United States Patent Application Publication US 2005/0228172 A9 - sequence listing, part 64

SEQ ID NO: 276038 - DNA, 418 bp, Homo sapiens
ggggtgttcctctctgagctctttggacggaatgacaaccccaagcagcagagcgtgttagcaacaggtaccccaaaggctggcttgcccgtgtatctctgtgcagggacgctttcacggcgttgtttccctccagagtgcacagtgagaggaagagcggccagctccgcccgtggcggtccccaccctgcgcgcccggccacttacttgcccaccaccaggctggcgccttccagcaccgccaggctgcgcagcgcatcccgcgccaggaagcgctcgccgcgggcgcacaccarcaccacttgctgcgcgttctccagcaggaggctgtggccgcctgccatgtcgcctcgcgccgagggtcgccgggaggccaccgggctcgggccaccggcaggactcagtggaggacgaaaag

SEQ ID NO: 276039 - DNA, 539 bp, Homo sapiens
agcgggttgaatagtggccctccacaaatggttggccttcctattctaacctctggaaactgggaatgtggccttatttgggaaaaggatctttgcaaatgtaattaagataaggatctcaagatgagaccaccctgaatttagggtgggccctaaattcaatgataagtgtccttataaaagaaagaaaaggagaaggccatgtgaagttggaggcagaggttggaattatccagccaatgaatgtctagagccatcagaagctagaactgtggaaggattctcccctasaggcttcaccaagagagcatggctctgccatcaccttgatttcagatatctgacctccagaatggagagaatacatttctgttgttttaaactaccaattttgtgatatcttattatggaaacaagaggaaactaatatacttggtgttcagaaatttagttttcttctatttctctgtaaactgaaataaactcagctttgaacttggagggacaaaaatatcatcttgtcaattccaagacagtta

SEQ ID NO: 276040 - DNA, 563 bp, Homo sapiens
tacgcctatagtcccagctgctgaggaggttgaggtaggaggatcgcttgagcccagcaaatcgaggccatggtgagcagtgatggtgctgcaccactgcactccagcccgggtaacrgagtgagaccctatgtcaaataaataaataaataaataaataaagtaaaataagcatatgtcatgaaaaaaatctgtatttctatcttctcttgaaaaccacaagatctgaagtctgggatcaagttgggaactttcttgtgggaggggtctgatctctccagttgctttgttcttactgggtccactccactcctttacctgcccttccctgtatccatctgagtttgcagcccccaattcaggctgactcctggggactccttttctcctgtatcctgctatcaaacttgggatgtatttagtattgggataaaggtcaggaatacaagttgcctgcccagaaatgaccctggtataagcctgaagccttgtgcatctggccagctgattgaaaagtaaattcttttgtgttgtgaggccactttggctcactttaagacata

SEQ ID NO: 276041 - DNA, 563 bp, Homo sapiens
tacgcctatagtcccagctgctgaggaggttgaggtaggaggatcgcttgagcccagcaaatcgaggccatggtgagcagtgatggtgctgcaccactgcactccagcccgggtaacggagtgagaccctatgtcaaataaataaataaataaataaataaagtaaaataagcatatgtcatgaaaaaaatctgtatttctatcttctcttgaaaaccacaagatctgaagtctgggatcaagttgggaactttcttgtgggaggggtctgatctctccagttgctttgttcttactgggtccactccactcctttacctgcccttccctgtatccatctgagtttgcagcccccaattcaggctgactcctggggactccttttctcctgtatcctgctatcaamcttgggatgtatttagtattgggataaaggtcaggaatacaagttgcctgcccagaaatgaccctggtataagcctgaagccttgtgcatctggccagctgattgaaaagtaaattcttttgtgttgtgaggccactttggctcactttaagacata

SEQ ID NO: 276042 - DNA, 479 bp, Homo sapiens
tctgctttatctatggcaaatgaatatgcatatagacatagcaaataatcatgttttcagttatatgcctggcatctagctaaagtttttgatggcaggaaaaaaagcctctattattttttataaaagactccayaagggacctggcacactgttctgacatgaataggtatcaaggaagctggagggattctagaattgtctgaatttccagagtgcttggattcccaccatcttcagccaaagcatcaggagaagctgcattaaatagggcatctcaggcactatcctggtcatagaagagataattggagaaaaagggacaaactagaaccagacattttctagaataatttttctgataggttccaggaagtataaaaccttgtctgggatattagaatgtaaatcctttgagaggcaggtctttgctttgtttactgcttggcacatagtaaactctccgtaagtatttttca

SEQ ID NO: 276043 - DNA, 606 bp, Homo sapiens
accagttccctaagacccatagccttcttttaagattaatacaattatatattaataacataatatgaacctttgaacccatcagaacccaaagacgaggatcttcacaagaaattacaacctgacaataactacataccctatcccttggctttcaacacctaagccaggcaccatgttgaagtctgtttagaatttttcttcactattttatttgtatgtatagttttatactgtatatatgcagtcttaaagagcatatttttcattttagttttaacttttaaaaaagtatatcttgttgactatcatattttagaaatttttcagttaacattatatatatacatacatatatatttattttaatcttttaaaaacaattgtttttatagacaaggtcttgccatgttgcccaggctggtcttgaattctcgggttcaagcratccacttcagtgtcccaaactattgggattacaggagtgagccaccatgcccagccaacattatattttaagattcattcatactgttgtatggtttagatcattcattttcactgctgtataatatcacaaaatgcaaatgtaccatagtttacagt

SEQ ID NO: 276044 - DNA, 587 bp, Homo sapiens
atttattgtttattcctaattgttttgcttcatctaacttctttgcttctgtatctacaagttagagagactttccaaccggaagccacatactgtcctgatacccaggcaggaacaaatcttgatggacaggttacttattttttaaaattcgttcatacttatgacatcatcaactgataaggatgatcaggattattaggtcttacctggcatgaataggttttaatgggtcgtggaaatttggccacgagaagattgtgcccaccctcaccttttcactgcttgtacctccatgcttgctttcttcagctctgctgtcatttggagtttgtttattgtttcctgtgctgccctgaaaagcaatgaagatctgttaatttgcttcttagaaamaaacaaacaaacaaacaaacaaaagaggtgggaaggatttggccagagtgatgaaacaaacattttcagagcgtctacagatctctggtcattttctcgaaggaactcttcaaaggccagtgcatcatcttggagctttttctctgctttttttagttgccgttccctcattgctatgtctttttcaaact

SEQ ID NO: 276045 - DNA, 620 bp, Homo sapiens
cttattgggatgtagaggtgatgcaagtgtctgatgggtaaaaagattctgaaggtttctttcaatctggaggtcttatgattcagtaaatatattaacatggtttttatggtttttattttgataattttcctactggttcatcaccagagaaggggccaacatagggacaaagaagaatatcgtgatctaatataaaataatacacattttgagggtagccaaaagttttgcttaccagaaatggtatcttccattcatttcctagaaagctagaaaatttaccattcaaaattaattgctttaggttgaaattgacagtaaaccttctatttattcagggcaatgctcaatagaaaaaaatataaatatagggtaacatcaagtaagaaaacaatctaattttagaaaaamaaacttagagaaactatcctaaatcaatatagcttaatattattgagttcatggaacataaataaaataaatgttaaggaatatattaataacctggtatgatcagtaagctccttcctttctcccatcttttatcttactgtttcttctttctatttctatcgcttctctcctctttcttttccattcttcagtaagtacccatt

SEQ ID NO: 276046 - DNA, 590 bp, Homo sapiens
ttataactttcttttcctagactaatggttctcaacattggctgtacattggactcacttggggagcttttaaaactctargtaccttggctgtaccttcaaccaattaaaaccagaatttggggaggtgtaacctaggatcagtacttttcaaagctcctcaggtgctacctgtgtgcttctgagaaacactgtcccagactaaggcagtagggtctctgccatacagaaagttttaattttaatgtttttgatgccttaattttcttttatagtttctactttttgttttctttaaatttttctatacctgatgtcattaaaatattttactatatattcttctccctatctcttttgtgtattaaaattcttacagtgttgtgacaaggatttttctacacagatgactaaaaactcttgttttgacagattgacaacctcctttttttttcaatttgtcattgcagaactaagaaaaggtaattttagtaaaagttgtgcaaaatacttatttttatgatgtggctataagtgagaaggaaccgttgattttaatcattgcattccaattttagagcttcattttc

SEQ ID NO: 276047 - DNA, 590 bp, Homo sapiens
ttataactttcttttcctagactaatggttctcaacattggctgtacattggactcacttggggagcttttaaaactctaggtaccttggctgtaccttcaaccaattaaaaccagaatttggggaggtgtaacctargatcagtacttttcaaagctcctcaggtgctacctgtgtgcttctgagaaacactgtcccagactaaggcagtagggtctctgccatacagaaagttttaattttaatgtttttgatgccttaattttcttttatagtttctactttttgttttctttaaatttttctatacctgatgtcattaaaatattttactatatattcttctccctatctcttttgtgtattaaaattcttacagtgttgtgacaaggatttttctacacagatgactaaaaactcttgttttgacagattgacaacctcctttttttttcaatttgtcattgcagaactaagaaaaggtaattttagtaaaagttgtgcaaaatacttatttttatgatgtggctataagtgagaaggaaccgttgattttaatcattgcattccaattttagagcttcattttc

SEQ ID NO: 276048 - DNA, 590 bp, Homo sapiens
ttataactttcttttcctagactaatggttctcaacattggctgtacattggactcacttggggagcttttaaaactctaggtaccttggctgtaccttcaaccaattaaaaccagaatttggggaggtgtaacctaggatcagtacttttcaaagctcctcaggtgctacctgtgtgcttctgagaaacactgtcccagactaaggcagtagggtctctgccatacagaaagttttaattttaatgtttttgatgccttaattttcttttatagtttctactttttgttttctttaaatttttctatacctgatgtcattaaaatattttactatatattcttctccctatctcttttgtgtattaaaattcttacagtgttgtgacaaggatttttctacacagatgactaaaaactcttgttttgacagattgacaacctcctttttttttcaatttgtcattrcagaactaagaaaaggtaattttagtaaaagttgtgcaaaatacttatttttatgatgtggctataagtgagaaggaaccgttgattttaatcattgcattccaattttagagcttcattttc

SEQ ID NO: 276049 - DNA, 589 bp, Homo sapiens
gtgcacttgcatctttctttgtgactagaaccagaaaaagtaaatacatctgtgatggttaatatcgagtgtcaacttgattggattgaaggatgcaractattgttcctgggtgtgtctgtgagggtgttgccaaaggagattaacttttgagttattggactgggaaaggcagacccaccctcaatctgggtgggctccatctatcagcagccagtgcagccagagaaacatggaaagactagatctagcttagtcctccagcctgcatctttctcccatgctggatgcttcctgccctcaaacattgtcttcagctttgggactcggactggcttccttgctcctcagcttgcagacggcctattgtgggacctcaccttgtgattgtgtgagttcatactccttaataaactcccctttaaatatacatctatcctattagttctgtccttttagagaaccctgactaatacaatgtctttcctgccctcttcagtgttattaggagcacattgcttcttactgttttgttctttcctttccgttgcaacccatgtgagttttaagttttcttattttctgtgaa

SEQ ID NO: 276050 - DNA, 487 bp, Homo sapiens
aattaactagcttatagtgggaagtgagtggatggaaacgtgtctcattaacatcatgttcgaacttaccataagctcagtgagggtcaataacctgataggatggctgtttttagggcatcataggactgaagaagacttcctgacaaccrttaaaaatctttgaactagaagacaaacttgaaaaaaaaatacaagcagaaatatgtcctctgacagctgataggtattttaagcaatggatccgatccatattttgcaaaaggctctagaaattaaactaaaaatgcttcactaggtctaatgaagtatatcttgaatgatccagaggaagatattattttcatccccatttaatagatgaagtatctaaaatcagagaaactgactgattttctctagactacaagctaataagtagacaactgggacttgaaaccaggcacactgattgtctccatagtctgtgtgcttaaccactgcatgg

SEQ ID NO: 276051 - DNA, 609 bp, Homo sapiens
agctttcacatgcagcttcaaacacctttgtggtttgggttatattttgacagttgctaggtagcttgagtcagagagtgcagctgtgcaatttaagatgtgttttcctatcctttcctctaaagagagctaaaaaaataaaactataatcagatttctaaagtgttaaacgggataaaactatttagaacccatactatagaatgaagtagatgaattctgataaagcacatatatactaaagtataccagtgaatttatttcagatgaaactaggtaggctcattgtaaacagatgagcttctgaaatttctgaactgtttcattgaaaggtaaaacaatgggtttgggagcacccacacttcttggcacaggtgagtggttggcactcattaaccaccgaattctgacacgaacatgctgtttatgaagaaaaatcagggaaggagactaagatttctgataagaaagagtagaagaaaaggtagaaattcaacttacttggtaaaaygggagtacgtcaggattagaaatgggctcttacacaacgagaaataaagatagctttttcataggcttcctattctgagagtttttcttgttgatttg

SEQ ID NO: 276052 - DNA, 526 bp, Homo sapiens
tattttaaaaaagaattagttatgtttcctagtactttcacattgaattaatttgtcacttattctagtggataaacaagaatagggctacttacctgaatgttaatggggcagatgctaccagagccaacccttatccccaggacctttcacattkctcttgtgaactttctactgtcagcacctgcatctcaaatgctgatttgcccatggacagcagttcattctagggaattaatatgcttgcttttccagcagccctcatctaataactctctagaggtgacatataaatactccagctccctcaccctcagatgagataattctgaagctgtgttttgcactagttctgaaagcttccccagggaattcagctccaagcacccactctggcagctgatttattagatgcttttccttctttgtctctcttccccacttccctaccactgttccctacttggggtctgcttctggagaacccatactaaatcctaaaattaggcattattgttattacact

SEQ ID NO: 276053 - DNA, 526 bp, Homo sapiens
tattttaaaaaagaattagttatgtttcctagtactttcacattgaattaatttgtcacttattctagtggataaacaagaatagggctacttacctgaatgttaatggggcagatgctaccagagccaacccttatccccaggacctttcacatttctcttgtgaactttctactgtcagcacctgcatctcaaatgctgatttgcccatggacagcagttcattctagggaattaatatgcttgcttttccagcagccctcatctaataactctctagaggtgacatataaatacyccagctccctcaccctcagatgagataattctgaagctgtgttttgcactagttctgaaagcttccccagggaattcagctccaagcacccactctggcagctgatttattagatgcttttccttctttgtctctcttccccacttccctaccactgttccctacttggggtctgcttctggagaacccatactaaatcctaaaattaggcattattgttattacact

SEQ ID NO: 276054 - DNA, 577 bp, Homo sapiens
gtagtctgttccttttcatcgctgagaagtaatccatggtatagatgtaccacggtctgttcaaccattcacctgttgaaggacatctaggctgtttccagttttggccattacaaataaagctatgataaacagtcatggaaagattttttgggaacataagatcttatttgtctgggataaatgcccaggagcacaatcgctgggtcgtgtagtagttgcaagtttagtgtttttaagaaactgccaaattgttttccaaagtggctgtacattttacgttcccactagtaatgtacaaatgatccagtttctccacattctggccagcatttggtgaatccttgtattttttagtgtcagcaacttgtyagtgcagaaatattcagacaaggtatttgtgtaagtaattgcatttccttatgaagtgatatgttcaattatatataagtaaaagatggacagttacaaaaaattaacaataaaaattgaaagaaataaaatcgaaccaatataaattagatgacaactacatatcctgtatttacttctaatacaatttttatgagtcaatgac

SEQ ID NO: 276055 - DNA, 630 bp, Homo sapiens
tggtccctgcttctcaacctcaggtctctctgggttcctggaacaatattttctccctttcttccttcagtgccagtggtgctaatttttgcttcccactattgaagtctctgggtgtctcaccattctttgtttgtttccttcatcatgcccaaaactaatgtaagttctcacttcattggagtttcttcatttggttgatttkgagtgaatctttttcctaccagaatcctgaagcatactgtaggggtgttagtatcatggaaaatagaaccatagcttctgaatttgaaataagggtttgtcacttattgagaatgaactgcattgcaggaaggaaggatgcgaatactcaacagtcagatgctaggagcagtcacatcctagttccttaatgcatcaaaaccaaagctttctttatacatacataaagcctaagagccactttaagcattgccttggtgaggagaaggcagaatgtgtaaatacaaattaaggtgttcctaactttgaaagggaaatggtgacaatgtttatctgtatgtatcttttctggagcctaattttttctctaatgacttaccgtattatgaaagaactggtatcttcatagttctcactcactttcct

SEQ ID NO: 276056 - DNA, 562 bp, Homo sapiens
attgataatgtggccagaatataaaacaatatttgattctagaatgactgttcataactattactttatattgccttccaagattgaaactaaaattttcaattatggaaaaaataatacatctatccagtaaacatatcaccaaagttatccttctttaggaaaattaaataaatatagagtaataatcccaattgtacaaatttcagaaatgtttatttgaaytgtaatagaatgcttcaattttaagaagaatgccctattattaggtatacattttgcaattacttttccagaatatttaaagtaatttgatttacaagaaacttttatgagtgtacccattacttaatgtcaagaaatggtaaaattaagtgaaagttttcctcttgacattccttatttttgctttctttattctactttattctattttcctttttggcaccctttgagtattaaataataaaagaagaaagaagaggaggaggaggagaaagagaagggaaaggaaagaggaaagtgggtgggcgggcaaagaatacaagttggatatattgca

SEQ ID NO: 276057 - DNA, 554 bp, Homo sapiens
aaaacatttaatatagtagtacttttactggcactcttttcctgacttttgaacaaaaggtcctgaatttccatttgcattgggctttgcaaattatgtggctggtcttgtctgcagagcttgttactgggtggttgggggtcagtgagccttttgggaggaaaggtcctggagacttctctgatggacaaaagtgtccttgactcacatctagtggcaggtaagggccacagatctacataggaaaacctgtgagaaaaggtggaccctggatttttgctcttgcacagccatcagggcctagaacaggcaccatacattcaattggctgtggcaagtaacaaccagcatcagggaatgtggagtggagggcactgcagcgaagtgcttgccttgagcaatctgatatggaggargtgagagatgctattgcgattcagccccagatggtgttgctgtgccggataggagctcagtactgcagtattatccaagagaaactggagatacagcttgtttgggtgaaaaatttttataaattaaaaaaaaatttt

SEQ ID NO: 276058 - DNA, 1153 bp, Homo sapiens
tatcgagcgagtatggtggcttcttaaaaagttaagtatggaattaccacatatggaatatagtccatggaaattcaacttgacctgaattttaaatatatatacctatatatgcatacacacttgttttatatgtgcaccatttgaagttggcatttattaacaggatatttctattactcacatgaaaaagagttcgtgaggcttttaggtacacccacctgcactgcttaccttgcaaattcaccccaacctctttcttgcctgtatggatagtcccatttacatttcatataccagagaaatcytaagtcatttattacttaaaaaccaatgatgacatttcttggcaaggccccaacattattaatttatgagagaaggctgtagtaacttatccaagaaggccacatgttttcttctctgtcatccttgacctcatttgtggctgtgtttcctccttccctgaatgcatattatccccatgatcctggaggaaaaatgactcatctgctcaaaggtgaatgttttggaatatttattgtttgagacctggctgactcatgtttatggcttwtatcgagcgagtatggtggcttcttaaaaagttaagtatggaattaccacatatggaatatagtccatggaaattcaacttgacctgaattttaaatatatatacctatatatgcatacacacttgttttatatgtgcaccatttgaagttggcatttattaacaggatatttctattactcacatgaaaaagagttcgtgaggcttttaggtacacccacctgcactgcttaccttgcaaattcaccccaacctctttcttgcctgtatggatagtcccatttacatttcatataccagagaaatcctaagtcatttawtacttaaaaaccaatgatgacatttcttggcaaggccccaacattattaatttatgagagaaggctgtagtaacttatccaagaaggccacatgttttcttctctgtcatccttgacctcatttgtggctgtgtttcctccttccctgaatgcatattatccccatgatcctggaggaaaaatgactcatctgctcaaaggtgaatgttttggaatatttattgtttgagacctggctgactcatgtttatggctt

SEQ ID NO: 276059 - DNA, 458 bp, Homo sapiens
gggaggccaaggtaggcggatcacctgagcgcaggagttcgagaccagcctggctaacatggcaaaatcccatctttacaaagatacaaaaattagcctggcatggtggcacacacctgcagtcccagctacttagagagctgaggcagggcaggaggatcgcctgagcctgggaggtggaggttgcagtaagctgtgatcatgctactgcactgcagcctgggtggaagagcgacactctgccaaaacacacacacacacacacacacacacaaacaaaaaaaaaaaccactacrtatgatttgagaccaacatgttatagttgcctaggtaataacaatcttatatttcccatgggaaactggcagtgctagctttatgtgtatatttttcacattgtgcagcagagtgaaaacagccctctcctcccataagattaggctgtaatctgtttaatg

SEQ ID NO: 276060 - DNA, 595 bp, Homo sapiens
ttttaaatgtggtacatatacaccatggaatattattcagccataaaaacagaatgacagcatgtcttttgcaggaatgcggatggagctggaggctatcatccttagcaaactaacacaggaacagaaaaccaaatatcacatgttctcatttataagtgggagctgaatgataagaacttatgagcacaaagaaggaaacaacagacactgtggtatgcttgaggtaggagggtgggaggaggaagaygaacagaaaagacaactattgggtactgagcttaatacctgggtgatataataatatgtaaaactcccatgacacatgtttccccatgtaacaaaccttcacgtgtacccccaaacctaaaataaatttttttaaaaaagatgtatggctgtaaaatgatcatgactttgagtactactaataagaatatctactattcaccaagtgcttactatgcatagcattgtgcaaggtgctccacatatttttaaaatttaatcgttaccaaaaaaatctatgaatcatgtataagcaaactgatatttaaaaaaaattagaaaactgaggctcagagaggttaagaag

SEQ ID NO: 276061 - DNA, 516 bp, Homo sapiens
cttgcatgtcatggccactgtcaatgctgaggctgttggcgccgaaaccttgggagggtgtgggggacctgcccccctggctcgggtctggggcggcggcgcttggacctggctggtggttggtttgtccactgtgtggtttgttttttgcttccagccaaagtctgtcttcaaggctgcctcggtctcctacctraaatagcatttctgtgccttcctggcagttgattatagagggggaagctcccggcgctcagaggagcctggcgtgtgtgtgcacgtgtgtgtgcatgtgtgtgcgtgtgtccattcacgctggcagcccccttgccgcaggcacagacccatcagggcgtgaacaggcaaatgaagagaaagggggctcccctgcctttagttcaccccagctttccaggccctccctcccaggcccagcctccttggtcccttcactcacatgcggtgccgtggctgccatctcacgtggccagcgccgtcatcggtaattagcagtga

SEQ ID NO: 276062 - DNA, 603 bp, Homo sapiens
ctatcaaatgcctcctccattaggaagccttccctggttgccccctccactcctgtccttgccccagaacacggcccggccctcacggacaatcctgacatcagagcctaatagagattttcctggtcatggaaattcatactccaaactgaatatgtgtgcaggataagcccctgttcccatgtgaaacaaaagtgaaaggtgcggatcacctgcctttccccaccccttctcacaacaatctgggctccacaggggcccagtaggrgccaggtccagttcagccgccccaggtgcaccatcctgggcaccagcgcctctgtccccttccacgaagcacagcttcatcccctggtacccagtggggaggggacacataccaggcattccccagggtggactgtgctccccacaccaggccaggaggccctggggctggtccagccatccagaaaagggagcaggcggtccaggtgacactgatgtgggcagcaggggccttcgggaaagggtcttcgtaggatcggccccaccttgctccaggagtacacactggggaagggtgctgcgcggaggtggagagaacgcatctttggctgaaag

SEQ ID NO: 276063 - DNA, 567 bp, Homo sapiens
ctgccagtacttccttgtgtttgactcaaccccacatcgttcaatcccacagctatgatatgacttcagcttactaactgaaatctaaattccagttcttctatgtcactgagcamcaaaagaagaaaattgtaaaatacagtacacaagaaatggagaaaatgtaaatgacaccttaattgttatcatcatttgctttaaaaagttaattttaaatatttctctggcatattaatttttgaaagagaagactatctattcaactagaaatagatgcctgccactgcaacaaaagaataatatgagaaaccaaagttcaaaagttgaagatgcaataggaagggagtaataaattggcctccctaggccaggtagagagtagggggtgggacaaaggtgaccaaacagtttactaaatgagaggcaccacttccctcccagaagagtaaagaacagtgattctcagccaggtgggccaggcacttgtcatgctattcatggttaggagactgttatgccgactgacctgtctaaattacgctcaaaggaggatgaggggagaaccag

SEQ ID NO: 276064 - DNA, 567 bp, Homo sapiens
ctgccagtacttccttgtgtttgactcaaccccacatcgttcaatcccacagctatgatatgacttcagcttactaactgaaatctaaattccagttcttctatgtcactgagcaccaaaagaagaaaattgtaaaatacagtacacaagaaatggagaaaatgtaaatgacaccttaattgttatcatcatttgctttaaaaagttaattttaaayatttctctggcatattaatttttgaaagagaagactatctattcaactagaaatagatgcctgccactgcaacaaaagaataatatgagaaaccaaagttcaaaagttgaagatgcaataggaagggagtaataaattggcctccctaggccaggtagagagtagggggtgggacaaaggtgaccaaacagtttactaaatgagaggcaccacttccctcccagaagagtaaagaacagtgattctcagccaggtgggccaggcacttgtcatgctattcatggttaggagactgttatgccgactgacctgtctaaattacgctcaaaggaggatgaggggagaaccag

SEQ ID NO: 276065 - DNA, 567 bp, Homo sapiens
ctgccagtacttccttgtgtttgactcaaccccacatcgttcaatcccacagctatgatatgacttcagcttactaactgaaatctaaattccagttcttctatgtcactgagcaccaaaagaagaaaattgtaaaatacagtacacaagaaatggagaaaatgtaaatgacaccttaattgttatcatcatttgctttaaaaagttaattttaaatatttctctkgcatattaatttttgaaagagaagactatctattcaactagaaatagatgcctgccactgcaacaaaagaataatatgagaaaccaaagttcaaaagttgaagatgcaataggaagggagtaataaattggcctccctaggccaggtagagagtagggggtgggacaaaggtgaccaaacagtttactaaatgagaggcaccacttccctcccagaagagtaaagaacagtgattctcagccaggtgggccaggcacttgtcatgctattcatggttaggagactgttatgccgactgacctgtctaaattacgctcaaaggaggatgaggggagaaccag

SEQ ID NO: 276066 - DNA, 567 bp, Homo sapiens
ctgccagtacttccttgtgtttgactcaaccccacatcgttcaatcccacagctatgatatgacttcagcttactaactgaaatctaaattccagttcttctatgtcactgagcaccaaaagaagaaaattgtaaaatacagtacacaagaaatggagaaaatgtaaatgacaccttaattgttatcatcatttgctttaaaaagttaattttaaatatttctctggcatattaatttttgaaagagaagactatctattcaactagaaatagatgcctgccactgcaacaaaagaataatatgagaaaccaaagttcaaaagttgaagatgcaatargaagggagtaataaattggcctccctaggccaggtagagagtagggggtgggacaaaggtgaccaaacagtttactaaatgagaggcaccacttccctcccagaagagtaaagaacagtgattctcagccaggtgggccaggcacttgtcatgctattcatggttaggagactgttatgccgactgacctgtctaaattacgctcaaaggaggatgaggggagaaccag

SEQ ID NO: 276067 - DNA, 618 bp, Homo sapiens
cacggcacacaaaccaaaaattgttggcctggcactgtggctcatgcctgtaatcccagcactttgggaggctgaggtgggtggatcacctgaggtcaggagttcaagaccagcctggccaatatggcgaaaacccatctctactaaaaatacaataagtagccagatgtggtggctcacacctgtaatcccagctactcaggaggctgaggcaggagaatggatttgacctgggagacagaggttgcagtgagctgagatcgtaccacggcactccaacctgggcaacagagcatgackctgtctcaaaaaaataaaaataaaaaataaaaatacataaaaatattgttaaacagcacatgagtgcctctgtcctttgatagttagtgctcagtgctgggcgtgagatataatttaaacattagttctcatcactccagggaaataattcttcaccactcttgccttatgtcttgtctcaaaactgaaaagaattgtttttaaatgctgagaaggtttgtgggtggtgtcactaaagacatgagaggacactggttagatgagtggtgaggatgtaagaggtggcagcacttatgtaaatgtaaaacatttgaaatt

SEQ ID NO: 276068 - DNA, 601 bp, Homo sapiens
tcaaatgggtaagtattaaatcaagacctaggatgtttttttttttcctacttctagctcatagtcatctttaggtatggagttaaccttttaaaatagaggtgccaggctgggtgtggtggctcacacctgtaatttcagcactttgggaggccaaggcaggaggatcacttaaagccaggagttcaagagcagtctgagcaacatggtgaaaccccaactctaaaaagaataatttaaaaattagccaggtgtggtggtgagtgcctgtggccccagctactygggaggctgcggtgggagggtcacttgaacctacatcacattattctaaaacttcctgaattcatggagtgaaatggaaaattcagaaaataaaaggaagtacattgtaaaagcagattataataaagcccagaggcattgaattttggcctgagtcaaaattcagtgggatcctccaggctccagtgagccatgatcactcagctgcacttcagcctgggtgacagagtgagaccctgtctctaaaaaaagaggtaccaaggtgcttagactatgtgtgtgtatagactttcagcagtgaggacaagtagttgtc

SEQ ID NO: 276069 - DNA, 546 bp, Homo sapiens
gttgtggagccagggaatgaaaaagcaaggaaaggtgggtttcagtgagtgggtggtatacgtgggattgggttggaggaggccctaccaagtgctgatacccttggccaggcctcatgtggtctggtgctgggattctggacttgtgtcaagagcagtcatagggtggatagagtgtcttaagagtctgaaagcaacttgcattgtggtatttatttactcatccgtgtagactcccctatmttggtattaaggacacaagatgtacttaccacctggaaaaagaacttgcagttctttccaaaggaatagaaaattgaggatgtgacaattttgttttggggctatgctctctcctttgtaattggttcttgtcccttgatgctgtttcttttctttcctccacggtcctctcatccttacttcccctctgtcaaaatctgttcttaggaagggaagggaaaccctttgagactgagatgtgtacagctaagggggcataaacaattacatctcctggatattattttgtgcatgttttgttta

SEQ ID NO: 276070 - DNA, 546 bp, Homo sapiens
gttgtggagccagggaatgaaaaagcaaggaaaggtgggtttcagtgagtgggtggtatacgtgggattgggttggaggaggccctaccaagtgctgatacccttggccaggcctcatgtggtctggtgctgggattctggacttgtgtcaagagcagtcatagggtggatagagtgtcttaagagtctgaaagcaacttgcattgtggtatttatttactcatccgtgtagactcccctatattggtattaaggacacaagatgtacttaccacctggaaaaagaacttgcagttctttccaaaggaatagaaaattgaggatgtgacaattttgttttggggctatgctctctcctttgtaaktggttcttgtcccttgatgctgtttcttttctttcctccacggtcctctcatccttacttcccctctgtcaaaatctgttcttaggaagggaagggaaaccctttgagactgagatgtgtacagctaagggggcataaacaattacatctcctggatattattttgtgcatgttttgttta

SEQ ID NO: 276071 - DNA, 546 bp, Homo sapiens
gttgtggagccagggaatgaaaaagcaaggaaaggtgggtttcagtgagtgggtggtatacgtgggattgggttggaggaggccctaccaagtgctgatacccttggccaggcctcatgtggtctggtgctgggattctggacttgtgtcaagagcagtcatagggtggatagagtgtcttaagagtctgaaagcaacttgcattgtggtatttatttactcatccgtgtagactcccctatattggtattaaggacacaagatgtacttaccacctggaaaaagaacttgcagttctttccaaaggaatagaaaattgaggatgtgacaattttgttttggggctatgctctctcctttgtaattkgttcttgtcccttgatgctgtttcttttctttcctccacggtcctctcatccttacttcccctctgtcaaaatctgttcttaggaagggaagggaaaccctttgagactgagatgtgtacagctaagggggcataaacaattacatctcctggatattattttgtgcatgttttgttta

SEQ ID NO: 276072 - DNA, 593 bp, Homo sapiens
gaaacctccatcataaatacgatctccaaaatgagctgagtggaagggcaaatgtaaagaatttcacacatcacatgttattttcctactgatttgttaattttatagataatttatattgtatattgtctttagagttaaygagcatttacatttctaagccttctcccttggccgctagatgaaacttgtacttttcttttcttattttttttgcatttaatatgctacaaacattaagtggcccagggggtttacatatctgctgggggaggcagtatggtttaatggaaaaagaaatggatgaggaactaggcaggcctgaagttcaaatcttttctctgctactgatcacatatgtaactttgggctggttactttatttctcagaatttgtgtttccttatctgtgaatagggcaacaggacatttcccccaacccccagtgggttactctaaggattaaatgagataatacatgcatagcatggcatctagcatatagtaagcactcaataaaagttattaatactgagtacttaacgttaattttcttccacttataggatgttctgttttcatcatagaaccct

SEQ ID NO: 276073 - DNA, 481 bp, Homo sapiens
tttctttacttgatgtttggaaatcttgccaagaattttttatggcaattcagatgtattttataatcaaattgcatttaatatgctttaggctaaagtgcaattaaragacatcagttcctggctctggatgggtatcatgggagaatcaacatattcccattactatatcagagtagtaaagtgcagaatgcagagtcagaatttatactgtaagattttgatcatggtagcaaaaatggtcacccagtaccattttgtctgcttttacagaacacagttcttgttagctgtttgggaaatgaactctctcagcccttttaaaaattaattgtaaggaaatttagtggaacaaatggaaatccaagtgcaaaggaaacacactctggcctccaggcaagcattttcttgaacatgtcattccgctctccctagtgacaataataggaaggggaggaagagagagaaaagttacagcttt

SEQ ID NO: 276074 - DNA, 613 bp, Homo sapiens
tcaataagtagagtctttattcaacagaatatggggtgtataagactctagagcccatgattctaaccaatggcatgttatagaagaaaactaaaacactgaatccagaaataagtatatttaagaatccaggacatggctatgccccattttcattccactgtaggtctctccatatatgtcttctatctattgctctaggaaaggtaatagaaagtgtgtgttycctttaggtcctggtaaactctaccttcaactgaacaaaactcttctaaactgcctgatgaagcagcttagggaggagggagtgcaggcattcatgaccagtatctctcccccagtttagaaagctctctctgctgctgacaatgtgcagggtggttgggccaggttgcacccagaggttcaggattgcttcttcctttgggatttctctctggcttccgctcctcaatggccatttttccacatggatccttctagtaatcactgctgaggtagttgctggctacctaaaatactgcagcaaaacagaatcatctgggatgcccttttctctcttttcaattttgtcccattaaaattgctcttgcctctcactagggaatggccc

SEQ ID NO: 276075 - DNA, 586 bp, Homo sapiens
ttttgtactgagttttctctagctttcctccgaatctaatactatgaatgactttcaccttctgaaaatgttatacactggcttccagaactccttagtctcctgatttttctagttcctttccaaccatttattaacacttccttcaggagctccctaccttctgtccagcttttttttttttttcttttgagacaggatctcaccccatcacccaggctggagtgcagtggcatgatcatggctcactgccacctcagcttttggggctcaggtgattctctgacttcagcctcccaagtagctgggactataggtgcgtgccaccacacctggctgattttttgtattttttctagagacacggtttcaccatgctgttaagtctggycttgaactcctaggaagaagcaatccaccttggcctcccaaagtgttgggattacaggcatgagccactgcatgtggccttctgcccaacttttcactgtttgtgttctcttgggtcctctccttagcccatggtcctccatcctggaagaactcatcgaaacccatgacctcaattacgacctacatgctggca

SEQ ID NO: 276076 - DNA, 627 bp, Homo sapiens
aatattcaccaacagatttgtagattagctagttatcatgcaccatagcacaataatgccacttaacataggccggctgaattctgatgaaggaagaggcttagatttacttagcatttgctaatcctaatcatgagattccaaggagagaaataaggtaatagagagaggcagaaaatggtgttttcttatgttataggtttgccttcgtatagctctaatttgacaaaaatttagtgaatataagaacttatcatgactgtagagagcgcttgctagtgagggcgattttaagccccttgtattcacctctktccccgcctggccctcaggtgagcacagtgaacttcaatttcaccctctccttttttctcttcgtagtaactgcctatgtagggaactctaacctggttcaatcccatcattttatatttgagaaaactgaattctacttatctcagaatgacttttccaacacttttaatcttacatcatgtaatattcacaggctcccttaaaagcaataaacttcagtcctcccactatggcagcagaggacagagcctcctgtgatgattctgcttctgggaccatcgcaggagatctaagcacaactttccagaagct

SEQ ID NO: 276077 - DNA, 618 bp, Homo sapiens
ggggtccatatgacgtgattagtcattagaaggaatatctgacacatccttggaggatgggcagggaaggtttcccagaataagtgacatcttgctgagtcctaaaggataagtagcaagttatagaaggaaggaaggcacctgaagaacaacaacaaaagagctcytagcgtgccacagagaagagcgtggcactttcaggacatttcaaacagtttaacttggagaataagggactgaaggggaggagcagaaagtggtgacggggggaactggaaaggtcagtgggctgacttgcaaccctaaccagctcgttattaagaatggaaaatataatatctaaaatattcttcttccttatatctcctctaagatgtttatcagtttacattttttatactctgtcatcttaattcattgcattctcttttcttcttagaataagggctttcaaaaccagtgaacttctgtccacaaagtacagggactctagttttcttcactgataatctaaattcagttaatggatttctaatattataattcaggcgtttctagagtaaaacttgatttattaaaaaaagtatttttctaataattgatggattcatttaccac

SEQ ID NO: 276078 - DNA, 647 bp, Homo sapiens
ctcattatcatgcatgctgttgttttgggcctgccttttccttggcctmtgaaagtgctgggcactttcatcatgcacaagcctatgctgatggaaaaggaaagggaagtgctacctttgccccctgtctccttctgagtcggacacatgggaaccccagagctgagtgggtgaaatttgccatccggagtaggaattccttaagagaggaaggaaaatgtgttgacttggctgggagaccaaaaaacaaaaaggacctacactacctaggaggaaattcagagtaaaaacaaggcttgccaccactttcttcccataggggcagcaaacactgagggacttcatattttttccccataatcaatgcaaacatttaccttattggcagaggtttatcttccccgggatctcctcgtgcttttggaaaatactgagatagtacaacaaaggccacagcccttgaaagatacgtgcctgctttttaatacagaactgctgtcaagtcaaatagcttaatgaaaataggcatgaaggaggccaagagaagggttttgtcttttgttttggatggcactcaggagtcaatgcagtggggacagacctgttctgtccaggtggcgctgagtcaaaggatcccggcctcaaat

SEQ ID NO: 276079 - DNA, 555 bp, Homo sapiens
aaactttatggaacacattgggctttggggggagctattaattcagctgaataaataaattataataccccaaatgagttcaaattgggttttaagtcatattttatttgtataaaaattacaaataggaccatatatgtaaatacttaacaccattatgtacattaacctgtttcttagtttggcatttgtataatagtgctccatgtcccctattttcaccttataaaatacagaagccagtgattttctactttattatactaaaaagttcttaaactcacaaaaacaatatactatattttcataaagagaagcaaggaaaaagaataccaattctccttatcttgaaatccttccatctaaatgatgaaaaaagggtgtttcctcttttacccatctcttaccaggggtgcctaaaagattatggtctctcataagccgataatcttcatcaytgagttcattaataaactgataataggcctcttctctgtggagacgctcttgctgccatcttctctcattttcatgatgattatggtcttgaggtaa

SEQ ID NO: 276080 - DNA, 558 bp, Homo sapiens
gtgggacccagatctttccctcgagcccacctctccaggtcttgggccttcgccctcctgtccggaraacgtgtgctgtgggcggccgttctctcgggtgctggaggctgtggttgggaggcgggataggcttgccgccgcgcctccggagcccgctgtgccctcgaattggccactgaggagagaagccggaagcccgtgctgcagcgtggggtcgtccagctggaggggatactcgggaggaagaacggcaggccccagcccttctttcccgacagccacgccgcccacttggcggcggggagtcgctccgcagccggcccggagctcgcccgtgcaactgaaaactgcgtccgtcgggagctagggtgcctggcgtcccgcgttccgccctcttgcgccgcccttacagtgcctcctcctcgaggccaaatgcccggccgctcagcgctcgtggcagccgcgtagttgcagagacacggtctgctttccaggcttgggaagtcccagcacttaactctgcgcgtcggtgtcgcttgtttgccagccagactataa

SEQ ID NO: 276081 - DNA, 558 bp, Homo sapiens
gtgggacccagatctttccctcgagcccacctctccaggtcttgggccttcgccctcctgtccggagaacgtgtgctgtgggcggccgttctctcgggtgctggaggctgtggttgggaggcgggataggcttgccgccgcgcctccggagcccgctgtgccctcgaattggccactgaggagagaagccggaagcccktgctgcagcgtggggtcgtccagctggaggggatactcgggaggaagaacggcaggccccagcccttctttcccgacagccacgccgcccacttggcggcggggagtcgctccgcagccggcccggagctcgcccgtgcaactgaaaactgcgtccgtcgggagctagggtgcctggcgtcccgcgttccgccctcttgcgccgcccttacagtgcctcctcctcgaggccaaatgcccggccgctcagcgctcgtggcagccgcgtagttgcagagacacggtctgctttccaggcttgggaagtcccagcacttaactctgcgcgtcggtgtcgcttgtttgccagccagactataa

SEQ ID NO: 276082 - DNA, 558 bp, Homo sapiens
gtgggacccagatctttccctcgagcccacctctccaggtcttgggccttcgccctcctgtccggagaacgtgtgctgtgggcggccgttctctcgggtgctggaggctgtggttgggaggcgggataggcttgccgccgcgcctccggagcccgctgtgccctcgaattggccactgaggagagaagccggaagcccgtgctgcagcgtggggtcgtccagctggaggggatactcgggaggaagaacggcaggccccagcccttctttcccgacagccacgccgcccacttggcggmggggagtcgctccgcagccggcccggagctcgcccgtgcaactgaaaactgcgtccgtcgggagctagggtgcctggcgtcccgcgttccgccctcttgcgccgcccttacagtgcctcctcctcgaggccaaatgcccggccgctcagcgctcgtggcagccgcgtagttgcagagacacggtctgctttccaggcttgggaagtcccagcacttaactctgcgcgtcggtgtcgcttgtttgccagccagactataa

SEQ ID NO: 276083 - DNA, 558 bp, Homo sapiens
gtgggacccagatctttccctcgagcccacctctccaggtcttgggccttcgccctcctgtccggagaacgtgtgctgtgggcggccgttctctcgggtgctggaggctgtggttgggaggcgggataggcttgccgccgcgcctccggagcccgctgtgccctcgaattggccactgaggagagaagccggaagcccgtgctgcagcgtggggtcgtccagctggaggggatactcgggaggaagaacggcaggccccagcccttctttcccgacagccacgccgcccacttggcggcggggagtcgctccgcagccggcccggagctcgcccgtgcractgaaaactgcgtccgtcgggagctagggtgcctggcgtcccgcgttccgccctcttgcgccgcccttacagtgcctcctcctcgaggccaaatgcccggccgctcagcgctcgtggcagccgcgtagttgcagagacacggtctgctttccaggcttgggaagtcccagcacttaactctgcgcgtcggtgtcgcttgtttgccagccagactataa

SEQ ID NO: 276084 - DNA, 614 bp, Homo sapiens
ttggtcatacattattctgggcatttctgtgaggctatttttggatgagattaacatttaaataggtagactgaataaagaagaccatactccataatgtgcgtggattttatccaatcaattacaggcctgaatagataaaaaaagctggccattccctgagcaagagagaattcctcctgcatgctggccttcaaactgggacrttggctttttcttgcttttgaactgtaacagaagcattggttttccctgcatctgctggcctttggactggaattacatcattagctttcctgagtttccagcttgtcaactcaccctgcagatctggggatttgccagcttctgtaaccacatgggccaattccttactatatataaaatatatatttattatatatattttatatatttacacatatatatctccctcatatatatatatatatatatatatatatatatatatatatatataaagagatatatactattgtttctatttctctggagaacacagactaatacagattttggtaccaagagtggttctacaggaacagaattttgagaatgggttattttgactgattctggggtttctggaatgt

SEQ ID NO: 276085 - DNA, 252 bp, Homo sapiens
agttaaaatacccaagagactttaaaaatagggcttctctyatagttgatatttgaaagaaaagctgtaaggtgtatgtaggccacttaatcactgagtatctttgtctataggcctcccattgaatactttagccattgataatctgccaatttgaaagggccctgtttgaactctcctgttttggggacctatctgttcttccagaaagtgacactgaagttgccaggtttcactatacatgagctctgc

SEQ ID NO: 276086 - DNA, 597 bp, Homo sapiens
ttggctgaatgtttgctatatatatgttacttgaaatgttaaatttaatatgcagcataccataggtgtatatataggtatataattttaaggttaaaatattcagtctacaagtttggttcttatttaagcttttgggctaatactgcatatggcacaatgtttaatattggcaagttcatctcagagaaaggggattcagatataattttaaagtagagataatttactgaagcgtctctgacaatctaacttattagacagcaagcaatatataatactgaaaaagtattcagaaatggaaaatttacatcatataggttatttaacttgtgttcagcctttttgtaacttttttgaaagtgcaaacaattctttggattattaaataaggtatacagtatgcatggtttctcaaatttagytttaaaatctaaaagtctataaagaatcagatgcataggcaatatgttaagttcacttggaggctaaaaatctccagtgaaaacaaaacgaaaacctttaagagaatgtagagtttatataaacacaaagtatgcattgaagatctgtttctaccaataaacattaaaacaa

SEQ ID NO: 276087 - DNA, 456 bp, Homo sapiens
ctaagcaggagtcctgtggcccggagcagcctgccagtcccgccagtgtcaccccaacacacttgcctgagaggaggggcccaagccctggcctgggctgcagagattggtcaggggcatcttggaattcgcatctcctgtcgggcgaggcaggagcaggtgggctactctctgccccactggcctctccccagcccctatcggcttcaaggctgccaatgccaaaatcttggcgggtacctggggccagatggcccttgcagtctcttgtgtccccaggatgccatcctctctgggtgaggccactcctgcatccagtgtccctgccagcctgggaaggcctgcacgtgacctaycatacctgcctggtaatgtcatcgtcccactctgccagcccctcccaaaggcattgggcctgggaacattctagcttggcagaggggtggggagccaatg

SEQ ID NO: 276088 - DNA, 453 bp, Homo sapiens
tcaccaccacccagggtctgtgctcactgtcactggaacccaccatgtccatcagattgatttacataaatggtggttgggctccaaatccactctccccagactgacacaaattgcaccccagaaccagactgatgaagcaaccatcactcggaacattgctggacaccgaggctgaaggaaatcacaagcagggactcacatgcaggtttctaagcacagccccaaacccagaagtcatcaayggctgataaatttgactccatgaaaattaaaactttctataaaaaaacccacaaagtcaaagatctgtcaacaaactcaaaaaagttctgcaacatacataagagatgacaggctaatgctcgcactgtatgttaaaacctactgcaaatcacccaacagaaagcccacagccagactggaaaaatgaagagacagttcaaagacaaa

SEQ ID NO: 276089 - DNA, 557 bp, Homo sapiens
aactaccaatgtgtatgttttgggaaataaacatggaagaagataggtcagagtcagcttagtgtcatcatcaaaaaatgcctrtactacttggctcttctttaaatatgatacttgggttaggaacaaagactctgctggaaaagcagtttaattatcaccaaccttctcaaagcaaagcacaaaacaactactgtgggatttcaaatctgtcatcaatctctcttatacttcattcatcacaaggcccctggatttaacaagcactaggcctcacccacttcaaagaccatggggaaacccacttcaacaaaagtctcctttgagcctatgtggagtgattttacttttttcttactcttcatcccagaagttaattccagagttggttgatacaataatcttgagcaatcgactgcagacctaaacacttcttggctgactttatcccatttgaaatgcataaagttactgtgattcaagttatgccctaggtgttgattttttatgagcctataatcccagagatgtaacatttgatttgttcacatggtgtc

SEQ ID NO: 276090 - DNA, 557 bp, Homo sapiens
aactaccaatgtgtatgttttgggaaataaacatggaagaagataggtcagagtcagcttagtgtcatcatcaaaaaatgcctatactacttggctcttctttaaatatgatacttgggttaggaacaaagactctgctggaaaagcagtttaattatcaccarccttctcaaagcaaagcacaaaacaactactgtgggatttcaaatctgtcatcaatctctcttatacttcattcatcacaaggcccctggatttaacaagcactaggcctcacccacttcaaagaccatggggaaacccacttcaacaaaagtctcctttgagcctatgtggagtgattttacttttttcttactcttcatcccagaagttaattccagagttggttgatacaataatcttgagcaatcgactgcagacctaaacacttcttggctgactttatcccatttgaaatgcataaagttactgtgattcaagttatgccctaggtgttgattttttatgagcctataatcccagagatgtaacatttgatttgttcacatggtgtc

SEQ ID NO: 276091 - DNA, 557 bp, Homo sapiens
aactaccaatgtgtatgttttgggaaataaacatggaagaagataggtcagagtcagcttagtgtcatcatcaaaaaatgcctatactacttggctcttctttaaatatgatacttgggttaggaacaaagactctgctggaaaagcagtttaattatcaccaaccttctcaaagcaaagcacaaaacaactactgtgggatttcaaatctgtcatcaatctctcttatacttcattcatcacaaggcccctgkatttaacaagcactaggcctcacccacttcaaagaccatggggaaacccacttcaacaaaagtctcctttgagcctatgtggagtgattttacttttttcttactcttcatcccagaagttaattccagagttggttgatacaataatcttgagcaatcgactgcagacctaaacacttcttggctgactttatcccatttgaaatgcataaagttactgtgattcaagttatgccctaggtgttgattttttatgagcctataatcccagagatgtaacatttgatttgttcacatggtgtc

SEQ ID NO: 276092 - DNA, 535 bp, Homo sapiens
ctgtgattcaagttatgccctaggtgttgattttttatgagcctataatcccagagatgtaacatttgatttgttcacatggtgtctataagagtaccttgcagtgatagaaaattagaaacaacatttattaataagtgccaggtttcaaggactcctgatccatccccatgacataaatcctggaatctgcagcatgtatatttgaaatacattaccataaaatatttataattactttttaaattctcttggacttgtcttggtgtcagaaatataatatttatttattattatttttctcttggctcatttctctttgtgcattttcagagaataacacttgacctaaacatttgcatttttaatttatttataataaaaagaactgataatttgccarccgagacattgtgcagatcttcaccacaagaaatagatgctatgtatctatgtgtgtgtgtacatactgtgatgcaaacaaagaaagtaaaatgtggagcaactagatagtttgtccaaggtcacactgaag

SEQ ID NO: 276093 - DNA, 535 bp, Homo sapiens
ctgtgattcaagttatgccctaggtgttgattttttatgagcctataatcccagagatgtaacatttgatttgttcacatggtgtctataagagtaccttgcagtgatagaaaattagaaacaacatttattaataagtgccaggtttcaaggactcctgatccatccccatgacataaatcctggaatctgcagcatgtatatttgaaatacattaccataaaatatttataattactttttaaattctcttggacttgtcttggtgtcagaaatataatatttatttattattatttttctcttggctcatttctctttgtgcattttcagagaataacacttgacctaaacatttgcatttttaatttatttataataaaaagaactgataatttgccagccgagacattgtgcagatcttcaccacaagamatagatgctatgtatctatgtgtgtgtgtacatactgtgatgcaaacaaagaaagtaaaatgtggagcaactagatagtttgtccaaggtcacactgaag

SEQ ID NO: 276094 - DNA, 566 bp, Homo sapiens
cttacatataaatgtagttgtttaaaaatatttatgctgtgtaatgtctgtaatttatgagttacagacatgatatccattatatttttgcctaataattcatttttaggaaaaactaagaataaagttattctttgtatttttaccaatcttttccccaaccaagtgttactgaaactgtcattccgaaatctttttaccttttaaggttctcacttttgaggctgagaactatgaaactagtattcaaatttgcattcattgttgtaatttctggcagcatgtccaatttamttctactgttaggtgcttgtttgttgtacttatgaagaactaagaaggattttctagtagcccagagttatgttattttttgcttagtgacaatttttacaagagactttattataatgaaaccaatgaaatgcatcacagtactttttcagagtgccagtggcttatgagatattttttgatgtaaacttgttaaagccatgtaactaaccaagcttatatccttactgtagaactagagacatattataaatatttataacaaacaaaat

SEQ ID NO: 276095 - DNA, 493 bp, Homo sapiens
taaaaattctaaaaattcaatacattcaatagtttgacacagattacttacattacaaggcaatgtcacatattaaaggaagaaaaacaaaaggttttaaagtcagaataaaaycattcctctatgggactgttaaattccctaaaacatgattttgggagaacaataaggtcctcaaaactagcattcaaagtattgaatcatcattgcttgtgttaagtaaattatttggcctcttggagtcttgattttcttaccaatgaaataggaatgagagcataggaatgaacagctctcattatagcaaggggttgtaagcacaaatgagataaattatgatcctttgaaaagtacaaagtattacagagaaagcaatagcattaattctggcagcagtctggaatggagcagtaattccagtcatctggaaatacaggcagtagtgagtcacggctcgtagactcagagcagggaactggtttggataaagtgt

SEQ ID NO: 276096 - DNA, 493 bp, Homo sapiens
taaaaattctaaaaattcaatacattcaatagtttgacacagattacttacattacaaggcaatgtcacatattaaaggaagaaaaacaaaaggttttaaagtcagaataaaatcattcctctatgggactgttaaattccctaaaacatgattttgggrgaacaataaggtcctcaaaactagcattcaaagtattgaatcatcattgcttgtgttaagtaaattatttggcctcttggagtcttgattttcttaccaatgaaataggaatgagagcataggaatgaacagctctcattatagcaaggggttgtaagcacaaatgagataaattatgatcctttgaaaagtacaaagtattacagagaaagcaatagcattaattctggcagcagtctggaatggagcagtaattccagtcatctggaaatacaggcagtagtgagtcacggctcgtagactcagagcagggaactggtttggataaagtgt

SEQ ID NO: 276097 - DNA, 493 bp, Homo sapiens
taaaaattctaaaaattcaatacattcaatagtttgacacagattacttacattacaaggcaatgtcacatattaaaggaagaaaaacaaaaggttttaaagtcagaataaaatcattcctctatgggactgttaaattccctaaaacatgattttgggagaayaataaggtcctcaaaactagcattcaaagtattgaatcatcattgcttgtgttaagtaaattatttggcctcttggagtcttgattttcttaccaatgaaataggaatgagagcataggaatgaacagctctcattatagcaaggggttgtaagcacaaatgagataaattatgatcctttgaaaagtacaaagtattacagagaaagcaatagcattaattctggcagcagtctggaatggagcagtaattccagtcatctggaaatacaggcagtagtgagtcacggctcgtagactcagagcagggaactggtttggataaagtgt

SEQ ID NO: 276098 - DNA, 579 bp, Homo sapiens
tcctggcctgataccaatttgaaaaggatcacactggttactatggtaaatagggagaaaaggtggaaatagggagactagttagggggctgttgcagttatttagtgaaagagctctggaaagtattgagacttgattagatttttgataaagcatatctaaaatatctaagactctaaaaggtcagctttgggrtatactttgggggtagtgccagtaggattttctgtcactgtgaacatggagtaagggagcaagagaggattgagaggagcaagtaaccccatgaattttagcctgaacaactgagctgatggagttgtcatttactgagatgggaggactatgaagaaataagttgtggcggagaagatcaaatattaggttatggacataggttacgggcatagttgtttgagatgcctgataaacatctaaatggaaaaatgaagtaagtctggagtttagaggtgacgtctaggttggagatagaaatttggcattggcaggatatggacaggatttaaaggtaaaggactggatttaggtaccaatgaagtgagttcagagaaaaagat

SEQ ID NO: 276099 - DNA, 493 bp, Homo sapiens
taaaaattctaaaaattcaatacattcaatagtttgacacagattacttacattacaaggcaatgtcacatattaaaggaagaaaaacaaaaggttttaaagtcagaataaaatcattcctctatgggactgttaaattccctaaaacatgattttgggagaacaataaggtcctcaaaactagcattcaaagtattgaatcatcattgcttgtgttaagtaaattatttggcctcttggagtcttgattttcttaccaatgaaataggaatgagagcataggaatgaacagctctcattatagcaaggggttgtaagcacaaatgagataaattatgatcctttgaaaagtacaaagtattacagagaaagcaatagcattaattctggcagcartctggaatggagcagtaattccagtcatctggaaatacaggcagtagtgagtcacggctcgtagactcagagcagggaactggtttggataaagtgt

SEQ ID NO: 276100 - DNA, 614 bp, Homo sapiens
aggatcctttgaaggaaagcattgactcttgaggagcaggtgctcaggattacatgatcgaggtaagggaatgtaggtggaactgraccaacagtttctcctcaagaaaattctggcaataaatatcttagacagtttttagaagaacctttccagtcatccattttctaattggacagcaagataaagctttgtcaaatctctagacaaatttcccttgggatttacaccatgttttcatgataccacaaaatattttgaaagtaaaaaaactcagtcgttgatgtatgcactcattattagatcctcagtatgtatggtttcagctaggaaagaaagcattgcctcctctcttgttgacctgagtttactaagtaactggctaaagttaattaatgaatcaattgtactgtagcaacatgcatgtgaatgctaggcaaaaccctcctgtggatggcagagaattactgtctttaggtaactgtttgtttgctttctatctctacattcaaatctgaccaaggaatgccactagctagacatgtgtagtgattaccagcgaacctcaggccaggctcactcaggactggctacccccaggatggagggttggc

SEQ ID NO: 276101 - DNA, 396 bp, Homo sapiens
gttcctttacataatcctatatttctcaaaagtttggttcattatttttaaattcttttttttatttttgtctgactgggttgattcgaaggtctggtctttgagctcttaaattattttttctatttggtctagtctgttgctaaggctgccaactgttttttgaaattcctatagtaaatttttcaattcaagaagctctgcttkgttctttctcaatatagctatgttgtcattcaaatccaggatcgttgttatggggttgttgttggattcaactttctgttggattttggtgaatttttttgccacttatatcttgaatactatacctgtcatttcagacatttcattctggttaggactcattgctaggttgctggtgtaatcctttgg

SEQ ID NO: 276102 - DNA, 557 bp, Homo sapiens
tttgtttgacatgagttaggtgaatctttgatacattaattaattttaaaattgttaaataaaattagaaatatcttcgaatttgccaaggtatgtttccctcctgggattactggtcagttttattttttcctcggatagatgttttaagccataaatcttgacatagacctgatgtagacctccatacctttcccagatgtgggacggagcaactgggacaggtccatcctagcactaagggatgattaagcctaacttgtagtcgttgtacaactataracatggttgatgctttaagagaaagatcttgatggaaaggggtaaatgtaaaaattgatcatatgaattgggtcattcttgtcacaccaaataaaaccatcaagaagccagggggaggaggcattcagggcaaaaacaccactccaaaaacgtaattctctgcatgcctggctgctgaaattacctgctttaagctgaaaccagttttatcgaatggttactgaaacaacctcttgcaacactaagactagttttacccaccactgtccctcacc

SEQ ID NO: 276103 - DNA, 557 bp, Homo sapiens
tttgtttgacatgagttaggtgaatctttgatacattaattaattttaaaattgttaaataaaattagaaatatcttcgaatttgccaaggtatgtttccctcctgggattactggtcagttttattttttcctcggatagatgttttaagccataaatcttgacatagacctgatgtagacctccatacctttcccagatgtgggacggagcaactgggacaggtccatcctagcactaagggatgattaagcctaacttgtagtcgttgtacaactatagacatggttgatgctttaagagaaagatcttgatggaaaggggtaaatgtaaaaattgatcatatgaattgggtcattcttgtcacaccaaataaaaccatcaagaagccagggggaggaggcattcagggcaaaaacaccactccaaraacgtaattctctgcatgcctggctgctgaaattacctgctttaagctgaaaccagttttatcgaatggttactgaaacaacctcttgcaacactaagactagttttacccaccactgtccctcacc

SEQ ID NO: 276104 - DNA, 557 bp, Homo sapiens
tttgtttgacatgagttaggtgaatctttgatacattaattaattttaaaattgttaaataaaattagaaatatcttcgaatttgccaaggtatgtttccctcctgggattactggtcagttttattttttcctcggatagatgttttaagccataaatcttgacatagacctgatgtagacctccatacctttcccagatgtgggacggagcaactgggacaggtccatcctagcactaagggatgattaagcctaacttgtagtcgttgtacaactatagacatggttgatgctttaagagaaagatcttgatggaaaggggtaaatgtaaaaattgatcatatgaattgggtcattcttgtcacaccaaataaaaccatcaagaagccagggggaggaggcattcagggcaaaaacaccactccaaamacgtaattctctgcatgcctggctgctgaaattacctgctttaagctgaaaccagttttatcgaatggttactgaaacaacctcttgcaacactaagactagttttacccaccactgtccctcacc

SEQ ID NO: 276105 - DNA, 325 bp, Homo sapiens
cagttttatcgaatggttactgaaacaacctcttgcaacactaagactagytttacccaccactgtccctcacctatcagagcctgccagctctcaaaaaccttactggtgccagtgaactttctcaaagagaaatacacaccatttttctctctgtctccctctttataaaacctctaactttctctttatgttttggacacactaaagacacccattcttcatgtatgtgtcaaattgtaatacttgtatctcaaataaaacattttaatttcagatgtttgtctctatatttatttgactttgacaatctgatattatttag

SEQ ID NO: 276106 - DNA, 325 bp, Homo sapiens
cagttttatcgaatggttactgaaacaacctcttgcaacactaagactagttttacccaccactgtccctcacctatcagagcctgccagctctcaaaaaccttactggtgccagtgaactttctcaaagagaaatacacaccatttttctctctgtctccctctttataaaacctctaactttctctttatgttttggacayactaaagacacccattcttcatgtatgtgtcaaattgtaatacttgtatctcaaataaaacattttaatttcagatgtttgtctctatatttatttgactttgacaatctgatattatttag

SEQ ID NO: 276107 - DNA, 325 bp, Homo sapiens
cagttttatcgaatggttactgaaacaacctcttgcaacactaagactagttttacccaccactgtccctcacctatcagagcctgccagctctcaaaaaccttactggtgccagtgaactttctcaaagagaaatacacaccatttttctctctgtctccctctttataaaacctctaactttctctttatgttttggacacactaaagacacccattctkcatgtatgtgtcaaattgtaatacttgtatctcaaataaaacattttaatttcagatgtttgtctctatatttatttgactttgacaatctgatattatttag

SEQ ID NO: 276108 - DNA, 325 bp, Homo sapiens
cagttttatcgaatggttactgaaacaacctcttgcaacactaagactagttttacccaccactgtccctcacctatcagagcctgccagctctcaaaaaccttactggtgccagtgaactttctcaaagagaaatacacaccatttttctctctgtctccctctttataaaacctctaactttctctttatgttttggacacactaaagacacccattcttcatgtatgtgtsaaattgtaatacttgtatctcaaataaaacattttaatttcagatgtttgtctctatatttatttgactttgacaatctgatattatttag

SEQ ID NO: 276109 - DNA, 569 bp, Homo sapiens
tctgtcatcacatggacttttcattttcctgaaatttatttttatgtatgtatatcaaacattgaatttctcttttcttctttactggaattgttaactgtcttagaggccaaatctttttttaaaaaatctctctaatctctgtaaacatttctaattacatatatattttctatacctaatacactactttggaattccttgtggcctaattgcatcggggtgctctggttttgttgytgttatttctgaattacattgactttggtgctctttattttgcatatttaaaactattagatagtgtgattatatttgacaggtcttaattgatgcgctgttcagcgctgtgagttcggttgagatttgggttggagaattttcttccacaggggattgtcttggatttttctgtttctccctcaatatccacctggaaaacatttcaattaatttatattcacttaaatatttctgtgcaaaaactgtgtacaaaagccccaaagtataatttgggcagttgagcagatattctgttgtccagcatttatggtggtttgtagtggaaa

SEQ ID NO: 276110 - DNA, 614 bp, Homo sapiens
gagcacatatccccagcaaaagctctggttttttgaagtctgtattgtgtgttatttccaggagaatacgcaatgatgaaaatgttattaaatgattcaaatatgaaatgctgttatgccaaacaatgaatctttgtgttatacattatgccgaactataaatctttatgttatacattctaatgtcattggagaatactcctgtcttcttggcattattgataattagattctaattgctaataagtcagaaaaattaggaacatcaaatttcagtcttctcaaaagcactcctgttattaaatttggatttttacctttatcacatcaaaggaaatattgttagaaaggtgtttaatgttttccagatggatagattactgttattagttcttatttcattgttaatttttaaaacyataaagttggaagtatcaatatgcctttcaatataccctagtggaatttattaaattttcatggatgtcctttaggaggttcaggaagttatttctattgctagatttctggaagactcatcaggaatgagtgtcagacattgtcagatgtccattgaaatcctcatggtcttttcctttattctattaatatgg

SEQ ID NO: 276111 - DNA, 586 bp, Homo sapiens
agtggaagacaaaggacatataatcttgggagtcctagggccctgcccactgccagtccctccacactactacagctgatgccttctggaaagcaccacctcctggcaggaggccaaccagcacaaatatagagcattacaccactaaagctaaggaccctcacagagtctattgcacccttcaccacctccgctggaacaggcgatgayatccatggctgagagacccatagatggttcacatcaccgggctctacgcagacaacccctaataccagcccaaagccaggtagaccttctgggtgtctagacccagaagagagacaacaatcaatgcacttcggctcacaggaagccatgcccataggaaaagggggagagtactacaccaagggaacaccctgtgggacaaaagagtctgaacaagtcttcagccctagacctttcctctgacagagtctaccaaaatgagaaggaaccagaaaaccaaccctggtaatctgacaaaacaagactcttcaacatccccccaaaaatcacaccagttcatcaccaatggatccaaacaaagaagaaatcactgatt

SEQ ID NO: 276112 - DNA, 586 bp, Homo sapiens
agtggaagacaaaggacatataatcttgggagtcctagggccctgcccactgccagtccctccacactactacagctgatgccttctggaaagcaccacctcctggcaggaggccaaccagcacaaatatagagcattacaccactaaagctaaggaccctcacagagtctattgcacccttcaccacctccgctggaacaggcgatgatatccatggctgagagacccatagatggttcacatcaccgggctctacgcagacaacccctaataccagcccaaagccaggtagaccttctgggtgtctagacccagaagagagacaacaatcaatgcacttcggctcacaggaagccatgcccataggaaaagggggagagtactacaccaagggaacaccctgtgggacaaaagagtctgaacaagtcttcagccctagacctttcctctgacagagtctaccaaaatgagaaggaaccagaaaaccaaccctggtaatctgacaaaacaagactcttcaacayccccccaaaaatcacaccagttcatcaccaatggatccaaacaaagaagaaatcactgatt

SEQ ID NO: 276113 - DNA, 295 bp, Homo sapiens
ctaggttttctagtttatgtgccaaaaggtgttcatagtacccttgaataatctttaatatttcagtggtgtcagttgtaatatcccctgtttcatttcttagtgaggttatttggattttctctcttcttttcttggttaatcttgctaatggtctatcaattttatttatcttttcaaataaccaactttttgttttatttatgttttgtatttkttgtttttgctgttgttgtgtcaatttcatttagttctgctctgaccttggttatttcctttgtttgctgggattggg

SEQ ID NO: 276114 - DNA, 295 bp, Homo sapiens
ctaggttttctagtttatgtgccaaaaggtgttcatagtacccttgaataatctttaatatttcagtggtgtcagttgtaatatcccctgtttcatttcttagtgaggttatttggattttctctcttcttttcttggttaatcttgctaatggtctatcaattttatttatcttttcaaataaccaactttttgttttatttatgttttgtatttgttgtttttgctgttgttgtgtcaatttcatttagttctgctctgaycttggttatttcctttgtttgctgggattggg

SEQ ID NO: 276115 - DNA, 523 bp, Homo sapiens
ctgtgctgaggagtacgcagggagccggcgcaggcgcagagaggcgcacrgcactggcgcagagaatgcccagccatcattcttgcactctgcatgcccataggcttaataccacatggaagttgctgaggcttatagcttgcaccctctgaagcagtagcctgagctgtatcgggggtcttctgagttgagactgccgctgaagtggccaggatgtggggagcagtgtcctgaggctgtccagagcagtaaagtcctggccctcaaaagcattctttcctcttaggcctcaaggtctgtgatgtgatggactgccatggagatctctggaatgcgtgcaagttcttttccccattgtcttgggtatcagcatctgggttttgttttaattatgcaactctctctagcaagtgttttctccacagcctgttcgaatttttctcctggaaaaagctttttctttctttgtcacatggccagtctgcaaattttccaaatttttctggtctgcttcctgtttaaa

SEQ ID NO: 276116 - DNA, 523 bp, Homo sapiens
ctgtgctgaggagtacgcagggagccggcgcaggcgcagagaggcgcacgkcactggcgcagagaatgcccagccatcattcttgcactctgcatgcccataggcttaataccacatggaagttgctgaggcttatagcttgcaccctctgaagcagtagcctgagctgtatcgggggtcttctgagttgagactgccgctgaagtggccaggatgtggggagcagtgtcctgaggctgtccagagcagtaaagtcctggccctcaaaagcattctttcctcttaggcctcaaggtctgtgatgtgatggactgccatggagatctctggaatgcgtgcaagttcttttccccattgtcttgggtatcagcatctgggttttgttttaattatgcaactctctctagcaagtgttttctccacagcctgttcgaatttttctcctggaaaaagctttttctttctttgtcacatggccagtctgcaaattttccaaatttttctggtctgcttcctgtttaaa

SEQ ID NO: 276117 - DNA, 523 bp, Homo sapiens
ctgtgctgaggagtacgcagggagccggcgcaggcgcagagaggcgcacggcactggcgcagagaatgcccagccatcattcttgcactctgcatgcccataggcttaataccacatggaagttgctgaggcttatagcttgcaccctctgaagcagtagcctgagctgtatcgggggtcttctgagttgagactgccgctgaagtggccaggatgtggggagcagtgtcctgaggctgtccagagcagtaaagtcctggccctcaaaagcattctttcctcttaggcctcaaggtctgtgatgtgatggactgccrtggagatctctggaatgcgtgcaagttcttttccccattgtcttgggtatcagcatctgggttttgttttaattatgcaactctctctagcaagtgttttctccacagcctgttcgaatttttctcctggaaaaagctttttctttctttgtcacatggccagtctgcaaattttccaaatttttctggtctgcttcctgtttaaa

SEQ ID NO: 276118 - DNA, 640 bp, Homo sapiens
tgctgtgtaaatgtattacagtatttgggttctgcccttaaagtgctaataaattttttagaactaatgcagatagatatttatacaataaataaaaccctgacatttaggttgttatatcataaaggaatgccttttgtgataataaatagaaaattcttaacaaagatagcatagtgattataatatgtagttgagggaaaatatgaatcctgaccttatcatttgcatatactcatggttcgaattctccatgaaaccctgtcaggttgaagaaaattactagggtaaaattattcagaagaaaaaacatttattagcaattacataatttatatctttaagagtggtattattttatgatgcgtttgtcgtggcataagtctagcataatrttaattgacatcaacccttatttatatatagtttatgtttgaggactcaaatctaaccagtggcaaatccaagtttatgtaaaaattaaatatcttctaatgagtgtaatttcatgtgcatttttatagtttctcttttatttaaaaaaaccttatgtgccagactctaatttactgttatatcttagaattatatatacaagaatttaaaaatgaattctaatagctattttgactatacacac

SEQ ID NO: 276119 - DNA, 741 bp, Homo sapiens
cttcccatttaattgtaaattccaactttaagtcattttttgctcctgcatctgagtgttcaaacttcytcagatccctagtacatgaacagactgcagccaagttctttgcaaaggcataacaggcatgacctttatttgaagtcccagtaagttcctcatttccatctgagaccacatcagcctatccttcactgtccatatcactatcagcattttggtcacaaccatttaactagtctctaagacattcagaactttccttcatcttcctgtattctgagccttacaaactcttccaactcctgcccgttgcctagttccaaagtcacttccacattttcaagtatctttatagcaatgccccatgwcttcccatttaattgtaaattccaactttaagtcattttttgctcctgcatctgagtgttcaaacttcctcagatccctagtacatgaacagactgcagccaagttctttgcaaaggcataacaggcatgacctttwtttgaagtcccagtaagttcctcatttccatctgagaccacatcagcctatccttcactgtccatatcactatcagcattttggtcacaaccatttaactagtctctaagacattcagaactttccttcatcttcctgtattctgagccttacaaactcttccaactcctgcccgttgcctagttccaaagtcacttccacattttcaagtatctttatagcaatgccccatg

SEQ ID NO: 276120 - DNA, 370 bp, Homo sapiens
cttcccatttaattgtaaattccaactttaagtcattttttgctcctgcatctgagtgttcaaacttcctcagatccctagtacatgaacagactgcagccaagttctttgcaaaggcataacaggcatgacctttattygaagtcccagtaagttcctcatttccatctgagaccacatcagcctatccttcactgtccatatcactatcagcattttggtcacaaccatttaactagtctctaagacattcagaactttccttcatcttcctgtattctgagccttacaaactcttccaactcctgcccgttgcctagttccaaagtcacttccacattttcaagtatctttatagcaatgccccatg

SEQ ID NO: 276121 - DNA, 370 bp, Homo sapiens
cttcccatttaattgtaaattccaactttaagtcattttttgctcctgcatctgagtgttcaaacttcctcagatccctagtacatgaacagactgcagccaagttctttgcaaaggcataacaggcatgacctttatttgaagtcccagtaagttcctcatttccatctgagaccrcatcagcctatccttcactgtccatatcactatcagcattttggtcacaaccatttaactagtctctaagacattcagaactttccttcatcttcctgtattctgagccttacaaactcttccaactcctgcccgttgcctagttccaaagtcacttccacattttcaagtatctttatagcaatgccccatg

SEQ ID NO: 276122 - DNA, 899 bp, Homo sapiens
ccacccccatgatccaatcacctscctccagacctaccaccaacattggggatatcacaatgcaacatgagatttagagggaacaacatctgaggtatctcatgcctcatgttgtgacttggtataatttccataagattacactgactttacacatcatattgcagtttttgctagctctcctgtaataagaaaatgggattcatcagcaatgccttctaagtctggctctgttttcccatgcagacttttccctgagctctgcttgtaagtcttgctagaacctcaccctaggcagcaacccccagtctgagactgcccttgacagtggctgaggtttgcattgttgagattagaaaaaacaaagggaagatagaccaaaacagatttaaatacagatcccattcgttgaagttttaagtaattttaaatgtttattttcaccagctwccacccccatgatccaatcacctccctccagacctaccaccaacattggggatawcacaatgcaacatgagatttagagggaacaacatctgaggtatctcatgcctcatgttgtgacttggtataatttccataagattacactgactttacacatcatattgcagtttttgctagctctcctgtaataagaaaatgggattcatcagcaatgccttctaagtctggctctgttttcccatgcagacttttccctgagctctgcttgtaagtcttgctagaacctcaccctaggcagcaacccccagtctgagactgcccttgacagtggctgaggtttgcattgttgagattagaaaaaacaaagggaagatagaccaaaacagatttaaatacagatcccattcgttgaagttttaagtaattttaaatgtttattttcaccagct

SEQ ID NO: 276123 - DNA, 546 bp, Homo sapiens
atttagagggaacaacatctgaggtatctcatgcctcatgttgtgacttggtataatttccataagattrcactgactttacacatcatattgcagtttttgctagctctcctgtaataagaaaatgggattcatcagcaatgccttctaagtctggctctgttttcccatgcagacttttccctgagctctgcttgtaagtcttgctagaacctcaccctaggcagcaacccccagtctgagactgcccttgacagtggctgaggtttgcattgttgagattagaaaaaacaaagggaagatagaccaaaacagatttaaatacagatcccattcgttgaagttttaagtaattttaaatgtttattttcaccagctgcccactccctttgtactctcctcacccaaaaaagctgacttgatattctagtaaaaagccgaactgtgctttagagaaacccacttgttacttctttaaatccatataattttgccaaagtgaatttttcttaatatgctctggcaggatcagaaaactaattattt

SEQ ID NO: 276124 - DNA, 546 bp, Homo sapiens
atttagagggaacaacatctgaggtatctcatgcctcatgttgtgacttggtataatttccataagattacactgactttacacatcatattgcagtttttgctagctctcctgtaataagaaaatgggattcatcagcaatgccttctaagtctggctctgttttcccatgcagacttttccctgagctctgcttgtaagtcttgctagaacctcaccctaggcagcaacccccagtctgagactgcccttgacagtggctgaggtttgcattgttgrgattagaaaaaacaaagggaagatagaccaaaacagatttaaatacagatcccattcgttgaagttttaagtaattttaaatgtttattttcaccagctgcccactccctttgtactctcctcacccaaaaaagctgacttgatattctagtaaaaagccgaactgtgctttagagaaacccacttgttacttctttaaatccatataattttgccaaagtgaatttttcttaatatgctctggcaggatcagaaaactaattattt

SEQ ID NO: 276125 - DNA, 538 bp, Homo sapiens
tttgctcttgttgcctaggctggagtgcaatggttcaatctcggctcactgccamctccacctcccggattcaagcgattgtcctgcttctgcctcccgagtagctgggactacaggcatgtgccaccaccctcggctaattttgtatttttcgtagagatggggtttcaccatgttggtgaggctggtctcgaactcctgacctcaggtgatccacctgcctcggcctcccaaagtgctgggattacaggcatgagccactgtgcccagcctattttgtattttttaatctaccacactctaagaacacatattttaaatcaatttgtacattcagtgcctagaacaaaaccagcattttgtagattccaaagaattatttgttgtataaatgatgagtaacttaaacaagttattatttataacatctatatacaaacaatatattacctcagaatacagtgataacatttgttatgtatgatttcaatttcagttaaaaaatattttttgcatgagttattgtcatatacagatg

SEQ ID NO: 276126 - DNA, 1077 bp, Homo sapiens
tttgctcttgttgcctaggctggagtgcaatggttcaatctcggctcactgccaactccacctcccggattcaagcgattgtcctgcttctgcctcccgagtagctgggactacaggcatgtgccaccaccctcggctaattttgtatttttcgtagagatggggtttcacyatgttggtgaggctggtctcgaactcctgacctcaggtgatccacctgcctcggcctcccaaagtgctgggattacaggcatgagccactgtgcccagcctattttgtattttttaatctaccacactctaagaacacatattttaaatcaatttgtacattcagtgcctagaacaaaaccagcattttgtagattccaaagaattatttgttgtataaatgatgagtaacttaaacaagttattatttataacatctatatacaaacaatatattacctcagaatacagtgataacatttgttatgtatgatttcaatttcagttaaaaaatattttttgcatgagttattgtcatatacagatgwtttgctcttgttgcctaggctggagtgcaatggttcaatctcggctcactgccaactccacctcccggattcaagcgattgtcctgcttctgcctcccgagtagctgggactacaggcatgtgccaccaccctcggctaattttgtatttttcgtagagatggggtttcaccawgttggtgaggctggtctcgaactcctgacctcaggtgatccacctgcctcggcctcccaaagtgctgggattacaggcatgagccactgtgcccagcctattttgtattttttaatctaccacactctaagaacacatattttaaatcaatttgtacattcagtgcctagaacaaaaccagcattttgtagattccaaagaattatttgttgtataaatgatgagtaacttaaacaagttattatttataacatctatatacaaacaatatattacctcagaatacagtgataacatttgttatgtatgatttcaatttcagttaaaaaatattttttgcatgagttattgtcatatacagatg

SEQ ID NO: 276127 - DNA, 538 bp, Homo sapiens
tttgctcttgttgcctaggctggagtgcaatggttcaatctcggctcactgccaactccacctcccggattcaagcgattgtcctgcttctgcctcccgagtagctgggactacaggcatgtgccaccaccctcggctaattttgtatttttcgtagagatggggtttcaccatgttggtgaggctggtctcgaactcctgacctcaggtgatccacctgcctcggcctcccaaagtgctgggattacaggcatgagccactgtgcccrgcctattttgtattttttaatctaccacactctaagaacacatattttaaatcaatttgtacattcagtgcctagaacaaaaccagcattttgtagattccaaagaattatttgttgtataaatgatgagtaacttaaacaagttattatttataacatctatatacaaacaatatattacctcagaatacagtgataacatttgttatgtatgatttcaatttcagttaaaaaatattttttgcatgagttattgtcatatacagatg

SEQ ID NO: 276128 - DNA, 596 bp, Homo sapiens
cacatattttaaatcaatttgtacattcagtgcctagaacaaaaccagcattttgtagattccaaagaattatttgttgtataaatgatgagtaacttaaacaagttattatttataacatctatatacaaacaatatattacctcagaatacagtgataacatttgttatgtatgatttcaatttcagttaaaaaatattttttkcatgagttattgtcatatacagatgctcacattgttttgtttatatgaaaatgtttgtaactactatgcacatttttgctacttcagccttttggtcttgctgccgtagcaaatactgtgcctcttaagaacatgaacctgttttacttcattttttagcagatttcttaatgaaatatatagcatactattttgtttaacacataagcagacaccctgtcagaagcagagacatctactccaccattaccacccatccctctactaatgtggctgctgaagatgttacctagagcagaggactttgtgttcaacctaagcactttatatcctttattttcaattgggtaggagataaaataattcagcagcaataaaagtcacacttct

SEQ ID NO: 276129 - DNA, 596 bp, Homo sapiens
cacatattttaaatcaatttgtacattcagtgcctagaacaaaaccagcattttgtagattccaaagaattatttgttgtataaatgatgagtaacttaaacaagttattatttataacatctatatacaaacaatatattacctcagaatacagtgataacatttgttatgtatgatttcaatttcagttaaaaaatattttttgcatgagttattgtcatatacagatgctcacattgttttgtttatatgaaaatgtttgtaactactatgcacatttttgctacttmagccttttggtcttgctgccgtagcaaatactgtgcctcttaagaacatgaacctgttttacttcattttttagcagatttcttaatgaaatatatagcatactattttgtttaacacataagcagacaccctgtcagaagcagagacatctactccaccattaccacccatccctctactaatgtggctgctgaagatgttacctagagcagaggactttgtgttcaacctaagcactttatatcctttattttcaattgggtaggagataaaataattcagcagcaataaaagtcacacttct

SEQ ID NO: 276130 - DNA, 546 bp, Homo sapiens
ttcaattgggtaggagataaaataattcagcagcaataaaagtcacacttcttaaagttgcagtctcrccaaggcaccacaatgtagcagtctctcttgtgaggtatcacctggagttctttatctcaccaccaagatgattaaggaaccgggacacacgggtgaggttggagtgaaagtttaataagcaaaaggaggaagctctctgcagcagacaagggcgtccaagtggattgccgtttttatagttgaatcaaaaagcttttataagaaactcctctcagctatgtataaaactgtctgcacaattccctttatatatccagctgtgggtatgtctctagtcaagcacaaagtgggcttctcttgttgtataactgtgggtttgttttaggtgagcccccctcctccctgtgtaagttcccacagaggccaccgtgtatatgcctgaaaaagggaggaaaatttttcctgggagcttgccaattacacaaagaacagaaggcgtctgtgctggaccctgcatgctcatctgtgcagggctta

SEQ ID NO: 276131 - DNA, 546 bp, Homo sapiens
ttcaattgggtaggagataaaataattcagcagcaataaaagtcacacttcttaaagttgcagtctcgccaaggcaccacaatgtagcagtctctcttgtgaggtatcacctggagttctttatctcaccaccaagatgattaaggaaccgggacacacgggtgaggttggagtgaaagtttaataagcaaaaggaggaagctctctgcagcagacaagggcgtccaagtggattgccgtttttayagttgaatcaaaaagcttttataagaaactcctctcagctatgtataaaactgtctgcacaattccctttatatatccagctgtgggtatgtctctagtcaagcacaaagtgggcttctcttgttgtataactgtgggtttgttttaggtgagcccccctcctccctgtgtaagttcccacagaggccaccgtgtatatgcctgaaaaagggaggaaaatttttcctgggagcttgccaattacacaaagaacagaaggcgtctgtgctggaccctgcatgctcatctgtgcagggctta

SEQ ID NO: 276132 - DNA, 206 bp, Homo sapiens
gcaattcacaggccgatgagaagatgcacgattgccattcaggtactgagggctgcaacagaggaagggtggtgagagcactaatgaattcttgctatkttctgatcattgtctcatcctaataacagctccctggaaaaggtactattaatccctaaagaaactaaaattcagaaagattaaatgactttcccaaaatcacaaaa

SEQ ID NO: 276133 - DNA, 206 bp, Homo sapiens
gcaattcacaggccgatgagaagatgcacgattgccattcaggtactgagggctgcaacagaggaagggtggtgagagcactaatgaattcttgctattttctgatcattgtctcatcctaataacagctccctggaaaaggtactattaatccctaaagaaactaaaattcrgaaagattaaatgactttcccaaaatcacaaaa

SEQ ID NO: 276134 - DNA, 417 bp, Homo sapiens
cacgattgccattcaggtactgagggctgcaacagaggaagggtggtgagagcactaatgaattcttgctattttctgatcattgtctcatcctaataacagctccctggaaaaggtactattaatccctaaagaaactaaaattcagmaagattaaatgactttcccaaaatcacaaaaccaatatgcaatagagccataaatccaattcaggcctgtctcatatcacaattattttctatctgctacaccaagtggcatccttgagttttgcaagatgccctcagtgccaaggcatgagtccttaccagggaaactttctttctttctttcttttttttttttttgatggagtctcactctatagcccaaggtggagtgctgtggtgcaatcttggctcactgcaacctctgcct

SEQ ID NO: 276135 - DNA, 206 bp, Homo sapiens
gcaattcacaggccgatgagaagatgcacgattgccattcaggtactgagggctgcaacagaggaagggtggtgagagcactaatgaattcttgctattttctgatcattgtctcatcctaataacagctccctggaaaaggtactattaatccctaaagaaactaaaattcagaragattaaatgactttcccaaaatcacaaaa

SEQ ID NO: 276136 - DNA, 589 bp, Homo sapiens
agagccataaatccaattcaggcctgtctcatatcacaattattttctatctgctacaccaagtggcatccttgagttttgcaagatgccctcagtgccaaggcatgagtccttaccagggaaactttctttctttctttcttttttttttttttgatggagtctcactctatagcccaaggtggagtgctgtggtgcaatcttggctcactgcaacctctgcctaccaggctcaagtaattctcctgcctcagcctctggagcagctggaattacaggcatgtgccaccatacctggtgagttttttgtattttagtaaagacggggtttcaccatggtgcccagggcagtctygaactcctgagctcaggcaatccacccgcctcagtctcccaaagtgctgagattcagagaaattttcatggagaggggacagatggagtcatttcttgtggggtgaacatgagtaccatgggtagactgaggttgggaaagattttccagacaattggaagagcatgtgaaagacacagattttgagaaatgtcaagtctagggaactgcaagccttttggcacaagaaagcca

SEQ ID NO: 276137 - DNA, 561 bp, Homo sapiens
gtggctcacacctgtaatcccagcactttgggcagctgaggtgagcagatcatctgaggttaggagctcaagactagcccgccaacatggagaaacactgtctctactaaaaacgcaaaaatcagccgtgtgtggtggcacacacctataatcccagctactagggaggctgagacaggagaattacttgaacctggaaggcgaagtttgcagtcagtgaactgagatcatgccactggacctcggcccaggtgacagagcaagactctgtctcaaaaaaaaaaaaaaaaaaaaaaaaaaaaaaaggaaaagacaggttaatctcaaaacatcaaggattcaagagactctgttcctcattctggcctttactcactaacctaggcctcaraatcctcatctccttcttcttcaaggacataatgtagtatagttgactaaagtatacagattacatgaagtttattatttaaaaaagtctgtctaaaataaaatttgttattttatttctattttatgaaaactatttttacttataaattctcacaaacaatagtatga

SEQ ID NO: 276138 - DNA, 653 bp, Homo sapiens
acttgctagtaccaacatgccaagttggtggtcatgttctgtcgagatytgaagcctttttggccttgggtccataagtgatactgtttctcccttgcaaaaactaaaatgactggagggaaaccagaataatcctaagacaaaaatgagcaagctcaaaggctataaaaattcgagatctcaaaaaccaaagatagctttcttgactagacaacagttggttataaactctgcaacaaagtacctctcagatatgaaatattactcctagagttgggttttttcccccatttttactaagaattgaaacccacaaaatgacaaatcaggattaccctatcaaaagacaacttcaattgctcctttgttctaagaaactgtgtgttaggtactgactggcaatacctgtaccttgatcttcacattaattatgcatttttcctacaaaattggctgccacagtacacactgtaagtcagatttgagagctgccaagagaaatgttccgaatggctgactttttaaagacaacttgtcagttcaccaaataattctttgagggcttatcctagtatactttgtctctcgtatacctatacttatacctatagcaattattacagctctttcctgatgtatcagcttacagcaaa

SEQ ID NO: 276139 - DNA, 1507 bp, Homo sapiens
ggcagtgacacagcctcagcagggagtgtgccttgtaaagctgtctccgtctgaatcagtctgcctaagtggtttcctgcagtccacaaaatgcattcacatgtggtgtctacatcagataatgttgtatcttgtggcttctatggggtctggaagtagtgaacaacataggaaagtgagaagtcattcaaatgctggaaggaagatggcaaagataaagctgcaaacagtgtcactgggaaacaaagattgaggtctgtacagggtgaagctttargagtgcctgttaaaggctggagtctcagggcatcctagtgacttttctttctcctgcctcttttgtctccttcttacttttccagaaagaagttcctgatgggagcatttttcccatggctactatctcacctgtagtttgagtgctatcctccaagaattagccttccctctttgctaaggaacaatcagagccaatgcactgtggccacagccttgtgaaactcggaaaagatgctgatgcctgaggtgcaaaacacactttcatgtacagtgtcttcttttcttcctataacaatcttataaaattattagggatgaaattattctttctagaccaatatcwataacaaactctggtctgatatttgtaaggagcttgacagccaaggagccactcagaaacagttattggtattgccaaaaaaaaaaaaaaaaaggaagctaagaagtcacccttctaaataaataaataaataaataaataaataaataaataaawacctgaattggagagctgcctgcatttcactctactgcctctggaagaagagtgttatctaaagtgcttccatcatgaataatgattgagaaactgcttttactctcccgactactgtactcccaggcagaaacccacggctgaagcccacgatgcccatgtgtaacttggttattacacwccttttctccctcccctgtgttaagtactcttcttatacacttaccaacattcttaaaaacattctaaatgggtcagtccctgacaatattattgtagtgctctgattacatgcatcagctagaaaatctccatccaagttattctcccaattagatgccagatcagtttgwagtctgaaattttaatgaagtgacaaaaaattacatctgaagtttaggcaaaatcaacaagtaccttaaagagagaaagtagaatgtattgtcagaccacacattttatttgaaatttttttatttattcatttatattccacctgattccaaaaaggacttacagcagcttttccttttagacatgttttctaaattggacatttctgcctcattgagactgccaatttctttcctaacataaggatattcttctatcataaccacatgctatatttggagactgaatggcaaggatattgttcttatccagaaaagaggaaaaatataactcattatgatcacaaactccgcttggaaaagcccccaaacaggg

SEQ ID NO: 276140 - DNA, 609 bp, Homo sapiens
agctgctctgcatggtgccaactgcagccaatccctggactaaagccataaaggtgggaagctcaccccataccacctgcttgttccttgtgctacacccttccaaaatctgcctttttttgttcactctctatgccttcggattgtcgtgttattatatttttcctaaattttgtagtttttatctatggtttaacaggagcttattcagccattcctagaagcagaacctcttgattctataaakttttggagttttttctctcacaggacagacaatatctggattcctgctacaagaagtgggtcaccatgaaatttacccacctaatgatgttttgcatattctgtgttgatcttcatcatttcctctcaaagccgtccaagtattctgttactgcttagtaaagccatttcattctccaaggtgtacttcccagtttgcaattttatgggcatcctatttatggctttagagaatgctgttcagtacttattgcctctgaaatctctcaagggatgccattccagtttgccctctgagattttcattctttctcttttacatttcttttgagccccatttgcctttcaaggagcagtaatgac

SEQ ID NO: 276141 - DNA, 609 bp, Homo sapiens
agctgctctgcatggtgccaactgcagccaatccctggactaaagccataaaggtgggaagctcaccccataccacctgcttgttccttgtgctacacccttccaaaatctgcctttttttgttcactctctatgccttcggattgtcgtgttattatatttttcctaaattttgtagtttttatctatggtttaacaggagcttattcagccattcctagaagcagaacctcttgattctataaatttttggagttttttctctcacaggacagrcaatatctggattcctgctacaagaagtgggtcaccatgaaatttacccacctaatgatgttttgcatattctgtgttgatcttcatcatttcctctcaaagccgtccaagtattctgttactgcttagtaaagccatttcattctccaaggtgtacttcccagtttgcaattttatgggcatcctatttatggctttagagaatgctgttcagtacttattgcctctgaaatctctcaagggatgccattccagtttgccctctgagattttcattctttctcttttacatttcttttgagccccatttgcctttcaaggagcagtaatgac

SEQ ID NO: 276142 - DNA, 578 bp, Homo sapiens
aagtttttaattccattctccctctccattatcattgtcattgtctgattcagacactatttttccycttgactttggcatgagttcccattgattctctccttcccttcctacactcttccttcttatctattatccatataatagatacatttttacaaaatgtgatcatttactttcttgcttaaaaaaaaacccagtcatccatgattttagttagtaactctggcccagacaaaatattaccaattttaagtattccatcatgcaaagaattgacaataattattattagattggtgcaaaaataattgcggttttggctattccttttagtggcaatggctgcaactacttttgcactagctaatacattaatattgcaacaaaatttctgggaagaggaaacctaatgaagcaagatcagcacaaataatttattagagcttgacctaggaaactaatgtatattatattgagaatgttgtctcagaactttgttaagatgacttcttatagaaatttatcagtctctatttgtacctcaaaatggagacttaaaatagtaattggttaaa

SEQ ID NO: 276143 - DNA, 572 bp, Homo sapiens
ctaatctgtgctgatggcaccatttccaccctgtcaacctgacaagaaacttgagttacccttgagtagtccttgtcctttatatctaattgaccaccaagtccttccccaggatatatccaaaaagtttttaattccattctccctctccattatcattgtcattgtctgattcagacactatttttccccttgactttggcatgagttcccattgattctctccttcccttcctacactcttccttcttatctattatccatataatagatacatttttacaaaatgtgatcatttactttcttgcttaaaaaaaaacccagtcatccatgattttagttagtaactctggcccagacaaaatattaccaattttaagtattccatcatgcaaagaattgacaataattattattagattggtgcaaaaataattgcggttttggctattccttttagtggcaayggctgcaactacttttgcactagctaatacattaatattgcaacaaaatttctgggaagaggaaacctaatgaagcaagatcagcacaaataatttattagagct

SEQ ID NO: 276144 - DNA, 504 bp, Homo sapiens
tctttccacttctcaatctagaatctatttctaggcatatctttcatgcaagttatttcattaactctgtatccctgtaactctaatgtctatattttcagatcaaaaatctgtcctgagctctaaacttctatatcctaaatctacacacacacagctccagtcccacaagtccaaaatttgagccctccgaactctgaaagcctttgaaggttaggagttacatttcatatcttcttaaaraatagcttcagtgcttgggaacattcaggaaatattgtcaaattacaacatggctggatattttcaaaaaatatatacttaaatttcatttatttaatattttatagaagtataattgactaacaataaattgcacatatttaaagtgtacaattgcataagtgttgacatatatatatgccttttaaactttcatcacagtcaagatagggaacatagttataacccctaaaagttttctctttgtgtccctttgtaatc

SEQ ID NO: 276145 - DNA, 504 bp, Homo sapiens
tctttccacttctcaatctagaatctatttctaggcatatctttcatgcaagttatttcattaactctgtatccctgtaactctaatgtctatattttcagatcaaaaatctgtcctgagctctaaacttctatatcctaaatctacacacacacagctccagtcccacaagtccaaaatttgagccctccgaactctgaaagcctttgaaggttaggagttacatttcatatcttcttaaagaatagcttcagtgcttgggaacattcaggaaatattgtcaaattacaacatggctggatattttcaaaaaatatatacttaaatttcatttatttaatattttatagaagtataattgactaacaataaattgcacatatttaaagtgtacaattgcataagtgttgacatatrtatatgccttttaaactttcatcacagtcaagatagggaacatagttataacccctaaaagttttctctttgtgtccctttgtaatc

SEQ ID NO: 276146 - DNA, 1215 bp, Homo sapiens
ttgctgcttaacaaatattcccctttctcttccctctgggaaaataagataaataagattcctatttgtacaataaggaatatttctgtatatttctgtatacttttacatatttataactgctttatgaaagtatttttgatattgctgtgaaaaaaatctgtaattgcttttaataagaatttgatgraaaaaatgtaatacaattattttattttaaatggaaattatggattaaaagttatcaaagagtattctacagtagcaaattaagtaaattgtagtctatgatttctgggcttataggaaagaaggtaaattagcttttgtagggtgctgtactaatgtgtgcatgccattgtgctgggcactttatagttaatctttacaacaatctcctaagaaagtaattttacagatgtagaaactgaggctaagaaatgttaagtcatttccccaacatcacatagtagaagttcatctacatatgaggcccatacaaaagctaattccatagctcacttggatcatgataccaagcaaaaacatggtaggtatgtcccatggtcaggtaggcactgagcagcagaacagtgggaactgatagwttgctgcttaacaaatattcccctttctcttccctctgggaaaataagataaataagattcctatttgtacaataaggaatatttctgtatatttctgtatacttttacatatttataactgctttatgaaagtatttttgatattgctgtgaaaaaaatctgtaattgcttttaataagaatttgatgaaaaaaatgtaatacaattattttattttaaatggaaattatggattaaaagttatcaaagagtattctacagtagcaaattaagtaaattgtagtctatgatttctgggcttataggaaagaaggtaaattagcttttgtagggtgctgtactaatgtgtgcatgccattgtgctgggcactttatagttaatctttacaacaawctcctaagaaagtaattttacagatgtagaaactgaggctaagaaatgttaagtcatttccccaacatcacatagtagaagttcatctacatatgaggcccatacaaaagctaattccatagctcacttggatcatgataccaagcaaaaacatggtaggtatgtcccatggtcaggtaggcactgagcagcagaacagtgggaactgatag

SEQ ID NO: 276147 - DNA, 557 bp, Homo sapiens
tccatcacattctgcccctaactacctgtcctgaccatcaccatctcttgcctggaacactacaaagaaaggtagggccaaaggattactcttctacttcagctttgattattattcttcagaacagtcttcctagaatcccagactccaaactctcaccatatgtttcttcatgcataacatcaacattctccttcataaaaacatgtgttttctacactagcctataagcctataacttcacgcaggcaaggatggtgtcttacttctgtataccccaccaccactaccacataggacccagtatataataaatgctgaatgagtgaataaacacatgtcctgcattttgcttgggaatcacagaaattatctgttacttgctgtgtcacttgctccaagaatgggggttttgggggctgagggagatgcatggaggacaagattcttgggattagcagcaggaatggaaatttggggaaggaatggggtacagtrtggggaccgtgggggtttggaaagcaggctgataacttagggaattttgaggcacccag

SEQ ID NO: 276148 - DNA, 561 bp, Homo sapiens
attctcatcaccacatggaggagaagggtgtgtgggtaggctttgagggtgagtgggccattgagtttattggagagcctgctgggaaggggcaggtgctccaggtatagtaccggaaatgcagtggtgatatgaccaccggtgctcccactaatgggcacctgtgtcggtttcttgttaaagcttcccagagccacagctctgtcttacggaggagttatgatgtgaagtgaggctgccagtagcagcctgaacccactgcacaaattccatgatgtggttctgaaagcaggggttggaagagatgggaagtggatatgacactttcccagtgaaaagtcagtcttgttaaatgaggagattgcattattattaatgcttccttaccctcccctctctccaggactgtctacataattggcagggcctggtgagaaayggcaatgtgaggctccatgtcagaaactgatgccaaacattcaaccaaagatggggcccttcccagctcagggccttgtgcagctgcacaggtcacaggcccctgaagcaactcagcctggt

SEQ ID NO: 276149 - DNA, 451 bp, Homo sapiens
ttttgtatactcaaaaaaaataagcaaaatcatcaaggactggggcaaggtgggggaattcaaaatggaatacaaacagaaacaaatgaccccagctatattccaaatgagtaaaataactacacttagaaagggaatctgagggtacagaacaaatataaggaacacattttgaagcactgtaatgtactcaagttagatttgttttcagagtggtatacattaccaattccaaaacttccytaagtgtattgtaagactgagcaaataattaaatatagtgcagataacgagagaaccagctttctcatgttggcaaagagttacaaataaataaagtgaggaagctagaatgaaccctatggttttggatggggaattagggagatatcagtatgaccttaggctcatagtgctcattctctctctctcaccccaaacacagacacac

SEQ ID NO: 276150 - DNA, 473 bp, Homo sapiens
gggggccacggtagagagacactctgggaaatatttggtgacttgagtgtttggtagatgttctggggattcctaagcaatgccaggatggctccccagggtctggagaactggatctgtggaggaggagaggagagggacaagagcttccacccagagaagttgacrgcagacagatgttgccagctgccagctcctttgcagacagcccaggatgagctgagccctggacttgggagcatttccacaagttgctatgtcctggctgtgtgtggagagaacaccttcctcacctgagacacaacagaaagttggttttgagatgaatgtggggccgtcacaaccagtttcaaaaagtaaagaagtccagcagccctcatggcagcaggagaagaaaccctaaaactgtcagggactttagccctgtgtcattgagagggtccctaaacctggctgttcctcacgttgaatct

SEQ ID NO: 276151 - DNA, 576 bp, Homo sapiens
actgggcaataagtaccctaataagatccttgtgtcttcagctgatgcctcctgttggcctaatataatgggaagcaagagggcaaggaaggccagatggtgcattcttcagagcctgccagggccgtgggcagggtggagaagggtgaagagggatctggaagggtaaatggaggcttttgagcgcagttaacttttgggctgaaggaaaatggacatgcaagcaggagggagaatcctagttagactcctcggttttcacaagtcattgtcgatgtcactgtcagtgtagtgggccttcaagctatagggagccactcctaatgagcaacatggaacactaggcctttcctggagaacctcacttccacttgtttgttctccaactttccagacacctagtgttagcaaaacacccagggatccgttgctcactscatggaaagccaattactgggataacaagtattgccagggaagaagcctttttattagggtgacatcagtcagaaagatgagagatcagtcccaaacacatctctctcaacggactaaaattggaggtttgtataatgg

SEQ ID NO: 276152 - DNA, 576 bp, Homo sapiens
actgggcaataagtaccctaataagatccttgtgtcttcagctgatgcctcctgttggcctaatataatgggaagcaagagggcaaggaaggccagatggtgcattcttcagagcctgccagggccgtgggcagggtggagaagggtgaagagggatctggaagggtaaatggaggcttttgagcgcagttaacttttgggctgaaggaaaatggacatgcaagcaggagggagaatcctagttagactcctcggttttcacaagtcattgtcgatgtcactgtcagtgtagtgggccttcaagctatagggagccactcctaatgagcaacatggaacactaggcctttcctggagaacctcacttccacttgtttgttctccaactttccagacacctagtgttagcaaaacacccagggatccgttgctcactgyatggaaagccaattactgggataacaagtattgccagggaagaagcctttttattagggtgacatcagtcagaaagatgagagatcagtcccaaacacatctctctcaacggactaaaattggaggtttgtataatgg

SEQ ID NO: 276153 - DNA, 562 bp, Homo sapiens
gctgaactttttttatttacttattttttgagacggagtctcactgtgtcacccaggcagggtggagtacaaagacacaatctcggctcactgcaacctctgccacctgggttcaagtgattctcctgcctcagcctcctgagtagctagaattacaggtgcatgccaccatgcctggctaatttttgtatttttagtagagacaggctgtatttttagtagagacaggctgtattttgtatttttggaagagacaccatgttggccaggmtggtcttgaactcctgacctcaaatgatctgcccgccttggcctgccaaagtgctgggattagagatgtgagccactggacctggcccagtgctgaactttaatatagctgtctttgctctgagttgtgggaagatgctataaaatcaagattccaaagagagaattgagaaaaaagaaaatgggaattaaataaggtaatggacttttgtgctttttttgtgcctatttttcattccttcttctgacaataactctaattttctttgaagaaacactgttcaccccatat

SEQ ID NO: 276154 - DNA, 547 bp, Homo sapiens
ctcctagctttctcatcagcctcctctaaaaattcctggtgctcccagagattgtaccataaaaatttgcacttaatgactactttgtttcattcctcaattggttcatgttgattctcttttcccaatggtatttcaagatatttttggaacaagaagcttgtctcacttaacttactcacttgttttttcctaaaccttcacagcacctatcagggtgtcagggagctaaaaagtactcagtaaatactatcaaaagatggcgaatgaattctgaacacaccatcccccagcatgacaccttgcacactaaagctcaacacgtgtttgttgaatgaatgaatgaatgaatgaatgaacactcctgtctcctacttayccacattcctgatattcgccaccctggttttcggaaaacaaaaatatatatatataaagatggaatgagacaaaaatatgatagagttggatgaagtacttggtatttaagtttttttttacttcttatggggatatcctggcttcttatctgctctcttggtggggg

SEQ ID NO: 276155 - DNA, 605 bp, Homo sapiens
gggaactagggcagaaacaggtcatcttctgcctytagttactcagcacggggcagatgataatgagcctcgacatcagccccacctgcctagagctcgatgggaatttagcacagctgagagctccgccctcctctccaacctgtcccacccacggtgcccacccagcccagagcaaagggaaggaagcccaactctgcttaacaaagagggttctaagtccccagggccacacctccccacttccactgcctgctacagccacgtttcccaggtgaggctctgctgccaggtctcttatgtaacaagaacctgatgtttccagaggagggagctgacctcatgcaccgctatgctccttaacagagtgaacctggtgtaagcctgagtcttcagcagcaccattaacttccaaagaaccttttccaagaaaaaaaaaaaaaaaagatgactatcctacttaacacttattaagtggtgttaattacctgttacactcagcagcttggaaaaattttgccctaacaaacaaaagagggtgaattgaatgagaatgggaagttctggcattcgcaaaagaaacacgagctgtcatcatcatcatc

SEQ ID NO: 276156 - DNA, 558 bp, Homo sapiens
agcagggacccatcccagagaagcagagatatgtgacctttcagacagaaaattcaaaatcattttttgagaaaactcaaagaaaattaaggtaacatagaaagggaattcagaatcctatcagataaatttaacaaagaaattgatgtacaaagaatcaagcagaaattctggagttgagagaacatttgaaataggcctctaagaatgsgtgtcatcctgccagctggagcaaggcaagaaaggtgccctggaccaaagacacagtgagagcaaagacagagagagtggaaaagcccatccagacagattagtcccagtttgctggtggtttgagggcttatctctacttatatccatcagtctcaatttcctggtctttagtggatttgttgttattttaaataataccatggctaaatattctttgtcatccaacatttgctgtcatccatgtttcattcttttttccttcctttgcttttaaaaacttgccttcctctttcctcagatagtatctatgacattttgtctagttggccttagggaaagactcaa

SEQ ID NO: 276157 - DNA, 561 bp, Homo sapiens
gatcagcatctagggtcagagtgcctggattaaaatcctggctccatcatccaacaactgagcaactttaattttcatatgcctcagtttcctatctataaaatagacataagaataatacctattgcatacaattgtcataaggatgcaaagagttaacacccataaagcatgtaccacagatccagggatatagaaagtgttcaatatatatgttggttttaacaacttgactgtccttcagctgggtaaccttctacctagaggtgaaatggttgcttgttcttggctgcagtctctcaaccttgcttttctgctcaacatgagaaatattaagccacaaaaaatatttttctgaaccaatttgatctgattcacttaaaagaaagttcagctagtaaatgtaataatttgaaataacagatttttctaaaattgaattcaaacccattttaatagaaaaaaataataatarcagcaaacatttgtatagctaccatataataagcacttgacaaattatttcatttaatgtttacaatcactaaggggaacaattac

SEQ ID NO: 276158 - DNA, 352 bp, Homo sapiens
cacaagccttccagactttaaactcaaagtctttatcttgctgtattttcatagtcaaatttccctctggatctcttaattagcctaygtttcttaaataaaaatttattttttcaatcagtactattttaaactcaaatcttaaaagctcatactgaaaacaactaactgaaaatgtatatatttttacaatgaaagctattaaataaggaatgcattacaactatagaagggccagtgtgcacattactcgtatttagtcagagacaattcctagaaggagtctagagaagtttctgaaaattgattttaaaataaggtaatagtttattttattacacagaaattattt

SEQ ID NO: 276159 - DNA, 352 bp, Homo sapiens
cacaagccttccagactttaaactcaaagtctttatcttgctgtattttcatagtcaaatttccctctggatctcttaattagcctacgtttcttaaataaaaatttattttttcaatcagtamtattttaaactcaaatcttaaaagctcatactgaaaacaactaactgaaaatgtatatatttttacaatgaaagctattaaataaggaatgcattacaactatagaagggccagtgtgcacattactcgtatttagtcagagacaattcctagaaggagtctagagaagtttctgaaaattgattttaaaataaggtaatagtttattttattacacagaaattattt

SEQ ID NO: 276160 - DNA, 352 bp, Homo sapiens
cacaagccttccagactttaaactcaaagtctttatcttgctgtattttcatagtcaaatttccctctggatctcttaattagcctacgtttcttaaataaaaatttattttttcaatcagtactattttaaactcaaatcttaaaagctcatactgaaaacaactaactgaaaatgtatatatttttacaatgaaagctattaaataaggaatgcattacaactatagaagggccagtgtgcacattactcrtatttagtcagagacaattcctagaaggagtctagagaagtttctgaaaattgattttaaaataaggtaatagtttattttattacacagaaattattt

SEQ ID NO: 276161 - DNA, 544 bp, Homo sapiens
gtgcatctgcattttgttcttgataaagttgttttccaaagatatacaggttcacaagtctgatactgctatacctgtatactagaatagaacaattaagtaaacggatggcagatggacagagtcaggtttttcaatgttggagtggaagtttatagataagcaaaatgaggaagttataattatccatgttataagggttaaagttaagagatctgtatggattcatgtctagcttaatataaatatagatgcttacatatagaaatatttataaatatacgcattttattagtcagtgttctccagagaatcacaaccaataagatgtgtgcctatgtgtgtatgtgtgtgcacagattttatatgtgtgtgtgtgtgtgtgtrtatatatatatagagagagagagagagagagacagagaggcagagagaaaaagagttattacatgaaactggctcacatagttacagagcctgaaagtcccaagttctatagtcagcaagctggagatccaggatggctaattgtgtagttcaagta

SEQ ID NO: 276162 - DNA, 600 bp, Homo sapiens
ttgcctacaaatttcattttagattattaaaagtattgttacatattctttgttataaatgtgatagaattaagaaccactgttctaggctgggtgcggtagctcacacctgcaatcccagcactttgggaggctgaggcaggcaaatcacttgaggtcaggagtttgagaccagcctggtcarcatagtgaaaccctgtctctactaaaaatacaaaaaattagccaggtgtggtggcgtgcgcctgtaatcccagctacttggaagactgaggcaggagaattactggaacctaggaagtttaggttgcagtgagctgagatcgccccactgcactccagcctgggcgacaagagtgagactctgtgaaaggagaggagaggagaagggaggggagggggaaagaaacaacgttctagtgctataagcaaagtaactgaggtaaaatacaggaaggaaaaaatagaagctgtttgtcagagatataattgtattagaaaagtcaagagaggcaactaaaaaccattagaattggtaagagaggtcactatggtagcaatattggataaatgtaaaaggtatgattgacaatgatacaa

SEQ ID NO: 276163 - DNA, 592 bp, Homo sapiens
cggtgcgttcactctggcagtttttaatctttcaggtttctagatgttgggatggggtgctactgagatcacaatctttactctttcttcatttaataagccccttgatcaaaattactactaaaatatgttttggaggttttatttcccaccccactctccaaatttgtcagccaccttaaaattaagcagatgttttaattggagtcttcagtgtgttggatcagccagtttattttccaagttcttcatctgtaaaatgatggggttggaccagataatttggaaggtttctttcagcctccagcactgtaatataccattataagttttctaagaagatggcaaattcccgagaacctttttaactgattcagtttagttccaaaacgtttgcmgtgatatatacctgtgcatagaagactggactattgatctgactttttggacttgttggaagattattttaaattaaggaagtgagaaaaccccaggtacagcacagaaattatttcctctttttactggggctctattctttgcttcaaatctcaatggaatataaaaatagattctgttagactgtgtggga

SEQ ID NO: 276164 - DNA, 443 bp, Homo sapiens
atgcattattttctctttgcctcgcccctccctctccattcccattgtgtttcagaagctctcatggtacccacaagtatcatatattttgcctttgatttccatgggaaaaatttagagggatatgtctatatatctacatctggcctgcctttgttgatattaatgttctagtctgaatattaaactacagtttaaaagaaaaaataagggctgggtgcagtggctcacaactgtaattctaacagtttgggagactgcggggaacagattgcttgaggccaggatttcaagaccagcctgggcaatgtggtgsaaaccctgtctctacaaaaaatacaaaaattagctggacgtggtggcatgtgcctgtgatcccagctaccggagaggctgaggtgggaagattgctcgagccctggaagttgaggctgcagtgagtt

SEQ ID NO: 276165 - DNA, 246 bp, Homo sapiens
gaatctctgttaatttcctctggatcatactgctatagagtccccagagacagggttgcaagcctgctcttagcatctccccaccctcccccatgcaacctgaatctaccgccttccttactgctatttattttattttattccctttatgcttggttcagtctgtygtttacatttgcaatttctcttgcaaggatagtcgtatggagaatgtgtaccctcctcccctcagggaaataattcata

SEQ ID NO: 276166 - DNA, 246 bp, Homo sapiens
gaatctctgttaatttcctctggatcatactgctatagagtccccagagacagggttgcaagcctgctcttagcatctccccaccctcccccatgcaacctgaatctaccgccttccttactgctatttattttattttattccctttatgcttggttcagtctgtcgtttacatttgcartttctcttgcaaggatagtcgtatggagaatgtgtaccctcctcccctcagggaaataattcata

SEQ ID NO: 276167 - DNA, 246 bp, Homo sapiens
gaatctctgttaatttcctctggatcatactgctatagagtccccagagacagggttgcaagcctgctcttagcatctccccaccctcccccatgcaacctgaatctaccgccttccttactgctatttattttattttattccctttatgcttggttcagtctgtcgtttacatttgcaatttctcttgcaaggatagtcgtrtggagaatgtgtaccctcctcccctcagggaaataattcata

SEQ ID NO: 276168 - DNA, 246 bp, Homo sapiens
gaatctctgttaatttcctctggatcatactgctatagagtccccagagacagggttgcaagcctgctcttagcatctccccaccctcccccatgcaacctgaatctaccgccttccttactgctatttattttattttattccctttatgcttggttcagtctgtcgtttacatttgcaatttctcttgcaaggatagtcgtatggagaaygtgtaccctcctcccctcagggaaataattcata

SEQ ID NO: 276169 - DNA, 433 bp, Homo sapiens
ggaagaagatacccagctgggatagtgaaatccttccaatgtcactaaaaagctacagcctgtccaagagtcacttggggtttcccctgcctgataccctaactgccttgcggaatcagggkttgttcacactcctaactgtgggtcactgcctgctgctcctggaatagttaacgaggactaatgcctacaatagattttgtgcccatggaaattttcccctgagccttcagagtcgcccaggattacagttttcctgcaaagccgagagatctcggtggggtggtaaactcggcctctcctgccgcttcggcggccacccagagagggccttctcctgttcgcgttacactttcatggtccctcaaagaagtgtctgcaagtccctatgtcaactgtgtttggtgagccacggggaaaagggagtcacgaa

SEQ ID NO: 276170 - DNA, 600 bp, Homo sapiens
gtatgttttaaaaagaaatatatttatgttggtatatgcattactttttttcctgaaaggatatacaaaaaactgttgatagtggttacctttgggtggatggaggacatttggaactttttgttttagacatttctccagtgttttaatttttctgtgttcatgtgttactttttgttgtttgtttgagacagggtcttgctctgttgcccaggctagagtgcagtggcaccatcatagctcactgaagcctcaaccttccaggctcaagcgatyctctcatctcagcctcttgaatagctgggaccacaggcatgcaccatcatgcccggctaattaaaaaaaaaatttattttgtagagataggatctcactatgttgcccaggctagtctcgaactcctggactgaagcagtcctccccttgtcctcccaaagtgttgtgatgacaggcatgagccaccacacccagcctgttttacttttagttaggaattttgaagagaaaaatgatagactctagaggaagatgttgggcttgcactcagataatccaagtagggtacacttcaagttaagttcgcgtgtacagacctggtgg

SEQ ID NO: 276171 - DNA, 572 bp, Homo sapiens
gcagcttttcaatttggtttccaccagccattcacatgacccagagtaggtctgagatggcccaggaaagaggatgatttaatgccttaaatgattcttgatctgcccattggagaaattattgaaaccacaatagggcttgtcatatggtcttcattctgggcagaaaattttcagtttcagccagtttggtaaaatttagactgaaataggacagttggttttctaagacacagaaaaattaacaaaatcagtaattgatcaaaattgcctgttctgtggggaaaaacttggggacttttaaaattttcactgtttaygtttagaaaaacaatactggtctcttactgacaatgttttatgtgtggtagatgcctagtaaatggtggttggatggatgactggaggagtgagtatattcatgagttattatccattttcctaactcttgggaccattttgaatgtcccagttgcagaaaagatgtccctcccatgagcatcttatgtagaggcttgatgccctttggattgtcaaccatttccatggagcaaatttgtcttcggtaacat

SEQ ID NO: 276172 - DNA, 546 bp, Homo sapiens
gttaaagcttgcaataagataggaaggacgttcatcataactagcagatagaataatattagcactagcagttgactcggcttttagagcatgtgaaatgtgggaaaacatttctgttgcaggatctggcatttagtattccaaacagaaccaacctgttaacttgttctgaaccagggttttccttttattttctaaaattttctgaatatccttgctcaaagcctgagtttgttgccagaaaagatctctgactgtgattgtgtttttgtgttatagatttttttctggaaaaatgtaatgctgaaataactgtatagttatttggcagactaaatatttatttttattttgtagtcacttgaattaggaatcccygtaggttatagaaatcctttaaaacagtgttttgccctagtctttcccatggtccggggcatgcatgtgattaaaacttgcccatactctgcaaaacaatctagctttagagtctttgatggggaaacagaggcaagaagccattgagtcaacaagatggaaatatgg

SEQ ID NO: 276173 - DNA, 527 bp, Homo sapiens
agtgaacttgttgtaaagaaaagttttattggagccacgagaactatcagagttttgaaggcctgtcacatggaagaacagaggggcagggccttttctatgtttctacagtggacagggcaaggagcaatggatgaaagctgcaacaatggcaggaatggcaacaaggcaggtttaggaagccctcataatctgaagacaactgatcctgggaaaagctcatttaaggtagatacaattaagcctgggttaaaatttcatagtaaatacaaaaataaattcttgattgggacttttattttgaaaaacaaaactgaacattaagaaaataagtttatttattatattaacacagttttgattataatttcagctataggctaattctgcagtcaaatgctctgccactgagctataccccttttataggctaattctaaaaccccacaaggactaaatcamttgttgttaggttttgtacaggagggtttgagtacatttttatgacgtaattttatgctaaaaca

SEQ ID NO: 276174 - DNA, 1163 bp, Homo sapiens
gcagtggctttcaaaggcacggcctgggcacacccacctccatccatcctgcccttcacagggcagagtgggccattgtgggatccatgttgaaattttatgtattttttctgtaaatgttaacgaaccaagttggtttggatttgcattctagatgttgagtggaagagatatgacgcacagctgcacacgcagtctgcaggaacctgactgtgctgtctctgtatttaayagaggatggtcggggcataaagtagtcctagtcaagcagccgcacaatgctgagggctgactgggtgaatatcatgaaagctacgggtgctcttgtggatactgtgaaatgctgttatgttcttaagaggctgggggaaaatctgtatcttttttgtctttcttctttatcccactgcctaagcccatccaactcaaattctgttacctgtggtttctctttgctctggactcctgtggagctcatttgcggtacatccacgggtaaaactcatttatcgaattgtctcctgaattccagtttggttcccgagctagagtgtgtaaatccagtaggagcagggwagggcgtgaccagctaatcttctgatagggagattagtatggatcagccaactcactggaagccaggtgctattcatcaagacaatggtcagccatctaaacagaagccaggacctactgtgcaagaaatggaaaatagccccaaaggcattttggagatcatttggggctacccttcccatcacaaatgcataatacaagggcgtggaggacagaatgggggcaccactgcccagtacaacctcacattacwggctctgctccccaaattctgttgccacactccttggctgcccaagtgtgactctggtaggccccagtgaaaagtgcattgtgcccaggaaagctatgagggtatgactgccttcacctacattttaaaggatgccctggagagcctagggtcccaggcagagaactgccatgggagtggggtcaccctcagactccactaggccccaaaggcatgccaacacttgcttttcgaaggatgactagttttctccggagaagagcatggccttgcttcagaatcctaggaatttgtgatgtgactcttttattgtagttggctagagacttgcatg

SEQ ID NO: 276175 - DNA, 618 bp, Homo sapiens
ccttgtagatttatggcttataatcttcctctttttcaggctgcagaagaataggctattcataagattctagagaatttaaagccaattaaatatttttttgaatacttgaagagttctccctgacccagggtcttctagggattatcagatgtaaaaggaaggtagaatttaattacaaattttctaaggggtaacaatgtgcaaatggaataccgatagtgcaagtaatctacatctgcaaatgtaaagtcagaggaccccatatttcagggaaaaaaatcagtcttctttagcaggtaaagaaagcatctgtaacaatgatcaagtgcctgctgagaataaaagcctcttgtcatgattgcagaaggtgatgcttgctttccagaaagtcaatttcctctctctctctctctctctctctctctctctctstgtgtgtgtgtgtgtgtgtatgtgtttgtctctttgtctcactgctctctttctgaataatatcttcttctaacaaccactcccgaaggtgtgcaacttcacaggctgttgatgatatcatattgcctatactaaactgttaggcagttttccaaatagttaaaaagttaaaaatgttttaat

SEQ ID NO: 276176 - DNA, 624 bp, Homo sapiens
tcattttatcttttaaaaatattaaatttaatttcatacagtatgcttatttttactttaaaaacagtgacatattactaagaaaatgagactaattgcacattagtatctcaagaatcaataatataacaatgtctacagcaactaggatgcaaaattaatgtatttatctttatcttttactttccattgttaaaacagcatttagaagtgaacagtatttctcaggaatatccaatgtcttagttccrgttactctaacaaagtgccataaactgggtggctgataatgaaatttgtttctcaccatttggaagctggagtttgaaagcagggtgtcagtaaggtcagcttctggtgagggctgtcttctgggttgcaggctgcaggcttctgattctatggagaaccaggttccagggcagaaagacattgaactagctcttgggcctcttctaatcgtgacgctaattccattcataagggctctaccctcatgaactgattacctcctacaggcccacctccaaacaccatcacattgaaattagagtttcaacatatgaagattggaaggacagaaatattcactccatggcgtgtcaacaaaaataagtgtgtctt

SEQ ID NO: 276177 - DNA, 519 bp, Homo sapiens
ttttgttcttaatgtatatttaagattctgaatgagttcttctacttttggatacttcttctacccatgggttactatatattgttattgctattgttattttctaaatattttacatttgaatttatttttattctaaaaattgttttaaggattttttaaaatttgaagtaacagtgtagcaatgttgttgttttctacatttgttattaatttctaatttctttacatcataagtttaaaagarttgaaaaatgtatagctgtattaggaaaagaagatctaaagtatacataattgagaaaaaagaaacgaaatgtatttatatgtattctagaagaaaaatttctaaacttaaatgaattaaatctgtatgtgaaaggacacacatattcttggggaaaattgttatggagcaatcaatacgcactggcaaaattattgtatttttaaatatgaagaaaaatactatcattaatgaagaaaaaaatcaggtaacttgtaaggtgtattctttac

SEQ ID NO: 276178 - DNA, 494 bp, Homo sapiens
agggaatcacaatttagacaaatcaagataacaccctcgatccaggattttgcagtagtaagcaccgaattcatcaacacgactcttcgctcagcacaacctctagtactgaatttcttaacttctagctacttaatattcttagcttttctatctcagaggagggtagataaagatttctgaaacattctgaagaaatttggaaaaatcgcatttggaaaaaaacaagaaaggttttctctttattttttacaattttttattttttatttatctctcatacctttctgctgaagaaatttttctcttaatttgaacaatttcaaacactttcagtgtaccatttttgcctttgatactcaactctggactgagaacccttttatgagagaaaaattatttacagcacatttattctayggtctaaagaaatatatgccccccaatttaagtcattcttaaaatcagaaatagccaattgaccattattttaa

SEQ ID NO: 276179 - DNA, 554 bp, Homo sapiens
tggcaaactttttttcagacagtcattaaggatgtgaatcagggctattagcagttaygtcattctgtcctctcaaaattgggttgagagatagtgggggcaggttaagaatgttatcaaatgtattagtctgaaggaaaagaccaaaggaacctaaatatttttatcattcataattttcctgcttagcattacgatacatcttaatttgcctttctcctctcccccctattttctttcctattttcttcttgtgtgttttatcttttccaagttgaaactagaattgtattgggagaacccaaatttcaaaaaattagtgattgacataattgaaagtacgtaatgaagtactgtttatttgtattttagaaaacctatttaaactaattgtttaaagaggttgaaatatattgttaccagtttttcattacatcccattaccttaaatactttatcactttttcttctatatcaaaatatctgccttctcctcccttcccacaaatagaaaatcgggaaataaaaatccaaagttcccagtatcatgtgta

SEQ ID NO: 276180 - DNA, 554 bp, Homo sapiens
tggcaaactttttttcagacagtcattaaggatgtgaatcagggctattagcagttacgtcattctgtcctctcaaaattgggttgagagatagtgggggcaggttaagaatgttatyaaatgtattagtctgaaggaaaagaccaaaggaacctaaatatttttatcattcataattttcctgcttagcattacgatacatcttaatttgcctttctcctctcccccctattttctttcctattttcttcttgtgtgttttatcttttccaagttgaaactagaattgtattgggagaacccaaatttcaaaaaattagtgattgacataattgaaagtacgtaatgaagtactgtttatttgtattttagaaaacctatttaaactaattgtttaaagaggttgaaatatattgttaccagtttttcattacatcccattaccttaaatactttatcactttttcttctatatcaaaatatctgccttctcctcccttcccacaaatagaaaatcgggaaataaaaatccaaagttcccagtatcatgtgta

SEQ ID NO: 276181 - DNA, 516 bp, Homo sapiens
catcaggttattatgttcctctctaaactggttattctagttagtaattcctctaaccgtttatcaaggttcttagcttctttgcattggattagaacatgttcctttagctcaytgtagttttttatcacctgtcttctgaagcctacttctgttaattcgtccatctgatcctccatccagttctacacccttgatggagaaatgttgcaatcatttgcagaagaggcattctggccttttgggttttcagcattgtttcattgattctcatcttcctgagtttgtctagtttcagtctttgaggctgctgatccttggatggggtttttgtgggggcctttttgttgttgttgttgatgcttttgttgtcactttctgcttgtttgtttttctttcaatagtcaggtccctcttctgtggggctgctgcagtttgctgggggtttacttcaggccctattcatctgatttgctgtcatgcctggagatgtcactcaagaaggctggagagtag

SEQ ID NO: 276182 - DNA, 516 bp, Homo sapiens
catcaggttattatgttcctctctaaactggttattctagttagtaattcctctaaccgtttatcaaggttcttagcttctttgcattggattagaacatgttcctttagctcattgtagttttttatcacctgtcttctgaagcctacttctgttaattcgtccatctgatcctccatccagttctacaccyttgatggagaaatgttgcaatcatttgcagaagaggcattctggccttttgggttttcagcattgtttcattgattctcatcttcctgagtttgtctagtttcagtctttgaggctgctgatccttggatggggtttttgtgggggcctttttgttgttgttgttgatgcttttgttgtcactttctgcttgtttgtttttctttcaatagtcaggtccctcttctgtggggctgctgcagtttgctgggggtttacttcaggccctattcatctgatttgctgtcatgcctggagatgtcactcaagaaggctggagagtag

SEQ ID NO: 276183 - DNA, 564 bp, Homo sapiens
ttggaaagtaactagttcatgaggttagagcctcatcaataggattaatacccttgtaaaagggactcccatgaggtctctagttctttctgtaatgtgaggatacaacaagaggtcagcagtctgcatcccaaaaggggatcttcaccagaatctgaccatggtggcctttctatcttggatttccagcctcctgaactgtgagaaatacatttctgtttttttataaaccacccagtctatggtctttgttataattgcctgaactaagacaattccaaacccatcttatgaggccagcattgccctggtaccaaagtcagaaaaggataccattttagtctgtttagtgttgctatacaggaatacctgaggctgagtaattcatacagaaaagaagtttggttggcccagagttctgcaggctgtacaagaggcatgrtgccagcatctgctactggtgagggcctcaggctacttccacacaagacagagggcaaagcagagtcggcatgtacagagatcacatggcaagagacaaagcaagaaagaggggaatgtgcc

SEQ ID NO: 276184 - DNA, 531 bp, Homo sapiens
acagggaagaatgcaggaccgatcacagcttgatttacgtagttcttgacaccgtgtttgctacttgaggaaatttattttttaaaggtgtttcatttgctgatatatcaactattatacattgcattttcatttgtttctgaagaaatcaaaataatatttccttttggaacatatgacaaaaataatgactaacagtaactacagcttacagttacttgtataaatatttagaactattaytacaaaacttaaaaaaataaaacacaatctgtaaaacagatacccaaatgacatatgactagttgcaggcacgtttcttagttttagaaggttatgtgtaaatcatctcgatggtttgacacaactcaaatttgtctcacctagaatctgcattcagtgaatggatctattgtatattgagtctgtcttcatgaacttgacatattggtagccatcagaaaaaaaaaaaatctcacatgggaaaactatcaacgtattttatttagaaattcaattatttgttaagat

SEQ ID NO: 276185 - DNA, 531 bp, Homo sapiens
acagggaagaatgcaggaccgatcacagcttgatttacgtagttcttgacaccgtgtttgctacttgaggaaatttattttttaaaggtgtttcatttgctgatatatcaactattatacattgcattttcatttgtttctgaagaaatcaaaataatatttccttttggaacatatgacaaaaataatgactaacagtaactacagcttacagttacttgtataaatatttagaactattattacaaaacttaaaaaaataaaacacaatctgtaaaacagatacccaaatgacatatgactagttgcaggcacgtttcttagttttagaaggttatgtrtaaatcatctcgatggtttgacacaactcaaatttgtctcacctagaatctgcattcagtgaatggatctattgtatattgagtctgtcttcatgaacttgacatattggtagccatcagaaaaaaaaaaaatctcacatgggaaaactatcaacgtattttatttagaaattcaattatttgttaagat

SEQ ID NO: 276186 - DNA, 470 bp, Homo sapiens
cagttgattctggtgctatactttccttgagttatgagtgctgaaaaagcaatgctatctttcttcctgtttattattacttctacttctctaaatcacatattgtataataatctattcactgaaatttagaccttttatggcctagtattgatcaattttgtgaatattckgagaataagatgggggagaacctttatttttatctgtatagctagtgggtcacacttgttacctcttatttcatattttctatttttttgttctgttttatctgtcaataacaggagcaaaatatttccattatggtcagtttgggacttactcctttagttatacctaccttctttgccttatatttttaggctattttagaaactcgaactttaaaatttctgcatcctttcggttaacagaacctatgaaaatagcaggttctattaactatcaaatagaaggtaatgaacctt

SEQ ID NO: 276187 - DNA, 566 bp, Homo sapiens
gcacctggaaaagccacagacactcaatgccagcccatgaaagcagccaggataggggctataccctgcaaagccacagaggtggagctgtgcaaggtcttgggggctcacctcttgcatcagtgtgacctggatgcaagacatggaaccaaaggagatcattttggaacttttaggtttaaaatctaaactcttagattttaactattagattttgaacttgcatggggtctgcagcccctttgttttggacaatttttcccatttggaacrggtatatttacccaatgcctgtacccccattgtatccaggaagtaactaacttgcttttgattttacaggctcttaggcagaagggattgccttgtctcagatgagactttggacttggacttttgggttaatgctggaatgagttaagactttgggggactgttggaaaggcatgattgggttttaaaatgtgaggatgtgagatttgggtgagagcagggatggaatgatatggtttggctgtgtcctcaccaaaaatctcatcttgtattataatccccataatccccat

SEQ ID NO: 276188 - DNA, 605 bp, Homo sapiens
agtttgcaccatgcacctggaaaagccacagacactcaatgccagcccatgaaagcagccaggataggggctataccctgcaaagccacagaggtggagctgtgcaaggtcttgggggctcacctcttgcatcagtgtgacctggatgcaagacatggaaccaaaggagatcattttggaacttttaggtttaaaatctaaactcttagattttaactattagattttgaacttgcatggggtctgcagcccctttgttttggacaatttttcccatttggaacgggtatatttacccaatgcctgtacccccattgtatccaggaagtaactaacttgcttttgattttacaggctcttaggcagaagggattgccttgtctcagatgagactttggacttggacttttgggttaatgctggaatgagttaagactttgggggactgttggaaaggcatgattgggttttaaaatgtgaggatgtgagatttgggtgagagcagggatggaatgatayggtttggctgtgtcctcaccaaaaatctcatcttgtattataatccccataatccccatatatcaagggcaggaccaagtggaggt

SEQ ID NO: 276189 - DNA, 508 bp, Homo sapiens
ctagaattcaggaactcctattaggattcctgaatcacataattggcctcctttttaaaaaatttccatttagtaataagaatttacaaacaagattaccagtaaaaatgttactccacaatatattggttagaaagcaattgttygcagacgttattttaatatgtaacacatgtttaagtagccatgaaacaggttggcagctttagcaatggtgctttactggggatggatgcagtatgacaagaaaataccacacacagcagcacaaaatataagtgactcttattgtagaagaaattccagcacaggatagggggtcagcatgaggatatgacacgcctaccaaagagagctgacagactaagaggaaagaaaatatgttcacctggagtgaaaaatattgtgtttctttcattttctcttggttcaggaaatggctatgtcagtggcaaattgtaggaacatgcaaggagccctatttacagctaaaaacattcatggtaga

SEQ ID NO: 276190 - DNA, 538 bp, Homo sapiens
agtaatattccattgtatgtatacatcacattttctttatctattcagccatcagtgggcatttargttgtcactatatctcagctgttgtgaataatgcttcaatggacatagaagaagtactgtatctctttgagatcctaatttcaattcttttagatatatacctagaagtggaattactgggtcgtctgatagttctgtttttaatttttgaggactctccatattgttttccatagaggctgcatcattttgagacagccaagtgaaaagtgctccctggagaatctctgacttggcctgtgcactgggaggttggggtgaagctgtgggaagtttgcaccatttgcaggggggggagcctggtctctcctgttcctgggtggtaacctgggactcaatctgtgagatgggggcttgttaacaggaatccctctcactttgctgagagtctttttccttttcacccagtaagtgttgttattctcacccttctgtgtgtccacaagcctaatctttccttgttgtgtgacaa

SEQ ID NO: 276191 - DNA, 629 bp, Homo sapiens
accaacatttgtttaattatttgagacagtaaccataattgatactatattctctgctgccctgtagaggacagcagtttacacatagtataatagatgataaattaaytgttaatttttcaatttaacaaaatattttctgtagtaatttgaagactatttatacagacttctgtataacgattaaaatatagaaataaaaagccaaaattactataacattaaatatatataagcttttatatacacatatatttgaatatacatacttctgttaaaatacaatttgctaaagtgactaaagattattaatgtttgctaaagtgtccaagtgttactgaggtagacacatgtctcctagcaaaagccatcaccttttggatggtactcaccagtttcacttagtgtcaaggtaaaaagtggctctttggtttattgacagctaagataaggccaattaattgcatgtactccacgaagacaaatggatgtatagagtctcctagaacagacaaggtatccaaaataagcgtatgtatgtgcttgtttgaggctccctgtggagtaatacgtttatggaagacaatgattcactgaggacatcatctgataaaactgaagagttaaag

SEQ ID NO: 276192 - DNA, 610 bp, Homo sapiens
aatttgaagactatttatacagacttctgtataacgattaaaatatagaaataaaaagccaaaattactataacattaaatatatataagcttttatatacacatatatttgaatatacatacttctgttaaaatacaatttgctaaagtgactaaagattattaatgtttgctaaagtgtccaagtgttactgaggtagacacatgtctcctagcaaaagccatcaccttttggatggtactcaccagtttcacttagtgtcaaggtaaaaagtggctctttggtttattgacagctaagataaggccaattaattgcatgtactccacgaagacaaatggatgtatagagtctcctagaacagacaaggtatccaaaataagcgtatgtatgtgcttgtttgaggctccctgtggagtaatacgtttatggaagacaatgattcactgaggacatcatctgataaaactgaagagttaaagtagaaaatgcaaatgctagctgtgttagtttcctttggttgccmgaacaaatgaccacaaatataatggcttaaaacaatgcaaatgtttcatagttctgaagatcagaagtctgaaatgagttcca

SEQ ID NO: 276193 - DNA, 455 bp, Homo sapiens
tcaataaactaaatgcaaatctactctttgttcttcaggagatattttattttttaaaagtaaataacatttattaaggatatcagaagaaataaactatatttctaatttaattgtgcaacaattatgaaatattcttcttgtttattcaaggatggtgttattttcttttaatttttttgacagtctttgaaatttttcactaaattatcacctctttaacctccattatggcttttcctcacttacttacatttaaaattctaatctctatcgaattttacccagtgaataccaacagtggatttctaaatgtttagataatccactctaaatttcatytgcaaacaatgaagaaccgctttatctaagcagctctgtcagacaatcacagtcctcttataaactaaacaaaaaatgtttataatgatgtgtgcttgttactccacatatac

SEQ ID NO: 276194 - DNA, 455 bp, Homo sapiens
tcaataaactaaatgcaaatctactctttgttcttcaggagatattttattttttaaaagtaaataacatttattaaggatatcagaagaaataaactatatttctaatttaattgtgcaacaattatgaaatattcttcttgtttattcaaggatggtgttattttcttttaatttttttgacagtctttgaaatttttcactaaattatcacctctttaacctccattatggcttttcctcacttacttacatttaaaattctaatctctatcgaattttacccagtgaataccaacagtggatttctaaatgtttagataatccactctaaatttcatttgcaaacaatgaagaaccgctttatctaagcagctytgtcagacaatcacagtcctcttataaactaaacaaaaaatgtttataatgatgtgtgcttgttactccacatatac

SEQ ID NO: 276195 - DNA, 573 bp, Homo sapiens
ggtgtatcgggcatttctttttctatggattcttctttaacctgttctagtgccataaaaacaaaagcaaaaaaaaccaagaaggtaccagcatcactgcaggacaggcaatgctggctctggttcagggagttctaccagcaagaacagccaatgtgtcgagagaggaaagacccaattcaagggccaaatcaggccaggttaggaggtaggaaaagtagcccagaaaaaagacttgtttactgatcctgtctgagtgtgtcaacctgtgttcttagattmtgtccactactgtgcatggaatccaaagcaatgtaagtttggaacttcttcccccaagcttcttgttctttgaactgtaattcttttacaagaggttctccctcctttacacatacacacacacacacacacacacttatgcacactcatagctgcaagcagaaaagcatttagtgactgcctcctgaatattataaacccaggtaaaatttgtctgcctttatctttcctccagctattaatcagaactggagatgactccgctagcttctagctacacttggaaagcat

SEQ ID NO: 276196 - DNA, 585 bp, Homo sapiens
gtaaaatttgtctgcctttatctttcctccagctattaatcagaactggagatgactccgctagcttctagctacacttggaaagcrtaagttctctcctttctgatctccagcactggacatacgtgtgcctcccttccttcaaagatggccaaacaaaatatcaaacaataatgtcccaagggctctgaaatagaagactgtgaaaacacagaagctatcagcttcacaagtttggacaagggaaagaagggaatacatagaaattagaaaacctggctgggcgcggtggctcacgcctgcaatcccagcactttgggcggccgaggcgggtggatcacgaggtcaggagattgagaccatccaggctaacacggtgaaaccccgtctctactaaaaatacaaaaaattagccaggtgtggtggtgggcacctgtagtcccagctactcaggaggctgaggcaggagaatggcggaggttgcagtgagccgagatcgcgccactgcgctccagcccgggcaacagaacgagactccatctcaaaaaaaaaaaagaaagaaagcctgacttcaaaattatattg

SEQ ID NO: 276197 - DNA, 1186 bp, Homo sapiens
tcaatgcagttcaatgaggaaagcaaagtcttttcaataaatggtgctggatcagcagtgcatctatatgtaataaaacaaaaccaaaccatgaatccttacctttcaatgtacaaaaattaacttgaaatggatcacaatctatatgaaatacctgacttataaaattccaggaaaatatttggagaacatgaggttgacagattgcttggatagatgcaaaaaaagtccaaaacgtttttcaaaaataaattggagctcgttgaagttaaaaactcttgcttttcagaagataccattaagaaaatgaaaaagacaagctgcagacatataaaacatttgcraaacatacaagattcatatccagaatatgtaaagtactcttagaactcaataataagacaaaaacaaaacaaaagaatacaatgggcaaaagatttgaacagatctttcaaaaaaaaagtgatatgcaaaatggccaggaagcatatgaaaaatgctcaacctcattactcatcagaaaaatgcattaaattaactaacattaagagatttgtcacacaaaatgttggccagcatgtagagcagctggagctctcacatawatataaagaaacaaagcaccataagcaacactggaagaaataacaaacagcaaaacctggcctgcaaagtcctcattaatgggaattataaacattttataaaagtagaaaaaaaagtttaaataatcataaggcacaagaagattgggagaagaatcaaaagaaatcctaaaattaaaaaaaaaaaacttgaagtttagaawtttattaatccaaactaaaaactggagaaaatatccaaaattcatttcaaagtaataaaagaaatggaaagtgtgatacaaatcttaaagctatgggagagttaagtcttaatattttggatggggaggagagagagactaggacagaggtattagctaaaggtataatggctgagaactttcaagaacttgaaagacaccaaatgcagattcaaaaagacttgatttttaaataaaaataaaaaatgaatccaacaacatgtgatagtcagattacaatctatcaaagacaaaggccagacatttagagcagccaaagagaaattctgacaaaggagccataattagaatgacagctgacatccttatgaaaataat

SEQ ID NO: 276198 - DNA, 581 bp, Homo sapiens
atataaagaaacaaagcaccataagcaacactggaagaaataacaaacagcaaaacctggcctgcaaagtcctcattaatgggaattataaacattttataaaagtagaaaaaaaagtttaaataatcataaggcacaagaagattgggagaagaatcaaaagaaatcctaaaattaaaaaaaaaaaacttgaagtttagaattttattaatccaaactaaaaactggagaaaatatccaaaattcatttcaaagtaataaaagaaatggaaagtgtgatacaaatcttaaagctatgggagagttaagtcttaatattttggatggggaggagagagagactaggacagaggtattagctaaaggtataatggctgagaactttcaagaacttgaaagacaccaaatgcagattcaaaaagacttgatttttaaataaaaataaaaaatgaatccaamaacatgtgatagtcagattacaatctatcaaagacaaaggccagacatttagagcagccaaagagaaattctgacaaaggagccataattagaatgacagctgacatccttatgaaaataat

SEQ ID NO: 276199 - DNA, 1026 bp, Homo sapiens
ttttggcatatgttcaggttatgtgtgtgcttacggaatgcggaagtatccagtctacgtatctctataaaaattgctttctatatgtatgtttatccatctgcacttttaccaatgacatattaaaatgttcattgcaagttatttttaccagaatggctctttgttggggaaaaggcgaagttcttaggcaaaaaattttgttttcatatgcatttttgattaggagaggtgaacaacttttcatgcttttaaactagttataattacttgtcaattatcagcttccctttttctcgtttattaggatcctgtatttactagtccttcatatgacctctataaataaatatagtgagagtctaggtgttcccgttttttacattattatgggggtgcataatgtagaatatgtttttacatttaatgtaccatagcttttttatttctttatarcttgtaaatctaaaaagtcattttatccttcagaggattgatattcaatttwgaaaaattgcctagggatcataggattwtctcacttgtatatctccacaaacacaagagaagtccagaaaacaggcaccatgtatagagttggccattcaaaattaaactcatagaaactgcaaagcctatgctgaaatgttccatgattttgtacaatgaagaataagccaggtccattatttggggggtgggaacagaggaaggaagaaggaaaaagaaggggaaagaggaaagaggatatgtagctataagggaatcaccagttggatggtaatctttcaaaagcagaaacacagatgagtccctcatctgatagttcagtggacttcagaaaagaaaagaaagtggtgtaggatttacttggtgatagaaacaatgaagatataaacaaaaataagggccatggagaagtaaaaacaaaaggtttacagattcattggtcgtgatgaaaatatgagctactccttcagtttaactgaagtcatgggcagatacatatttacattagcatacact

SEQ ID NO: 276200 - DNA, 534 bp, Homo sapiens
gtgttttgagttactatcaataaccagattgtcagggtttcagtaaaaaacaaacaaatgcaaaaacccaaaacttaaacaagattgttctgagtgcctgtgaaatagactaatgcatggtaattaccttgaccttgtaaaaacatagtcctcaaagaagttagggatcatctcccatcttctagcaagggctgccatctgcattagtgaactgcttggcctccaggactgagaacttctcaaacaggaacatgaccatggtaacatgtccagaacaagccaactaaatgggacacgccatactgaaatggtgcttagggttgtaacaattagaaagcaccacagataatayacagaaagactactttctggacagaatacccaaatccccagacatacttaatttacaagatttctgtgccatcggttatgtaagaactgtttttcttgagtaaatctgactaataacagtagcagcaactgataagcacagatcacaagaatttttcatactgctttagttctatttcctta

SEQ ID NO: 276201 - DNA, 558 bp, Homo sapiens
actttggaaattgtgacattagaatagacgaaacaactttcagaactctcatggagaactgaaatgttcatgaatatcaaacaggagagaagttaactgcatggagtaaactagtagaagtctaaagtgatctttttaacttttaggttaaaatgttgctgattctttgttttgtttttcaaagacaagaaaacaattcttttaagctatttacagcttttaacaattaggtaaagtatactcctatgaacacaatttggagcatatttgtttacctagtttctccagaatttggaaactacttgtgagtattcttaatttatggcaatatagttatttgcataagtgcaataagaatctgttttcttttgtaacaggacataattggaaaaactggttattttaccaaggctttgagtggaatggtgtgttttcctttaaggaattaaacttgacttatagagccaataaaagccccttgggaaaactggccttgtaccttgtctacacagtccctgcamagggttcctgacatgtcataagtaaagaatgtcactt

SEQ ID NO: 276202 - DNA, 633 bp, Homo sapiens
caattgggagattcttcagtcccccagctgagcatgctgcctcacttccttctcctccyttgccttatatgtttcctgtcacttctctgttgaattccagtgttctctcataggtgaccaaagtatgattacatactcactattttggttcttgtttgtgggggaggcaagtaccagctgcctctggtcagccatcttaaaaccatgtcatgaatctgtcttttagtgggtctgtttctccaggcttgaccttcatgagtgtggtagtaaacccactcctcttatcctctattctacataaattccatgactgcagaattctttgtctgcttccttgaagccttgatgcctgctgacggttttttctccctgagtcagatgggaagactagaaagggctaaagtacaaggagcaacctccagtaatttgtcatttaccatgtaggtgttcttattagtttatggctctagcggcttccgctccgtgtaagcagatcttgcccatgactctgaatgcaactctctctccagattttggaacagtggttgtacctatgacttcatttccatgatgggtccaaaaaaacttgttttgcagtttgctcagcttcttcctattgtaaggatgacagtg

SEQ ID NO: 276203 - DNA, 633 bp, Homo sapiens
caattgggagattcttcagtcccccagctgagcatgctgcctcacttccttctcctcctttgccttatatgtttcctgtcacttctctgttgaattccagtgttctctcataggtgaccaaagtatgattacatactcactattttggttcttgtttgtgggggaggcaagtaccagctgcctctggtcagccatcttaaaaccatgtcatgaatctgtcttttagtgggtctgtttctccaggcttgaccttcatgagtgtggtagtaaacccactcctcttatcctctattctacataaattccatgactgcagaattctttgtctgcttccttgaagccttgatgcctgctgacggttttttctccctgagtcagatgggaagactagaaagggctaaagtacaaggagcaacctccagtaatttgtcatttaccatgtaggtgttcttattagtttatggctctagcggcttccgctccgtgtaagcagatcttgcccatgactctgaatgcaactctctctccagattttggaacagtggttgtacctatgacttcatttccrtgatgggtccaaaaaaacttgttttgcagtttgctcagcttcttcctattgtaaggatgacagtg

SEQ ID NO: 276204 - DNA, 625 bp, Homo sapiens
ggtgataaatttaaaatctggttaggggcttatgaaaaaaaaaatctttgacatcacatgatggagccctaagtattggccagctccaagcatgacactttaccagtagcctttagcatccccctgtggctaactttrtagagcacttgtaaatatacctcttcattggtttttgatggctatggatggttctgctctttttcttttggagggtggagtggttgtaatctttgatttttgctttcctaatccttgtattagttggcctcacaggcccttgggatttcacaaattatcttcagttgcattcttgggtaataaaggaataaaaatgggctgacaataaggaatgtccaagattgaggctgaccatagaaccctgggaatttcaaggctagtctttcatgcattcacttatacattaatcatcccctcgtctcttcacctccctccattcattcagcaaatgtttttgtgttagcattgggagctggtgtcaaacaaagtagacaagggtgcctgccttcataaaaacttatagtctgggctattttcaaaggatagtaaaggaaatctcaatcaatgagtactctaccaaattagattatttggactttaagaaaag

SEQ ID NO: 276205 - DNA, 625 bp, Homo sapiens
ggtgataaatttaaaatctggttaggggcttatgaaaaaaaaaatctttgacatcacatgatggagccctaagtattggccagctccaagcatgacactttaccagtagcctttagcatccccctgtggctaactttgtagagcacttgtaaatatacctcttcattggtttttgatggctatggatggttctgctctttttcttttggagggtggagtggttgtaatctttgatttttgctttcctaatccttgtattagttkgcctcacaggcccttgggatttcacaaattatcttcagttgcattcttgggtaataaaggaataaaaatgggctgacaataaggaatgtccaagattgaggctgaccatagaaccctgggaatttcaaggctagtctttcatgcattcacttatacattaatcatcccctcgtctcttcacctccctccattcattcagcaaatgtttttgtgttagcattgggagctggtgtcaaacaaagtagacaagggtgcctgccttcataaaaacttatagtctgggctattttcaaaggatagtaaaggaaatctcaatcaatgagtactctaccaaattagattatttggactttaagaaaag

SEQ ID NO: 276206 - DNA, 1236 bp, Homo sapiens
tagttttagtaagctgggcactgtgggtatgctttagaatatggcatcaaagattcttaaaaagcagaggatagtaaagcacggcctcacccttttcctaagccatctggctttttacagttttaacttacttttatgatggattccagggcacatgcaatatttttattcyagctaaatgaggagcaaattagaagaattttagctctcattttgaaaaagataggaagaagggaaaggaagtgagtgttgtgtgatagaaatagcctgtgttagactttcccaggcttctcagggcagatgagatcagtactgtgtgcatcagctcatgtgagagctaatggaatttggaaacattgattaggtccctccattcttgagtactgctggagtgaatacccgttcaagttctacagattaactaggcaaatattaaaatagtcctgctgggtccgactcaaaagggcaggtagttcattgagtgggagaagatcatctcccgagtttttggtaattagtactaagaatgaaatcccatgggaaaaacaatagtgattagttatcagtagagctattatattagtttttattgtaatgacaacctgcagaattttttttttaaagctttggctgttttgcagcagcctggatggatggatattgaaggaaatcwtctccaaatttaccatatgcctgaatgagagaaacttcatcttgaatatggtcattttctttcttacaacctgacaaattcggcctcaggtgtatgcagtgtgccctgaaataaccttcagattcccagttcttttaatgagtctccgagattgactcactggcctttcccatcactttgaatgtctttttcttttctatgaatttaaaaatatctaagactcagagtagactagaactacccaaaaagacttggatttgataaaatttccaaggatacagggacttaagtaaagtttgtctggatctcattctatctcaatcctagcactgcagtatcagccaccaactgactawaggacactggggactttttcccagttataggaaatagcatcccttgcagattgaaaatatggaatattgcttgtcaggcttagatcctacctaacaagtgactgcttcccagaacagcattcaagatggtcttcaactgtcttggaatcatctagaatattttctccccagcccccacaggtttttttatattatcctgaatttcca

SEQ ID NO: 276207 - DNA, 586 bp, Homo sapiens
ctacatatcaagactcagcatcatgggattttaraatctggggactaaaaaaagactctaaagcctccagagattaaaaacaagctttacatgaaggatcattagaataagacttttcaaaagccacactgaaaaacagaaagctttgagaaaatgcctttaaattttgtgggaaaatgatttcccacttaaaattctgtacccagccatattactactaagcataaactgaaggataaactaaggataaattaaagcctttttcatatatacacgatttaaaaatatttaccgcttatatactcttttccaggaatcacagagggtacagtctccaaaacaagggagtaaacatggagaaaagaagaaatgggactcactacgatgccaaaaaaggagagatgaaggacttcacagtagctcacaagtttgggctggaaagcaaacagccagaatgctctggagggatgtcatcatggagatgagcccaacagaatacccaatgcctctggctgtattgagaggagtttcataacttgggggtgagtaagtgcaaagaaaactactaaagcaaaaaaccaaggca

SEQ ID NO: 276208 - DNA, 586 bp, Homo sapiens
ctacatatcaagactcagcatcatgggattttaaaatctggggactaaraaaagactctaaagcctccagagattaaaaacaagctttacatgaaggatcattagaataagacttttcaaaagccacactgaaaaacagaaagctttgagaaaatgcctttaaattttgtgggaaaatgatttcccacttaaaattctgtacccagccatattactactaagcataaactgaaggataaactaaggataaattaaagcctttttcatatatacacgatttaaaaatatttaccgcttatatactcttttccaggaatcacagagggtacagtctccaaaacaagggagtaaacatggagaaaagaagaaatgggactcactacgatgccaaaaaaggagagatgaaggacttcacagtagctcacaagtttgggctggaaagcaaacagccagaatgctctggagggatgtcatcatggagatgagcccaacagaatacccaatgcctctggctgtattgagaggagtttcataacttgggggtgagtaagtgcaaagaaaactactaaagcaaaaaaccaaggca

SEQ ID NO: 276209 - DNA, 586 bp, Homo sapiens
ctacatatcaagactcagcatcatgggattttaaaatctggggactaaaaaragactctaaagcctccagagattaaaaacaagctttacatgaaggatcattagaataagacttttcaaaagccacactgaaaaacagaaagctttgagaaaatgcctttaaattttgtgggaaaatgatttcccacttaaaattctgtacccagccatattactactaagcataaactgaaggataaactaaggataaattaaagcctttttcatatatacacgatttaaaaatatttaccgcttatatactcttttccaggaatcacagagggtacagtctccaaaacaagggagtaaacatggagaaaagaagaaatgggactcactacgatgccaaaaaaggagagatgaaggacttcacagtagctcacaagtttgggctggaaagcaaacagccagaatgctctggagggatgtcatcatggagatgagcccaacagaatacccaatgcctctggctgtattgagaggagtttcataacttgggggtgagtaagtgcaaagaaaactactaaagcaaaaaaccaaggca

SEQ ID NO: 276210 - DNA, 586 bp, Homo sapiens
ctacatatcaagactcagcatcatgggattttaaaatctggggactaaaaaaagactctaaagcctccagagattaaaaacaagctttacatgaaggatcattagaataagacttttcaaaagccacactgaaaaacagaaagctttgagaaaatgcctttaaattttgtgggaaaatgatttcccacttaraattctgtacccagccatattactactaagcataaactgaaggataaactaaggataaattaaagcctttttcatatatacacgatttaaaaatatttaccgcttatatactcttttccaggaatcacagagggtacagtctccaaaacaagggagtaaacatggagaaaagaagaaatgggactcactacgatgccaaaaaaggagagatgaaggacttcacagtagctcacaagtttgggctggaaagcaaacagccagaatgctctggagggatgtcatcatggagatgagcccaacagaatacccaatgcctctggctgtattgagaggagtttcataacttgggggtgagtaagtgcaaagaaaactactaaagcaaaaaaccaaggca

SEQ ID NO: 276211 - DNA, 518 bp, Homo sapiens
tttagaaccagtgagcctttggttatgaaagacacaggtttcccagtattttttcagtgctaacataatgtactgatgacagtcagtttgccatcattcagtttgcagatggcttagagcactggctttttctaactacatttgcagagcaggggcactgactgtacttcagccccaytaggaggaagggggtaacctagaactaaaacccatcaaataatgctgcacaaattaatggctttcatagctttgacagctttggtatagctttgttgaagagctgaaagtgagtactaaggagcagaaatgcgatttaaaataagcattgacaatcgctaatgctgcagcctagagcagcccaggaaagtcagcaaggcagaccctatctgctgtaggtctccagtgttggagccgagcctagaatccaagtcctctgactatttaaatgtgctatttacaaaactatatgctgccttgtgcacagcttggccctcacaagcttggataaaccaggaact

SEQ ID NO: 276212 - DNA, 625 bp, Homo sapiens
ggagtcccaatcttactctgagagtccactctcagtttttcagtccatataacaaccaatcaagtggcaataatagcttttaaagatatttcagactttgcaaacaaactgggtgttccctcttctgagcatccatagtaccgtgcactttccctgtcacaccttcctgtgactaagtgtctgtctagactccccraagagcctacgagtgaatgtgaagtagctacaatgttaagcacccatagatctacatgcccagggctcagaagataatcaatgtctgctcaatatcttcaaaaatattcctttgacctagtaatgtgtagatggcttaatggaaaacaaacctgctgaaaataccattgacaatgaaaatggctgtaaaacaatttggacgcgcaaggagaataagatgggcattctctagagaaatgtaaaaccaaagtacatctctgactgcttaaaaaccaccgtaaagaatttcaattgccaccagtactgcccagagagtgtcaagaagacacacatgccaaatgggagttctggcagaaggtcaggaagaaaaggggaactccttggcctcagacccaaggcctcccttcaaacactctcagcagagttagga

SEQ ID NO: 276213 - DNA, 579 bp, Homo sapiens
ggtaaagaaataagtaaaatatagagcatgttagataagtgttaaagggtaaaactaagtkagagtctcactgggggaagggaggttagaattgggggctaagttggtcagagaaggtctacctctgtatgatgggtcaacaaggaggttatctgtgggagaaaattccagaggcttgtgtgtgtcggtgtttgttgatcatcaagggagtacagggcatgaggtctgggaggacctcgtaggtcaccatatgaggacactggctttaatgccatatgaggtggaagaagagaaatgtactaaaagcccactaaaaggaagcaagaccaggtaataacctaggtaaaagatgaaggtggttagacctatgccagcaatagatgtggtgaggaaggtcagaggatcacttgagtccaggagttccacactacagtgagctgtgagctatgatcatgccactacactccaccctggaggatgaagtgagatctcatctcaaaaacaaaacaaaacccaacacatttgggctgagcactgggaggaatggaaatgccactggtgggcttgggaaccaggagg

SEQ ID NO: 276214 - DNA, 579 bp, Homo sapiens
ggtaaagaaataagtaaaatatagagcatgttagataagtgttaaagggtaaaactaagtgagagtctcaytgggggaagggaggttagaattgggggctaagttggtcagagaaggtctacctctgtatgatgggtcaacaaggaggttatctgtgggagaaaattccagaggcttgtgtgtgtcggtgtttgttgatcatcaagggagtacagggcatgaggtctgggaggacctcgtaggtcaccatatgaggacactggctttaatgccatatgaggtggaagaagagaaatgtactaaaagcccactaaaaggaagcaagaccaggtaataacctaggtaaaagatgaaggtggttagacctatgccagcaatagatgtggtgaggaaggtcagaggatcacttgagtccaggagttccacactacagtgagctgtgagctatgatcatgccactacactccaccctggaggatgaagtgagatctcatctcaaaaacaaaacaaaacccaacacatttgggctgagcactgggaggaatggaaatgccactggtgggcttgggaaccaggagg

SEQ ID NO: 276215 - DNA, 579 bp, Homo sapiens
ggtaaagaaataagtaaaatatagagcatgttagataagtgttaaagggtaaaactaagtgagagtctcactgggggaagggaggttagaaytgggggctaagttggtcagagaaggtctacctctgtatgatgggtcaacaaggaggttatctgtgggagaaaattccagaggcttgtgtgtgtcggtgtttgttgatcatcaagggagtacagggcatgaggtctgggaggacctcgtaggtcaccatatgaggacactggctttaatgccatatgaggtggaagaagagaaatgtactaaaagcccactaaaaggaagcaagaccaggtaataacctaggtaaaagatgaaggtggttagacctatgccagcaatagatgtggtgaggaaggtcagaggatcacttgagtccaggagttccacactacagtgagctgtgagctatgatcatgccactacactccaccctggaggatgaagtgagatctcatctcaaaaacaaaacaaaacccaacacatttgggctgagcactgggaggaatggaaatgccactggtgggcttgggaaccaggagg

SEQ ID NO: 276216 - DNA, 585 bp, Homo sapiens
tcatctagcctttagagtgtccttccccactccaaaaaaactgccctcggtaaacaaaaagaagacagaggaggcacagcgaggcctgcaagaggctaggagatccagatgatctgggaagagaagggtcagagaaggtccccaggaaaggaaagaaaatgggatctcagctcaggctctgagcctagatagataataggtcagaatcaagggaagagagaaaacgtactagaaacagaaagtaaaagaataaggttgggcatgcctagtcagtggtcttaagtgcagaaacgtgactgaagttggtagcaaaggaagctttatcagattagtagtgagtagggcccattccacacttagaaggttccagagctaggacagagctaagggcattttctacagtctatggggaactgcaaaaatggacsgctatcaaagttggcagatccatcctgaaacacatgcacgtctcccagatggaacccaacacataaaatatataattaaaaaactgaactcatttgtttttattctgtcctatgcacgtggcatctacaacactaaatctgttaaaaaaaatacatc

SEQ ID NO: 276217 - DNA, 529 bp, Homo sapiens
gcttagtgattaatgggtgctctcccaacttctaacaaggaggattaaataagggaatatatatataaaagtcacctggcacattataagctttcaacaaaaacattagcattaataatgatgatgagtcatcagcagaagtgaaagcaaattttgaccaagataacttagactgaaatagtgaagatcattytccttgtaagattatctgctatattgtccagagcgtataatattgaaggtaatagaatttcactgaatgagaaaccaagaggaattatttcctgtcacattcacccacttttccttaaaccatatcatttcttcattcatttctcctctcaaatcacttacctccagcctgagccctttgtgataccatgcctatgtcgatgctgacaaacactgttcgattggacccatcaggttctgccatgatgaaggcacgactgtatagcctggtgaggatgccctgtgcattctggccggatttgccatagcccatctaaagaggaagagacaatcagag

SEQ ID NO: 276218 - DNA, 529 bp, Homo sapiens
gcttagtgattaatgggtgctctcccaacttctaacaaggaggattaaataagggaatatatatataaaagtcacctggcacattataagctttcaacaaaaacattagcattaataatgatgatgagtcatcagcagaagtgaaagcaaattttgaccaagataacttagactgaaatagtgaagatcattttccttgtaagattatctgctatattgtccagagcgtataatattgaaggtartagaatttcactgaatgagaaaccaagaggaattatttcctgtcacattcacccacttttccttaaaccatatcatttcttcattcatttctcctctcaaatcacttacctccagcctgagccctttgtgataccatgcctatgtcgatgctgacaaacactgttcgattggacccatcaggttctgccatgatgaaggcacgactgtatagcctggtgaggatgccctgtgcattctggccggatttgccatagcccatctaaagaggaagagacaatcagag

SEQ ID NO: 276219 - DNA, 504 bp, Homo sapiens
ttaccagtcttctctactcattaacagtttatgtaacctaacactgactggaacagaggctccaccagaccccactggccaatctttgtgtaaatgtagcctacgttgtttcaaaaaactttgtttccaacattttaaaaaatcatgagatatctaaaaatcccattttccaggttctctggaaaactcaggagatctgagatcatgtgttctctctacaacaaacagctgccacctgggagaggctgtaggccttcttcacaagaattgcacctgtctcctccttggtmcacctcctcactccacctcatctgcaaaacttgattagcccttgtaaggatttacgtttgagacccctttctctaaagctcttcacagactaattgacattcattcagtgagtctttcattctccttttgcccccaggagaaaatgatgtctacaaggaggcaaattgaaagattagaggctcatggtaaaagctgccattactagaccttgac

SEQ ID NO: 276220 - DNA, 504 bp, Homo sapiens
ttaccagtcttctctactcattaacagtttatgtaacctaacactgactggaacagaggctccaccagaccccactggccaatctttgtgtaaatgtagcctacgttgtttcaaaaaactttgtttccaacattttaaaaaatcatgagatatctaaaaatcccattttccaggttctctggaaaactcaggagatctgagatcatgtgttctctctacaacaaacagctgccacctgggagaggctgtaggccttcttcacaagaattgcacctgtctcctccttggtcmacctcctcactccacctcatctgcaaaacttgattagcccttgtaaggatttacgtttgagacccctttctctaaagctcttcacagactaattgacattcattcagtgagtctttcattctccttttgcccccaggagaaaatgatgtctacaaggaggcaaattgaaagattagaggctcatggtaaaagctgccattactagaccttgac

SEQ ID NO: 276221 - DNA, 611 bp, Homo sapiens
cacattcataccctgattatgccagagttaagacaggctatggagttatgcacaattgccagctgtcggactataatcccaccctctctcgccccatggtccattgtgaggctgagtctgagatctgctaatgcaggcttttgtaggggagccatgacgattgcacctgaaataagttacggacagagcctggaggtgcttaaatgccaggctaagggatttaatgttagtgaaggcagttaagagtccctgaacatttttaagcaggacagtacaaatagagctgcgttttgccaatattcatctggcagaagtgggtaagtagagcagggagagtctaagagaggatgcttcttccctatccctgaaccaycacaggcatgatgaattgatcgagggacttatttctgagaagcccaagcagatcctccaaattcttctcagcatagtgttctaatggcgggggaaggggtggagctaaaaagtcaattgaaacctaatggacacccttggactgaagacagtcagctctttaagaggtgagacatcatttaggtgggaagcagagccagggcggcgtttggaagtggaagtggaagtggaaatgaaaa

SEQ ID NO: 276222 - DNA, 557 bp, Homo sapiens
aaagtttgtaagaataaacacataaacatgaatctcatgaacacgggatttcccccaagatactcagcagcattgaatgaatgcacaggggagagaagtcaatttcttatttcccctaaaaatactacattatcactcaagagtcctggcagaaccaaaaacaactggaaaggagaaaaagtaaatgcaaaagaattttgggtttttttttctgcataagagaggagtaggagaaatggctcctgcattgaacacttgaccatggctgcacargtggaaaccacagcatcctaccccgtctttcagcctttgctctgtgtctggagttttgacataataggacatgtgaaagacttgatcaaattatgaaatgtattgttctgctacctcctgatagagatagtttgtcatgcaacaaaagtgagtgcctatgttcagaggaggggagctgaatttcaagtcattcccctttcaaggaggcaataaataattgtgggttttgagtatggattctggattaagatttattgagttccaatcccagcactaccctaata

SEQ ID NO: 276223 - DNA, 557 bp, Homo sapiens
aaagtttgtaagaataaacacataaacatgaatctcatgaacacgggatttcccccaagatactcagcagcattgaatgaatgcacaggggagagaagtcaatttcttatttcccctaaaaatactacattatcactcaagagtcctggcagaaccaaaaacaactggaaaggagaaaaagtaaatgcaaaagaattttgggtttttttttctgcataagagaggagtaggagaaatggctcctgcattgaacacttgaccatggctgcacaagtggaaaccacagcatcctaccccgtctttcagcctttgctctgtgtctggagttttgacataataggacatgtgaaagacttgatcaaattatgaaatgtattgttctgctacctcctgatagagatagtttgtcatgcaacaaaagtgagtgcctatgttcagaggaggggagctgaatttcaagtcattcccctttcaaggaggcaataaataattgtgggttttgagtatggattctggattaagatttattgagttcmaatcccagcactaccctaata

SEQ ID NO: 276224 - DNA, 599 bp, Homo sapiens
aacattcaccctcctcttggtgtgaatactcctacgcggggggactttcaaacaaacaaatgacattgctgaaagtgaagctgggaaggtctgcacacaattggttctgacgagccaatatgagctgtccccaacacaccattgtccctgtacaagccacctcttaggccaccaatgaggcgtttctcaagtggactttcagatgacaatgccgccctcggagctggaaaagcaatggggagcaggaattgagactggattctccaggtggtgtcaaaaccatacccacccagtgcagactgctttgttttgtatcatgaataggttttgaggcttttccttatgtcagctgcttttcccagaccaggccagtctaaaagagcaatcaggaaatgtgggtaacaataaaaacaatattgaaaacagttccaggagattctstgagactttcaggggtctctttcctggcagagtcccaaaaagctcatgtcacactcctgagtggacaataaattctccttcccagtcaccaatggcattatctgcactgccctctggtggcttccgtggctgccataatctggtgatgactgagccct

SEQ ID NO: 276225 - DNA, 644 bp, Homo sapiens
tctttaataacttgtaaactaaaatggtttcattatgatccctttctaattaatttctaagtaatgggagtgaaaatactcatgaaaatatgcttagagcaaagaactgatatagaaaaaaaaataaaaagtgaaagaaaagggcatagagagaatgtatacctatatagcgaaaagcaactgtcaggacataaaattaaatatgattaataatggttatctctgggtgtttatttttatttcaatatttatgcttttttgtgtttctaatgtaactataataaccacatattacttttgtagtaaaaaatagctgttaattgcagcttaaaaaatgagagaagaaaagatgtgtcaagaccacartgggaaggactatgttaagaaatattaggatttcatgctggagacaatggaaatcaattggtggcttttaagcaggaaaaccacttattgttcttgatcagaggaagagttttagatcagatttttgaaaaggatcctgatggcacaaagggaggtattgccctggctggaatatttggttttaaacatgggtctcttattttcaaatccaaaagtaatagaagtgcgggtcctctgacaggtgacttgagattcattcaggccagagggcccagccc

SEQ ID NO: 276226 - DNA, 560 bp, Homo sapiens
gatacgaagttcaaaagggttatcaggagtatrgggcccaaaggttgagagccagccatagcttgctagaccgcttccaatgccacctattggtgtgggcccagactcaaggacgctgatataaacatccaagtagaatgcccaagtgagcatatactgtctccaataccaaagtattgaattaaggtgttgttctcctttttggtggttggaggccagaggcagcagtttttccttggctgtcagaagcattgaacattctgattctgcctacataatcccaagaagccttattcacctagcagatccctgaatttttttaaggttcatcagccacctctgccagcacaagtatgataacactgcaggtagagtgtttaaaactggatcttctcacttgtcaactaaataatatggtctatatagcgaaagctttggctatcagagggtagaggcatttgtactaatcctgacacacccactggtggtaaatggtaggggagtttaggtaccccagggggaatattgcaagccagtgggccagaaaacaaggtgctggc

SEQ ID NO: 276227 - DNA, 560 bp, Homo sapiens
gatacgaagttcaaaagggttatcaggagtatggggcccaaaggttgagagccagccatagcttgctagaccgcttccaatgccacctattggtgtgggcccagactcaaggacgctgatataaacatccaagtagaatgcccaagtgagcatatactgtctccaataccaaagtattgaattaaggtgttgttctcctttttggtggttggaggccagaggcagcagtttttccttggctgtcagargcattgaacattctgattctgcctacataatcccaagaagccttattcacctagcagatccctgaatttttttaaggttcatcagccacctctgccagcacaagtatgataacactgcaggtagagtgtttaaaactggatcttctcacttgtcaactaaataatatggtctatatagcgaaagctttggctatcagagggtagaggcatttgtactaatcctgacacacccactggtggtaaatggtaggggagtttaggtaccccagggggaatattgcaagccagtgggccagaaaacaaggtgctggc

SEQ ID NO: 276228 - DNA, 582 bp, Homo sapiens
aaaaaatgccattattctagggctccggggaattagatttttgagtgatgtgttttattctctattaaaatggtccaggcataatttggatggcataacagaagaaagaaaacaacagaggaggaattaggacattctggcaaatcaatgtttttcttcttcttgacgttcctctgctgattgattgtttaactgggaacaggtggaggttggaggatgggcaggaaatgagagagcagagaatttcagattccattcctttccagtacaggctccttctgaatcccaggtctcccctttatttggggagctagggtgtgctaactagcacmcagcataatgtagtgcagcagcatttggaaaactgaaggccacagcccattagtagaataggtaataaatggaattcagtgtgtctcaagcagcatttattaaaaatgaaatggaatcaaataaaatgaaaaataccgaaaggtgttccatattgtttggataagtattattttttaaaactccttctactggctcacaatctatagttacttccattatgaattgtgaccacaaacgtttggaaaaaat

SEQ ID NO: 276229 - DNA, 504 bp, Homo sapiens
tgacccaggactgcctggctctgtaacctgaaatcttaattgttatggaatattgcctccagtcaccctgtgttctaactgaatgcacttatagatcatgaaatmtttggctgaaccacagtcttttatgagaggctttgcagatgtgcttcctgagatcacttcaggagttgagtaattctttaagtaaataaagagtgtaacatcaagtcacttatagattgttagctacatgaagccagaaataatttcctgccttgttcattactctatcttcaacacctagcaaatttctgacacatttgaagctctaataatatatttgcacaatacatgtttatataatagatgtttacacaaataataagtcatacatctaaataaattgtacttacaacaaacaataaatcaatgaattgaagcctgcatggacttggatgggcttaacatttcatggccacaaaactgttttaattgctaaatacttttacttgaaaagacatc

SEQ ID NO: 276230 - DNA, 504 bp, Homo sapiens
tgacccaggactgcctggctctgtaacctgaaatcttaattgttatggaatattgcctccagtcaccctgtgttctaactgaatgcacttatagatcatgaaatatttggctgaaccacagtcttttatgagaggctttgcagatgtgcttcctgagatcacttcaggagttgagtaattctttaagtaaataaagagtgtaacatyaagtcacttatagattgttagctacatgaagccagaaataatttcctgccttgttcattactctatcttcaacacctagcaaatttctgacacatttgaagctctaataatatatttgcacaatacatgtttatataatagatgtttacacaaataataagtcatacatctaaataaattgtacttacaacaaacaataaatcaatgaattgaagcctgcatggacttggatgggcttaacatttcatggccacaaaactgttttaattgctaaatacttttacttgaaaagacatc

SEQ ID NO: 276231 - DNA, 504 bp, Homo sapiens
tgacccaggactgcctggctctgtaacctgaaatcttaattgttatggaatattgcctccagtcaccctgtgttctaactgaatgcacttatagatcatgaaatatttggctgaaccacagtcttttatgagaggctttgcagatgtgcttcctgagatcacttcaggagttgagtaattctttaagtaaataaagagtgtaacatcaagtcacttatagattgttagctacatgaagccagaaataatttcctgccttgttcattactctatcttcaacacctagcaaatttctgacacatttgaagctctaataatatatttgcacaatacatgtttatataatagatgtttacacaaataataagtcatacatctaaataaattgtacttacaacaaacaataaatcartgaattgaagcctgcatggacttggatgggcttaacatttcatggccacaaaactgttttaattgctaaatacttttacttgaaaagacatc

SEQ ID NO: 276232 - DNA, 504 bp, Homo sapiens
tgacccaggactgcctggctctgtaacctgaaatcttaattgttatggaatattgcctccagtcaccctgtgttctaactgaatgcacttatagatcatgaaatatttggctgaaccacagtcttttatgagaggctttgcagatgtgcttcctgagatcacttcaggagttgagtaattctttaagtaaataaagagtgtaacatcaagtcacttatagattgttagctacatgaagccagaaataatttcctgccttgttcattactctatcttcaacacctagcaaatttctgacacatttgaagctctaataatatatttgcacaatacatgtttatataatagatgtttacacaaataataagtcatacatctaaataaattgtacttacaacaaacaataaatcaatgaattgaagcctgcatggacttggatgrgcttaacatttcatggccacaaaactgttttaattgctaaatacttttacttgaaaagacatc

SEQ ID NO: 276233 - DNA, 580 bp, Homo sapiens
tgacatgtgtgataggattaaaggggtttcacagaggaattagggcctctgggatatggacagagctgaggagtgagggttagggaggctgtataggttagaggctagggaaacagttaccttaacctaaaatgtatgtcctctaaattttggggggaaatggatgaaattcccaatactctctagaaaagcttccaccaacagagcagtctgaagcagcaaagcaggcactctgaagaagcctaaggaacctgtttaccaacacgtttggcctccgcaacaattgttcttgggcataatggcttctcttccctctgccttcccaatcttgcatcaattgttttcactggcaaattctaatatgcaatcacacaaaaaagaacattctatgcaatggatttccctacacatctacatcacataggagggaatgcatgatgtcaggttaacaacagaccatccakcagtctccaaagagtgactactacttgtcacctcaaacaaatcagactttggcttccccatgcagaccacaccgaagaatattatcaatcttctgttgacaaatgatataaaggag

SEQ ID NO: 276234 - DNA, 515 bp, Homo sapiens
gtaagagtaggttgcagtttgcttacgcatcaaattaggttacagttcactctgtattattatgtattatgtattatgtatattatgtattatgtattaatgattaataactagtactatagatatatcaaaagcaatgcagatggagcactagcttgacccayagttagacacttacacatatttgttgaattgaaaagtatgcaaataattggagaaactgctctctctaaatcccgtaattaacaggtggtggccacttgcaactagtaccatttgaatgtgaaggtgttcattattttatggttgttgagttattttctaattaaaataatttttaaatgatgtggaaaaacttcatctgtacatagggcaagacctagtgtttgctgggctaactcccataagcaggtcactggctaattgtattctgggctctctcttcccttctctcttttgcatttttcctcttttttgtcctgccttcagggtcctcctgctcacccctgaagcta

SEQ ID NO: 276235 - DNA, 628 bp, Homo sapiens
cttatatgaacatcctttctctcacaggaaaaggtgatttaattattgaaagagattttaaaaatggaaattaaactcttctggctttagagcagctcccaattgagatgttttggtaaggtaacagaaaaatatcatgattgctacatccaaccatctccaagtttcttagggacactttgtggtttcctaacacaaygcattaaatgtaaaaactttgtttgcagactattcttttatcttgacttgttttggcttcttttgttttattttatcttgtatcattcatttattattatttttattattttaactttaaaaagtttttgtcttaccttttctcctagtgaatgctccagagggcattggctataagatagcagtgaaaaaattagaagattttattccttgtagctggggccagcaggatttaatgaaagggaattgaagattaacaatattattgttttaaaatattcaaactgcctacaaattgcacatcatctgcaacaatgacttgagaatattgttagggaaagtaataatttatgactccagacaaaaacttgcttaatatcccatggcaatttacaaaaaataacatgttcctaacattttatttgtgagt

SEQ ID NO: 276236 - DNA, 423 bp, Homo sapiens
accaatcatgatacttctttaagagtctgttagtgactggtcaccgtgcatctgttatgtagtacatgcacagatagtacagtgtgtagttgtgttacatccttcttgtccagtgatagtccacaagatatttttacaaaaatggatagtcaaaacagtatattggtcaacaaagatgaaagtgtaacaaaggaacaaaagtgataatgctagaaatgaaactgacatcaaacatgaatggagttctagaagaaatagctgaccaygggaatgctgacacagccatcatttgagacttagatatgcagccagaggaacttggtgaaggtgaatttatggacataaattaggcaagtggatgtgacaaaagaaatataaagatgtctctgaggaagtgacaccagggacttcacatgaagggga

SEQ ID NO: 276237 - DNA, 478 bp, Homo sapiens
agaaaaaaatgctcattccaaaaataaattgtaggagaaaaagaaagaaaacaccattcaaactacttgtgataagtttttttaaaacaaagaaataaaacactaattcacaatgtttctaatgttttaaattacaatgtactaaacaaatatcaattttactatttttcatttctctattctttagaactgagaktaagagggcttttaaagtctcaaccaaaaagtttagaagtcacagaagaatcttctaccttttgatgatgaagatctttttgcatggtttctgcttacatgacaattttttcagttccacagtgctgtgcaaaccaaggactgcctgtatttaaaagtgggaatgtatgacgccttagaagttagacataaaaactgctcttgaaaggagcttgaaaaatacttgaattgttacaagcttatgacggaaacacattttagggtgttgattgtacaattggaa

SEQ ID NO: 276238 - DNA, 514 bp, Homo sapiens
aagctacatactctaagctaaggaccacactggactggagcaaatataacagatctcagcacggattgccttggtaccagagtccctaacaagcccacatgctgccagtcacactgtccacacagaatcttgggggatctggaacactccatcctggctttaagttaccaccactaccaaactaytgcccttttctattaaggcttaaattgccaatatagcaatacagaagaacctatactcacaagcattcacttctgtttaaagggatgtttacaaacaacaggatttcttgtttcttgaacctaacttagcagcaagatgagttctcacccgggggagaaattatatatacaatttattagtagttctattacatatgtaaatgtgcccattatagaatataaagagaaacagaaaggagtaaaattaatcactcataaatacctatattaacaatttaaataggcttcttttcaccttttttctcctgtaacttgtattataggaaaat

SEQ ID NO: 276239 - DNA, 414 bp, Homo sapiens
tgtggtgtgggcttggggtcaaagacatcagtgtaaattcatstttaacttaaaatatatacagatagataaatacagaaatgattttgtatatgtgtgaacacatgggttagtatacatacatatatttcctagctctgccctctgagaggaccttctagaagcaataacatcccaggatgaatgagcacacccaatgcccagatcttggtttctaacaccattctccaatgaaaggaaccagggctccttgagaaatggctgactctaaggctgagacagagaatatacaaatgaccctggaacatcatgtagtgccagaaagtaaggatatgctaaataaacaaaatgatggggacctgccaaaggtatacatgaattaacctgagattattcaaagggggagaagagaca

SEQ ID NO: 276240 - DNA, 575 bp, Homo sapiens
atgtagtgccagaaagtaaggatatgctaaataaacaaaatgatggggacctgccaaaggtatacatgaattaacctgagattattcaaagggggagaagagacaaatctcccatgtagaaaaattccaaataatttacatagatacttacccgtcaaggaaatggagtttaacttcccatcccttgaatatggactgcacttactaacttgctttcaagtgttggggagtagggagactatatttacagtggagaaacttgtcaaacactaccttgacaggtggtcagggttaacatcatcaytgaccagtcatgttgatagcatatacccttgatgctatgtgataagaatgatactttatctctgtggtattatttctaaaatctcataatcccagactgattgtaaaaaggaaacatcagaccaacccaaatttagatagttccacaaaatatccaaccagtactcctcaaaattatcaaagtcatcaaaaaattttttaaaaatctaagaaactcatcacagccaagcaaagtctaaagagacataataactaaatataatgtgttttcc

SEQ ID NO: 276241 - DNA, 641 bp, Homo sapiens
agcacttatgtagacaatctgtggctgtttggcatcaccatcattcctgactctgaatttatagctaccaataaacaatcattttctcatatttattcacatgtaagtacttaacagtaaaaaaaagacatatcattaatatagtaaaaaaatgtgttcaggataactaagcagcatagtagcatcattaggatactygtatcagctgttaaacaacagcaggaactaacaatggcacgtgagttcaggtgtggaattttccacttgtggcatcatgttggtgctcaaaaagttttggattttgaaacattttggatttcagattttctgactacagatgcttagcccataattaacaaaacttggaagtaaccaagatgtccttcaataggtgaatagtcgaacaaactgtggtatatcccaacagtggaatttattcagcacaaagaagaaatatgcggtctagttatgaaaagagacagaagaactttaaacgcatgttgttatgtgaaagaagccaatctgaaaaggtcaacattctgtatgattccaagtatataacattctgaaaaaggcttagtaatacaaactaccagacttatgaaagattgaaccatagaaaggcacaatacctagacaaa

SEQ ID NO: 276242 - DNA, 214 bp, Homo sapiens
tttgttgtgagggcattggttactttaaattactggacagaaggcatatctgaaatggttctgggagtaacccagaagggccaggcaaacaccaaagctctcagatagtaacaaagcaccaggaagccctgtggccatcagctcaaagtcttctgtggctggcggaatatgcccactgtagagtcrgcatggtcccttcagattcagccctatt

SEQ ID NO: 276243 - DNA, 618 bp, Homo sapiens
gttcagacaattaattactaaaattagctcccaaattccatcttggttcccaaaccctccattttatctaaaatgacctaattaaaagaaaattgagatagtattatgctgtcctataatgcactttaaaatactcaacatacatagtgtgatatcatgtttatattacttacagtgagcttcagtcaggcactaatcaagaatgcacaaaccagatgtcttctggcattccacccaggaaatctgttccccaaagcagctaccgtaataacttgaatgattcacatctcggccaataaccaacactttgctattagcttaatgaatatcagcaatggatttttattgattaaaaacagtgacctggtgagtagcatgataaattttagaaccagctcttactgattacattgaaggtatctaggtatgggttagtttaaggcattttggtgacactcaactccttatgaacagggtataaaatccagtgagatctatgytttcaccttcgaggatgacactccactagccggtcctgtgttcagccattggtttaggaggctttctagttgcctgatactgcctataaaaggatggattcctgctgctggagtatgg

SEQ ID NO: 276244 - DNA, 607 bp, Homo sapiens
agaaaacaagggcaagcgcattcttttacaagcacagtttaattatcaaaatcaagaacttactatttatgtgactattatctaatctacggaatttagtcaaatttcactaattattccactaatgtccttgatagcaaaaggaagaaaatgtcttttttttctgatccagaattatatattgcatttagtcgtcatgtctctttatcaccttataattcctcaatctttctttgtctttcatgacctcgacattcaaggtatacaagccctcagtttggggttatctgatgtttcctcataaataggttatgcatttatggaaggattagcacagaagtaaagtgttgtgtccttttcagagcataataataagaagcacatgatatctctgtctcattagtgacatttactttgatcacttaaggtgatttctgccatgtttcctcagtgtaaatcttttttccctttgtaattaataaataccttctggagacctrctttgatgtgatgtaaatgtcctatttttcatcaaattttcaaccattagtttctttcttggttcttggctaaaattattattactacagtggctgccaactggtga

SEQ ID NO: 276245 - DNA, 671 bp, Homo sapiens
agtgttggcaacctaatggattaaaaagtcccaaactggagataccaccaagacactacttgaaagtataatgttgccgtttattacaacaaaaacaaagataaatagatgggacttaaactaaagtttctgcacagcaaaagaaataakcagcagagttaacagacaacccacagagtgggagaaaatcttcacaacctgtacatctgacaaaggactaatatccagaatctacaaagaactcaaacaaattagcaagaaaaaaacaatcccatcaaaaagtgtgctgaggacatgaatagacaattctaaaaagaagatataaaaatggccaacaaacatgtaaaaaatgctcaacatcactaatgatcagggaaatggaaatcaaaatcacaatgcaataccaccttaattctgcaagaatggtcataatcaaaaaaatcaaaaaataatagatgttggcatggatgtggtgaaatgggaacacttttacactgttggtgggaatgtaaactggtacaaccactatggaaaacagtgtggggattccttaaagaactaaaagtagatctactatttgatccagcaattccactactggggatctacccagaggaaaagaagttattatatgaaaaagatattaatacttgcacacacatgtttatagc

SEQ ID NO: 276246 - DNA, 557 bp, Homo sapiens
aagaagtggtaagatgcttgcccctctatgcagaattagagtgaatgttttagttatgaatgcagattgacacaagtttgtggaaytggtgacttgaataccgagaacagcactgccatcggtgacatgattttataaaatgatgaatgactctcagaagagttcccaacagaacaaagatcaacctactactgacttgcatggcaattaaaatcctaaataatttagggtataataaaagcatacaacaatgttttgcatttatatgtaaaatgaagttatgatttaggatcagttcatcataatttatttgggggtaggggtggttcttaacaggaatgcctggtgggacatcggaaagtcatgagaacatgaggcacttctttattatttgcaactatcgcatacattgcaggatattaagcctcctagcttctgcccactaaatctctacagcgctcccaatgagcatggcactcaaaagcacatctacaaatttccaaaattccctcaccagcaaaaaccattgattcaatcattccgcaaagatgaaatgg

SEQ ID NO: 276247 - DNA, 557 bp, Homo sapiens
aagaagtggtaagatgcttgcccctctatgcagaattagagtgaatgttttagttatgaatgcagattgacacaagtttgtggaattggtgacttgaataccgagaacagcactgccatcggtgacatgattttataaaatgatgaatgactctcagargagttcccaacagaacaaagatcaacctactactgacttgcatggcaattaaaatcctaaataatttagggtataataaaagcatacaacaatgttttgcatttatatgtaaaatgaagttatgatttaggatcagttcatcataatttatttgggggtaggggtggttcttaacaggaatgcctggtgggacatcggaaagtcatgagaacatgaggcacttctttattatttgcaactatcgcatacattgcaggatattaagcctcctagcttctgcccactaaatctctacagcgctcccaatgagcatggcactcaaaagcacatctacaaatttccaaaattccctcaccagcaaaaaccattgattcaatcattccgcaaagatgaaatgg

SEQ ID NO: 276248 - DNA, 557 bp, Homo sapiens
aagaagtggtaagatgcttgcccctctatgcagaattagagtgaatgttttagttatgaatgcagattgacacaagtttgtggaattggtgacttgaataccgagaacagcactgccatcggtgacatgattttataaaatgatgaatgactctcagaagagttcccaacagaacaaagatcaacctactactgacttgcatggcaattaaaatcctaaataatttagggtataataaaagcatacaacaatgttttgcatttatatgtaaaatgaagttatgatttaggatcagttcatcataatttatttgggggtaggggtggttcttaacaggaatgcctggtgggacatcggaaagtcatgagaacatgaggcacttctttattatttgcaactatcgcatacattgcaggayattaagcctcctagcttctgcccactaaatctctacagcgctcccaatgagcatggcactcaaaagcacatctacaaatttccaaaattccctcaccagcaaaaaccattgattcaatcattccgcaaagatgaaatgg

SEQ ID NO: 276249 - DNA, 557 bp, Homo sapiens
aagaagtggtaagatgcttgcccctctatgcagaattagagtgaatgttttagttatgaatgcagattgacacaagtttgtggaattggtgacttgaataccgagaacagcactgccatcggtgacatgattttataaaatgatgaatgactctcagaagagttcccaacagaacaaagatcaacctactactgacttgcatggcaattaaaatcctaaataatttagggtataataaaagcatacaacaatgttttgcatttatatgtaaaatgaagttatgatttaggatcagttcatcataatttatttgggggtaggggtggttcttaacaggaatgcctggtgggacatcggaaagtcatgagaacatgaggcacttctttattatttgcaactatcgcatacattgcaggatattaagcctcctagcttctgcccactaaatctctacagcgctcccaatgagcatggcactcaaaagcacatctacaaatttccaaaattccctcaccarcaaaaaccattgattcaatcattccgcaaagatgaaatgg

SEQ ID NO: 276250 - DNA, 1251 bp, Homo sapiens
aaatattgctcaaatatttttattgctcaaatatttttattactcaaagctgaatggcttcaaacaacagcatttattatttcatagtttcttcaggtcacgaatctgggcttagcttaactggcccttaccttcagggtctcttacaggttgtagtcaggtattgattaggtttagtcatctacaggcctgagtggggaaggtccactttcaagtccaagctgtttctttgcaggattcagttcctcatgagctgttagatggagggtcttagttcctctactggtgttggccaaaggccaaactcatttccatgtgggcttctccagcatggcagtttacttcatcaatgcagcaaaatgagaaggagggaggaatgaagggaaggagagagattgccagcaggagaaaagtcatagtcttttataacctatgcttggaaatgamctaccatcacttttgccttatgctatatgttaggagaaagtcactaggtccactccatgtgtacaaagggaagagattattcaagggagtgaatgccaggaggtggggatcactgagcgctactagagaaggctgcctgccccactcatccaaatgcccaaaagtagagttgcttagcwaaatattgctcaaatatttttattgctcaaatatttttattactcaaagctgaatggcttcaaacaacagcatttattatttcatagtttcttcaggtcacgaatctgggcttagcttaactggcccttaccttcagggtctcttacaggttgtagtcaggtattgattaggtttagtcatctacaggcctgagtggggaaggtccactttcaagtccaagctgtttctttgcaggattcagttcctcatgagctgttagatggagggtcttagttcctctactggtgttggccaaaggccaaactcatttccatgtgggcttctccagcatggcagtttacttcatcaatgcagcaaaatgagaaggagggaggaatgaagggaaggagagagattgccagcaggagaaaagtcatagtcttttataacctatgcttggaaatgacctaccatcacttttgccttatgctawatgttaggagaaagtcactaggtccactccatgtgtacaaagggaagagattattcaagggagtgaatgccaggaggtggggatcactgagcgctactagagaaggctgcctgccccactcatccaaatgcccaaaagtagagttgcttagc

SEQ ID NO: 276251 - DNA, 625 bp, Homo sapiens
aaatattgctcaaatatttttattgctcaaatatttttattactcaaagctgaatggcttcaaacaacagcatttattatttcatagtttcttcaggtcacgaatctgggcttagcttaactggcccttaccttcagggtctcttacaggttgtagtcaggtattgattaggtttagtcatctacaggcctgagtggggaaggtccactttcaagtccaagctgtttctttgcaggattcagttcctcatgagctgttagatggagggtcttagttcctctactggtgttggccaaaggccaaactcatttccatgtgggcttctccagcatggcagtttacttcatcaatgcagcaaaatgagaaggagggaggaatgaagggaaggagagagattgccagcaggagaaaagtcatagtcttttataacctatgcttggaaatgacctaccatcacttttgccttatgctatatgttaggagaaagtcactaggtccactccatrtgtacaaagggaagagattattcaagggagtgaatgccaggaggtggggatcactgagcgctactagagaaggctgcctgccccactcatccaaatgcccaaaagtagagttgcttagc

SEQ ID NO: 276252 - DNA, 480 bp, Homo sapiens
aattaccccacaagacattctcaggtgtctttttaccaacacttttctcctgagctggttctattttctggagatgaggtttcagaataggctctattgcttctcagattatcaatttaagacagaaaataatagaagtagatactagctagcagaaaagatttgtgaagtaacaaagctaggcatggcctgtccgttatggtstacactgggttagtgaattctggagaaaattctcttcatatcatttctccttcctgtcccaatacaccctgtgcagcacagtgctaggcatataaataaaatttataggttaggagtatcatcttgaccacaggccagcaaattatgaccacaggccaaatccattgtgtatgcagcctacttgagtgaacaagattttcttgaaacccagctatgcccattcacttatgtgttatatatgggtgttttctcaccacagggtcagagttgcagaga

SEQ ID NO: 276253 - DNA, 480 bp, Homo sapiens
aattaccccacaagacattctcaggtgtctttttaccaacacttttctcctgagctggttctattttctggagatgaggtttcagaataggctctattgcttctcagattatcaatttaagacagaaaataatagaagtagatactagctagcagaaaagatttgtgaagtaacaaagctaggcatggcctgtccgttatggtctacactgggttagtgaattctggagaaaattctcttcatatcatttctccttcctgtcccaatacaccctgtgcagcacagtgctaggcatataaataaaatttataggttaggagtatcatcttgaccacaggccagcaaattatgaccacaggccaaatccattgtgtatgcagcctacttgagtgaacaagattttcttgaaacccagctatgcccattcacttatgtgttatatatggstgttttctcaccacagggtcagagttgcagaga

SEQ ID NO: 276254 - DNA, 1167 bp, Homo sapiens
tctgtgcctcagtttcctcattgtgataaaataaagttaacagtacctatctgataaagttgtaaagattaattaataaagttacagctctcagagtcatgcctgggacatagtaagctgttaacaaatattaacttttattcatcagatcaattgatattattgatgytgaaaatatggtcttgttaccaaggaccaagatagacatgttcaaggcacttgactatattattttatttgagagtgacaaaaacataaagtagacagaatcctaaaagtgaactgacaacagggtgagtgctgagcaggggaaaggaataagccttcatgattataagccttcatgattagtatagatttgagccatttctacaaagacgcaggaaagaatgtttttagaatatatatattactgcagtcattaattttaaaagcaccattagaagaaatagttcccagaatatagtatgttttgcaatatattgcaaaagcattatagtcctgtggaaatttattaataaagatcaataacaccaaaaaatacatagaacattttcttgtagaatgaaaactccagcatcaagggatggagcagctgcctggttcaactcwctcttttagtctatagttttgctcctccattgcaatttatttgttgaagaaatcagatcatctcttgtttcccttggctgagattttgctgatttcattcccacactgtagagtcccatctttctctggcctatgtattttttacaaattggtagttggatctagagacttaatgacatccagatttgattgtttaaggatggcttctwaggtggtgatgtgttctcatcaagaggtgcgtgctatctaattgtctttcttggaagcagccattgattctcaatccttccttcattaggaggaagcggtgatattgcaattttattcttcattactttattagaatttatttctatacagagaaacttcctctcatctacaatttggttacctgttggtacagtttgtagcagaacaggataaatgtttaagtatttaattttaccagtgttcaaaataaaccatcaattccctagcatcctttcaaaaaggtggccattttattatttttgtatcattaggagcttgggattataagcatatatgactcgtttc

SEQ ID NO: 276255 - DNA, 555 bp, Homo sapiens
ctcttttagtctatagttttgctcctccattgcaatttatttgttgaagaaatcagatcatctcttgtttcccttggctgagattttgctgatttcattcccacactgtagagtcccatctttctctggcctatgtattttttacaaattggtagttggatctagagacttaatgacatccagatttgattgtttaaggatggcttcttaggtggtgatgtgttctcatcaagaggtgcgtgctatctaattgtctttcttggaagcagccattgattctcaatccttccttcattaggaggaagyggtgatattgcaattttattcttcattactttattagaatttatttctatacagagaaacttcctctcatctacaatttggttacctgttggtacagtttgtagcagaacaggataaatgtttaagtatttaattttaccagtgttcaaaataaaccatcaattccctagcatcctttcaaaaaggtggccattttattatttttgtatcattaggagcttgggattataagcatatatgactcgtttc

SEQ ID NO: 276256 - DNA, 542 bp, Homo sapiens
tgtgtctgtgaaggtgggggaagactgcatgagagaactaagtagacattcatctgatgctcatgcctagtaaagaaatgtgtgagtgttaccctaaagccaaatccaaatttaaactggtcagtaagcctgatgtttggccaatattgggagcagcccctagtttagacacagaaaggaatacaagaatgctaatattttttgagaatgtcgtaggtgtcaggtactgtgctggattatccctaaaaagtccaaactgtcagagaaggaaaaaccagttggctgctaaggtagtgcctcaataatattctcaatccaaacacaagaacaccaagcatgatagcaacatgtaagttgtccaaggtaatggcagagtcaaagacagttttatatccgtccaaatatcatcacactgkcttcttctttatcctatttcattttcttttatctccccctttggacccagttttttgtgatacagtctctgaccgaccaagtcatccagcaccctccctctccttccttctcactggaacacccac

SEQ ID NO: 276257 - DNA, 516 bp, Homo sapiens
atcttacaagccaggagataayagaatgatacattttaaatactgaaagaaaaaattgccagccaaggatccagcaaaattatcctttataaaaggaggacaaataaagtatttctcaaacaagcaaaagctgaaggaattcatcaccactagtattgtcctgtaaaaaatgctttaagggagtcctacacctggaaacaaaaagatactatctaccatcatgaaaactcacaaaagtataaaaaacactggtagagcaaacacaccataaggaaaggaaagggtccaatggttacaactacagaaaacaaaacacaatgataaacaggagagaaagaaacaaagaatattcaaaataacaataactcaattaataaaataataggagtaagccctcccatatcaataataatcttgaatgtaaacagattaaacttttcacttaaaggatagagtggctaaatgaattttaaaaacatgatccacctatatgctgcttacaagaaactcacctca

SEQ ID NO: 276258 - DNA, 487 bp, Homo sapiens
agttctgactgggcggagcccactgcagctccacaaagctgctgtagccagaccgcctgtctagattcctcctctctgggcagggcatctctgaaagaaaggyagcagccctagtcaggggcttatagatgaaactcccctctccctgggacagagcacctgagggaaggggcagctgtgggtgcagctccagcagacttaaacgtttctgcttgctggctgtaaagagagcagtggatctcccagcacagggcttgagctctgctaagggacagactgcgtcctcaagtgggtctccaaaccctgtgcctcctgatggggagacacttcccagcagggttcaacagacacctcttagaagagagctctagtgggcatctggcaggcacccctttgggaccaaacttccagagggaggagcacacagcaatatttgctcttctgcagcctccactggtgatacccaggcaaacaggatctggagtgg

SEQ ID NO: 276259 - DNA, 460 bp, Homo sapiens
  misc_feature (1)...(460): n = A,T,C or G
gtgttttacagattaaggtgatacctaaactagtgctttcggggtgcccttaccactagattaaactctgactyccttcatctctccattaattcaaaaattatttataagatgcttactacatgtttaggtgctctataacacaggaataaaatactctgatagtacaaagggacaaacaaaggatttcaatgtggaaagttaattaaagaagacttcaagaagaggtgacttgtgagctaggccttctgagaggagaggcattttagtaagttaatatgataaaggtgattcctggggctgcaaataatctctatgaaaagggtaatatctgagtatcttctctctggattccattttggaggaatataaatgctttcaaggtgtgatacacatcagtaggtcagaatgactttggccatatttccaacaccaataaatggaacnnnnnnnnnnnnnn

SEQ ID NO: 276260 - DNA, 578 bp, Homo sapiens
gtgatgttagcaaggttgcaggacgtaaggtcaacacataaaaaaaaatcacttgttttactatacagatgctccttgacttatgatggggttatgttctgataaacctataatatgttcaaaatatcatcaagttaaaaatgcatttaatggctgggtgctgtggctcgcacctgtaatcctagcacttttgggggctgaggtgattggatcatgaggctaggagctcaagaccagcctggccagcatggtgaaaccctgtctaaattagccaggtatggtggcacgtgcctgtagttccagctacttgggaggctgaagcagcaaaatctctggaacccagaagacagaggttgcagtaagctgagattgcaccactgcactccagcctgggcaacacagcaagactctgtctcaaaaaaaaaaaaaaaaaaaagaaaaagaaaaaaggcatttaatacacctagcatacccagcgtcatagcttagtctagcctgccttaaatgtgctcagaacacctacattagcttacaaytggacacaatcatctaacataaaactatttttataataaagt

SEQ ID NO: 276261 - DNA, 586 bp, Homo sapiens
acttagacataaatataaaaaatatatggactggatgtgtatgctgaaaatgacaaaacgttggccaaagaaataaaaaaaccctaaataaatcataagttttcttttattaggcttatttgggttttcttttattaatayataatacatagagatatactagattcatggattagaagtattaatattgccaagatgccaattctttttaaatgaatctatagattcaatgcaatgactttcagaattaggttgtaaatgccaacaagctgagtctaacacttacgtggaaagtcaaaggaactgaagttgttaaacaattttgaagaacaaaattggagcaaacatcctatctgatttcaagactcataagctataacaataaacacagtataaaattggtaaaaggataaacacatagatcaataaaacagaagagagattccagaaacaatggtcaattaaccttttacaaaagtgcaaaggctgttttgtaaaaaatttagttttttcaacaaatacccctcagaaaatttgatatctatatgcaaataaagaatctcaaacaatacctcatagatctaaa

SEQ ID NO: 276262 - DNA, 460 bp, Homo sapiens
  misc_feature (1)...(460): n = A,T,C or G
gtgttttacagattaaggtgatacctaaactagtgctttcggggtgcccttaccactagattaaactctgactcccttcatctctccattaattcaaaaattatttataagatgcttactacatrtttaggtgctctataacacaggaataaaatactctgatagtacaaagggacaaacaaaggatttcaatgtggaaagttaattaaagaagacttcaagaagaggtgacttgtgagctaggccttctgagaggagaggcattttagtaagttaatatgataaaggtgattcctggggctgcaaataatctctatgaaaagggtaatatctgagtatcttctctctggattccattttggaggaatataaatgctttcaaggtgtgatacacatcagtaggtcagaatgactttggccatatttccaacaccaataaatggaacnnnnnnnnnnnnnn

SEQ ID NO: 276263 - DNA, 634 bp, Homo sapiens
aaatattcaaaattgtatatgtaattaatcagtaagatgattatttagctacacaatttagatgaaaacatttgtattttaatattacactattcacaatagccaagatacggaagcagcctaggtgcccattaactgatgaatggataaagaaaccatggtatgtatatatatatgaatattcaggctttaaaaaaggaagagatctttccatttgggacaatacagataaatctggagaacattatgctaagtgaaataagccagacatagaaaaatacttcacagtctcatttatgtggaatcctaacaccattcaatacatagaaacaaagagtagaatggtggttaccagggtaggaaggagagagaaggtcagagaaggcagacttgtagttgtgtagcatgaataagcctagagaactaatgtactgcaggagtatagttaataatactgtatactgaaaatttgctaaaagaatagacttyaggtgcttttaccatatgcacatacacaaaaaggtatctatggaaggtgatggatagcataatttgcttgacagtagtaatcaagtagtatatatatacagtagtgtgtatatatatatatacacacacatagtgatatatatat

SEQ ID NO: 276264 - DNA, 532 bp, Homo sapiens
tttttgaatgtttactacctgctggctaccatgctaaatatattcatgtatgaactcatttcaacctcatgtcgacttcaagaggtaggtacaattaaaatcaacatgttacagatgatgaaacagaagcacagagataatttgcccgagttcccagaaagctaggaaatagtgaagttactttccacctttcatttcccatggacatagatagcttaattttcctctaagtaggaacttccagcaaaaccctagttaccagcttctttgggggraaaaaaagcctttttggcagactccaggctgccttgccctttgaattttctactgtgggtttgagaggatctttccttgtttctggaatacttcatgatgtatgtgtcttcttaccctcttctaagtttcttctttcaaggctcatctcaagttttgcctcttttggtggatgtccctagggctcattctattatgtaagattaggcatccttgaacatactttgcttagacagttgattcaactagatcctaagtc

SEQ ID NO: 276265 - DNA, 578 bp, Homo sapiens
ttagaggatggataatactcaaataaatgaacrtttattaatgagactttgaaagtttatgtatggctatactactaaattatttccccatttaaatgctttacatgttctcctgtattttcctgtggactgttccctggccacataggtgacaaaatatcagtacaagaagagaatatagcagagatcataatagatgaggttgtcagaggcagaaacagagtctccctgtctactcttgcagaaagtaaatgtgaaattctggcaatttggttgggttatttggtctccagcaaggcccctctcaggaagtgaactcacagtggcctttcagttgacagccagaagatggggtgaatgctgttagcagttaccctagggcagaaaatttaagaggtgactgcacaatggaactggggaagccaagagaaggtaatgaggtgccaaacctggcctgatatgcacaaggcaggagacagaagccaataaaatacatgccaacatgccgggccacagaggtctctcacacagtggattgcttctgcaaagcttttcagttcataatcagtgccctgcaa

SEQ ID NO: 276266 - DNA, 578 bp, Homo sapiens
ttagaggatggataatactcaaataaatgaacatttattaatgagactttgaaagtttatgtatggctatactactaaattatttccccatttaaatgctttacatgttctcctgtattttcctgtggactgttccctggccacataggtgacaaaatatcagtacaagaagagaatatagcagagatcataatagatgaggttgtcagaggcagaaacagagtctccctgtcyactcttgcagaaagtaaatgtgaaattctggcaatttggttgggttatttggtctccagcaaggcccctctcaggaagtgaactcacagtggcctttcagttgacagccagaagatggggtgaatgctgttagcagttaccctagggcagaaaatttaagaggtgactgcacaatggaactggggaagccaagagaaggtaatgaggtgccaaacctggcctgatatgcacaaggcaggagacagaagccaataaaatacatgccaacatgccgggccacagaggtctctcacacagtggattgcttctgcaaagcttttcagttcataatcagtgccctgcaa

SEQ ID NO: 276267 - DNA, 594 bp, Homo sapiens
aacctggacttttcctactagaatatgctgcttctcagtgagtacccaaggtttataaacttaattcttaacgaatgacaacataatcaacatatggtgttttttggtttatctcagtcctctttggttttttgattatgctgatccttttggcaagttctgacttgttcatggaattcttacagatgtggagctctttcctgggaaacaggctgcattttcctcggtgaatccttcggtgaacatcccctccttacctcctccgaagttattgtctctgtgatacttgggctgaagctaagaaggcttattcaaagtaacaaagcccttagaacaaatgagaagggygcagacaaccgatgagccatgagtagccactcccagttacgacacatgtgaaattgagctccagcattcttggcttgaatttcaaaaatgcaactaggttgtgaccctgtgaggctggctagggtaggtgagcagaaccagttcttcattttggtggcagagaacaggcagaagacaaacacctaccacctttttagccagaactcctaaacctgagacattttcattttatcccaccaaagccaa

SEQ ID NO: 276268 - DNA, 574 bp, Homo sapiens
cccgacattaggttggtggaaaattgtctgagcagkcactgggtctatgttcacatatgtgactgattaaggctattcctggaagcagagaatttcctttgtttcaggcttttaaaaaaaaaaattagccagtgctcttttttctttaagtctgatttgagtttgtgctcatctggggttctttccttcaccacctcaggcaaggcaaacaggagctgagtggaagacaggaaggaagtagggactgggttagaaggtcttggatctaccagccaagagattctctgggtatcagtttcagaatctgtaaaaggggtcaagtgaagagaagtaggctttatgtcaagtttctcaaactgcattttccagaaaataagtgttttacaagaacatactaaatgaaaaaaaaaaagattaaaataataattgtcggtatagttgatattgttatgcaataatctgcctttgataaacaaaacgccagacaggaggtagcatgattggtcaaccacttgaatcacacatgcacatttagtggtagggtcttggtaatctttacaaatcttaatattta

SEQ ID NO: 276269 - DNA, 562 bp, Homo sapiens
atctaaattggcattcccttgtggcaagagaaaggcagtaacagcaccaatctgaaattgaacaataaaaaactgagatttgacctgccattatggacatgccatggggatgtgtcaaatgtcttctacaaataataaataaaatatagatgggatttggcttgccttagacacacatctgcaaatgtagtggataatgtgaaatgccacttaatgcattgatgacttgatatgtgatttcttgaagaccctagcttggagacaggacccttattagagttggccttgagacacaggagttaaacactttgaaatggtgagaagtgttagttttacactgtgcttccttcaagagtgatccaagcaacaaaacagacaagatttttggagaaaacrtatccatttcctctggctgcaatttactcacaatgtggctgatgtggctaacataaaaaacagaaataagtgaaaaagagagattttttcaatgtcttgtgatagagtacaacaaattcttttgtacttctttggctgatttagaacttggtgtggggaaatcttt

SEQ ID NO: 276270 - DNA, 550 bp, Homo sapiens
gttttcttccttacttcaaggacgtaagctttagtcctaacattcttttcctgggattactataatgtagtctccctgccctaaccccaaaacctcttgtctattccagcaagcttgttgtgagaagcatattattttgatgtgataacaaatatgttaatgttaatagaaactcttaccaagygtttactatttacctagtgtttactatataccaggcactgtttctctgttgtattacttcatttaatcctcacaataccattctgaagtaaattctattattcttattttacaggaaaaaaaaataacattgaaaggacaaataattgccagaggggcagaattatttgagctggacacactggctctagaatcacgctcttaacaactactctattctggccttgaagtactcttgtttcgtgccacatgaatctttttttgtgccacatgaatacattcagaggttgccattcagtgggcagagtttgggagcttctacttaatattggttatcagggccaaggtgaggctatgaagtttacag

SEQ ID NO: 276271 - DNA, 550 bp, Homo sapiens
gttttcttccttacttcaaggacgtaagctttagtcctaacattcttttcctgggattactataatgtagtctccctgccctaaccccaaaacctcttgtctattccagcaagcttgttgtgagaagcatattattttgatgtgataacaaatatgttaatgttaatagaaactcttaccaagcgtttactatttacctastgtttactatataccaggcactgtttctctgttgtattacttcatttaatcctcacaataccattctgaagtaaattctattattcttattttacaggaaaaaaaaataacattgaaaggacaaataattgccagaggggcagaattatttgagctggacacactggctctagaatcacgctcttaacaactactctattctggccttgaagtactcttgtttcgtgccacatgaatctttttttgtgccacatgaatacattcagaggttgccattcagtgggcagagtttgggagcttctacttaatattggttatcagggccaaggtgaggctatgaagtttacag

SEQ ID NO: 276272 - DNA, 550 bp, Homo sapiens
gttttcttccttacttcaaggacgtaagctttagtcctaacattcttttcctgggattactataatgtagtctccctgccctaaccccaaaacctcttgtctattccagcaagcttgttgtgagaagcatattattttgatgtgataacaaatatgttaatgttaatagaaactcttaccaagcgtttactatttacctagtgtttactatataccaggcactgtttctctgttgtattacttcatttaatcctcacaataccattctgaagtaaattctattattcttattttacaggaaaaaaaaataacattgaaaggacaaataattgccagaggggcagaattatttgagctggacacrctggctctagaatcacgctcttaacaactactctattctggccttgaagtactcttgtttcgtgccacatgaatctttttttgtgccacatgaatacattcagaggttgccattcagtgggcagagtttgggagcttctacttaatattggttatcagggccaaggtgaggctatgaagtttacag

SEQ ID NO: 276273 - DNA, 643 bp, Homo sapiens
tttttttttttccattttccagataaagacctaagattttgagaagttaaaggactcattcaggattatacagctaataagcagcacgtcaggactgaaacttcagaccttctaactcctctggtcaagtatagaggaaaagtaaagcctgggagttaaaagtgggtttgtaaaatgcggttaattgaaaagaagaggtatagtaatgtaatttagtgagtgagagctcactctggagcagacattgcaaatagaagcctgagataataatgcagcagcagatgagcttgtacaattatggcccaaacaatagttacaaagtttttttcaatttttaacaacatttaaaaattgggacatttcacaataaaaatctagatttctaacctctgttttacaatctgcrtagatggccccactggggaacattcccacgcagccacagccaggaggaacttgggagcagctgtccctcgcggatagacatgagctctctggttctcctcaatctcaccattccctgttgccgccagtcctggtgaccaatgatctgtacttttcatcacactacactgctgcttttctccacccatctgtatcacaccctggattctcgaggcatttgaatttgtgtcttcaagtc

SEQ ID NO: 276274 - DNA, 603 bp, Homo sapiens
cagacccattcgttatcaaatcccattcattcctgctaaagttacattcagtatcagaygacattcttcggcaccacatggaaattctgaggatctgattatctattaactactattgatgctgatgtggctggtttggctacagaagaccaaacagcactctcacaaatggtgatacaagtcgaaaaattgccaggcaaaaaatcaagcacacagagaaaaagcagactcaccaataaacaaatgaactaaggcctcctgtgttggcaaaggtcacccaatacattgaaattcaatggagggggttttaagttaaggaaaacaggcaaacaccagggaagctatcatgtaaaaaggctgggaaccaatgccccctttcctatagaaaggagccagcatggggtatgctttgcagatgggctggggtagcagacaggctgcagagcacatctggcacacaggtgtatggccttgtgttcctaagccagccatcaacagtcatgtggaaagagtcctattgctgttttgggtgaaaatcaagaggaattgtagctgagagatcataaagctttttgaaaaaaagtgtgtgggtcccagccaaaa

SEQ ID NO: 276275 - DNA, 435 bp, Homo sapiens
ttttcactggcttaactgttcaaaggaaaggtggaatgctgccagccaggattggggctctgggagtcagtgctgggcttattctcccttgggaatcctgtcccttcctgaaaccagctccagaggtactcctctgtttgtcagatgaactagtctccattgagcatttgctctgtttcatcatgctatgcgtatcaggttagatgtttaacaatttttttttttttttgagacagagccttgctctgtcatccaggctggagtgcagtgatgcgatctcggctcactgcaamctgtgcctcccaggttcaagcgattcttctgcctcagcctccgagtagctggtattacaggtgcccaccaccatgcccagctaatttttgtatttttagtagagacagggtttcaccatatcggtcatgttggtctcaaact

SEQ ID NO: 276276 - DNA, 640 bp, Homo sapiens
tcatcatgaattgaagtcttttcaaatagyattcagtgacatgaacacacagtggtccttggttggttctctccttaaccctgccgtgttttccattaggccctgtaccctaaaggaaggagctctgcctctttgcttctgaggaggcaggatagcctagtggttaaagatggggggatgcaatattcaagggcataaattctattatgcaagaaaggtaacttcctttttcttcctgtaacaactcaatttctgtttcaagactttattttgcccaaagacagaaatcttcatttcgaagtcttttttcttagaagttttataaattctacttgctcttctccccaccctatggtattctccatttccactcaggactcatctaagttctggaaagcttacatagcctcatggcatgaggatgaggtggaggtagggagaacatctggcataagtacagtctcttctttatcctgatatcttctctttcgtttgttcattggtttctgttcattttctcccttggcctctgtttagtctctgtttaattctctgccacggtgctactcagaatagggaggctcagggcccaccacactcacgtgccttgagctggctttaaaggttgaaattcagtagt

SEQ ID NO: 276277 - DNA, 614 bp, Homo sapiens
ggggcatttccacataaatcatgcacacacttttcatagtatttttaaaaatgcctttaccaagtgtacataaaccttctacaagaagttgtaacataatgtaggggtgagagaagggcgagataagcataattgaagtatccccagccaggcagaaaatggaattactgggtagatgggaccatgacattagaaaggtcacactgggtcacataaattcagatgtcckagttacctgctttggacagtggcaattttacatgagtcatacttcaaaggttacagatatatagcagatgcctctaacctaacaaacagtgtgggtatatcacacgttaatttattcaaaccttttcatatcttatttagagattatttttgtctgtataagttttattcagacatacttgtttttatcctttaactactgtcttgatttcttaagagtttttttattttattttagctagagtttggtcattaagtatgtgttcactctatccttatacatcgtgaataccaaatgtcatcatcaatttcatgttcctcgtttgtagagatttggaagtccctacaaaacaaattatttcaatttttgaattttcctcagctgt

SEQ ID NO: 276278 - DNA, 561 bp, Homo sapiens
tcatgaacgttaatggaaataaaaccactgacaaacccaatagcactagacgacacgcaactcaagggcaggggcatgtctttatttttgttcctctcaacacagttcctggtacacacaaggaactcaaaatctgcttgctggttgattaactaatttgagttcaaccaaataatgtgacacccaaagtgattctgggcaatcatggtaacctgtcctctgggggtctctctctcggccacagatgatgcagcagcaggagttactgagtggtcagctcttaaatattgttcttatctgacaggtagagtagaaagaaccctgctgtaggagtcaggagttctgacttctagtctggattggccagtttataaactttatgctcctaygatcaactcctcctccttcctggggctcaatccttcacttaagaaatgaatggattatactaaagatcttccaaggtcccttctgaatgtatcattctgtgatgttacgagtccagggtcttattatgacccaaaacttagataaaaaggaaagactctgccccaaagaccc

SEQ ID NO: 276279 - DNA, 341 bp, Homo sapiens
atattctcagtctttattccataattactactataactcctttcagtcacagccatgggggaggcagggcctttgtgctctgtacttttccttggactggamtgttccttctcttcttagcttgactgccctgtgtttcttccaaagaatagcctaaaacgcttttcccatgaaaggcctttaacgttgctcatcctgtaatccagcatcatgactccattcactgtgagctcccagcagtttctttatatccccatggcaatatttataccctaataactatttggtagtggtttatgtgttttctcctccatgtaaatttgtgaacttaaaagcagaga

SEQ ID NO: 276280 - DNA, 546 bp, Homo sapiens
gtggtattcctggcccttgatgacctggacaaattcatattctcagtctttattccataattactactataactcctttcagtcacagccatgggggaggcagggcctttgtgctctgtacttttccttggactggaatgttccttctcttcttagcttgactgccctgtgtttcttccaaagaatagcctaaaacgcttttcccatgaaaggcctttaacgttgctcatcctgtaatccagcatcatgactccattcactgtgarctcccagcagtttctttatatccccatggcaatatttataccctaataactatttggtagtggtttatgtgttttctcctccatgtaaatttgtgaacttaaaagcagagactgtatagctcatcttgtaatcctgcactgcttagcattgtgcctggagcctaataagaaatccataaatatcagttgaattggactggtttttctaatatcagagagtgtgtgtcatctgtgacatgaccgatacggtgagatgtgtgtgaagagcattagacctgga

SEQ ID NO: 276281 - DNA, 563 bp, Homo sapiens
tttgttctattattgcttaggattgctttggctatttgggctcttttttggttccatgtgaattttagaatagttttttctcattctgtgaaaaatgacattgatagctggataggaataatgttgaatctgtagattgttttggacattatggccattttaacaatatcrattcttccaatctgtgagcatggactgttttttcatttgtttgtgtcatctttgatttctttcagcagtgttttatagttctccttgtagatatctttcacctccttggtgagctgtattcctacatattttattttattttattgcagctattgtaaatgggattgcattcttgacttggctctcagcttgaaagctattggtgtatagaaatgctactgatttttgtacatggattccgaaactttactgaagtcctttatcagttcaagaaatcatttggtagagtctttagggttttctacatatggaatcacatcatcagcaaagaaagatagtttgacttctttttttcctatttggatgccttttatttctttttcttgcctgat

SEQ ID NO: 276282 - DNA, 563 bp, Homo sapiens
tttgttctattattgcttaggattgctttggctatttgggctcttttttggttccatgtgaattttagaatagttttttctcattctgtgaaaaatgacattgatagctggataggaataatgttgaatctgtagattgttttggacattatggccattttaacaatatcgattcttccaatctgtgagcatgractgttttttcatttgtttgtgtcatctttgatttctttcagcagtgttttatagttctccttgtagatatctttcacctccttggtgagctgtattcctacatattttattttattttattgcagctattgtaaatgggattgcattcttgacttggctctcagcttgaaagctattggtgtatagaaatgctactgatttttgtacatggattccgaaactttactgaagtcctttatcagttcaagaaatcatttggtagagtctttagggttttctacatatggaatcacatcatcagcaaagaaagatagtttgacttctttttttcctatttggatgccttttatttctttttcttgcctgat

SEQ ID NO: 276283 - DNA, 513 bp, Homo sapiens
cttaaaacagctaaaagaacaaattttgtaagcattccattagactggctaaacatctccccccacccagtttacaatgtatacaatctcttatattcatgtggcttagtgatttgtacaggatgacctaaagccaccaggattcctggagatatkcttagatgtttactaggttgctttggagagtgagaagaaatctgggcttgttgagctttacctaccctacctactgctttctctgggcaaattcacttacatatgttttatttagcatggatctgttaatactttcatttggaatgaaatgtttctgccggtttctttctgttcttgtgcaaatgtgaaaactattgctttagcgaaagcaaacaccgttacttcctgaatcacagctccctccaaaccactcctctccagataaacatttatgttttatgccccaataactacacttccttttattttccctgctctgagccttgaagtgttcacctgaaagcattttaaaatagt

SEQ ID NO: 276284 - DNA, 513 bp, Homo sapiens
cttaaaacagctaaaagaacaaattttgtaagcattccattagactggctaaacatctccccccacccagtttacaatgtatacaatctcttatattcatgtggcttagtgatttgtacaggatgacctaaagccaccaggattcctggagatatgcttagatgtttactaggttgctttggagagtgagaagaaatctgggcttgttgagctttacctaccctacctactgctttctctgggcaaattcacttacatatgttttatttagcatggatctgttaatactttcatttggaatgaaatgtttctgccggtttctttctgttcttgtgcaaatgtgaaaactattgctttagcgaaagcaaacaccgttacttcctgaatcacagctccctccaaaccactcctctccagataaacatttatgttttatgccccartaactacacttccttttattttccctgctctgagccttgaagtgttcacctgaaagcattttaaaatagt

SEQ ID NO: 276285 - DNA, 587 bp, Homo sapiens
aacattcaatcttagaggtcatttagcagctcatgactgagttgattttgtgcagtaaggcatagatctataatgaaaaacaaatcttcatttacttctgttgccccatttaatgattatgaagagtaaactcttataaagtaaagtaatactctacttgaaaggaatattcctgttacactataaaatatattaccagatattaatttgatggtagaacaaaggaaggatctgctataaaatatatcaagtaaggttttacatgtcattatacacaaytgcagagttttttgagaggctctaatgaaagggtacttctcatgctttggaagctcaagtcttcctcctcaaagagagtcaatgacattattttacagaggattttgtagaaatgaaaggtaattaatgccatataaaagcaaaacattacatctgtaattgctacatagcatgtgcatgacaagttgctggtgcccataagggacagcacttgaaggtcaaaggaaagagcatacccttccacctctcagtttgatttgagtattaaatgagctagcacacagcttggcacatgttaggctttcagt

SEQ ID NO: 276286 - DNA, 365 bp, Homo sapiens
cagggaccctagagtcatccctgcgtctcaggaaggaagaaagtaaaatgccaagggaaaacaaaacgacattgcttrttctttaagtaaagaacttgacacctttaaagccaccttttcaggagcccactcagtggcttctgtttctttttcatacaattatatttcattgactttgattgcattcgacaggatatagctatgcctatctgtgaatgagcctgggaatagagcttcgtatttgggcacattataaacctgaaaaaaaaaatttgtctctaagaaacaagggggtcattatattgtataggcaactagcattctcattgctttttctctcattcggggaaattaagtataatcaa

SEQ ID NO: 276287 - DNA, 595 bp, Homo sapiens
gacattcagggttgataagaattcaccgtggagtaactggccagtgtgaataaagagccttaaacatctatacccctttcccaagtagttttattttacagagtcyacctcagtaaatgctacaaaatgcaaaggtttatatatatgtattaatacaatctttgaaatttaatttctaatattggaaaaaagaaagcaacctaaaaatctaataagagaattaaatggttaaatagaatgctgaaccacactaaaacaaaacaaaacaaaaaggaaaaaacttttcaaaggacagtgaaagacatgagatgttactgatgtcatatgtaaaataagtaagattcaaagatgcaagagaggttcagttggagaaagaaattcaaatatcaaaagctaaatcctggagttttataacatatattgtatataatccgttaacaagaaataatagaaattaaatgggccaaaaatctaaaagtaatagaccctgagtggtacaattatgtattactcttgttttcatctctttttttattttcccattttagacagtgaatctatatttgttcagtcattaaaatgtgttaaatatctt

SEQ ID NO: 276288 - DNA, 595 bp, Homo sapiens
gacattcagggttgataagaattcaccgtggagtaactggccagtgtgaataaagagccttaaacatctatacccctttcccaagtagttttattttacagagtctacctcagtaaatgctacaaaatgcaaaggtttatatatatgtattaatacaatctttgaaatttaatttctaatattggaaaaaagaaagcaacctaaaaatctaataagagaattaaatggttaaatagaatgctgaaccacactaaaacaaaacaaaacaaaaaggaaaaaacttttcaaaggacaktgaaagacatgagatgttactgatgtcatatgtaaaataagtaagattcaaagatgcaagagaggttcagttggagaaagaaattcaaatatcaaaagctaaatcctggagttttataacatatattgtatataatccgttaacaagaaataatagaaattaaatgggccaaaaatctaaaagtaatagaccctgagtggtacaattatgtattactcttgttttcatctctttttttattttcccattttagacagtgaatctatatttgttcagtcattaaaatgtgttaaatatctt

SEQ ID NO: 276289 - DNA, 1191 bp, Homo sapiens
gacattcagggttgataagaattcaccgtggagtaactggccagtgtgaataaagagccttaaacatctatacccctttcccaagtagttttattttacagagtctacctcagtaaatgctacaaaatgcaaaggtttatatatatgtattaatacaatctttgaaatttaatttctaatattggaaaaaagaaagcaacctaaaaatctaataagagaattaaatggttaaatagaatgctgaaccacactaaaacaaaacaaaacaaaaaggaaaaaacttttcaaaggacagtgaaagacatgagatgttactgatgtcatatgtaaaataagtaagattcaaagatgcaagagaggttcagttggagaaagaaattcaaatatcaaaagctaaatcctggagttttataacatatattgtatataatccgttaacaagaaataatagaaattaaatgggccaaaaatctaaaagtaatrgaccctgagtggtacaattatgtattactcttgttttcatctctttttttattttcccattttagacagtgaatctatatttgttcagtcattaaaatgtgttaaatatcttwgacattcagggttgataagaattcaccgtggagtaactggccagtgtgaataaagagccttaaacatctatacccctttcccaagtagttttattttacagagtctacctcagtaaatgctacaaaatgcaaaggtttatatatatgtattaatacaatctttgaaatttaatttctaatattggaaaaaagaaagcaacctaaaaatctaataagagaattaaatggttaaatagaatgctgaaccacactaaaacaaaacaaaacaaaaaggaaaaaacttttcaaaggacagtgaaagacatgagatgttactgatgtcatatgtaaaataagtaagattcaaagatgcaagagaggttcagttggagaaagaaattcaaatatcaaaagctaaatcctggagttttataacatatattgtatataatccgttaacaagaaataatagaaattaaatgggccaaaaatctaaaagtaatagaccctgagtggtacaattatgtattactcttgttttcwtctctttttttattttcccattttagacagtgaatctatatttgttcagtcattaaaatgtgttaaatatctt

SEQ ID NO: 276290 - DNA, 633 bp, Homo sapiens
ttgaagctcagcctgcagtggctgacattcagaagtgatggcagcaggaactggttcttggcagtgccttgcttccccaggttgctgcaggagctaattgttcaaagttgcattctgagcctaaagccttctaataaaatattttttatcccttttaatgaagttggttttgttgtttgtaatcaagaaccataaytggcagaacacagatctatccctggaaaaatataccaatacacattttttttggtaaaatgtcagaaggatccatgacttccttcaatttatttaatagatgaggaaactcaagcatgctggggctaaatgatttgcccaaggccagctctctatctattagtagtgttggttttagaacctagattttctgaactccagtcacctttcaatgtgcataaatgctctaatctttttcatgggtggatgtgcaaatgattccaataatgcaggctgtggggagaaagaggcaaactgtagtaccatcagcagtgtggtctggatatggtgaactgttccttcacacacagatgtgggaagccatgatcatcagttgcattattcctgaggggcaatgcattccagttacatagaaccagtttctacgtttcagggtat

SEQ ID NO: 276291 - DNA, 435 bp, Homo sapiens
attcttcaaggtccaaggaaaacttcaccaaatctgtgacattggcatcctcctactcacacaatttcacaaatacaataaaattaastatgcttcttatgtgtcctcataattttttttttttttttttttttaggcagagtcttgctctgtccccaggcttgagtgctggcagtgcagtgttgcaatcttgggtcactgcaacctctgtctcctgggttcaagcaattctcttgcctcagcctccagagtagctcggattgcaagcatgcgccaccacacccagatgattttttttttttctatttttagtagagacaggattacacctgtcggccaggctggttttgaactcctggcctcaagcaatccacccgccttggcctcccaaagtgctgggatcacaggtgtgagccactatgcccggcaatcata

SEQ ID NO: 276292 - DNA, 627 bp, Homo sapiens
tacataactgcctttaaagaggctgaaatagaaatctatttacacaagtactactatttggattttctgggtaccactgtgatatgaggttgtggtacagtgtctgaacagctttaaaaattcaagaactatataacctaaagagtaaaagcctttcacaaatagacctacacatattatatttttgtatatgacagtggtatatagttttttcacacctaatatgtttctcattctaaaatgaatttctgctttcttctttttccccctctgccgacaatatgtttcagataacttatggtttctctattaagtagtgctaattatttatgtatttatatatttagaaagagagtctcgctctgtcgcccaggctggagtgcagtggtgtgatctcagcccattgcaacctccacctcccaggttyaagcaattctcgtgcctcagcatcccaagtagctaggattacaggcatgtgccaccacgcccagctaatttttatatttttagcagagatggagtttcgccacccaactcctggcctcgactgatccacccacctcagcatcccaaagtgctgggattacaggtgtgagacagtgtgcccagccagtaatgctactatgc

SEQ ID NO: 276293 - DNA, 1201 bp, Homo sapiens
agttctacagaaagaatcacctatctgtgaagtcacgggcacagctcacagaaaggtgctgtggaattgacttctttggagtcctatgatgtgaacatttcatctgaaaagatatagtgtcagaatccttaaggtatccaccgagaataaattacttcctctacatcaagcatcttcttctcttccatattcaacacagtgaattcataatggagacaatacmtccctaagttgctgatggtgttgcaagcaccattcatgttttggacattatggcagtgacgatcagaagagaatcctgtggacctacgtttctggtgtttgtagcaacaggatgagcatcagtgagccaggttctgggcagagacacccgaagcccaggaggcagagccagattcccctgacttccactaagtgacccactaagtcagctctcagcatgtcactcatagctgattttgagataggtttttaactggtaagcaatatgcttaggtgccctgccctgtctcagtaaaaagacaagtgaaatgccaacgtctaatccttttgtttgagawgtttttaatgaaccaaacttaacgccatccccgtttctggctgcgttcccctcatactcagcagagcatgggcaagacggctgttgtgttctttcctgcagcagcaatgcaaacgttagttataaattaattagactttaatatttttggtgtttaatgacaagtttttaaactggacatattaggaaaaatattttttttagctcagcatgctgagtccggtactgtgtatttcaccagtacatgcctctagctcagcatctggggctcatgttgcccagtggctgggttagaggtgccttgccatgatctcagaatacagtctgttgaattatcctagatgaaaataaaggcaaaccaacacattcatccatgaggattttggtccattccatttattttcttttattttgcattcttaatttcctttttagtttaacactgtttgtttgagcttagggaagacaactaccaagaaaggccaggaacagttgactacacaatgaagattccatgcaaaatgttcaatattggatctaaaggggttcaaaatgtttcatactaaactgtttgggaatwtatttgttaactctgtgtacacctaataaaattcaatgttttcttctcagaagagttcattg

SEQ ID NO: 276294 - DNA, 552 bp, Homo sapiens
acttaggcagatagtgagaatatgggagtcctcagtaaggttttccttttaatgaaaagcagcccccaaatcattttcttttcttacgaagagcagcctattgctggcagttgtgccaataggaagaaactacctgggaataggcaggctcaaaatggcagctccaycctctctttgccagccacacgtacagtaaggagcagacaagatggttctggccaagtggaaagtccatttgcataataagattagggtggggcgaccagccttcccacacacaatgtaaatgtcacacctgatccaatcaatctgtgggccctacataaatcagacagtgccttctcaagcttgcctgtagaatccagtgcactctgccaccagcaggtctttccttttcagatacctctctctggcaagagacagacagagacggctgctctcctctcccctttcttctgcttattaaactttccgctccttaacccattccatgtgtgcgtgtccatgttgttaatcttctcagcacaaaatgaccaaccccaggtatttacc

SEQ ID NO: 276295 - DNA, 588 bp, Homo sapiens
tgcagcataccttcctacccgacccagtgtgacaatcaaaattgtctgtagatgttgccaaatgacttttgggtggaaaaattgctctcgttaggaaccacttatgttaattatggaagaatcttttttttctaatgttatttgcatctaaatttgcataactcatttctaataggtactcggatttcattcgtaattcagaaatagaaaaacatacaatggtctttttaacctgtcctagtggtgaatatacatggtttccttcgcatttatmtgttctaatggcccagaaaaaataagaatccagacctctctcatgtaattgttaaggatattctgagccaagccagatttcacatgcatttccattccatccatcccagcattcacagtttccacagctacatattccattccctgcaataaaatacatataggtatcatgattatgatcaaaatgtgccaaatttaaacatgctattataaatcacaagtgtccacaatgaaatcatttcattcatccttggtagattttcttattgtgcaatgatgttattattacatcttattaagcagctgcgagacatc

SEQ ID NO: 276296 - DNA, 552 bp, Homo sapiens
acttaggcagatagtgagaatatgggagtcctcagtaaggttttccttttaatgaaaagcagcccccaaatcattttcttttcttacgaagagcagcctattgctggcagttgtgccaataggaagaaactacctgggaataggcaggctcaaaatggcagctccatcctctctttgccagccacacgtacagtaaggagcagacaagatggttctggccaagtggaaagyccatttgcataataagattagggtggggcgaccagccttcccacacacaatgtaaatgtcacacctgatccaatcaatctgtgggccctacataaatcagacagtgccttctcaagcttgcctgtagaatccagtgcactctgccaccagcaggtctttccttttcagatacctctctctggcaagagacagacagagacggctgctctcctctcccctttcttctgcttattaaactttccgctccttaacccattccatgtgtgcgtgtccatgttgttaatcttctcagcacaaaatgaccaaccccaggtatttacc

SEQ ID NO: 276297 - DNA, 592 bp, Homo sapiens
atgaatggtatccaagacagaagttctctcagtctaaacagctttccatgacagactaaaaacccttacatggaaaaactgcctcaacgacagcaggaaagactttacaatgaaaaagaaacaaataaaaaggactttcttttccttctgtttccttgggttggttgttctttccaaacatgacttccatttactaaaagatggctgtattytttttgagtcaaaatcacgttgaaaaaatgtgcagttgaaaagagtattttgacatatttaacaaaactgcagaattggtaagttcaaaatatattgaaaaggggcaagaatcaatcattagtgcttcttttaaaacacagtgattaaaaatgagttaacagcctgggtgattaaagtgatcaggaaaaaggagttgtggtcatcacagatatcatgaaaggattcaggttcatgtgtctcaactatgtgatatttcatatcagggaaactggtatatgcatttcagctgcaaaaatccccaaagtccaaattaaatgtttgccatttcttgacacacttctcaaagtaagagtgcagtcagaattatttagattgtgac

SEQ ID NO: 276298 - DNA, 472 bp, Homo sapiens
ctgtggttctcagggtgggttgtggggtagtgctccccactggaaccaggagtaactgtggcatccccattatcctctgcgcctatcatagatcacagttccatgatcctggttttatcccctttcgtcatcgataatccagcattgatgtctccataaaaggggaaaagaagggagatcacgatcagctgctgccaacagtccggaggccggtccactaacatgaatgtcaaaatgtgcagccttgaggcagctttcatattcccttttaagtttaaggactcccaaactccctacccattgaaggataaacaaatagtttasacaaatatgctttcaacccttcattgatctctgaatatatcgccacctcccaaagcaaacaatttgcaaaggcattagctagagggactctttggctttgttttgttttgttttcaggaaatgcctttgagtcaatatttagtcaacc

SEQ ID NO: 276299 - DNA, 1051 bp, Homo sapiens
gtcatttttatggtaggtagattataccaacaccaagcactgtattcttccattgtgtgtgtgtgtgtgtgcatgtgtgtgtacatacagrgagatctttagagagcatttctcttatttgaattcttctgatgttcgatatcaagacaaacagcaccatgccgaatctttcatctctatttcattgatcttctgcctacacagtttaaaggaatactggttagaagtaatgaaactaaaacctgcaggcttaacatacacataaatttgacaaaccagcatggaagcattgcatttcagatccatgtggcaaattgatctttttttagttctgtcatttgaaagataaagcaatttgagataaggcccagaaaagatagtggcacatcagatgaaggacacaagtctcctgatttcttcttttatgaccttttcactatttgtctattaaaaaaaaaaaaaaacctgatgtaatgttatggcagtctaaagggttttcatgctaaatagataccattatctctaaactcttctatatagcaaaacccwaatccaccaaggttctatgatgtgaatgagaaagaaacacctgttgttttaaacaagtgagattttggagggaggtgttcttgcaggagaatccctgactgataatcggttccccatataaaatgtagggaatgtggttaagccaagataaacaaacacagcaaaaatcatgtttacataatttatattttgtattatatacataatttataaatgccataatttatattcttgtagcaggattcatgtacaaatctcttagtattgattcttggatatggaatacataggtctaaaaaaaccatgcatatattttataaatgatgtgtttatgctcttctgtcaacagcatttatgtgcactttgtcaacaggtaaaatgataagaacattgaatacatttttwaaaatttcctaaaaacacaatgaggtaggaagacgtataattattattctttttacagaagaagaaattagatatctgaacagtttgccattttaca

SEQ ID NO: 276300 - DNA, 516 bp, Homo sapiens
gttaaatggattaagggttgtgcaagatgtcctttgttaaacagatgcttgaagacagcatgctccttaagagtcatcaccactccctaatctcaagtacccagggacacaaacactgcggaaggccacagggacctctgcctaggaaagccagttattgtccaaggtttcaccccatgtgatagtctgaaatatggcctcgtgggaagggaaagacctgaccgtcccccagcccgacacccgtaaagggtctgtgctgaggaggattagtagaagaggaaagaatscctctttgcagttgagacaaaactgccttaggcctggaggtgggacatgcgggcagcaataccgctttgtaaagcattgagatgtttatgtgtatgcatacctaaaagcacagcacttgattctttaccttgtctatgatgcaaagacctttgttcacatgtttgtctgctgaccctctccccactattgtcttgtgaccctgacacatccccccctcagagaaacacc

SEQ ID NO: 276301 - DNA, 549 bp, Homo sapiens
aggctctgaagctgccagaagattctgagggtaggcagatgagtagaaaaaagctccaaggagacaagagaggggaccagataaggaggagattcagtgattccactcaagctactcttattgcaggtggactctgtatggattgatgaccgatttcatgggaaaaaaaaggaagtagcttgccaaaagtctctggactctgtgaccgtgcctgattgaccaaaagtaagactatctttttgataattgacagatcaacacaccctcctagatgttacagacacagatcccattaactgaataaataaatgaagaaaatatgcagaaaggaaactgttaaccttggaagggaaaggagcagtctccatccactcttctttcacttacatctttatatttgtattcaatcactttgttatttttacttatttatgtttataccggctgtttcctctgcctggaaccttattcgcctrtgcatcctcatagctactccctatttccttcaagtcttagctcagatttcactttctcagtccagacctatac

SEQ ID NO: 276302 - DNA, 570 bp, Homo sapiens
ttaactaaattatttagattttcaataaacaaaaatgttaaagtaagaaaatgatattagagtattaagttgaacaggttaggccttaaaatgtatttattctttttgttctaataaaaatgttaagatcatatctatctcctcctgtcttacaaaagcagacagacatctatctacctgtagtttattcttgccccaggtcagtgctgacaattcatagaatacaagtcagcagggtcgagagaggcttctcgcaaatatttctctgtgattttagtgtctgtgatctgtatgtgggctacagtacaagattttaargtagggatcatttatacaatctgaaacactttgggctcacctatctttattaaccaagcttaattccagatctgcccatgtgttcctgactcagctggcccctgccattcttaattaatcccgttcagtcctggtatatttaatcttttatgccacctgtttccaaatactctgtcaaggcctggctgggttactgctccattcaagccttcctattttggcttctcaattctggattgctgtgtttcagag

SEQ ID NO: 276303 - DNA, 590 bp, Homo sapiens
actaaaagtcaaagatgaccttattcccttccctgaaattacactaccaccttagtctgcagctaaggcaatggagttacaggtactgctcagatcccacagccattcaggggcaaagttttgcctaggagccaggtctttcaatacctgccccttgcaatcccacaacaccaaacctgtggctacagtgcctgccacaatcagatggaaagagatgggcagtaggaagattttaaacaaatgaggtgttatctctttttgcttgcctgactcttatttttctcttctgaatctaaagatttttcaccaaagatctaaaatagtgagagctgtaaaccataggcaagacatgcaaatgtcaatatcggatacgccagtgtgatctcattggtagggttagccttgcacagcctgtaaaactgcctccttagaaatcaaaacccactgcccagatttccaggtcttggaccactctacgcttaagattaaagaacaaatgtttcagatacattataagtggcaaacaatgcamtattacccttaactttttttttttttaacatttgttacctcactgtcttatttaaagg

SEQ ID NO: 276304 - DNA, 546 bp, Homo sapiens
ttctatttttcttacatataacaagatccagaagatacatgcatagcaacaaaaaaggacactgtgtgattacaaaattcctatgataaatctttattcagaaatatggttatttgctgattaatgaatgtattcaagaaagcctgctcaatggaactgcctcaaataaggtaacagatttatggayggatgtgatcctggaccaacatctctgccccagaagaggaaaaataaaagaactccaaacatctctcagaagcagttaccaggtcgtgctcacagagcttacctgtgggttgtaggcaaacccctctgggcccactcccttcaaacaaggggtcacactaacttgttggctcctaatccctctgacttttgacataatactccttcagcaaagagctgcaaacagtgcaggtaatacccaattgctgttaggcactgccttacgtggaccaatatttggaaagtttctgcatattgtaatttccaaaaaataagcctagcagacatgggaatctctctatatccaaaatttccaactct

SEQ ID NO: 276305 - DNA, 612 bp, Homo sapiens
agctccctgatgacaacactgcctctcggccactcttccataggaagggtcatgtccccaggctgcttttggccatacttttgacctgtctaagacccaaagactccaaaagctataaggacatcccccacacattatgctgcctggtttaaaatgctgcctgtcttatgtcataggctcattcttatttaaatcaggtgaaaccttctgcccctgtggatttcctatcaagagacctgttgtccctccggatatctggcttttgtaagcaccactttagttcactgggcatggccatgtgtgtttgaatcctggctatggatgaaattcatgtttattttcacaaggcccctaagtctcatgcaaatcaaaatagtgattaattaatcatcctatgtaactgtccccaagcacttcattcaattaatcactatgtattgagcacaaactatgcaccaggcactgttctaaatattggggacacagcagtgcatgaaataaagtcccagttctcaaggtgctgcattctaatggagcaagggagaacrccacacaaacaagataatttctggagttataactgctacagaggaaataaacagagtgatgtga

SEQ ID NO: 276306 - DNA, 540 bp, Homo sapiens
tgtgggggacagaccaaaatctcagtaaccatcagcttccagtccttgtgcaggggctacctggacagtgttgtgcccatacgaaggggcaggagccaggccagtgtctgtcctctgcagatacctgaaattcacctgaatgacctgtccgatgaggtaacaggtctggcttcataaaagagtctgaggtcaccggaaatgggaaatgggcttgctagtgaagtaagaaatcccccaaatacagcctaggcaacaagagcaaaattctgtctcaaaaaaaaaaaaaaattcccccaaataagtgcttagtcctacagaacattttctgagacatytgagtttccaaaagcactgtgtatacactcccctctgcattctgttcaagtggcagcactgtccttcattcccacaactgctttttaaaaaaaaaaaaaaaaaaaaaaagaacactgtggtgagctttttattttgctattttagggtccatcattttactttaaaaaggactctatcatgggtattttggaaaatacttaggtt

SEQ ID NO: 276307 - DNA, 552 bp, Homo sapiens
ggtttgtggtgagccaagatcgygccattgcactccagcctgggcaacaagagcgaaactccatctcaaaaacaaaaacaaacaaacaaaaaattaactgcaattccagcaaacgtgagtctaccatagactaacaacagaacatggagcccagtacacaaccaatactgccatctgttggtgccaggcagagttcactcacttttgtttggaataatggctttgtttctacctgtcaaaattaatagtttcaaaattcctaaatatgggagccactatctcgctttttgagcctgataaaagcaaaaaccaaccgttctaaaaatgtcttagattatcatgacaatacaaattgggatttctatgtttctttgactacaaagaaataatttgtttggtaaggtgttttcagataaatacttgtctttgcagaatccatgctagatggacaaatattttcatatcactcttggagctgacactttaaagcattcctggagaactgcatatgttctcacatacaagcaaaattgactcatttgtaaatattga

SEQ ID NO: 276308 - DNA, 487 bp, Homo sapiens
ttttgagcctgataaaagcaaaaaccaaccgttctaaaaatgtcttagattatcatgacaatacaaattgggatttctatgtttctttgactacaaagaaataatttgtttggtaaggtgttttcagataaatacttgtctttgcagaatccatgctagatggacaaatattttcatatcactcttggagctgacactttaaagcattcctggagaactgcatatgttctcacatacaagcaaaattgactcatttgtaaatattgagcttttcaatgctatctattcatagacaatcggcagtattaggaagcccactggatcaagagtcagcaaacagattcttatccaatctgccactcagttccatgagcttggtcaaatcctgacttgcaatttcttcatgtaggaaatggggttttartgccgagcctccttacctaatgggtatgttgagaaaagtgaataacatatgtgaaaatgtttt

SEQ ID NO: 276309 - DNA, 988 bp, Homo sapiens
agttatagctcacaggccatgagagccagccagctcaataagagaatggaataaatgctcaaacagaatgctgggagcctagagctctgtaggaaggagggagaggggcaaagtaaacaaaataacagattggcacaatggtagcatggaaggaacttgataactaagacactctggcctagacccagaatatctatgattctagacccagaataatatctgtartaatatatataattctagcagagtatctatgattccttttgaggtaagaactaaactggcaaagtgtatgtaagggctttgcagatgtaacatgattttggaagtacttgtctgtaatgaagtgcatgtgggtgggcagaaacaacaccttttggaaagcaaatcctaatacttgcttttctctcttttcttcttcagccctccctcaagtaaacatggagagagtggaagagaagagggcagaaatagagagcaaaacaacagggagacttatttcagttccatttctctccccatgcwttcatcagcctctaagatggtcaatgatcttcacatccctgtgtgggcctctcccatagtcaatgaagtcgatwtgtgtaaacaataggacatgacagaaatgtctgtgagatttccaaggctaggtcacaaaaggcattgctacttctgtcctcatctcttttgaatcacttgctctggggaaagccaaatgacacgtcttgaggaaacccaagcagtcctatgaagaggctcatgtggtaaggaactggggcctcctgccaacagccatgtgaatgcaccaacttggaagtggatcctccagccccactcatgccttcaggtggccacagctctggccaacatcttgatgcaaccttatgagacaccttgacccagaaatacccagctaagctgttcctaaattcctgatctacagaaattatgagataataactgttgctttaagctgctatgtgttgag

SEQ ID NO: 276310 - DNA, 551 bp, Homo sapiens
ctactgtgtactggaatcttccaaaaactcaataaatacatatggaacacctactgagtactagatattgcagatctaacaatgaacaagtcatagtccatgtttggtagccagtctccaagatggcttccaatccgcccatctccaatgtattcatcccattgagtgtgattagacttagtgacccacttctaatcaatagaataagrcagtatgtgacttggagactaggtcttaaaagacattgcggcattattatcttgccttttcttggatcagtgtctctgggagaagtcagctgccatgtgttcagacagccctgtgaaaaggttcacctggcaggaactgaggcatcttgccaacagccatgtgggtgaacagagcatcctccagcccgttaaccttcagatgactgcagccatgccccatagcttgaccatagtctcctgagagacgctgagccagaccaccagcccaactactcttgtattcctgacttacccatcatacatagttgttgtttgaagctgccaagttttgatgtaatttgt

SEQ ID NO: 276311 - DNA, 514 bp, Homo sapiens
tggcagctctgtctatgtgcaggatcctttactgtccaggctgctgtgtgtctgccaaggttaagtatttagctcatagattattgagaagtttggtttcttctccctccacctgctgcctgcttcctggcaactcttttgcttatttgtatctccttaaagaggaaggggaaaagatcccaaaagaaagcaaactcatttcacataatttggctacctgttacctctggcaaaaatatgcatgggattgaaaatgaaagttaattgccaaattcactatgtacaaatggtttctataccaattactggttttatctgtaaggctggrtaaagatgacatacatttagggtaaaggaagaaataccaaaaacttgactttagtatgagcaattcaaattctgatttgctgaaccagcttcacgccaaacagccatgagtagacaaaacttctaaataaggcatatagaaaataaggtggtcttcttggtcaggtataatatgtcaagcaggaaa

SEQ ID NO: 276312 - DNA, 602 bp, Homo sapiens
gggaaagccattcacttcccccacttcccattgtcatcttctccacatgaaaamcacaaacccctaactcgagctctgtgctgcccaatgctgtggctattaaaataaaactgaaaattcagttcatgtgcagtagccacatttaagtactcaatagccatacatggctagtggctactatattggacagcacagatacagatcatttccattatcataaaaagttctactggtcagcagtgatttagatcaattccacaggtatcccatattgcttcattcccacgcacatgcacatctggagaaagctgcaaaacagagggggttggagctgccacaaattcctggtttccaactgggcctccagccattgagtgcacattccttctcttgcttgtctttggtagatattcccatcattcccttccatgacttctccaaaacacttaaaacccagcctctcctctctttctttttttctactttttttctggtgggagcaagagctaagaaactagatcataatgcaaaaacaataaattaggggagagggttgcagggaagaggcaagggagagagctcttgatggtcaggattgaaca

SEQ ID NO: 276313 - DNA, 602 bp, Homo sapiens
gggaaagccattcacttcccccacttcccattgtcatcttctccacatgaaaaacacaaacccctaactcgagstctgtgctgcccaatgctgtggctattaaaataaaactgaaaattcagttcatgtgcagtagccacatttaagtactcaatagccatacatggctagtggctactatattggacagcacagatacagatcatttccattatcataaaaagttctactggtcagcagtgatttagatcaattccacaggtatcccatattgcttcattcccacgcacatgcacatctggagaaagctgcaaaacagagggggttggagctgccacaaattcctggtttccaactgggcctccagccattgagtgcacattccttctcttgcttgtctttggtagatattcccatcattcccttccatgacttctccaaaacacttaaaacccagcctctcctctctttctttttttctactttttttctggtgggagcaagagctaagaaactagatcataatgcaaaaacaataaattaggggagagggttgcagggaagaggcaagggagagagctcttgatggtcaggattgaaca

SEQ ID NO: 276314 - DNA, 602 bp, Homo sapiens
gggaaagccattcacttcccccacttcccattgtcatcttctccacatgaaaaacacaaacccctaactcgagctctgtgctgcccaatgctgtggctattaaaataaaactgaaaattcagytcatgtgcagtagccacatttaagtactcaatagccatacatggctagtggctactatattggacagcacagatacagatcatttccattatcataaaaagttctactggtcagcagtgatttagatcaattccacaggtatcccatattgcttcattcccacgcacatgcacatctggagaaagctgcaaaacagagggggttggagctgccacaaattcctggtttccaactgggcctccagccattgagtgcacattccttctcttgcttgtctttggtagatattcccatcattcccttccatgacttctccaaaacacttaaaacccagcctctcctctctttctttttttctactttttttctggtgggagcaagagctaagaaactagatcataatgcaaaaacaataaattaggggagagggttgcagggaagaggcaagggagagagctcttgatggtcaggattgaaca

SEQ ID NO: 276315 - DNA, 602 bp, Homo sapiens
gggaaagccattcacttcccccacttcccattgtcatcttctccacatgaaaaacacaaacccctaactcgagctctgtgctgcccaatgctgtggctattaaaataaaactgaaaattcagttcatgtgcagtagccacatttaagtactcaatagccatacatggctagtggctactatattggacagcacagatacagatcatttccattatcataaaaagttctactggtcagcagtgatttagatcaattccacaggtatcccatattgcttcattcccacgcacatgcacatctggagaaagctgcaaaacagagggggttggagctgccacaaattcctggtttccaactgggcctccagccattgagtgcacattccttctcttgcttgtctttggtagatattcccatcattcccttccatgacttctccaaaacacttaaaacccagcctctcctctctttctttttttctactttttttctggtgggagcaagagctaagaaactagatcataatgcaaaaacaataaattaggggagakggttgcagggaagaggcaagggagagagctcttgatggtcaggattgaaca

SEQ ID NO: 276316 - DNA, 566 bp, Homo sapiens
agcatcctaagtagcactggcctcaggcagcagtcaatgtatgtgccccatcagcccctccacgcagtgtcttttcctctcttttggttctccttcctagacaacatgttagtgtcaacgagatgcatgtcagtcaggccatgagcyggaggcctttcctcctgcctttcccacacagacacctacctgtcctagttaagatggttctgtcagcttgctgtcggggctggaaagcaaccacagcattttctctcccacctctgggtattaagggctgaaaaacaacttcaggaatatttgtattttaacaacagacttttagaaatagaaaaattaatccctaaagatgacattttcaccaccaggctagctaggggtggaaagttgtctatttcataaacaaattaagtcacacatttattataccatctcccaataccacttcagttgagataatccatgttgacagcctaggatgtagccttccacatatttctctgtgtacccatagggacatgccacaatttatcctaatgatggacattcagattgttttcatttgagag

SEQ ID NO: 276317 - DNA, 559 bp, Homo sapiens
tgttcatgacttcgtttttaaattttcatcaaataaagatataagtaggtttttttttttaagttcttcgttccatcaaagtacgggcctaggccacctccccgtgtgcatccctcctcctccagctaggcagctagacaaatataggcaattgaatttttcagtgtcttccactcatttgaaatgccattcctacaagcccagtgcctggtaaaacaaacaaaaaactttcaaaaattgttactgaatgaaataattctcaaatgtatttcaagtctctttttttccttgcctggaatgcttggtctcttggcttgtctcagcttcaatgctacatcctcagatagttcttctttgataaccacatttaagtatataccctcacaccccaagtcgtttgytaaggagagcaccacgtcatctcttcaacggcactctctaagcttgtacttatgtgtttattatgtttgttttcccccaccagactgaagttccatgagagctggaaccatatctgtgttctcacctccgtggactaagcacagtgcctgacacagag

SEQ ID NO: 276318 - DNA, 563 bp, Homo sapiens
ctggactatctcttggatttttatatgagacagaaaaacttctttgtcttccttaagctgttattttatatttagcaaaattgaatcttttgctttttgttttttaataaaatttttaatttttattttttgtgagtacatagtaggtatatatatttatggggtacaagatattttggccgggcacagtggctcattcctgtaatcccagaaccttgggaggccgagccggtggatcayctgaggtcaggagttcgagaccagcctgaccaacatggagaaaccccatctctactaaaaaaatacaaaaattaaccgggcatggtggcacatgcctgtaatcccagctactcgggaggctgaagcaggagaattgcttgaacccaggaggcagaggttgtggtgagctgagattgcaccattgcactctagcctgggcaacaagagcgaaactctgtctcaaaataaaaaaaaagatattttgatataggcatacaatgtgtaatagtcacattagggtaagaggtatacattacctcaagccggtatcctttgtgttacaa

SEQ ID NO: 276319 - DNA, 472 bp, Homo sapiens
aaataattcttttgtcaattaattttggtaaaaaaaggcatatgctgccttggtgaaaattttggaaaaaatgtgtttttgaatatgctattcgtttagaactatgcagttaaccaaattatgctactttacatgtattgcaagctaccttggcattgctytcttctcttacaacacagtcccttgtgagcatgcaggaacacatgtaactgtggttatgcgctgtacatgaggagtagctgcatggaaaagtgaagagactcaaagagaatgtgcaggtggcactgtttttgccagtggataatatgagtattttaaaagctagcaacttcttggtcatttttctggtcaagtaatttataagatatttagtttttataattttgggtccaattaaatgtatctgcaagtgcattttatgagtgctgtataaaaattaaattacattcagtttgaatcttatttaaaaaaa

SEQ ID NO: 276320 - DNA, 363 bp, Homo sapiens
aatatatgaggcagtcaataaaataaggaaaacctcctcagaaaggtctttatgcttatagttccctaccacgaactctaagagagsaggcagcttgcctggcgggtaaatgaatgtttttccaaaatatgtaaagtttggcatcacaatgaacctattgatgggagagttctccttcgcttaatttaaaagtcgtggaaccagaacaacttgactgttatgctaataaagctgaaaccatgaaatattttgggttgttttttccttttttgttagctgttttctctgcccatcccattctatagacaatagaaaatattggctatggtctctgactggtcacatttagaaaggttccagatc

SEQ ID NO: 276321 - DNA, 363 bp, Homo sapiens
aatatatgaggcagtcaataaaataaggaaaacctcctcagaaaggtctttatgcttatagttccctaccacgaactctaagagagcaggcagcttgcctggcgggtaaatgaatgtttttccaaaatatgtaaagtttggcatcacaatgaacctattgatgggagagttctccttcgcttaatttaaaagtcgtggaaccaraacaacttgactgttatgctaataaagctgaaaccatgaaatattttgggttgttttttccttttttgttagctgttttctctgcccatcccattctatagacaatagaaaatattggctatggtctctgactggtcacatttagaaaggttccagatc

SEQ ID NO: 276322 - DNA, 980 bp, Homo sapiens
aatatatgaggcagtcaataaaataaggaaaacctcctcagaaaggtctttatgcttatagttccctaccacgaactctaagagagcaggcagcttgcctggcgggtaaatgaatgtttttccaaaatatgtaaagtttggcatcacaatgaacctattgatgggagagttctccttcgcttaatttaaaagtcgtggaaccagaacaacttgactgttakgctaataaagctgaaaccatgaaatattttgggttgttttttccttttttgttagctgttttctctgcccatcccattctatagacaatagaaaatattggctatggtctctgactggtcacatttagaaaggttccagatcwtgtttaagagtttattgtttaattttcaaatatttgtggatttcctggttttcttctgtttttcacttttaacttcatcctgttgtggttagagaagacatttcatataatatttatcttttaaaatctattgagacttaatctgtggcttaacataggagctwgcctggaaaatatccatgtgtgctatccatggctatccaatagcccatgtatacttgataagaatatgatactgttgtcattgggtatggtgttctgatgtttctgttagatcttgttggtttattgtgttgtttaagtactttattttcttatcttctctctgatagttctatctattattgggaatgggctactgaattcttcaactattattgtagacctatctatttcttccttaattctgtcagtttttgcttaacgtatttggattttgatttacacattaggtatgtaagtgtttataattgttatatcttcttgttgtattgaactttaaaaatgtatataatgtccttctttgtctcttgtaaacctttttgacttaaagtctattttgtctcatattagtatagccaccctggatctcatttggttactatttgtatgggat

SEQ ID NO: 276323 - DNA, 625 bp, Homo sapiens
tgtaaaatgtgatatacaaaatgccatcactctggttcagagctctgaaatggagttggaaaggactccattctaagaaggactacatgcacgacctatagccttacaaattaaaaaaaatttaaatttaaatttaaaaaccttgcaaaaaaaataagcaaaaagaatcaaaacttgccatgaacttctgaactgggccgtacttccatgatcacatcctgagaaatgactaaactttaccattgctgcagctcctgaatgaccggtgaactatgaactcgtgcactaagccagccacctccaccagtgataattctttcagaacaacttgtctaatcacccttatcttccttttaaaaatccctactccttttcctctcttcgaatcacaatttgtcctctagctgaatctgtgtctcccaaattgcaattcctaagatgccaatcaatgccttgtcttacagtgttgcagtctggtctyttgcctcatcttggttaacatatgcagacaccaataactgctaatcccataaccattatctgaaaaatagccctgattgttattcacctccatctaccatttttgcctaaatagtcaattacaataaactgattaattttcacc

SEQ ID NO: 276324 - DNA, 606 bp, Homo sapiens
agccaaagataaaggtgaaaatattgttttagcaatccataaatagtgtgtgggggggaattgtacgtttaattaagaaccaatactgtgatcacaagtattagtgttttgaactgttcatggtgccaactgaactcttggtatgaaggagagrtctacacatggcaatatatttgtgaaagcagaacgaatattagtaaaaatatatagatcttatttaaaccatactattattcttactaatgatataaactagattggactttgcagattgttttcctttatgaatatgagtttaaatttcactgtgatatctgggttttaaaataaaaacaggaaactagttaatgagatataaatgagttctcaaattaagtgattccaacccaactcccttctttctttgttttgtgttttgagaaaaggtcttgctcgtttgcccaggttggagtgcagtggcaggatctcagttcactgcagcctcaacctcccagactcaagcgatccttctgcctcatcctcagcctcctgaatagctgagaccacaggcatgtcccaccacacccggctaattttttgtatttttagtagagagtgggtctcact

SEQ ID NO: 276325 - DNA, 606 bp, Homo sapiens
agccaaagataaaggtgaaaatattgttttagcaatccataaatagtgtgtgggggggaattgtacgtttaattaagaaccaatactgtgatcacaagtattagtgttttgaactgttcatggtgccaactgaactcttggtatgaaggagagatctacacatggcaatatatttgtgaaagcagaacgaatattagtaaaaatatatagatcttatttaaaccatactattattcttactaatgatataaactagattggactttgcagaytgttttcctttatgaatatgagtttaaatttcactgtgatatctgggttttaaaataaaaacaggaaactagttaatgagatataaatgagttctcaaattaagtgattccaacccaactcccttctttctttgttttgtgttttgagaaaaggtcttgctcgtttgcccaggttggagtgcagtggcaggatctcagttcactgcagcctcaacctcccagactcaagcgatccttctgcctcatcctcagcctcctgaatagctgagaccacaggcatgtcccaccacacccggctaattttttgtatttttagtagagagtgggtctcact

SEQ ID NO: 276326 - DNA, 337 bp, Homo sapiens
gggctggaaatacttctgtggtcatttttataatttacaatctgtccctgtttcttctaaaatattttataagcatttaattgaaaaccaccagcctccttcaccccagagccaagccaggcagggaatctctctggaggctacatactgggagaaaacagtttttgagacacatacatctgtgtcatgagaacttccctctgcaggtctcagcatccaccttttctaacagttagctagtctaaaactcagcatgcagactaacgyttaagagcaaggctgaataactgcaactgctgttcaggaagttgagagctaactgagcaattgccatata

SEQ ID NO: 276327 - DNA, 562 bp, Homo sapiens
ctctaaatgtagccacactaggggttagggtttcaacacaagaatttcggggtgacacaaacattccgtttctaacaaccagctcatacctacatctccatttgaagtcagtttcgatgacatgttctcagggactccttcctttccatgctccatagcatcctgtgtatggccttgtcataaaacttgccacattgaattgctattgcctataaacatgttactatcgatgattatatatatataaaaaacatatttatgtgccaatatgtattatactatactatatataatattaaatatatacattatactatcttgacatataataggcacacaatgctgaatgaatgaatgtgtagaagagggagatagaaagatttgctcctgactytaattctcagcccagtggaaatgacattttcctaaacttcaatattaaatatctgaattcattagtcatatgccttatatggctagttctaacagaaatgtggctcttagaaacatacagttattaattcattcactgtatgttcatattagaaaagtgcctgttcat

SEQ ID NO: 276328 - DNA, 532 bp, Homo sapiens
tggttaatttaaaacaatatggagtacctgacagcagcagaggggggtgggggggtggggggcaaaaggacattcacactttaattaatgacatgctagatgcaggagtgctgatacaaaagaattttttgaacaacagccctgtgtggaaaaggaggatggctcatggagaacaaacagtagattattgaggcttaaatacataaatttgtacctcagtacaattttatagcctcagtaattttagtcatgatttcaatcatacaaaaagactgctactcagtgatcgaccttgcaaacattcttctctcagtctcagaaagtgccaaacactgtttgctcttatatgggaaggatcccagtttatgtatactrtgctaccatagggtcatctgaactcactggtttactgtcataatttggtcagaagggatttggatttgatgtaggtctcaagtgtaataatacactatattgatgatgagatgataatattggaaactaaagagccaggttaagactgagttgaatg

SEQ ID NO: 276329 - DNA, 543 bp, Homo sapiens
ctcaataaaatactggcaaacaaattctagaaacatataaaaggaattatacaccatgggtaagtaggatttattccaggaatgcaaagttagtttggcatctgaaaattaattagtataatatattgtatcaatagaattaaaaggaaaatgtatatgatctcaatagatgcaataaaagcatttgtcataattcaatactttccaagaatttatacaccaycaacaacccattaacctaggaatggaagagaacttcctcaatttgataaagagcatttataaaaagcccacagctaacactgtacttaatggtgaaagactagattattttctcttaagatcagaaacaagactctctgactgcttctatttgacattgtactggtggttctagtcagggcaatgaggcaagaaaaagaaataaaatgctccgagattggaagggaagaaataaagctatctctacttgcagatgacatgatgttatgtacagaaaaatcttaagggatccaccaaaaactattaaagtgagttcagtaa

SEQ ID NO: 276330 - DNA, 524 bp, Homo sapiens
tatttatatacagtacctgtaatgggagatagtcaaagaatatatttaatgtccccaaaggcagtgagctacatgccaaaatgagaggttgatttccaggcctaagtcaamcaattgaataatctaaagtaagggaagaaaataactcattgtgtacattgggaattatgttaactgcaagtaacagaaaaccaacctaaaagaaacttaaatcaataaagttgtaatctgttcttggattagctgactgttggcataggattagcagctcaatactgttaggactttggtctttgaaactgttttggcccttcactcagagtttcaaggtgactgttgttgctccaagtatcatgtcctcactcaaaacaggaagaagagaagtcagtaccaaaatatttgtaaaattccccagaaaatactctctggccaaaagtacttagcatggccaatcctggcttcaagggtggctgcaaaagtatttcattttcctcacctctgtaacaaaacgtgacaaaaggcaa

SEQ ID NO: 276331 - DNA, 587 bp, Homo sapiens
tagtagcaaaactattagagaattatactttacaatggaacaaagtatacaaataggctatagttttctcccataaaatattattatgaagtaagatttttccaaaatatcttctatttccagagtgagcacagaactagctttgtatgaatgccacattctgtggttttcacttatccctgaagtgacattcatcctattaacagttttaataggatraatgtcatttcaaggatcttttatttttcaaaacaacaaaaaataaccatttccatagtctagatataattatatacattaaaataagccattcttttaaataaaatgttaacattcccccacatatttgacatttttctctaatgaatacactgttgtactggcattttcttataatgtgttattttaagggctcctttttctaacattgtaaatttaaccggcatgagctaattaatgagctcaagttaaccttccttcccctccaaaccttaactacccacccagtcttttagaattcattcctaggctttaagaccacttagaatttagaaaacttttttcttttgactgcactgtgattattt

SEQ ID NO: 276332 - DNA, 581 bp, Homo sapiens
tttccataacatcattatgcttaacacagtgttatttaatttttatctctcttggaccttcactttaatcaaaaaatcaaaaaaacttatcctcagtctctatcactttatcccatttttctcttgcagagtaagtagcacagagacctccatagaacagaagttaatcatgtttattgattacctaattaatcaattaaccaactagttgataaatgtgttacaaggtgacttccctaaaaactcattcccatcatggaaaacataaatcaagtattatttatttatttattttactttaagttctaggatacatgtgcaaaacatgcaggtttgttacataggtatacatgtgccatggtgttccgctgcacccatcaacccgtcatttsgttttaagccctgcatgaaataggtatttgtcctaatgctctccctcccctggctcctaaccccccaacaggccccgatgtgtgatgttcccctccctgtgtccatgtgttctcactgttcaactcccacctatgagtgagaacatgcggtgtttggttttctgttcctgtgttagtttgctgagaatg

SEQ ID NO: 276333 - DNA, 468 bp, Homo sapiens
ttgttttctctctatgagtgttaactgctagtcaccaaattttccaaagacagagagagatgaactattgcctctgcttcttgcactagtggacaactcactcgctgagaaataaatgttcctgtacatctggactttcaaataatatttagggagtgtgctttgtaagactttcctccaggaaacaaataaacattggcaggtgagataaaacaggtacggaggaaggcagtgtgatcataaggaacatgctggaaagtgggcaggacacttcattgcctctgtcagttttatatgtgatccctcaggaatgccctgattatttttatgttggttacctgatgagaggattgatttcaatctgcaaagagtttatrttaatcagctcttaggaaaattttaaagaataataaaatattgtgctaataaaaatccacactaattcaatacctttactgccattttcct

SEQ ID NO: 276334 - DNA, 586 bp, Homo sapiens
gatgttttttgtggtgcatgcatttctgttagaccttaattttactcataagatttatgcagtttaccctatgtaaattttaaccttattttgacatccagattttttttttttgagacagccttgctctgtcacccaggctggagtgcagtggcatgatctcagctcactgcaacctccacctcccaggttccagcaattctcccacctyagcctccagagtagctgggactacaggtgcccagctaatttttgtatttttggtagagatgggtttcaccatgttggccaggctggtctcaaactcctgacctcaggtgatctgcccacctcagcctcccaaagtgctgtgattacaggagtgagctaccatgcctggccccactttatagaaaagttggaaaaatagtagcaagtaactctcacccagcttcccctaatgttagcatcttacataaccatagaacagttaccaaaaccacaaaattaacattggtatgatatttttagataatctttagctcttgttagaatttttctatttttctcacatcatttttctaaaaatggctttattgagatataa

SEQ ID NO: 276335 - DNA, 387 bp, Homo sapiens
tttgttcgcccattcatcatttgatggacgttgggttatttccactttttggatgttatgaatcatgctgctagattaacattcctatacaagattttgtgtggtctagccattcttgtagagtagtgtgatagtctgtttttttttttgttgttgtttttttttgctcaggattgcttcagctatttggagtcttttgtacttccattatgaatttcaggattgttttttctgttttttttttttttttgkgaagaatgtcattggtattttggcaaggattgcattgattctgtagattgcttttggtagtatggtcatttttacaatatttattgttctagtttatgaacatgggatgtctttccatttgtttgtgtcttcagt

SEQ ID NO: 276336 - DNA, 638 bp, Homo sapiens
cttagcactgcttttgctatatcctattggttttgatatattgtgttttgattttcatttgtttcaattaattttaaaattttcctcttgattttgttgttgactcattgattgttcaggagcaggttgtttaattcmcacatacttgcccaattttgaaagttccttattgttgatttctagttttattccactgtggtcaaaaaagatacttgctataattttaattattttagatttgttgagacttgttttgtgtcctaacatggtccaccctggaaaaggttttgtgtgctgataagaagaaagtgtattctgtagctgttggatgaaatgttctgtaaacatctgttaggtccatttggtctaatgtgtggttaaagccaaagtttccttgttaattttatgtctaggtgatctgttccatgttgagagtggggtgtttaaatttttaactattatcatattggagtctatctctccctttagatctaataacatttgctttatatatctgggtgctgtagtgttgggtgcatatatgttcagaattgttatatcctcttgctgaattgatctttttaacattatataatgaccttctttatagtttttgacataaaatctattttaactga

SEQ ID NO: 276337 - DNA, 579 bp, Homo sapiens
ttttaactattatcatattggagtctatctctccctttagatctaataacatttgctttatatatctgggtgctgtrgtgttgggtgcatatatgttcagaattgttatatcctcttgctgaattgatctttttaacattatataatgaccttctttatagtttttgacataaaatctattttaactgatataaataaagctacccctgcttgcttttggtgttcatttgtgtggaatatcttttctttatccctttgctttcagtctatatgtgtctttacaaatgacatgagttacatgtaggcaatatgtagtttgcttttcactggggtctgttactagagagttaatattttttcaaattaattcagctagtctatgtcttttaagtgggggaatctaatctgtttacatttaattttattagtgataggtaaggacttactcctgtcattttgttgttttgcagttgttttgtatagtctttgtttccttcttcctatcttgttttttatcattgaggtttagtgaggttttttaatgataaggcttgattcttttctctttctcccttgtgt

SEQ ID NO: 276338 - DNA, 819 bp, Homo sapiens
ttttaactattatcatattggagtctatctctccctttagatctaataacatttgctttatatatctgggtgctgtagtgttgggtgcatatatgttcagaattgttatatcctcttgctgaattgatctttttaacattatataatsaccttctttatagtttttgacataaaatctattttaactgatataaataaagctacccctgcttgcttttggtgttcatttgtgtggaatatcttttctttatccctttgctttcagtctatatgtgtctttacaaatgacatgagttacatgtaggcaatatgtagtttgcttttcactggggtctgttactagagagttaatattttttcaaattaattcagctagtctatgtcttttaagtgggggaatctaatctgtttacatttaattttattagtgataggtaaggacttactcctgtcattttgttgttttgcagttgttttgtatagtctttgtttccttcttcctatcttgttttttatcattgaggtttagtgaggttttttaatgataaggcttgattcttttctctttctcccttgtgtwaactttgctgggtataataatcttggctgccaattttattctgccatcattttgaatattacatcacattttcttctgggctgtaaggtttttgtggagaattttatgctagtctaatgaagattcctttgtatgtgacttgatgcttttatcttgctgctttwataattttatctttgtgtttgatttttgacaatttggctacagtgtgcctggggaataattttttttggttgaat

SEQ ID NO: 276339 - DNA, 386 bp, Homo sapiens
gggttgcgacccctattgtggcatgtgggtcttggggtacaggtttgctctcttatggcagggttggatttaggtggccctcagagccaggatctgtgactctgaggcaccctctagcagctcgggcccagggggcsaggttgtaactgtgattctaccccagggggtggggcagggtacagcactggccgaactctgaggaagaaggggtgctctgggggcttgggcctggggagccagggtatggctgcagttccggaaccggagccaacagggctcagtggcagctctggtcccaggggatgtgacactgtgtaataatgactcaagaccctgggatggtggggcttgtaagtatcccagactctgtgaggccatgtgtggca

SEQ ID NO: 276340 - DNA, 539 bp, Homo sapiens
aatgactgcacctcatgtgcaacaggtaggagtcaaagttgaaagtcaatcagtaaaaacttaagcaacatgacagaataaaattataaagrgcaataaaataatactatattggctaaaactagtagaaagaagggaagagaataaagctaatgtaattgttactcaattaagggaaacaaaagactgctttaaaacagaggaagataggtatcatatgaaggtataagtataaagataaccactggggggaaaaatcttcctaagatgaggactaccatttaaaaagcacagaaaacacaacactcaaagtttcaaaatatatacaaatgtaaaaaatggcataaaataattttacaaaaccatgaccaatggttgtgacttgacagaaagatatgtccttcctatctatatctggcttaattcatccaccaaacagaaaaaaagctttaaactgacccacaaagcaaaccattctatgctgtcatcaagatatacctgaaaaaaaaagttaaaggataggataaagttcacaaaag

SEQ ID NO: 276341 - DNA, 577 bp, Homo sapiens
aagaacaaagcatacatatgcaaaataacagactgggaaaaccacaaaaatacacagaatttcaaaaactaatagaaactagctgggcacggtggcacatgcctgtaatcccagcactttgggaggccaaggcaggcagatctcttgagaccaggagttygagaccagcctgggcaacatggtgaaatcttgtctctacaaaaaatacaaaaattagccaggtgtggtaacatgtgtctgtagtcccagctgctcaggaggctgtagtgggaagatcgcttgaccctgggaggtggaggttgcagtgagccaagattacaccactgcactccagcctgggtgacagagcaagaccctgtctcaaaaaaaaaaaaaaaaaaatcataataacgatagaaactactttgtaaaactctgtataattaaattacatatgaataaaataattttccagtaaaatgtgagctaccaaaagtgaacctaaacagcctgaacagacttttttttttaattaaaaaaaaatttttatgggtacatactagatgtatatatctatgggttacacgagcttttgata

SEQ ID NO: 276342 - DNA, 569 bp, Homo sapiens
tgtgagtaaatgcattaccctacaatattacaatatctacaatgtcactaggtgataggaattttttagttccactataatcttgcagaaccacttctacagatgcagactgacattgatagaaacatcattgtgtagcactatctgtaatcttacrtatatatacacgcatatattgtttgtttctctggagaaccttaacacagctctcatgggccaacagccaagtcacattacaatagaggcctgcatggacaggtaagagatgctaggaagccctccctttctccctccagcaaaaggttgggatggggcatgattttatcatgcaatgtatttaagattccccacccccatctcatcctgagtctagtggcaacagggtagaaagaggagacaaaccctccaaattggataaaatttagttcctaccaagatgacagaattatacattcaattgacttgcagaaaaacagaaaattcagtttctggaatactaggatttacttaatacttatgtatattaagcaaaattatcagaaagttgaagagtaattaataataatagt

SEQ ID NO: 276343 - DNA, 598 bp, Homo sapiens
agttagtctggttaagggtttgccaattatatctttccagaaaataaagtattccttttgttgatcttttgtactgttttttaatattgcagtttcacttatttctgctctgatccttattatttcttttcttctgctaattttggattcagtttgttcttacttttctagttctttaagatgcatcattaggctatttacttaaaattttactacactttgatttagatgcttatttctataaacattttttaaattactgctttttgcttcatcycataggattttgtaagttgtgtttccattttcgtttattcaaggaatttttaatttccttcttaattttgtcattgacccactggtcattcaggagcagattgtttaatttccatgtgtttgtatagtttccaaagttcctcttgttattgattcctactttttttccattgtggtcagagaagatatttaatatgatttctactcttttgaatgcttagacttgttttacggcctaacatatggtctaaccttaataatgatccatgtgctgaggagaaaaatgtgtaatctgtagccactggatgaaatgttctgtaaa

SEQ ID NO: 276344 - DNA, 608 bp, Homo sapiens
gttgcataagtgaaattcacagacataagttcaagtttsattctatctctgatcactttctgttttgtgtaaaaccaaggagaaactaacatacatagcaacatgcctacagaaacatctttttaaaatttgaagccaatttaaataagaagctatgttcagtggatttcattcagaaaaaagaaagactgtaattaattcttgagaggcatatcttactattttttgcgttattaactttttagttgataaggggaattttatacatacataaacaaccaggtctcctgtcctttaacatattactgtattattccattagtattactgcaggatgtttgttgaaggccttgcaggcttcagaaacattaacttctaggtcttaattctttatggattattttgctcccatatgaatttctgagtttctctttcactgttaaacccagcctgaagaaagccttctgtggtgcctcttgtcaccacatgaggtctccataaatcctgacctggattaagcagaagtggaatccactatagccaatatccgagtctcctattatcttgcaaaaaaaaaaaaaaaatccagttcgtacaataatttggaa

SEQ ID NO: 276345 - DNA, 660 bp, Homo sapiens
  misc_feature (1)...(660): n = A,T,C or G
nnnnnnnnnnnnnnnnnnnnnnnnnnaaatgcattttatgtttagacttgggctccatctctaagatctctcattatatatgcaaatattcactaatctgaaaaaaatccagaacacttctggttccaagcatttcagrtaagatatacgcaacctgtattagagtagtatcatgcagttttcatgacacagaatttggaggcttacatggttaagcaaagagtaagtgtagaaagagatttaaaagtcaggctctgcctaactccagagttcttaaaagcttgcccctagttccagagtctatcaaggaaggcttaacaaaacgtttctcttctaattatgtccatatttttcttccaatgaataataaatattttaatagaaatctcatattattttgtattcagtgataaaaataaatagctaatgtgatgattaattatatgtgttagttttactgaggcaaggaggctcagattatcattttttaatgtgtctgtgagggtggttggttatgagattaccatttgaatcagtggactctgtagattgccctactcaatgcaggtggccatcatttaatcccgtgggagcctgaataaaacaaaaggcagaggaaaaagaaattcactttttttgctttctgcctgtctacttgag

SEQ ID NO: 276346 - DNA, 533 bp, Homo sapiens
tttttcaatctaacagcacagggcctggcatagagctaggtgcttattaaataaagggtatttcattattacttttaatatctgaaattttctaaaatattatatttgtattatgagaatagataacatattcctttagttattactatgatccaataacttcttgtattgagtcctgggaagggctgggctgagggtgatactttacaagaagaacaaatcmacttacaataatcaagccctgctcagacctacagtatcccatgaacaaaagagtggcgatagatataattagttttgtgctatgtgtgtcacataatataaactaatctttgaagaggtaaagttggtttcccgctgccagaataactgcttgttgattatgcagtgaaattaaagggagaagttctaaaccttgatctgctgataagtgggagtgcttgggtagctttggatatgcggcttagctctcgccttagtttcctcctttatacattgttgggattagaccagttgaaccataaatccatcct

SEQ ID NO: 276347 - DNA, 494 bp, Homo sapiens
ggtgacattgcaaggatcttattaattttaatttttctttcctaaactgtcatatgtggaaaataaaagattgtgtattatctacctcaaagtaattgccaagattaaaatacgtaaattagtaaatgcacttggaaagctcagttctggaasaagatgccatagctcatgtttccgtgctccatccttctatgactgaatgccctggaagtaattcagaacacaatgataataggactcaaatagctgagaagaagaaatactgagtagggagcttatgagtataaaatgagttccctgagttttctttctatctcacatagtgctaggagtgggcaaacccaggagagacctggtgaggagcccaacaccgtctccatatgtaagagaccagctgtttgagatctatcataaatagccgcttcagagttcccatagtcccagcccagtgtctccctgccttccattcagtgtcataaagagacctaggccca

SEQ ID NO: 276348 - DNA, 494 bp, Homo sapiens
ggtgacattgcaaggatcttattaattttaatttttctttcctaaactgtcatatgtggaaaataaaagattgtgtattatctacctcaaagtaattgccaagattaaaatacgtaaattagtaaatgcacttggaaagctcagttctggaagaagatgccatagctcatgtttccgtgctccatccttctrtgactgaatgccctggaagtaattcagaacacaatgataataggactcaaatagctgagaagaagaaatactgagtagggagcttatgagtataaaatgagttccctgagttttctttctatctcacatagtgctaggagtgggcaaacccaggagagacctggtgaggagcccaacaccgtctccatatgtaagagaccagctgtttgagatctatcataaatagccgcttcagagttcccatagtcccagcccagtgtctccctgccttccattcagtgtcataaagagacctaggccca

SEQ ID NO: 276349 - DNA, 514 bp, Homo sapiens
acgcatttaattaattaggaaatgctgtcataggttttatggattctgtttctttaattcacttaaagatttcaagtcttttttcatacagcagctgcatacagttataaaatcataacaaaacataaaagaaaatctcttggtctgctatgagatattgtcaaagatggcaaaatgtcaaggagaatataatttgctgatgagggattctgcaatggattataccaccttaaactgggggaaattaatccaagtcgattccttaaaaatctcctcagtcaccaataactaaaggtgaaagtgaaatactatcaaaaccaattctatggccctttttagaaactaagcacaaatatttagatataattatctactgatatgcatacctataatctttatagcaaaccyacaccctatttcctaagtaaaaatagttattagataatttttgttaaaaatgcaattccaaggtttcttcattttatttttaaaatttacttaaattggtccaatt

SEQ ID NO: 276350 - DNA, 587 bp, Homo sapiens
atataacaattactaaacagagctagagaaaaagtagcctagcttctaattgtgacagaaatttgcttaacagcttgaagatgatcgtgtcagaataagatctstaacgtaaatgagttgaagttaaatctgatggttccagaacaggaaacagcatgtagtgaattaaagatatcacagaggattatttatgggagccaacataaattagctttgttaaacagaccaggtgagtcaattatcattgttgagagcacagacactcaatggtatcaaaggaatgacagagatatagtgatatataagtcatgtgtcatcacccctcaatggaatctgcccacaacatcccagaaatgcttgataattctctagatggcaattcacagtttcagaaaggtgtgtaatgtatgtctctgagatactttctcccagggcaaagatgagaaaggattccagtaactgtttgctctgtgctaccagctatttttgagtttgactttcagaagagagaatgatctttctgcattgcacaaaacaccactggcctctgaaacactgattcttaacaacctcaatttgaagggcag

SEQ ID NO: 276351 - DNA, 354 bp, Homo sapiens
atgcatggccaaagaataaattaatacatttaggtttgcttatttaggagatacagaaaggaaaaacccatagcacaaagatgagcagacttctaattatcgttcaaatacaaatataaagaccattccctgacctcacctgatttattttctctacttatataatttatagaaatcagctgtgtactcarttgtcttactaaaatctaactctcacctgtactttaattttctattattttcttataccaaattggctattgtaaattctgaaagtagtccatttctaatccctaagattatatgaaaaaaactcatataactgaaaccattactttatgttcattgccacca

SEQ ID NO: 276352 - DNA, 656 bp, Homo sapiens
ttacattctaaaaatcatgtccactaaattactaaattgcccttcctcaggttaaagccacatgctccttccttgtagttcccttctccatttaaagcaacattcagctcagtctctgatttaataacaacggagacaccgaaaacagaattttaattccatctctatcattaatatattacatgaccttgggcaatctccaagcctcatctccttcatctaaagaaatgatattctcaactccatagtagcttactttayagtcttgttcaaaggaatgattagcaatgtctgccaggtatattgaacatattaagtgctagatacatatttaattacaagatggaatctttatgatattaaaggatctgctgcaaaaaaaaaaaagaaagcaaaataaatcatgcactggaatgcaggatcagagcaattggacatttttcttccttggtaagaaatttataagaaaaaaagaaaacaccttctaatgctacctgttgcaaaaaccaactaggtcagttttacaatagaattttttaagacaatgaactatgtgccccaatgtggtttatgttgaggcacatattttgctattttgtgcagaactgcagaacacttatttgtcctactttaagtaaacctcctgtagaccaaga

SEQ ID NO: 276353 - DNA, 588 bp, Homo sapiens
cagcctcagccagcacctgtctataggaagtaaataatacaacaaaacataaacaaaaataggtcatttgaataatcttaaagttctgtcattgaaatatttgctcaaagatcatttttatttctagaccattataaaccaagactggctgcagctatcattgtacctgattcacagctatgtaatataaataagaacttttaaaaagayttccaaagtaaaggcaaggggactggcaagttttcaattaagatgtctcaacctaatttaagattgaaatgccaaacacaaagttggtcatttggtgaacacgtaaaagagcagataataaaaagatgcttttagtaagcagatgtgcaatgttaatatagaggttatgtcattttatcaaattccactattacagtggtcatatgtttattgtaataaactgtcatcaaagttttcaccagactcagctgaattatgttttttaattcagctttttccaagttgtcaaatattgaatgtgactgtgaatttttttggccagaaagggggaaataaagagaaagaagagaaactgggagtttgaattgatttatttta

SEQ ID NO: 276354 - DNA, 587 bp, Homo sapiens
cttttagtaagcagatgtgcaatgttaatatagaggttatgtcattttatcaaattccactattacagtggtcatatgtttattgtaataaactgtcatcaaagttttcaccagactcagctgaattatgttttttaattcagctttttccaagttgtcaaatattgaatgtgactgtgaatttttttggccagaaagggggaaataaagagaaagaagagaaactgggagtttgaattgatttattttaagaataattcatattggttmtttaagtaactcatcagttaaccacatcaacacacttaatatcttctacttacatagttaaaaatgtatattttgcttatgttaacttgaaaagaggatatggagtccaaaaacattcagattataatgctttttaaataaaatttgacaatatcaaaagaaaacaagactctaggtccatcccatagtactttactaaagaacactcctgtcagtctaatctaatttaattatgttgaaagtggattggcttcgaagattgaggaaaagaaataatatttaaattatcttcatttgagtaagatattttattttgt

SEQ ID NO: 276355 - DNA, 587 bp, Homo sapiens
tcattaaatagaagtggtatatatatatgataagatccaagcaggtcctgaagatacaagttaaatgaagaagtcgtccaaatttcccactcattctacactatcttttctctcacagcctgcttctatggcctcatagagagttttctatgatcagtggacagagttagagaagagtcaggcctggtttacagacttttctgcacattgtgcaagcaccacctaaaagtggacagctgcagtaatacagctcctctctgggatatctctaaagaacagtggtgaagacaaacctcctactgggcagaactttaggstgggcacgtggttttgcggtttcgttggaaggagagaaggtcagatgtttgactatatatgaattcatgggctgtagccaatggtttggttggatggctagagacctggaagtaacattattggaaaattgatgacaaatacatttgggaaagaagtatgtggatagacctctctgaatggacaaaaaacagaagatatttgtgtcccatgtaaatgctcccatagtgtgtttagcaggggaagactttaaatcacaggataaatgctgt

SEQ ID NO: 276356 - DNA, 587 bp, Homo sapiens
tcattaaatagaagtggtatatatatatgataagatccaagcaggtcctgaagatacaagttaaatgaagaagtcgtccaaatttcccactcattctacactatcttttctctcacagcctgcttctatggcctcatagagagttttctatgatcagtggacagagttagagaagagtcaggcctggtttacagacttttctgcacattgtgcaagcaccacctaaaagtggacagctgcagtaatacagctcctctctgggatatctctaaagaacagtggtgaagacaaacctcctactgggcagaactttaggctgggcacgtggttttgcggtttcgttggaaggagagaaggtcagatgtttgactatatatgaattcrtgggctgtagccaatggtttggttggatggctagagacctggaagtaacattattggaaaattgatgacaaatacatttgggaaagaagtatgtggatagacctctctgaatggacaaaaaacagaagatatttgtgtcccatgtaaatgctcccatagtgtgtttagcaggggaagactttaaatcacaggataaatgctgt

SEQ ID NO: 276357 - DNA, 591 bp, Homo sapiens
tgtccagcctagccctgctgcatttgacatcgttctttgggctagtggtggggaccagacatagcccaatccttccttagagcctgcctccctaaacactgatatactatccaaatgagtccaacagtgtctgtttcctaaaaatgtagtttgtcaccagagaaatacatataccaagtaaaagaattcatgtcttcaggtggttgaacatttaagtgaatccagaaatatcaggttcatattttccaacacgtattctggagatgcataaaaatactgtctaaagcaaaagaaaagcttgaagctagcttgagaccaagcagaaatgagggacagcttgaattctaatgatcctgattcttagtcactgcttctgttttttgcatgtagccatcacggcttaaccagggaagcagaactaatgtgatatatagatacatgtcaagagacttatygtagggaatttactaacccaattataagggctggctatgaagtcttcacatgactgtttccacatccagtgctagaacccagcacaggcagtctggaagaagaaatcaccagtggactggaaccccatgagtacaa

SEQ ID NO: 276358 - DNA, 596 bp, Homo sapiens
gtaccaaaccctgcatattgtataattttcccatacatacataccaatgataaagtttaatctataaatttgccacagtaaaagattmccaacaataactaataataaaatagaacaatgataacaatatactgtaataatagttatataaatgcggtctctctctttctcaaaatatcttattgtactgtattacccttcttcttgtgatgatgtgagatagtaaaatgcccatgtcctgagatgaagcgggatgaatgacacgggcattgtgatgtagcatttaaaacttataaattgtttgtttccggaattttttatttaatattttcaggccatagttgaccatgagtaaccaaaaccatggaaagtgaaaccatggataaggaggggccactgtactatttatgtgggagaaagacaagtatttgttatcatttagtgagaaacacacagtataaggaatagtttatgaaaggataaccagatcagggcagaaatgctcctaaatttgactcatggaggctccttagagaagttatatgtgggttaaaaacaaaccgaaaaaggttttaaagtgaaaatgctaaagaaaa

SEQ ID NO: 276359 - DNA, 547 bp, Homo sapiens
tttttggattagggatgctcaacctgtagttaaaactattatttgtgacagaaaatttattcctgaattaggaaaaagaaacactgaaaagggagttattgacttacttattccttcattcaacaaataatttttgggtgcctactctgtgataggcatggttctggatgctgcagagcagtatgaaaatgcattcgaactttatgcccattagaagctcagagccttgtggaagaggcagagaagttacaaataaaaatcagctacatgatttaatgacagatattgttgaattcagtggggaggcttcagcaattaagggtgtagagaatgaccagaagcacttttttagaagagtgtcaggcagggcttctctaagtagttgatatttgagcaaagacctggagaaaatgaaggagggagttacatggatagctgaggaagggacattccaggcagaggcaatagcaaatgcagcgacctgagtgagaattaatttgtccttttcaaagcaaatcaggagctgcraaggagtgagaaaagggat

SEQ ID NO: 276360 - DNA, 607 bp, Homo sapiens
aaaaacatataatcatcatgatagggcagcagaagagcatctgacaaatttcaacactctttcatgacaagaaatgctcagcaatttgatttagaagtaacayacgtctacacaataaagggcatatatgaagagcccatagctaacatcatactctaaggtgaactgctgaaatttttcctttaaattcaggaacaagaccaagatgtccgctttggcaatttgtattcaataggcttctggaagtcttagccagagcaattagacacgaaagataaataaaatgcaaccaaattgcaaaggaaaagtaaaattgtctctgtttgcagatgacattatattaaatattaaaaattctaatcgcaccaccaaaaacttattagaactaataaattcagtaaagttacaggatacaaaatcaacatacaaaaatatttttcattttatacactaaaaatacactctttgaaaaagaatttaaagatataattctatttccagttgcatcaaaataggtacttttgaatattaaccattaagaacaagagacatacatatattatttagggctatagcggtagctgacatcagaattaaccacatccac

SEQ ID NO: 276361 - DNA, 542 bp, Homo sapiens
tgcttttgtcaaaagctattttgatactttgacttgattttaggtatatgatcgactttgatgatatttttatcaacatgtaaaaaaaaatcaaagcagaaaacaccaggaaaagtccagaaacaaacactaaaatcaaaataatttggaaggcctagacaagaggaagaaaatggggaaagataagcagtttcctgtgtctgtctactatcatcttcacaaccttgtgtctattaggagtattaatatctcattaatctcatatactgaagtagttagcgacctgaagtttaggaacatatctgcctagaattgtgccctaacaatattttasatcatgatagatattaacatacatttattaatgtattattatctccgattttccttgcatccttatagcacctagaagaattgtgttagttatcttttgctccataccaaattaccccaagtatactggcttaaaaacaacacacatttattatctcacatgagataataatggagtctgggcaccgtatacttgatttaatttggct

SEQ ID NO: 276362 - DNA, 542 bp, Homo sapiens
tgcttttgtcaaaagctattttgatactttgacttgattttaggtatatgatcgactttgatgatatttttatcaacatgtaaaaaaaaatcaaagcagaaaacaccaggaaaagtccagaaacaaacactaaaatcaaaataatttggaaggcctagacaagaggaagaaaatggggaaagataagcagtttcctgtgtctgtctactatcatcttcacaaccttgtgtctattaggagtattaatatctcattaatctcatatactgaagtagttagcgacctgaagtttaggaacatatctgcctagaattgtgccctaacaatattttacatcatgatagatattaacatacatttattaatgtattattatctccgattttccttgcatccttatagcacctagaagaattgtgttagttatcttttgctccataccaaattaccccaagtatactggcttaaaaacaacacayatttattatctcacatgagataataatggagtctgggcaccgtatacttgatttaatttggct

SEQ ID NO: 276363 - DNA, 548 bp, Homo sapiens
aggattgaaagcctcattttctcattgactgttgactggaggcttttctcaatttattgccattaagttctcaccatacagcagctcacaacattgcagctggctttctttacaacaagccagagagcaagtcaataaagaacaaacaagatgtaaatcagagtctcttgtaatctagcattgaaaagttgcattgtatcctgtttgctgtgtttcattgattagatgagagtcatttggtatggtctatactcaagagaagggrattacacaaggacacagagcatgaatactgcgaggtggggctctttgggccatcttggaagctgctcccacaacattacaggatatataataaccactcaaaaagatagtgcaactgaatgggagattaagaatatgccctgttctagcaatagcactacacagtttttgcttttataattttctcccattattgagaagaaaatatattgacatggttgagaattatgtgccaatgtctacaatacctgtctttccatatgttatctcatttaactcttacc

SEQ ID NO: 276364 - DNA, 545 bp, Homo sapiens
attcctttctccaatttacagatgaaaatactgaagctctaagaagtgaaatgagaagctcaaaaagccacagtaaacaagtgtagatgattttatagctccaaggtttttacattgagcatgattcttcttattttcctctttcctcatagacatgacyccaagattagaatggtccgatggcaccatttacctcttatggtcctcactgctacacgtacagatagatgtcttcccactgaaagtcaaaaatctgctgatgggcaggaaaatgtcagcacattgctgtagctctctattctcagataaatatattaacacatttctcctacttatttctgtacaaaacttattttgtttctggcagcatttatgctgatgtcaatgaggcctttgacgggaggcactttttattgctgctgtatgtcttcttcctgcctgccttcttcccttctagaaataaatattttacttggccatctgaggaaatattttccacctggcacgatatttatatatacattttcaaatatcatcagaagtgt

SEQ ID NO: 276365 - DNA, 545 bp, Homo sapiens
attcctttctccaatttacagatgaaaatactgaagctctaagaagtgaaatgagaagctcaaaaagccacagtaaacaagtgtagatgattttatagctccaaggtttttacattgagcatgattcttcttattttcctctttcctcatagacatgactccaagattagaatggtccgatggcaccatttacctcttatggtcctcactgctacacgtacagatagatgtcttcccactgaaagtcaaaaatctgctgatgggcaggraaatgtcagcacattgctgtagctctctattctcagataaatatattaacacatttctcctacttatttctgtacaaaacttattttgtttctggcagcatttatgctgatgtcaatgaggcctttgacgggaggcactttttattgctgctgtatgtcttcttcctgcctgccttcttcccttctagaaataaatattttacttggccatctgaggaaatattttccacctggcacgatatttatatatacattttcaaatatcatcagaagtgt

SEQ ID NO: 276366 - DNA, 545 bp, Homo sapiens
attcctttctccaatttacagatgaaaatactgaagctctaagaagtgaaatgagaagctcaaaaagccacagtaaacaagtgtagatgattttatagctccaaggtttttacattgagcatgattcttcttattttcctctttcctcatagacatgactccaagattagaatggtccgatggcaccatttacctcttatggtcctcactgctacacgtacagatagatgtcttcccactgaaagtcaaaaatctgctgatgggcaggaaaatgtcagcacattgctgtagctctctattctcagataaatatattaacacatttctcctacttatttctgtacaaaacttattttgtttctggcagcatttatgctgatgtcaatgaggcctttgacgggaggcacyttttattgctgctgtatgtcttcttcctgcctgccttcttcccttctagaaataaatattttacttggccatctgaggaaatattttccacctggcacgatatttatatatacattttcaaatatcatcagaagtgt

SEQ ID NO: 276367 - DNA, 570 bp, Homo sapiens
ttatgacaaatgaaggaagggaatatcttaaaataaactcctaataacttggaagtaacagttgtcttgacatcagatccctacattactaaatgaaggacattctttactaactggctttcttacaaaatctgtgcatttaaactgagagttaataatgggcttaataataggtgtctggttaatcaaagtctcatgagcaagattttagcatcagggaagcacgtctttgatagaaatacatttttatctttgaagatctaaaaacctcagagtggggttttggtactagaagttacaactcttgtacagtttgtttaacattttcaaaacttaaactcctcaatgatgtattttaggaaggtgttcgtgatgattaaatggtaatgcatgcagtctacttagyacagtgtggaatacataataagagtttcactttttgtcttagtgttattgttacagatgctgcctcgcatcttcccgctcttttttttttttacttctctcactctattctcaagcatttatttcttcatacatccgactttcattcaacaaataattattact

SEQ ID NO: 276368 - DNA, 576 bp, Homo sapiens
atagttgaagacatcaacactcctctgccagtaattgacagatcaagcaggcagaaaattagtaaggatataaatggtatgaacaacaccataaatcaactaggtataattgacatctatagaatactccaaaaccagcagaatgcgcattcttctcaagctcacatacaacattcatcaagatagaccacattttgggctacaaaacacacgttaacaaatataaaatgatggaaattacgtaaagtatgttctcaaaacactaaggaattaaactagaagttaataagagaaaaatagctggaaaatcccaactatttagaaattaaatgacatattttaaaataactcatttgtcaagactctcaggtgaaatttaagcagcattttaaactaaatgaaaataaaataccacttatcaaaatgtatgctatgtaccaaagtcagtgcctagagggaaatttatagcactaagtgcacacattagaaaataaggaagatctaaagtcaatattacaaactttcaccttagraaactaaagaagggagagttagttaaacctattgccaggagga

SEQ ID NO: 276369 - DNA, 431 bp, Homo sapiens
gtgtttggttttctgttcctgagttagtttgctgagaatgatggtttctagcttcattcatgtccctgcaatggacatgaactcatttttatggctgcatagtattccacggtgtatatgtgccacattatctttatccagtttattattgataggcatggaaattgttttttagttattgctaataatcaataaaaatgtattgactgactgactgactactgtctgctgggctcagtgaaaaaatgagataagaatccttaccttcgtgatgattccacacacaggatatacaaataacaaataagtaacaatatcatatgatgtaacaaggggaggtcaaggatgttccaygattaactactagagaagtggcataaagacaatgcttacctgcttaccttatgaatccacaaaacaaagaggcctgg

SEQ ID NO: 276370 - DNA, 624 bp, Homo sapiens
ggtgccatgattttctgcctgcaaaggctactgtcattctattggctatagccaagaatgtggcatagcttactgcaaatagcaaaactgggccattgtctctgttagagacttaaaaagctgagctttttgatggctgtaccacttcttcagttatattctgtggcagctcctgccaacacatgaagataatgaattaaaaaaactcttcttaatggatagttcaatacccattttattaatttattgcaaaggtcaatgaagtgtaagatacactaagtagtagctgttctgtaattctctgcttcaagactggggaagtaggaaacttgtcacacctcctaaggcgatcatctgcatgcctttccatcctatttgtttcacattagatatgagttacaactcctgattacaattaattgtcccaaaggattatcataaaactaatttctagttaaagaatatcgaggaaccataaaaatgatcacayagatactggtgttttataaatgaacacacctaatttttatagttttaaaataagatacttttcaaaaaggccctataatagtcaagcactttaacccaatgcaaactctcccgtccagcatggacagataatgc

SEQ ID NO: 276371 - DNA, 596 bp, Homo sapiens
ctgttttggttcagttttgtgtttgtttctctgtttaattatgctaagatctagccatatttctagctatgcaagaaaatcaagaagcatagtagttataagcacaggtttggggatcaaaaagatatattctagaaccttgatgtatcacctagaaattctgtgaccttgaacaagttacttatcctttgcaaccccagtttacctatctatacaatcaggacaacagcgagtattgaagacagattctgtgtaattcaaataaaataatataattagtatttctagcttagttcctggaacataataactgccaaaccggtttaattattattgttattatcattattcttattataaacatcatcactattaagaaagaatttacagtggaarcaaagtaagaaggaaggcaagtatgaagctaatctagccaatctccaggtaatccaaacccctgaagcaaacattagcacaagggaaagagtgtattattacaagacctactacagctttatgattattagacctcgataagcatgtgatagacacaaatggacagctttcatttgtccagggaaatgtgacctgtgaaa

SEQ ID NO: 276372 - DNA, 373 bp, Homo sapiens
tccactggtatagcattatacacagtagtttcactgcgttaaacattttctatgctttgactattcatccctccctccccactattccttggcaaccactgatctttttacctttcccatggttttgccttttctagaatgttgtatagctggaatcatactgtatgtagccttttcagattggcttatttcacttaacartatgcatttattttatattttcttttcatggttctatagctcattttgttttaagcacagaattttattttatttttttttcattttctggatgcccacaatgtattcattcacctactgaaggttatcttggctgggtccatgttttggctattataaataaaggtgctat

SEQ ID NO: 276373 - DNA, 373 bp, Homo sapiens
tccactggtatagcattatacacagtagtttcactgcgttaaacattttctatgctttgactattcatccctccctccccactattccttggcaaccactgatctttttacctttcccatggttttgccttttctagaatgttgtatagctggaatcatactgtatgtagccttttcagattggcttatttcacttaacaatatgcatttattttatattttcttttcatggttctatarctcattttgttttaagcacagaattttattttatttttttttcattttctggatgcccacaatgtattcattcacctactgaaggttatcttggctgggtccatgttttggctattataaataaaggtgctat

SEQ ID NO: 276374 - DNA, 547 bp, Homo sapiens
ccagctcttttattatcaatggaaagtcatagagttaaaagttctgtaaaagcaagaagtgggcagaaaccacacggagagagaaacagaaaaagctaagagaaccctgttgttacccagtccaccactaacatcctaaaggtggggctcacattgaaatactgaatctgtaattcatgcctaaaatagctagaactagagttgcacataattacattaaactcaarcagaagccacacagggaaggttgaaggaaggggaagaatagaaaagccattcagagaatgtcgagggcttagcagtaagcagcagttctcggtttcatcaaaaataaacaagcggagggtagaagctgccttgaggtacgttggctgcgcccccttatttgtagtaaacagtgactacactggtaagcacaggactgtggatgaaacatcccaggacattgtgcagctccccagcagtcttacagaggagctatgcaggcaagacgtagtctgtttctgcggccgtagagagacacccttacggtttctggaagctgcaa

SEQ ID NO: 276375 - DNA, 558 bp, Homo sapiens
gatttggagtatggagtaagtccaaataaataaggattgcattcttaaaattaatagaagtttagcagatttgatgggtagaaatcaaagtataaaattaaacttattgctgtacactagcctgtataagtttgataattaattgtcaaatatacatgtgtgtttacatttttatatgtgtgatcaccaacagtagcttaaaattttcaagtacccaataagatagttcattaaaagtagcaatactactcaagggaacatgagagatagtgaatattaaatattaaatatcatctaaatgaaagatacacaatgtttgatggattgcataaatcattattgaatagaagtcaattatctttacatgatatatcacctcagtgtaattctgatagaaagcagtaagtttttttttkggttttgttttatttatgtgagtatgcatgtttgtagagcagattctataaatgtatagagaaatatagagaacaaaacagacattcttatacaataacaaaatgaaagaattatctaccaaatattaatatctataataaa

SEQ ID NO: 276376 - DNA, 577 bp, Homo sapiens
cttttacatgcctttttccgttattttttatccaatcagactttttcagacttcctttgatacaagtatctgcaggattttccttgtcacctgtagacactttttctcttttcaaggaagctagaaacagattttgatatgcctaaagttttgaagtgttctacaatctctagaaagggctccaagaaagccatatgtaatatgcattttttgtataatttgagaatatttatttcctctatagagagcaagaaaatgaatgggaagtggatgtatgaaagtcatgtgttatgtattcatggaaattaataagtatatcatacataggtyaagaaatgggaggacaaagagataactatattcatgaggcctgaaataaacaagacacctgggcacaagatacttatgatatactaaatatacagctaacactagatatccagggtacactgaaggttatacaagcacccagtattttcaaggccttgattcagccacctactggggacacccattctgtcaccatgtgttctctgttcaagaaacacactactattcagcctttaacaataaggaa

SEQ ID NO: 276377 - DNA, 600 bp, Homo sapiens
ctgttgaggattcaaagaacataagacaaaggctctgttcacagccatcaacattttctgttaatagctacctcttaatgtattcatatttctgatggatagccctttgtattacctctttgtgaattgttcaggatcctatataattgacttagtaaaacttttctcctttctaccttaaatattaaaaagtaggtctattttgtttatgatttttcctaatgagggatagcacatgcttgtatgtttgtgtttcaaaaaacatactatgtggccaaaaatggtctcagttcaccacatgatttagtgaaggcccctgtattagtctgttctcatgctgttaataaagacatacctgagactgggtaatttataaaggaagaatgtttaacggactcacagtgtttcacaaagagagtttcagaactaccttggtttttaaaattagagttctagttagttctagttaatgtgttttagctaataatttgttggtggtgttaataattcatggagtcagcatggctgggggrgcctcacggtcatggcaggaggcaaacgagaagcaaaggcatgtcttacatggcagcaggcaaaaga

SEQ ID NO: 276378 - DNA, 616 bp, Homo sapiens
acggactcacagtgtttcacaaagagagtttcagaactaccttggtttttaaaattagagttctagttagttctagttaatgtgttttagctaataatttgttggtggtgttaataattcatggagtcagcatggctgggggagcctcacrgtcatggcaggaggcaaacgagaagcaaaggcatgtcttacatggcagcaggcaaaagagagcttgtgcaggggaattcccacttacaaaaacatcaaatctcatgggacttcttcactgccatgaaaacagtatgggggaaactgcccccatgattcaataatctccacctggccccacctttgacacatggggattattacaattcaaggtgagatttgggtggggacacagccaaaccttatcagccccattgcttttaatgtgaatagcctgaattaatttatctaattattgaggttagacacatgttgtataattgttgcatttatttttttttctggtttcaattgccatcatcttgtgtcttcgttttaacatattttcggccacagtaggggaactgccctttgaaagtattggaatcatctttgattccaattgaactgtacaaatgttttgttt

SEQ ID NO: 276379 - DNA, 560 bp, Homo sapiens
gaaaaatatcctgaaaatgctgtggcaaaacatttttcaatctagaattctatgcactgctaaactacaactataggatgagagtaaaataaagacatatagacaaagactgaaaaattttacaactcacagaaagacacttaagttaatgtatagtaaaagaaaatattttcaccatttggatttcagaaatctaaaagttttataacacactgttagaacataaggaaatgagcaatgaaataaattattgatagatgtgtaatttgttgcagccgtctgtgaagagcaatttagaagtgtccattaatatttaaacacagatacttttgacccgcaaattcaaccaagagattttcacctgtagttacacttgcactggtgtrggctgaagtatatgcaagaatattcattgctacattgttaatagcaaagaaagaaatcaataatataaaacatatagcatttaatatggtgaacaccctgttaagagtgctttacatatgttaactcatttattaactctcccaacaatcctctgaggccagaacaattatcat

SEQ ID NO: 276380 - DNA, 549 bp, Homo sapiens
tttcagctcagtcacaatcattttttgatagcctatcctataagcttaacttatagtgttaatcagtattaatacatcttagtgggaaagaaggaaaaaataaacgatcacacacacacacacacacacacacacacatacatttacgtaacagagcaagtgtgaaaatacctaaaggctttatagctccttttgtcaatggatacatgacagcatttttggcattctttactactcttattctatgctccatttgtcttcagtcagcacctcagctgcccttatgttttacttggtaaggcaaattcctaaatgagcctggtaattagtcatccagcttatakgaaggtactatagtttttcattaactttttcactgggcttgagagtagtaaggactcccagagaattccttgtgttccaaaagtacttctccttgacatcttggtataggattaataactgtttacctttgataatcaggaagaatgactccagctagtacagttacgtgatgcctatacattcctttttttctgggaaaaatgt

SEQ ID NO: 276381 - DNA, 552 bp, Homo sapiens
tgttgaacaacttaaatattttttctcattctattttatttctttttgtggcttgttagccataattcttcgtttcattatttcagtggttgccttagagtttatagtatacatcattaatttatcgtagttcatctaaaagtataccacttatataaaataacattattttcatttccrcttcttttgcactgttgttgtcatacacttttcttttgtgtgtgtgtgtgtgtgtgacagagtctagctctgttgcctaggctggagcacagtggtataattttgcctcactgcaacctccacctcctggattcaagtgattcttgtgcctcagcctccagagtagctgggattacaggcgtgcaccaccacgcctggttaatttttgtatttttagtagagatggggttttgccatgttagccaggctggtcttgaactcctgtcctcaagtgatctgcacgcctcggcctccaaaagtgctgggattacaggcacgaacctttgtgcccggcctgttttacttttaaatgctataaatcacacattacat

SEQ ID NO: 276382 - DNA, 552 bp, Homo sapiens
tgttgaacaacttaaatattttttctcattctattttatttctttttgtggcttgttagccataattcttcgtttcattatttcagtggttgccttagagtttatagtatacatcattaatttatcgtagttcatctaaaagtataccacttatataaaataacattattttcatttccacttcttttgcactgttgttgtcatacacttttcttttgtgtgtgtgtgtgtgtgtgacagagtctagctctgttgcctaggctggagcacagtggtataattttgcctcactgcaacctccacctcctggattcaagtgattcttgtgcctcagcctccagagtagctgggattacaggcgtgcaccaccacgcctggttaatttttgtatttttagtagagatggggttttgccatgttagccaggctggtcttgaactcctgtcctcaagtgatctgcacgcctcggcctccaaaagtgctgggattacaggcaygaacctttgtgcccggcctgttttacttttaaatgctataaatcacacattacat

SEQ ID NO: 276383 - DNA, 654 bp, Homo sapiens
gataggggtctccagaacttccattcacatttagaagagggcagcggctttctatggaaaatatgaactctcattcatctctattccttcttctagctatggtccagctcagctgtttggaataaagtatctatatgaagtctgcgaatggttctcagactggttgaacattagaatcacctgagtaccttctaaaattcttattacccagggcatatctcagaatgagtaccrcagggtagggataggattagggatcatgatctctggagtctggtttaggcactagtgctgtttaaaactacgttcatgaggtggaggttgcagtgagccgagatggcgccactgcactccaacctgggcgacagagtgagagtctgtctcaacaaaacaaaacaaaaaaaaccaactacccttgtgatttgaatgtccatccaaaattgagaaccattaggtaaggccaagctgtataattaaagagcagttttcatttgtctggtgtggtggcagctttttgataagggaagtattgttgccatccacatacctgagcctcactcctgagaacactggtgtgtatgttgctaaaattccccaggtgattctgaggttccttcctggataaaaaccactgaccctgggaatgtacccact

SEQ ID NO: 276384 - DNA, 1291 bp, Homo sapiens
gataggggtctccagaacttccattcacatttagaagagggcagcggctttctatggaaaatatgaactctcattcatctctattccttcttctagctatggtccagctcagctgtttggaataaagtatctatatgaagtctgcgaatggttctcagactggttgaacattagaatcacctgagtaccttctaaaattcttattacccagggcatatctcagaatgagtaccgcagggtagggataggattagggatcatgatctctggagtctggtttaggcactagtgctgtttaaaactacgttcatgaggtggaggttgcagtgagccgagatggcgccactgcactccaacctgggcgacagagtgagagtctgtctcaacaamacaaaacaaaaaaaaccaactacccttgtgatttgaatgtccatccaaaattgagaaccattaggtaaggccaagctgtataattaaagagcagttttcatttgtctggtgtggtggcagctttttgataagggaagtattgttgccatccacatacctgagcctcactcctgagaacactggtgtgtatgttgctaaaattccccaggtgattctgaggttccttcctggataaaaaccactgaccctgggaatgtacccactwgttgttgcattacttgtgatgtacttataaatcaagtataggccgggtgcagtggctcacgcctgtaatcccagcactttgggaggctgaggtgggtgaatcacgaggtcaggagatcaagaccatcctggccaacatggtgaaaccccgtctctactaaaatacaaaaaattagccaggcatggtagcacatgcctgtaatcccagctactcaagaggctgaggcaggggaattgcttgaacccgggaggtggacattgcagtgagctgagatcgcaccactacactccagcaagactccatctcaaaaaatagtaataatttaaaaataaataaataaataaagtatatttctttcatcagcttcatgagctwgagtagtatgaatttcaatctggagtgatcctgttttctaagtgttcacaaagcttggtttctgtacctgtaaagttgagagccagatgctccactgtggtaaaagtgccagggtaatgagttgaggcctgcaaaccaggtttattttgacgtatttaaagtttgagacccactcgatgctttttctaggtaaatagtcatactaattctgcttcttctgactgaagtatcaggaatcccagccaactacagtttaaagat

SEQ ID NO: 276385 - DNA, 636 bp, Homo sapiens
gttgttgcattacttgtgatgtacttataaatcaagtataggccgggtgcagtggctcacgcctgtaatcccagcactttgggaggctgaggtgggtgaatcacgaggtcaggagatcaagaccatcctggccaacatggtgaaaccccgtctctactaaaatacaaaaaattagccaggcatggtagcacatgcctgtaatcccagctactcaagaggctgaggcaggggaattgcttgaacccgggaggtggacattgcagtgagctgagatcgcaccactacactccagcaagactccatctcaaaaaatagtaataatttaaaaataaataaataaataaagtatatttctttcatcagcttcatgagctagagtagtatgaatttcaatctggagtgatcctgttttctaagtgttcacaaagcttggtttctgtacctgtaaagttgagagccagatgctccactgtggtaaaagtgccagggtaatgagttgaggcctgcaaaccaggtttattttgasgtatttaaagtttgagacccactcgatgctttttctaggtaaatagtcatactaattctgcttcttctgactgaagtatcaggaatcccagccaactacagtttaaagat

SEQ ID NO: 276386 - DNA, 615 bp, Homo sapiens
agagtgcctagaataaaaaacagtaatttaactacaattaccgggtaggctgttttcctctcacaatttgatcagtctcttgaagccacacagaayttcttctgaagacgtgtattccttggcaggctatttcctccagtgatacaccaggcccctctctgctggggtcactgctcttctggggagatggggctcccctccttccaaggctccagggttcctgtcctgggccccactcatctaagttctgaatcttctgagatttggtgtaaagtctggtgaaagaaagagcaggaaagaggtgagagctgtaaaacaaagaaagtcctgaccattttcagagttggaggggccctgctgtcacgaaatatattccccaccccacttgccatcagtacacactcacatatccactgagaaaaccttagcctggaccttttccgtaaccttcactgctcagacacttacatattcgctgctagtcccctctgttgctgccacttcctgggtcaggaagttaactcagaccggattaaactgagaagtgaaactactgtgggaggcggggctcataagatttaggagaaaactagtgacgttgttcatatcatttgc

SEQ ID NO: 276387 - DNA, 604 bp, Homo sapiens
aatccacaataattgatctatttcttcttagatggttgtcccaggcctagcaataaaaaagatgagaattttctctcaaaatccaaaagagaggcatttctatataaattcacagaaactggttaaatatattggatttaaaagtaaagaatataatccttactcttcatttaacataaaatattaaattgagatggaaaatcctatttttcatttgttcttatcaaggtaacaatggtaaatattaaagttatttgtccattaataagtataaagcatgcctattggtcactgtatgcattactttagcaattacggggactctttaaattccactggayaattattcctacatccagtcccataaagtttacaatgtgaaatggcaacagttttctatattcattaaaggtatttttgttttggcattatcacataacaattaagcatagaaatagaaattccttaatttttgcagtaaaattctgatctcagaatagtttagtttgcatttaagttgtgctacatgtatttgtggtcagaacattttgtctattgcttacattagaaactcaaaactgacaaacctctgcagctacttccc

SEQ ID NO: 276388 - DNA, 525 bp, Homo sapiens
aaacaagttcagggctcccactgattctacattatggtgagttgtgtaattatttcattatatattacagtaaaataataatagaaataaagcacacaataaatgtaatgggcttgaatcatctccatatcatcccttccccttctcccgggtccgtggaagagttgtcttcaagaaaactggtctcrggtagcaaaaaggttgggaaccactggtgtaaatgctttaaggaatagttaagcagcttaaagtttacatgctacaaaaaatacaggtttaaatgctaataaaaatgggtgcaaatgaaaacactctcttgctgtggtccaaggaatcttaggcattctatcagaaagacttacagcttggagttgcagctgccctcccacatcctgtccactgtaacccttgcaacacacaaacacgcacacacacgcacatgcacacacacacacacacacacacacacacacacacacacacacactgtgtttcatgccctcactagggtggcctgggagggaa

SEQ ID NO: 276389 - DNA, 525 bp, Homo sapiens
aaacaagttcagggctcccactgattctacattatggtgagttgtgtaattatttcattatatattacagtaaaataataatagaaataaagcacacaataaatgtaatgggcttgaatcatctccatatcatcccttccccttctcccgggtccgtggaagagttgtcttcaagaaaactggtctcgggtagcaaaaaggttgggaaccactggtgtaaatgctttaaggaatagttaagcagcttaaagtttacatgctacaaaaaatacaggtttaaatgctaataaaaatgggtgcaaatgaaaacactctcttgctgtggtccaaggaatcttaggcattctatcagaaagacttacagcttggagttgcagctgccctcccacatcctgtccactgtaacccytgcaacacacaaacacgcacacacacgcacatgcacacacacacacacacacacacacacacacacacacacacacactgtgtttcatgccctcactagggtggcctgggagggaa

SEQ ID NO: 276390 - DNA, 545 bp, Homo sapiens
taaacaacaaattgtatatatatataaacacacacacatatatgtacatgtatgtatatgtgtgtgtgtgtatatatacatatattttttttctcacagttctcgtggctgagaggcctaagagcaagatgccaccagatttggtgtctgatgggagcccactcctcttaggtggtggtttcatgctgtgtcctcacatggtagatgggcaaacaagctcctttgggcctttttgttttgtgatcctttttaaaaaaaaaaaaaaaaaattgagacagagcctcactctgtcacccaggctggagtgcagtggcaccatcatagctcactgcagccttgacctcttggcctcaagcgatcctcccacttcagcctcccaagtagctggggctacaggtggatgctgccatgcctggctaagtttttttatttctttatagcaacagggtcctacactacattgtccagactgatctcgaactactgggctcaagcaatcctccttctttggcctcccrgagtgcttggttaacaggcatgagcca

SEQ ID NO: 276391 - DNA, 454 bp, Homo sapiens
tcatttatttgttagctttttttcctttgctgtgcagaagctttttagcatgatrtaataccatttgtctattttgcttttgtttcctgtgcttttgtggtcttactccccaaaatctttgtccagaccaatgtcctgtagcatttccccaatattttcttttaatagtctgaagttttaggtattacatttaaatctttactccattttgagtttatttttatatgtggtgaaagatgggactctagtttaattctgtgtataaataaccagttttctcagcaccatttattaagcagactgtcctttctttaaggtatgttctcagcatctttgttaaaaatgagttggctgtaagcacgtggatttatgtctgggtcctcaactctttccattgttctgtgtttctgttttttgccagtaccatgctgtttttgttactataccattgtag

SEQ ID NO: 276392 - DNA, 586 bp, Homo sapiens
actctaatgaacagatcagtgaaaaaatatacttatacagaagtctgaaggtggagatcagtactttctagatgttacattttaatagtagctaaactaatgatgacatgtttatattgtcttatattttttaaagatattttcttatcactgttgtgaaaaagaaactttgtactcacaatttagcgtctccacttacactttataagcatctttataatatcgtcaatcttgctgaaatttcatataagcagtacaaaatacagtacatcattataaatcaaggagaagcattttggtcacagtgatctctaattacaatgtggactctctcaatttagaaaactactgttatacagctgtaatttttacttaatgccattctatacaaaccaatataacttggatgttcacaatccacgaatgcctactaaaagtatttttacttactttgtcttttaaattgataacccatgtattttaagtttatatatatagtattttagtaatacactgaattacttaaaacrtaaattggagtttttactaaaaattatatcttcacctacctgcctcccattttaag

SEQ ID NO: 276393 - DNA, 623 bp, Homo sapiens
atcctcactaacacttattcttttttgtctgtttgacaataaccattgtgatatctcattgaggcttttatttgtttttccttgataattagtgatgttgagcatttttcatgtacctgttggccattcttcttttgagaagtgtctattcaggacctttgcccattaaaaaaaaatcaggttatttgttttcttgctttttagttgtttgagttccttatatactttggatattaactccttatcagatggatggttgcaaatatcttctaccattctgtaggttgtctctccacactgttgattgtttcctttgctgtacagaagcttattagtttgatgtaatcccatttgtctattttcattttcatttcctgtggtttttgggtcatataatatcaaaaaaatcattgcataggccaatatcatggagctcctcctctatgtgttcttctagtagttttacagttctaggtcttacatttcattctttaatccattgttagttgatttttgtatattatgtgagatgtgtctraattcattcttctgcatgtggatatacagttttcccaataccatttattgaagaaactgttctcggcacttttgtcaaaaatcaa

SEQ ID NO: 276394 - DNA, 502 bp, Homo sapiens
tgccagtgactttaatctttccataaactttatttcatgagaaagactggtctttttttgaaattgatgtgtgctatgttttgtgcacagcacactctatttttaaggataggtttgttaatacctatcagaactcttactgacaaagtaccatcaaagatgctgctgtctcatgttcttagaaggctggcaaagaggtgaaagtgaatagaaattgctstcttgtggccagcatgtattaggcttatgtatattaataagaagttaattagaatggaaggaatgggcaaggagggcactctgctattatcgttgcagacagacctttggtaacagtttctcattatgtggaatggcagaactggggattagagaaattgtttgtaaatgtggatcccaaagccttctcacaaaagcaagtcagcctcgtttgtgagtttccaggacccttctttggaattttcatcctttccatcacgctgttactgagctcaccttgaag

SEQ ID NO: 276395 - DNA, 433 bp, Homo sapiens
tcaaaggtagaagcttacaacttgtggaaagacagataccactctctggcctggggtgggaggacagagtatgactcgtcctcaggcaggttggcttcctggatgatcagagaagtagaatctagggtgaaatgaaacaaaagtagatggagaaatctcaacaggaccaagtagagagggagaatttaggaatttagttagactgcagcaaaagaattcactgggtctctggccctaggctaaaaactatagaactccaaacctttaatgggagggggtacttcatggggcatgtctaagaggagtgaggaatgaggttaatgtgattctacggaattagacagaagtctgtatggctgaatgtacygggtttaacagcaacgttttagttagtttttgatattattgcaatgatgcactccagcaggagaca

SEQ ID NO: 276396 - DNA, 567 bp, Homo sapiens
ttctgaacaattccaccataatattttggtacagccttcctttagccagttttatgtgtaatagccaaagtgatcattttaaaatgagtaattgagatcatgtttataatccaatgttttcctaactcattcatagtaaaagtccttatagtgcctacaagatgctataggatctggctcttgactatccctttgatgtcttcccctgctacttttcccagtgctcacttcatacccagccatgccaaccttgctgctgttcctcagcaagcatgccctctgctatatccctgaaacctataactatgcgtggtaaatagtactcaagaattgtttatttgaataaaggtaatgacatttcagctaaggcagagtaggagtggaaaataaggaggtagctccttagctgatgaatgggttaacaaaygtgtctattttgcttaggcgaatcctcctgcctgagagctaatgtatgagtaggggttaactcaggtaagagactcttattacatatattcattctgtttttcagataaacatagaaaacctttaatgtagacatgtttt

SEQ ID NO: 276397 - DNA, 567 bp, Homo sapiens
ttctgaacaattccaccataatattttggtacagccttcctttagccagttttatgtgtaatagccaaagtgatcattttaaaatgagtaattgagatcatgtttataatccaatgttttcctaactcattcatagtaaaagtccttatagtgcctacaagatgctataggatctggctcttgactatccctttgatgtcttcccctgctacttttcccagtgctcacttcatacccagccatgccaaccttgctgctgttcctcagcaagcatgccctctgctatatccctgaaacctataactatgcgtggtaaatagtactcaagaattgtttatttgaataaaggtaatgacatttcagctaaggcagagtaggagtggaaaataaggaggtagctccttagctgatgaatgggttaacaaacktgtctattttgcttaggcgaatcctcctgcctgagagctaatgtatgagtaggggttaactcaggtaagagactcttattacatatattcattctgtttttcagataaacatagaaaacctttaatgtagacatgtttt

SEQ ID NO: 276398 - DNA, 567 bp, Homo sapiens
ttctgaacaattccaccataatattttggtacagccttcctttagccagttttatgtgtaatagccaaagtgatcattttaaaatgagtaattgagatcatgtttataatccaatgttttcctaactcattcatagtaaaagtccttatagtgcctacaagatgctataggatctggctcttgactatccctttgatgtcttcccctgctacttttcccagtgctcacttcatacccagccatgccaaccttgctgctgttcctcagcaagcatgccctctgctatatccctgaaacctataactatgcgtggtaaatagtactcaagaattgtttatttgaataaaggtaatgacatttcagctaaggcagagtaggagtggaaaataaggaggtagctccttagctgatgaatgggttaacaaacgtgtctattttgcttaggcgaatcctcctgcctgagagctaatgtatgagtaggggttaactcmggtaagagactcttattacatatattcattctgtttttcagataaacatagaaaacctttaatgtagacatgtttt

SEQ ID NO: 276399 - DNA, 479 bp, Homo sapiens
tcaccttactgaaggattccatcaaatatggtccagagtttgcagatgcatattcaagcttagcttcgttattggctgagcaggtaattgtttcacacagtagtttttttcaatgttattgttacatgtataaattaatgttacacagatttttgtactaatgatttaatttgtaaacccatattggacaaccaatctctatgtcagtttcttttggacagaaattacaagcctaattttctcactccaatattctctgtgtatcrcaggtcgcttttagacaaagatggtccgttattggccattgatatattctctctcactttggtacagaatctatcaagaacaatacatgatatttgatgtttttattaccacttacttgtaatatttttctgaggaattgcaagtggtctaagatcgctgaactcaacatggagcaatttgataatcctacaaattctgttttaacatctgtt

SEQ ID NO: 276400 - DNA, 554 bp, Homo sapiens
cttttagacaaagaccagtggtgatatttagtgcccttaaaatcttgtggtttccaatttcaatrccatttagcaatccttgggtgtatgcctgcatgattctgtcttctaatatccacagtcgtcattacaaacgttcccccttcttttcagcccttctttccttactttcttatcttgatcctttttcctgttctccgaggactgtgcttcctacttaacaccacctgataccaacagtaacataagattttgtttctcttccctctaagaatttagtaacttatctataactgtacctattcatttctttccactgggaagagtgagagatgacttttttcccattaaagacaagacacttcccacctgtaatttccagcatcattacctttatgtgaatatttgggcatacttctttcatgtatttcctgtactagtcgtttgtatttaagtagttgtaataatatacctattgtaagttttattttattgtatattttcatttatgattgtcagcattgcttcataatattaaagacttttaaaatata

SEQ ID NO: 276401 - DNA, 554 bp, Homo sapiens
cttttagacaaagaccagtggtgatatttagtgcccttaaaatcttgtggtttccaatttcaataccatttagcaatccttgggtgtatgcctgcatgattctgtcttctaatatccacagtcrtcattacaaacgttcccccttcttttcagcccttctttccttactttcttatcttgatcctttttcctgttctccgaggactgtgcttcctacttaacaccacctgataccaacagtaacataagattttgtttctcttccctctaagaatttagtaacttatctataactgtacctattcatttctttccactgggaagagtgagagatgacttttttcccattaaagacaagacacttcccacctgtaatttccagcatcattacctttatgtgaatatttgggcatacttctttcatgtatttcctgtactagtcgtttgtatttaagtagttgtaataatatacctattgtaagttttattttattgtatattttcatttatgattgtcagcattgcttcataatattaaagacttttaaaatata

SEQ ID NO: 276402 - DNA, 554 bp, Homo sapiens
cttttagacaaagaccagtggtgatatttagtgcccttaaaatcttgtggtttccaatttcaataccatttagcaatccttgggtgtatgcctgcatgattctgtcttctaatatccacagtcgtcattacaaacgttcccccttcttttcagcccttctttccttactttcttatcttgatcctttttcctgttctccgaggactgtgcttcctacttaacaccacctgataccaacagtaacataagattttgtttctcttccctctaagaatttagtaacttatctataactgtacctattcatttctttycactgggaagagtgagagatgacttttttcccattaaagacaagacacttcccacctgtaatttccagcatcattacctttatgtgaatatttgggcatacttctttcatgtatttcctgtactagtcgtttgtatttaagtagttgtaataatatacctattgtaagttttattttattgtatattttcatttatgattgtcagcattgcttcataatattaaagacttttaaaatata

SEQ ID NO: 276403 - DNA, 554 bp, Homo sapiens
cttttagacaaagaccagtggtgatatttagtgcccttaaaatcttgtggtttccaatttcaataccatttagcaatccttgggtgtatgcctgcatgattctgtcttctaatatccacagtcgtcattacaaacgttcccccttcttttcagcccttctttccttactttcttatcttgatcctttttcctgttctccgaggactgtgcttcctacttaacaccacctgataccaacagtaacataagattttgtttctcttccctctaagaatttagtaacttatctataactgtacctattcatttctttccactgggaagagtgagagatgacytttttcccattaaagacaagacacttcccacctgtaatttccagcatcattacctttatgtgaatatttgggcatacttctttcatgtatttcctgtactagtcgtttgtatttaagtagttgtaataatatacctattgtaagttttattttattgtatattttcatttatgattgtcagcattgcttcataatattaaagacttttaaaatata

SEQ ID NO: 276404 - DNA, 559 bp, Homo sapiens
aggcaaaatggcaagatctcatctccaaaagaaaaaaaaaaaaaaagaattagctggatgtgatagtgcaygccagtagtattatactagttagttagtaggcttaggaggaggcaggatcatttgagccaggagttagagtctacagtgagctactactgcactactgcactctagtctggatgacagcgtgagactttgtttccaaaagagtaggggttactgttaagtcaaagtagctatttctagagctgtcactgaagagcaaacaacatagacaatattaacatcaatcctatagattaaatgatatttacctttttctttaacgtcctttttaattaggagagttttcactactaatctggtgccagaggaagatgataaaataaattgactttacatgtatgactgctggatggggaacaactgaacttcacagtgagtatatgtaccacctcctccaatgttagaatccaaacaaatatatgtgacatctaagtgtactctgtttgttcactttcagtttttctctatttttaatacgaataatggtggg

SEQ ID NO: 276405 - DNA, 559 bp, Homo sapiens
aggcaaaatggcaagatctcatctccaaaagaaaaaaaaaaaaaaagaattagctggatgtgatagtgcatgccagtagtattatactagttagttagtaggcttaggaggaggcaggatcatttgagccaggagttagagtctacagtgagctactactgcactactgcactctagtctggatgacagmgtgagactttgtttccaaaagagtaggggttactgttaagtcaaagtagctatttctagagctgtcactgaagagcaaacaacatagacaatattaacatcaatcctatagattaaatgatatttacctttttctttaacgtcctttttaattaggagagttttcactactaatctggtgccagaggaagatgataaaataaattgactttacatgtatgactgctggatggggaacaactgaacttcacagtgagtatatgtaccacctcctccaatgttagaatccaaacaaatatatgtgacatctaagtgtactctgtttgttcactttcagtttttctctatttttaatacgaataatggtggg

SEQ ID NO: 276406 - DNA, 559 bp, Homo sapiens
aggcaaaatggcaagatctcatctccaaaagaaaaaaaaaaaaaaagaattagctggatgtgatagtgcatgccagtagtattatactagttagttagtaggcttaggaggaggcaggatcatttgagccaggagttagagtctacagtgagctactactgcactactgcactctagtctggatgacagcgtgagactttgtttccaaaagagtaggggttactgttaagtcaaagtagctatttctagagctgtcactgaagagcaaacaacatagacaatattaacatcaatcctatagattaaatgatatttacctttttctttaacgtcctttttaattaggagagttttcactactaatctggtgccagaggaagatgataaaataaattgactttacatgtatgactgctggatggggaacaactgaacttcacagtgagtatatgtaccacctcctccartgttagaatccaaacaaatatatgtgacatctaagtgtactctgtttgttcactttcagtttttctctatttttaatacgaataatggtggg

SEQ ID NO: 276407 - DNA, 607 bp, Homo sapiens
ggattaaagttgtattgtatgaaatgtcaggcctgtctaaagctttttttttcttttttttcccctcacactttgatctgctggccattaattttgttgctgacacaatcgctattgtgacttccctgggtggtgatttgggtgtagtaggggccaagtctgaaggtttactgaaaaatggaccctaaaaggcagattaattgcagaaatgtcatacaaatttgtttaacatgtatacacatgagacgatacaggagaaattgtccatttttatgcttagtacagagagccatgtagagatatgatttgacaaaaagtgtatgayttaatgctggcagactgagtggggaaacccagtgaggcttgtctgtctctattctcttggctctctaagcatgcattttttcctactggtatgaggcagttctctctctgaaatgggggtctgatgacctacagtcaaacaaggtaagtcagataatttctttatggcaagtttttacacagaaaggctggagcagcaggaagttagagtaatatttttaggttttatggctgactttggcaaaatgggttctgatttctatgacctaccctggggaagagg

SEQ ID NO: 276408 - DNA, 607 bp, Homo sapiens
ggattaaagttgtattgtatgaaatgtcaggcctgtctaaagctttttttttcttttttttcccctcacactttgatctgctggccattaattttgttgctgacacaatcgctattgtgacttccctgggtggtgatttgggtgtagtaggggccaagtctgaaggtttactgaaaaatggaccctaaaaggcagattaattgcagaaatgtcatacaaatttgtttaacatgtatacacatgagacgatacaggagaaattgtccatttttatgcttagtacagagagccatgtagagatatgatttgacaaaaagtgtatgatttaatgctggcagactgagtggggaaacccagtgaggcttgtctgtctctattctcttggctcyctaagcatgcattttttcctactggtatgaggcagttctctctctgaaatgggggtctgatgacctacagtcaaacaaggtaagtcagataatttctttatggcaagtttttacacagaaaggctggagcagcaggaagttagagtaatatttttaggttttatggctgactttggcaaaatgggttctgatttctatgacctaccctggggaagagg

SEQ ID NO: 276409 - DNA, 522 bp, Homo sapiens
tgggaccttgactcagatcatggggactgaagtcataaacatctgttgacctgtgttctagaaggactaaggagaattagaaaaaagcccatgaattattcaatcgaactagagaaagaraaaaatggcacaaaaacaccttttgatcatctttactaaatacaggttgttatggaacaattattaatctcagtctaaaacctatcttatgcgggtaatacataatggactttttaaagcaaattgtttttcagacataacgccactgataacacaagattaagtatctatctctttttaaagatgatcctgataggtacatagatgtcctacagggtctagggcaaacctttgacctcgcttgcagagatgtcgtgctactgttagatcaaaccctggcctttaatgaaaagaatgcggctttagctgcagcccgagagtttcaatcttcaggggaaattaagttccctcttcactgggtagattagaaaatggtgagttgttttctaaataagaaggatc

SEQ ID NO: 276410 - DNA, 1183 bp, Homo sapiens
gaacagaagataaactcttagctttgaagtcagggtggtctctgacttgctatactctttgttctccatcagcattcagaactggctggactccagcttcacagatagggtagtaaatatttataagcccacaatcatttttaaccatcctactcttgcatggattatatagctttgcattgcagtagcagtaaaggaaataaaattaacattgtttatgactctggccactgtaaattattactagccccacgttgatagcctattgaaaaacaattaattaaaatgataacacttaaaataaaatatttttccttcatgtrctttgaaatatgactttacccaatgcaagagcaaaaagaaaattggaacaataaaacataaattggaactctgggtcaaataaaaagtcctgggtcaggtaggttctctcctacaaatgctatatttgaggtacattcagccacactgtgtggggctaagtcaacttggacgaagaccctaacttaagaatttattgatttaattactgagcacatatttattgagcatctagatgccaccaagcgccagagtgttgaagcagcaagtwgaacagaagataaactcttagctttgaagtcagggtggtctctgacttgctatactctttgttctccatcagcattcagaactggctggactccagcttcacagatagggtagtaaatatttataagcccacaatcatttttaaccatcctactcttgcatggattatatagctttgcattgcagtagcagtaaaggaaataaaattaacattgtttatgactctggccactgtaaattattactagccccacgttgatagcctattgaaaaacaattaattaaaatgataacacttaaaataaaatatttttccttcatgtgctttgaaatatgactttacccaatgcaagagcaaaaagaaaattggaacaataaaacataaattggaactctgggtcaaataaaaagtcctgggtcaggtaggttctctcctacwaatgctatatttgaggtacattcagccacactgtgtggggctaagtcaacttggacgaagaccctaacttaagaatttattgatttaattactgagcacatatttattgagcatctagatgccaccaagcgccagagtgttgaagcagcaagt

SEQ ID NO: 276411 - DNA, 1146 bp, Homo sapiens
tatctctaatttatctgatgtatttcagtaatgcacrtgacatcaacttagactctttcacacttttaccaacatttacctgcctgacaaggccaacccaagttacttcactacctgtattttgctttccctagaccaatatttctcaattttttttttcattatcatactcacctcttttaaggagcttttttagatattttttcttatcagctttctccccaattaaacactcaagaataagatttgttacataggattgagcttggaaagacccaaaaccattgtaatgtctatgattatttttcaccaccatcatccccaccccaagaaacaattttcactcctgtagagaatgtaggactctagactgtcatccaatctatcaaatgatagaggaaaaaaatacaaatctgagttgaatgggatccctacatggaaaacaaaaccatgattaggggtaagagctgttgaaaattcattccttatggtcttttatgttatctcctgtttccctaatgcatacatcctctgttcccctcctcagtgccctgtacacacacccagaagacaacctcatcwtagtgttgatcacattctgctggtagatgagaaaatctaggattaggaaacaccttgtatttccttggtggggaagaatgccagattaattgattcattttagttggatatgaaagagaattagacatcaaatattgatagcatgtttctcataaatgctcatactgatgacatatgggtggaggaactgtctcgtaaagaaaacaaaagcaaagaagagggtgagaaaacaggtgtctttatcttttgggctgctgtgtcttgaatagtttcttggagaagtcgttgacatgagtttaaagatctgttagtccttaatttcccaggtttgtaattactattwcaatattacttttgtaattactattacaatattacaatgtattactatttactaataaagccatttggctaataggaatatactttaagactctgtggctttaaattattgattagagtgaaagcacttctagaaaatcagctcagacacatagtgaccccgatgtcagggcactggaaacatttttttttctattggccctttactgctttggaatacca

SEQ ID NO: 276412 - DNA, 602 bp, Homo sapiens
ggttgtgctggataataaaattactctagattgtctactggataaacagaaaaaaatctgtaccattactgactctatttgttacatgtaaataaatgcattgacyattacagagatttggttgtagggtattaataaacagactgcttgattaaaacaagtagactccttttctggctcattctttgatctatttcattttagttggtttggttcatggagatgctgactaaggagcatactccaaactcttgatttgatcttcttgatcattataattgtctctctggcacactatgttccctcaaaagttttcaatggttacatacagccatttgtaaaatgtcaaatggtctctctttaattgagatgacaaaaactcaaaaaagagtgttctcataaagacatcataaccaataaatgatgtactgagaccaaaaccctaaaataatggtaactgagaatggcgttaaaagcctaatggtcacactcacctaagtaaaatcataaccaaaaggaagaaactgttaaacaaaattaggagatgccattattttggactgagttcatacaataggccccagcagaccagaccaaaccaa

SEQ ID NO: 276413 - DNA, 559 bp, Homo sapiens
gattacaattcatccctcataataggctccataacagattgtactacaaagactgattacacaaaagtcatctttaaattctcttgctaaggttgtgctggataataaaattactctagattgtctactggataaacagaaaaaaatctgtaccattactgactctatttgttacatgtaaataaatgcattgactattacagagatttggttgtagggtattaataaacagactgcttgattaaaacaagtagactccttttctggctcattctttgatctatttcattttagttggtttggttcatggagatgctgactaaggagcatactccaaactcttgatttgatcytcttgatcattataattgtctctctggcacactatgttccctcaaaagttttcaatggttacatacagccatttgtaaaatgtcaaatggtctctctttaattgagatgacaaaaactcaaaaaagagtgttctcataaagacatcataaccaataaatgatgtactgagaccaaaaccctaaaataatggtaactgagaatggcg

SEQ ID NO: 276414 - DNA, 602 bp, Homo sapiens
ggttgtgctggataataaaattactctagattgtctactggataaacagaaaaaaatctgtaccattactgactctatttgttacatgtaaataaatgcattgactattacagagatttggttgtagggtattaataaacagactgcttgattaaaacaagtagactccttttctggctcattctttgatctatttcattttagttggtttggttcatggagatgctgactaaggagcatactccaaactcttgatttgatcttcttgatcattataattgtctctctggcacactatgttccctcaaaagttttcaatggttacatacagccatttgtaaaatgtcaaatggtctctctttaattgagatgacaaaaactcaaaaaagagtgttctcataaagacatcataaccaataaatgatgtactgagaccaaaaccctaaaataatggtaactgagaatggygttaaaagcctaatggtcacactcacctaagtaaaatcataaccaaaaggaagaaactgttaaacaaaattaggagatgccattattttggactgagttcatacaataggccccagcagaccagaccaaaccaa

SEQ ID NO: 276415 - DNA, 649 bp, Homo sapiens
gaccacatggcagtggcaaagtctccttgaacctgttctggttcagggggttgcccaatctgtgaactctttcttgctcaaataaactttgttacatttaatttgtctaaagtttttcttttaacaatggtgttcgtgaaatatttgtcaaggaaagggagggagggacaggttggatggatgaacagatggacaaatacccaaaagtgtaactgtttatgccagtcatgtttgtttatttccaaaaatactgcttttattcagggctccccaattccccattggcccactgaaaacctagcttctattctctgtccccatgtagctatgagattttggataagtaaggataaagaccagcatgataaaccaacgtgctgaccatgtgctgagcattgttctaagtgtttcaaatgttttaatagatttaatcctcaaaacaaccctataagataagtatgattgttgtccctgatttacagttggggcacatggtgggtaagaaaggtcacacagacagtagatggtggggcttggatttgaatccaygcagtcaaatcttgggagcctcgttcttaaccactatgtcatacttctatagccattgcagtaaatgcatgtggaatgaatggatacatgaatatacacc

SEQ ID NO: 276416 - DNA, 509 bp, Homo sapiens
tttctccaaactcagcgccctgcaggtggcacacaaagctgagatattgtcacctttgggagcactgtattacaacactggccgatacgaagaggctttgcagatttaccaggaagctgcagcacttcagccttctcagagggagctccgcttggcactggtgagtaggatgaaagaaaatgaagctggcaacctaagcacaggcagccatagagagagctgtagtcctcacgcctcaaaactggagctggaatgccrtaatatatccactgtatgaatattcatacagctaatgttagagccattctctaaagacatggacaccaaaaatactgcatttttgttttgaaataacttcaaacttatgaaagtgttgcaagaatagtaaaaaatttacatataccctttcatccagctccaatgatttgtaacattttgattcatttatcactccattgtgtatgcatatgtagatgtatatgtacctacatgtatatgtgtgcatattt

SEQ ID NO: 276417 - DNA, 506 bp, Homo sapiens
tccacacgccacatacagaaacaatagaattaggattaaagaaggtaattcagaaatgagattgactgactctattttaccaagttagggggctttgaagaattaataggtatcctggcactctggaagataaagtacgtgctactcagacaaaaagaatatcatatgcagaaaccctcacaaaagagaatggacaacgtataagaaaactacaaataactytacatgttttgagttttggagggaataatagaaaaggcaggagtgagatcatgttgaacatgaggcattaaattataagtgccagagtgataggatagctagctaacttttgattacttgccctgtagcaggtattcactaagcatttcacatgcattatctcatttattcctccttacatacataggagttatgtgcattgctctcctctcaccagtgagggaagtgaggctttgagaagttaagtaacgttcccaaagatacacagctggcaagaggtggag

SEQ ID NO: 276418 - DNA, 1096 bp, Homo sapiens
acacattgatctagtctctttctcatacagcaggacagcctgacagagggcaaggatagcttgccatgttttctcttctgaccacaagtttatatagcttgtcaaagatttctgatggtcattttattttagctcttcctgtttattcatttttgctagagacttgaggagtgtttctggagggcaagaaatatattttgaatgttaactgagtaggaatttacttgcgacttytgttttcagttgagttgattctgtgttgagttaaagatattaattctgacctactcatagagttcatttcaccctgtctactgaagagattaattaaatacaccattatagtgaatatatttgatcttatatttgccatgtggttctatgatgtctgcttattgcttccttgttgtttcttttgtttattatgactctacctggtcttataccttctctgtaagcttcatctgggatgtataagcagccagctgctatcagttgttcattcwaatagctagggagtcaaggctttttcattagcatwctaaagcctacagtttctgaataatatatattcacttaaaaattatttttttgatgaaaatatatttttgttatatatcttcattagtcagattctatcatgtttaataacatgacttcatgtaattatctgatcagttatttctaggtgccaaaactatttatacactaaattttgttaaatacatagataccactgtttcatcttctgctttttttatagataaaggggagcctttgcaagaattataaatcaattcaacagtcttccttcttcttgtctgtttgcaattagcaaattcaagctaatttcagaaatgttggaagaattttttctttgatttttgcagactcacatcctcaaagtaagacttcttatggttacttaagttgtggctgcaggttttagaccctttaagggctttgcctagggagtcctttctgttacagacagttgcaggttgcttctctgatttcccttcacctttcaccatatatttaactgtagaattagtaatgccttctgttaaataacataatgttctctttgtgaaac

SEQ ID NO: 276419 - DNA, 546 bp, Homo sapiens
ttttcaaaagtaggcacgtgtggggaggcatgtatggggagaatagattccaagtagaaggacagcaatcttgaaaataaactgcggtatcttggcaaagtacagatagctgcatggagattcttactgtggccattggttttgaaatgaccaatagtaaaataatttggagtttgcagtaggaattgagaccacatgcttctttaaaagaattatatattatatatatgtgtgtgtgtgtgtgtgtktgtgtgtgtgtgcatgtgtgaatagatgtatgaatacacactggtagtgggaatcggggtacactttcttctcttgatggggttcatggggttcagggcatgctaccctaaaatatggcaccttagcctttgagaaaagagtggaatagaaaggtctctctgaaattctcccacctttcttccatgaagcaggctataatgtaattatctgaccttcttctaacgtaggtcataagatcttcattccagagagactctccctatagaaaggatccaaagtcaccaagatgccagggag

SEQ ID NO: 276420 - DNA, 546 bp, Homo sapiens
ttttcaaaagtaggcacgtgtggggaggcatgtatggggagaatagattccaagtagaaggacagcaatcttgaaaataaactgcggtatcttggcaaagtacagatagctgcatggagattcttactgtggccattggttttgaaatgaccaatagtaaaataatttggagtttgcagtaggaattgagaccacatgcttctttaaaagaattatatattatatatatgtgtgtgtgtgtgtgtgtttgtgtgtgtgtgcatgtgtgaatagatgtatgaatacacactggtagtgggaatcggggtacactttcttctcttgatggggttcatggggttcagggcatgctaccctaaaatatggcaccttagcctttgagaaaagagtggaatagaaaggtctctctgaaattctcccacctttcttccatgaagcaggctataatrtaattatctgaccttcttctaacgtaggtcataagatcttcattccagagagactctccctatagaaaggatccaaagtcaccaagatgccagggag

SEQ ID NO: 276421 - DNA, 1169 bp, Homo sapiens
tctccttccctccacccacatgctactcctggttttctctctaggttttgaayttgtggtatttttcttttttctctatttaggacttttatgtttcttactgtcgaatttgtaaacaacagatcaaagatgaaaactaaaataagtaacagaccaatattgcttaaatgcaaacatgtaatgttacatttcagaaaaataaaacttgcaatgatgtataaaaataatctgtaaatttaaaaactatatgtctatgtctatggaattgtgtatatatacacacacacatacacatatatctatgtctatggaatatacatatatatgtctatggaattgtagagacaaatactaaaaataatagataattcctctatatttaactcttctattttcttgatctcacattgaaacttatgaaaagcactcaatcacactctgttctacatttgactccttgggaagtatattacattaacatctactgttgccaagggatttctatataaaatacttttaaaactttatgcacagtaaatagactaagaaaccttttcaccacttagaaaagtgaatgtacaaaawtctccttccctccacccacatgctactcctggttttctctctaggttttgaatttgtggtatttttcttttttctctatttaggacttttatgtttcttactgtcgaattwgtaaacaacagatcaaagatgaaaactaaaataagtaacagaccaatattgcttaaatgcaaacatgtaatgttacatttcagaaaaataaaacttgcaatgatgtataaaaataatctgtaaatttaaaaactatatgtctatgtctatggaattgtgtatatatacacacacacatacacatatatctatgtctatggaatatacatatatatgtctatggaattgtagagacaaatactaaaaataatagataattcctctatatttaactcttctattttcttgatctcacattgaaacttatgaaaagcactcaatcacactctgttctacatttgactccttgggaagtatattacattaacatctactgttgccaagggatttctatataaaatacttttaaaactttatgcacagtaaatagactaagaaaccttttcaccacttagaaaagtgaatgtacaaaa

SEQ ID NO: 276422 - DNA, 526 bp, Homo sapiens
ttacacattgcatttgtttcttcttttaattttaatttayttttttaacttttatttcaagttcagtgggaaatgtgcaggtttgttacataggtaaacttgtgtgatgggagtttgttgtacagagtatttcatcacccagttattaagcatagtactcattagtttattttccttatcctctccttcctcccacccttcaccctccaataggcctcagtgtctgttgttcccctctctatgtccatgtgttctcatcatttagctcccacttgtaagtgagaacatgtggtatttcattttctgttccttcatttgtttttgttgatgtaattgtggggtaactctggatgggcattggtggatccacattttccaagcctctgtgtaatcatggtattattatggttaacaattgttattagatcataatgagtaaactcctataatatacaaatttgtttttctgacctctgtttattacttcccacaatataatggttccctgaatagttgcagtaactga

SEQ ID NO: 276423 - DNA, 526 bp, Homo sapiens
ttacacattgcatttgtttcttcttttaattttaatttacttttttaacttttatttcaagttcagtgggaaatgtgcaggtttgttacataggtaaacttgtgtgatgggagtttgttgtacagagtatttcatcacccagttattaagcatagtactcattagtttattttccttatcctctccttcctcccacccttcaccctccaataggcctcagtgtctgttgttcccctctctaygtccatgtgttctcatcatttagctcccacttgtaagtgagaacatgtggtatttcattttctgttccttcatttgtttttgttgatgtaattgtggggtaactctggatgggcattggtggatccacattttccaagcctctgtgtaatcatggtattattatggttaacaattgttattagatcataatgagtaaactcctataatatacaaatttgtttttctgacctctgtttattacttcccacaatataatggttccctgaatagttgcagtaactga

SEQ ID NO: 276424 - DNA, 534 bp, Homo sapiens
acccctttggcaaccaaacagttattgccatctgcagcaggtaaacaacataaatatcatgttaaattctgatgaatttcagtggtcaaaataaatatttgcagttttttggtgaaaattgtacatatmtttacaaattgaccccctccccatgatctctttccccctctctttttcaagtatgttaccactttccttctcagagatgtctaagttagtgtcaggaattagccatttaatgtaatcataaatcaccccaagagatattaaataaccatatttcaaactgagatctgtggtttaagtttcattattatagtattccaatttagtcagcatccaaaagatacaatcttatatcaaatttcatgaatttcccctctgttttccttttctctccctttgctcagcaataaagcccatgtaatcattgtatactacgcatatgggttagcaatgactcaaaattaccatacgtgttttaagtaataagacaattttggattttctactttctaagaccacctatacttt

SEQ ID NO: 276425 - DNA, 554 bp, Homo sapiens
ggagggagataattgaatcatggggggtaatttcccccatactgttcttattgtaatgaataagtctcatgagatctgatggtttgatcagggtttccgcttttgcatcttcctgatgctgtgtttgcctgctgccattcaagtaagacatgacttgttcctccttgccttccaccatgatggtgaggcttccccagccatgtggaactgtaagtcaaattaaacctctttcatttgtaaattgcccagtctctgatatgtctttatcagcagtgtgtaaaagactaatacaamtgcctataaatcctactttttcacttggaaatggggatgagaatgtgggggttcagtcaggatagtgggagaaattgtaaaattataggaaataacacaaaccctcttggaaggtatgggggtttgcataaagtgtttggctgaaggtagctgaattatcttaaaagcatagggcatagatacataagaatgtagagtagtttaaacagcttgtttactcatgtggtcctaggaccaaccttcgatcaactaggagagca

SEQ ID NO: 276426 - DNA, 542 bp, Homo sapiens
tagtcagggaacctgaggtaagtggaatgtcaaatggagaatgggtgttggctagaacataaaatctgcaaagatgaagtcctcttggggatatatctgcttgctacagataggtaaagattagtagataactaagcagtttaagctaggaacaaaaatttgatttgacaaaaggaaatataagtagctcatattttatggaatttggggtgttttaggcagtgaagacgtcaacattttcataatttattgaactcaggttaagagtattgtattatttcaagcctgatattatacaacctaaraaaaaattgccaaaccaataatggtgactatgaaaagaaaaagaaaattttaaagcaaaatgcttaaaaaaaaccaagatggccctttctgaaaatataagaactagtataaatacctaaggatagcatcatatagccaagtaaaattgaatttctatctagaacaatgtttcagaaatattttacagtctaagtaatctaatgatattaaaataatatcactatatgtagatgata

SEQ ID NO: 276427 - DNA, 604 bp, Homo sapiens
aactgcatcctatcagcacatttccaaaactttcactcaaataatagtagtgacattttccttacattgctcaagtttgaagaaatcccaaaatagctcagcactaaacacagacgatctgccaaattccaaatctgcagccccaacaacactcgaagataagttattttaaatattttacacacaactagcatggttacccactgctttttgaagcaatttgtaaagcttaatagaagatgatcttggatgaagttccactgtaacacagttgagcatttctgctccttgagaaaagtggtgttcagggaaggatgacattatattctggaattaaactcgagaaggaattggttttatttttggttaatacaattcactacatcctctggcattttcatctgtcagagagtaagaaagataaagagtaaatcaacattttgctttacttttattcaactcccagttatcccaaaatgaatacyagaaccctgttcttctggcctttaaacaattatacttctcattaaagtggtgatatttggaagacaaacctcattttcatcagcaaatgtcttctgagtggtctttgagtaactgataa

SEQ ID NO: 276428 - DNA, 521 bp, Homo sapiens
ttctgttgttttccagcatcaatatgtgaccatacacatggaggactgctaaccagagaagctcggctgagctgagctgtccagagagtttattgaggcttcatatttaggcatgattaattaattaattacctacatatttgaactccatctgcagctccccaccaacttttagattaagatgatataatgtggttcatagttgctatcctaaactatatggttggtctttatggtgtggccaggccccactctaagactactgagtgtgataatcctcaccaagaatcatcttattagcataaaataggtatagtttcaggggtccaccttagataatgaagatatttccataactctgaaaattctaagtgtttagaggctgccatctagcagctgaggacaaactccagacttatatttgggtgaggccaaactcttcactgcacacacttcrttgaggccctcttctcatcatccttcaactgtctatattcatttctattgtgtcaactgatact

SEQ ID NO: 276429 - DNA, 1166 bp, Homo sapiens
ctctccttttggtttcatttctaatcagttgcttacattcaatacaatctgtctccatgctgcatgtagctgtgtttcaaatctccttatctttcatttgaaccaacataatagacttgtttattcccrtgctatctccctctaactttgaccaataaatggacgaagttagagggagataacttggatttctaaaataaggttaagattatactctttagcatctcaaaattcttcaagagctccctggtgaattaagaagtaataatcctttacagttgcataataatgttttgcaatttacaaagcacctcacaatcattaccatattgttttaccacagaaataaactttgaaaatacttggttttgctatgaatgaggaaactgagatgcacaaagatgaaattctggaatgtttcggtaactgacagagatttacatcttatctattatattcaaatccactcttctctgagacagaggtatattcctcatgtagtcatccagtgtattctattgcaaaggcatgctgtacctttttgatcttatgtgccatcgcwattttctgggcaaagccaagaaacttcttgggctaagctcctctttgggaggctttcctcccttgctttacagctaccwttacattacaaaatatctatactatcctaaagaataatatcctattggatatgccccatcaccggccccaaaaagtcactgatttttttttaccatctctatagttttgcctattccggaatgtcatttaagtggaattatagtagagcctttccatctgacttctttatctctgttgggtatagtgtgttttggttcttctctttattatttttgtttgtacatttgttttgtaattcttttaaaaatgtatctattaaggtgggggtagatggctcactactctttatcactgtatagtatcccactgtgtaaatgtaccagtttgtttatccattcgcttgaatactttaattgcttccgagtttgaggaattatgaataaaattgctataaacatttgtatacagtttttggtgtgcaaagagagtagatcttaagtagacataagtttttaaatcttctatgtattttcatctgaataagaagaatataattaatttttataacaaagtgagataaatat

SEQ ID NO: 276430 - DNA, 572 bp, Homo sapiens
ttatttatttatttatttatttactgagatggagtctcgctctggacccaggctggactgcagtggcaggatctcggctcactgtgacctctgtcacctgggttcaagcaattctcttgcctcagcctcccgagtagctgggattacaagtgtgtaccaccacagatgtctattttttatttttatttttagtagaaacaaggtttcaccatgttggccaggctggtctcaatctcctgacctcaggtgatctgcctgtcttggcctcccaagctgctgggattacaggtgtgagccaccacacccagcttaggtattgttttaaatacaaatttttctctggaattctaatggctgaattggatcttcattttctaaagtagatctataattttaatttaaaaattactgcacttaactaaataaatcaagtaaattattgtgctcgatgaacccttttttaaaactaagaatgaaaataaaattgaaattttctgtatacagaataatgactctaaacttaatgaatgatcactgtrgcataattacacctaatttgttcaaagggcaaa

SEQ ID NO: 276431 - DNA, 408 bp, Homo sapiens
gggagttggcttaggatataagcatgtatttatttagctgctttttgcggggtgggtgactggtacagtacattcaaggtgtcttcattcacactcatggcacctctgctgtggtgtctaaatrcctgtgggctggctggattttctcctatctcatcactcatttattttgccagagcttctttactttgtgactggttttcaaaagaatgaaaatggaagctgccaagttttcttaaggggtaaaccccaggactcacacatcatcacttctgccccattctctttgtcaaaataagtcataaggccagcagcaattcaagaaagaggaaataatttccatatcttgggagtgatgatggaatttttggtggccaacttgtaactggataacccataaaaaatgaa

SEQ ID NO: 276432 - DNA, 500 bp, Homo sapiens
gggtgtattttctacaaaggggactcaaagctatatttaatactcagatatattttgtttagttagcacattgacattgacagaaaaatacaattcraatgccctttgccactaccactcactactgccttttgcttgcccattcacaaaagtgcattattcttttagtttgcaatctctacattaatgctgaagataagaagataagaaagaataccatactttacttaaccttccccaccttcttaaatgcaaacatatgtcaactgtgtcttaggaatccagacctggattgtctcccacagaatgataatgtttaattttctcccagtgggttagggtcaaatgatatacagctcatgcatggggattcatctcactgccaaggaggccttaactaaatgctccctttttatggacatagggagattaagaaagggatacagggaaggtctaggagaactgattccgagtggaaaatgtgcctcggccaaggtgtc

SEQ ID NO: 276433 - DNA, 350 bp, Homo sapiens
tgttgtattatcatggctaaaactggaagccttcagcatctttttttcttccctttccaatagcttaaaatgtgaacatgatgcaatgtagataaggaaacggaagttacattttgaagttggcagcacactgaaagagaaggagactgggtctctgatgacatacatcatggagcaaccactcaaccagctctggactcctgatgattcaaaatattcacactaaagagaagttgaattctatsttgtttaggtcgtggcacttgaggattcctttttatttttataaaagaagcctaaacaaaccctgactaataaagtggtatttacattattactttggatctacc

SEQ ID NO: 276434 - DNA, 1072 bp, Homo sapiens
agctattatgtaattagtgcttactacatgagagctacttctaacactttacgtcatgtaagcctgacaataacagaatgtggtagttaccattgtccccatttccagatgttaaaacaaaaacttgaagaacctaagtgacttggtaaaaaatagctaagtcaagaatccaacctagttatgcttacctccaaagcctgacctccttaccactcccctaatatgcttgtgaataaatgtaatttgcaagcaaatttcaggagcacaaatatttcataaaaagagtttttgttaaaatgcttctcttatagatctaacatttaaattaggcaatgcaaaaataaartcatttttctaacaaaatttagattatatactgtatcattattgcaaaatgcattacgtcctctgcaaaaggcagtctatagtatcactgataatagtaagatgagcaaatctgaaaaaaaaaaaaaacwgcatagtgtaggtatgtattagtgaagacctcaaaaatactctgtggtctaatttttacttcgttgcagaattctgcacccagtcgtcaacctctcttcatcactwtgtaaaacaacttaatattaagtatgttttctcttccccaatctctatagcaaaaaataaatatttgaaaagacaaactttttcagatggtattataaagtttacaattgcatgccatctctccaatagatgggaaaccacttttgtttttctgaattattatttcacaagaaatgaatttttgtttgagtgatgagacaatcatgactgaaattacttggtgatcatcttaatctgcccaagtataagaaataaatgacttagaagaaaaaaagtcacctgcgagattccaagaagagtctagattttgtactaaatgacacatttatctgtttgcatattccaaaattgattaaaacatatagaatatgtctggaaaggagaacggagagaattccatttgggcactttcagtaggggctagatatatttttccatggatttaattgaaaaagaagctgcaattctaccccgaacagaacctcataac

SEQ ID NO: 276435 - DNA, 593 bp, Homo sapiens
ttaagtcccttttttctctgatatctttttcatatctatagagtatgacagttttagaattggtcttcaaacacttccctaacaattcagggatctggctttggaatgccgaggttctgtcctcttgtcacacatgtaccatgagttcagagcccatagcaggaggagggtggatggacacttgggaggtaacaagaccagtttttcccaggaggatgtagccttatggttacccacttccttattcgtaattcttgtgctaarggcaaccactatggttttgagaaatcaagctttcatatttcttcatttactcacccatcaaatccagagtactttgagtgttaagtagtaaaagaatgaattagtgttaacttgctaacgtgatacatcaccttttaaagaatctgaaacaatgtaatttctcatataatttctttctactcacactgggaaagatatattacatttttagaaaatccatttcccattgattattagtttgataaaaatatgagtaatacaagtttacaaagtagaaattgtattcagcttgcaaaattctaagaaatctatactttcagttcagtttt

SEQ ID NO: 276436 - DNA, 593 bp, Homo sapiens
ttaagtcccttttttctctgatatctttttcatatctatagagtatgacagttttagaattggtcttcaaacacttccctaacaattcagggatctggctttggaatgccgaggttctgtcctcttgtcacacatgtaccatgagttcagagcccatagcaggaggagggtggatggacacttgggaggtaacaagaccagtttttcccaggaggatgtagccttatggttacccacttccttattcgtaattcttgtgctaaaggcaaccactatgsttttgagaaatcaagctttcatatttcttcatttactcacccatcaaatccagagtactttgagtgttaagtagtaaaagaatgaattagtgttaacttgctaacgtgatacatcaccttttaaagaatctgaaacaatgtaatttctcatataatttctttctactcacactgggaaagatatattacatttttagaaaatccatttcccattgattattagtttgataaaaatatgagtaatacaagtttacaaagtagaaattgtattcagcttgcaaaattctaagaaatctatactttcagttcagtttt

SEQ ID NO: 276437 - DNA, 573 bp, Homo sapiens
aatcaatggattgctggagaaaaaatactttcatctaagtctgagagtaaaataaaggatttctatatttaactaccctctgtggttattgacaaacgttttctttgcccgtatcaagtcatctgtcactcagcacaacctctaacataaattttcccrgtgcttctaaatctacattttcctactctagcttttattaaatagccttatgccttactttgtggagaaaattaatgtctctcatttgtgatcttctttaatctctcactcctgtatcttcaggtccaactgtatctatatctatctggcatacgtttctgtacttttcaatggaaaaaattccgcaagctcctgttcagggttaacttcagctcaggacctagctccacaacattcccttcacttctccaacacagtattccctcactaagctttgtgttcatcctttccctctcaactagacaattattattgtatattatatacaggttatattagtttctaatgacataccaaattaccacaaacttagtggtttaaaacaacatacatttattattttacaattttgga

SEQ ID NO: 276438 - DNA, 406 bp, Homo sapiens
ctctgatcctaaccctctggtttccttcttataaggacatttgtggccacattgggttcaccaagtaataatacaggatgatagtcacatccccaaattcttaacgtaattatatttacaaaatcccttttggttaacatattcagattctggagattagagcatggaaatctctagcagggaagaggtgttattctacctaccacacagtcaatcaacatgctcaatagctttatagttaggagctttgattttatatttatactgacctttgyttaattccagtcctgtaaaaaataaaaaatataaaaacttctgtcacttgggtagactacttaatctttctaagtcccagtttcctctgaataaaaaaaaatagtgcctacctggtaggttgattgttaga

SEQ ID NO: 276439 - DNA, 635 bp, Homo sapiens
acaatataatttcaacccaagtttaatgaaaaggctttactagcactaactgtacaaaaaaaatgtacaagtacaattgaaaatccaatctttgagtggataaagagatttcaatgcaaacacatcacagataggtcacttcctgagccatttactgtgtaatagtctctaatctaaacatatctcaycaattaactcacttaattccttcaagaattcaatgagacagaatctattatcatctctgttttagatatgagtaactgatgcatagaaatgttaagctatttaatcgtggcaaactactaagccaagctttgaactagaagtaacctgagttcaaatgccaagacattatacataaagtaatgagtgagtgaccaaaaataaatatgtgcatatgtgtgtctgtgtgataccattttttttcttccaaggatatgatagcaagaaaaattaacaaggtaaattgaaagcagatcaaggctgaaagatggtagaataaatggtattactttagaggtcaatattcaagtaaaaaatagcacacataaaggcttaagagataaaaatttcatgtatatgtagtatcaacatatttcacctcagcaaagcaataatactttgctaaaagc

SEQ ID NO: 276440 - DNA, 635 bp, Homo sapiens
acaatataatttcaacccaagtttaatgaaaaggctttactagcactaactgtacaaaaaaaatgtacaagtacaattgaaaatccaatctttgagtggataaagagatttcaatgcaaacacatcacagataggtcacttcctgagccatttactgtgtaatagtctctaatctaaacatatctcaccaattaactcacttaattccttcaagaattcaatgagacagaatctattatcatctctgttttagatatgagtaactgatgcatagaaatgttaagctatttaatcgtggcaaactactaagccaagctttgaactagaagtaacctgagttcaaatgccaagacattatacataaagtaatgagtgagtgaccaaaaataaatatgtgcatatgtgtgtctgtgtgataccattttttttcttccaaggatatgatagcaagaaaaattaacraggtaaattgaaagcagatcaaggctgaaagatggtagaataaatggtattactttagaggtcaatattcaagtaaaaaatagcacacataaaggcttaagagataaaaatttcatgtatatgtagtatcaacatatttcacctcagcaaagcaataatactttgctaaaagc

SEQ ID NO: 276441 - DNA, 605 bp, Homo sapiens
aatcaaaatataaagaaaataactataaataatcagatgacctgaagaaaaattaagacaaatatcaagcattttataatcagctcatatacattatgcatacaagagagcagctattattgacattttgtttgagtgattttctaaacttttttaatggatagagaggaaagcagagatctagtaactcaaagttcacagagcaagttagtgagtcaacatctagctcataagtatagtatttttgtttgctttcaacttcagttccaagtcttccctcaaattatccacaatatttcagaaggcataatggaaaataaagtaagtatatgggacagatgcaaagagtctgagagaaatagcaagcaaataaaaaagaaacgataaacagtgagaaacattcttgcagtggtttcaatgctttggttaattagagaaytgagttcagtgaaacctgtttcagtgcacctggtgaatccaacgcacatctcaaatctcacagctggaaaaatcatcttaattttacttttttattctgcttatctgaaggtagggttcatcttggttaatactttcactaagaattaattggtgaaattgtacta

SEQ ID NO: 276442 - DNA, 570 bp, Homo sapiens
gctttggttaattagagaactgagttcagtgaaacctgtttcagtgcacctggtgaatccaacgcacatctcaaatctcacagctggaaaaatcatcttaattttacttttttattctgcttatctgaaggtagggttcatcttggttaatactttcactaagaattaattggtgaaattgtactaccttcattggtgcttttggttacgtgtttccatttttttcatgagatgattatatgtaaagttttatataataaatacactatttgcaagttctccttgaagacttcatgggacatctgactaacttagagttagcacaattccaggcttaaaccgacttgatgtctaacttacttgctaatgaytctgtaatattaataaacatttttttccatcctctaaattcttccttctgtttttcagtattctttcactctactttttttcttctcaggaactctaagttttctggttgaatttgtatttaatctctggtaaaattatcagcatcctagaagatatttttcaaaacaatatttttctatgttttagttttacttcaac

SEQ ID NO: 276443 - DNA, 579 bp, Homo sapiens
agtcttgacatgctacttactgttaatcatccaagccaggagttactaaactcaaagctattggctacgttgataaagacagggtcttcctggctgatgcaggagttactaaactcaaagctattggctacgttgataaagacagggtcttcctggctgatgtggaaaaatgaaagaaagaaaaataaaggaaaaacagaacctagcacagtcttttgaaatgaatttgtagcaactagcagattctgtgggagaaactaaactaactagagtaataacaatcccaattctaagaaaattaagtcctagtttgttttttgtttatttatttatttatttttgaactactgtctckctctgtagcactctccagcattgaatcaaatccgcaggaacctcatttttctcatttaaaaatgaaaccatttggacatggtgaagatcaaaatcccatggttttcaatgactctgagattctctaccctataatcctttccattggaataacttacatcataaaaattcctaaactatggaaatttaatactcagatcatattaaaggctctcagtctcttcc

SEQ ID NO: 276444 - DNA, 612 bp, Homo sapiens
tgacaaattaactcccccaaaacatgtatctactaactagttatgaagttcatagcaattcctattctgccaaggccacttattttttagtgtcagttgaaatatttcacttttttaagaaaccttgaattttaggtatggaatacagtatttacgtcaaagaatagtaacgytaaacagagtgagtatcttacaaaacattttgaattaagtttattgaattttataatttgtgaatgtagatatcttgactggggaactgtacgtctgcatattatattcagatagtcatgagaacttaaactcatttatatgttatataaacagaattaaaacaattgacgacaaaaaatagtttacaaccctcagacacacaggctttctgtgacataggaatttatattgtatatgtactgttatttctactagaactgtccgctttatatgtatttgccaaaaaaagaacaagtgagctacatcagctagcagctattttagctgactacagagaggaaagaaaaaggactgtacatttcaaattcttaagtactcctcaaatgcctagtgttttatgtacagatagggtagatttttcccttaattacattgcag

SEQ ID NO: 276445 - DNA, 614 bp, Homo sapiens
tcttcctttatcatgttaatctctttcatctgcttttatacatattttgttcatgctaaacaacaccaaactggttgcttcctttattcaaagccagtatactaattaaagaaaattatctttccctgtgttactgcttaaaacagtcactgaagcagcattcttagctgattaaaaatatttcattaatcatttctcttctggctatcactataacaatttatatttcttacacctgtgaaatgacaaagttagggaaagaaaatctgctaatgtctttttagaagcaatttttaatggaatcccttctacaaagtgctcttgcagattacttcagctgtggtgggaatggttttattcatatgcattcttggtgggaaaatgacaccttagatactaaatgttacttgcaaccaccacctatatttctcatccttccttccctttatggttgttttttctttagttattaggaaaccatcactgttccactataacagttgttagagctttaccttatctgcttactgtcttccaggagcttattatttcattgtttagtgcttactagcatgtggattacayatttatcctttctctcctagacaagccat

SEQ ID NO: 276446 - DNA, 500 bp, Homo sapiens
caaataatgcctacagcaaaataaatatagcaaatcatttttcaaaatcagctcctatgataatatcctaaaacttgcctttaagcctttaatcttattatttttttctttcttttttttcttttaagaggggagtattcatacgggaagttttcccttttacatctctctggctaccartttgactcttcatgtgaaaagctcctgaggtcccaaatgtaccattttcaataaattatactccaaatctcataatttaagtcactttagattcatttctttcacctcagtttgttgttttctttggcttccatatgatatttttctaaagtcatcctcgaacagtctgtttattaaaaatgttacagtgagaactagatagtgatggatataaacagccagaaggagtcactatcactgagaattgctttaatcagttcagttaagtgaaaacatatgttgataagagtcatatttctcagtaaagcatattcttgtgg

SEQ ID NO: 276447 - DNA, 515 bp, Homo sapiens
tggatgctgtggtgtactacccagatctggcttccatgactgaaatattcattcgtccatttgctgggagtgttsactgctgaaaggtcacaactgagacctctccagtcattgcccttaaagtaagattgttgactcaatcagaattgcactccttctctggagcatttcacatcgaattactgaaacacgtagatgcttgagcatcttatctcaatgagatgtctctgaatattccttcaagctcgagaactccccatgatgtgggccttttttgaaattacatcacagttcagcttttgtctctacacaatcctacttcttttctcattcccctaaaaaactgtttccaagagcactttctaataaatactctctacacagattcccactttaaagtttgtttcccagagaatcaattctatagctcacagttggatcaatgtaaaagttgtctaattgcaactttagaaacttatggatattttagtatctgttttaatcaagttttaaag

SEQ ID NO: 276448 - DNA, 558 bp, Homo sapiens
tgtggtgtactacccagatctggcttccatgactgaaatattcattcgtccatttgctgggagtgttcactgctgaaaggtcacaactgagacctctccagtcattgcccttaaagtaagattgttgactcaatcagaattgcactccttctctggagcatttcacatcgaattactgaaacaygtagatgcttgagcatcttatctcaatgagatgtctctgaatattccttcaagctcgagaactccccatgatgtgggccttttttgaaattacatcacagttcagcttttgtctctacacaatcctacttcttttctcattcccctaaaaaactgtttccaagagcactttctaataaatactctctacacagattcccactttaaagtttgtttcccagagaatcaattctatagctcacagttggatcaatgtaaaagttgtctaattgcaactttagaaacttatggatattttagtatctgttttaatcaagttttaaagataaggagattaataaaatgataatctgaggaatttgcatcctagacact

SEQ ID NO: 276449 - DNA, 529 bp, Homo sapiens
gcaccttgtggtataggtgaggatgaagctggcatattaatcagtcactttctttttcaaggaaaatttttcttccttatttatttatacacaactgcatytcatttttccatagtagatggttttcaaaaaatgtgtaaatgtgatattttgtaaacagagtgacactgttaataacctggtatgagaactttacaaagaactgagggatccataaggttgaagaagacatctgagggaacagctttttcataagaggccaacaactctttcaggtacttcagaggtgagaatctgggtgggaggtggtcaaaggaatgaccaggtagattcaactgtgacatctcatcgctctcatttttcaaattgcttttattcttttatctttggagttctctgtaaaattgtatttactgaacgtgttgcacatcattaaaacatttataaaaacttatctcatctactagattcattttaaattgaaaaatcaagtcctgcctgctgcctttatttcattacactgtcttta

SEQ ID NO: 276450 - DNA, 529 bp, Homo sapiens
gcaccttgtggtataggtgaggatgaagctggcatattaatcagtcactttctttttcaaggaaaatttttcttccttatttatttatacacaactgcatctcatttttccatagtagatggttttcaaaaaatgtgtaaatgtgatattttgtaaacagagtgacactgttaataacctggtatgagaactttacaaagaactgagggatccataaggttgaagaagacatctgagggaacagctttttcataagaggccaacaactctttcaggtacttcagaggtgagaatctgggtgggaggtggtcaaaggaatgaccaggtagattcaactgtgacatctcatcrctctcatttttcaaattgcttttattcttttatctttggagttctctgtaaaattgtatttactgaacgtgttgcacatcattaaaacatttataaaaacttatctcatctactagattcattttaaattgaaaaatcaagtcctgcctgctgcctttatttcattacactgtcttta

SEQ ID NO: 276451 - DNA, 409 bp, Homo sapiens
cagaattattacaaacagattagaaaccaaaggagaagggataactttggagagtatggtgacttcagtytttttagagatgcatagatgagcatccaagtagagaacacagaggaagtaactgaaaattggcattggaatttcattcaagagtcagactcaaatatgtagttttgggacttacaaattagctataattgctgaagccataatattggatgggattatgaagaggaaaatgtagggaggtctgtccaagctatatcattggggagtgcttctgtgtaggtacagggctgaaagcccaataatgaggcctgcttgtaaaagtcagggaaaaagcaagcatattttatgtccttttcttgactaaccactctactatatatgatattattgaatttctttt

SEQ ID NO: 276452 - DNA, 1191 bp, Homo sapiens
gaattttacaaattatcattgtgcatctattctctaattttgtaataaaattatttgtaaagacagggtctccccatgttgctcaggctggtcttgaactcctggactcaagcgatcctcctgcctcagcctcccaaagtgctgggattacaggcatgagccaccatgcctggccagtgcatttattcatattgataaaataaattacatctgtaaattgcatcatccttgtgacactcagttgatgatgacacattkattttttaacaccattctggattatctgggtaaatatgttattttggacttttccatcagtgttctaagtgaggataagcctataattcttctttcccctggaactttcctcttcatctcttcaacttctacgtgttctccaacaaggaagtctagccccctctcctctctgtttgcactccctctctgcgtgactgtcctgcagcttgaattccaattttatatacctcagtgatttactacttttgctaaatatcatttttaatagttggtcatcttgatgaatctagctatagtttatttatattcccagctagataatattccactgcctaacwgaattttacaaattatcattgtgcatctattctctaattttgtaataaaattatttgtaaagacagggtctccccatgttgctcaggctggtcttgaactcctggactcaagcgatcctcctgcctcagcctcccaaagtgctgggattacaggcatgagccaccatgcctggccagtgcatttattcatattgataaaataaattacatctgtaaattgcatcatccttgtgacactcagttgatgatgacacatttattttttaacaccattctggattatctgggtaaatatgttattttggacttttccatcagtgttctaagtgaggataagcctataattcttctttcccctggaactttcctcttcatctcttcaacttctacgtgttctccaacaaggaagtctagccccctctcctctctgtttgcactccctctctgcgtgactgtcctgcagcttgaattccaattttatatwcctcagtgatttactacttttgctaaatatcatttttaatagttggtcatcttgatgaatctagctatagtttatttatattcccagctagataatattccactgcctaac

SEQ ID NO: 276453 - DNA, 579 bp, Homo sapiens
ttttggaactattttcatacctccttaggtggccttaatatatacatacatatatctatctatctatctatctatctatctatctatctatatatctcatgyatatatgtatgttatatgcatatatatatatatatatttttttttttttttgagatggagtcttgctcattgcccaggctggagtgcagtggcaccatatcagctcactgcagactccacctcccaggttcaagcgatcttcctgcctcagcctcctgagtagctgggattacaagcatgtgtcaccatgcccagataatttttgtatttttagtagagtcggggtttcaccacattggccaggctggtctcaaattcctgacctcaggtgatccgcccacctcggcctcccaaagcactgggattacaggcgtgagccaccatgcccggcctatattttttattcatatgttcttctgtctccaagatgctctatttcgggggtcagcaaagagccagattaagcttgcaggctatctcgtctctgtcacaatgactccgttccgccattggagtgagaaagcagccatggaaaat

SEQ ID NO: 276454 - DNA, 584 bp, Homo sapiens
ttattctagctccctgttaattaaatcttttaacattatagtgtaagcttctttatttctgacagtgctatttgccttaaagttttttctgcctgacagcgatttggtcatacaagcttgttctcagtatttgcttgacttacatttttctgtctttgtacttctaatctttctgagtctttactgttktagctgtttcttttataaacaatgtatagctggttgctgtttttatttttgtttgtaatcccataagacaatgctttttgttgatattactgatatatttagatttattgtgactgctgatatatttgaatctatttctagagtcttttttgtatcatttatcattctttttctgtgcatcatttttttccccttttctactttccactagattgacttagttttccttatatcccctttggcctttctgtggggtcagaaactgtacattctggtcctatgattttagtgtctacagttaaatttttaatctatccccttgacttcaggctaattatggataattgagttaatcaatgtttatgctttcctttctggcaataaggaaacttaga

SEQ ID NO: 276455 - DNA, 298 bp, Homo sapiens
atcaaccaccaccacttcctggggaccagtggttggggctacacacaccaccgcactggctgaaagtcaccacttatggaagtttccaggtccatgagagaagtgtcaaggagtcactctggtaatgaacactgcagaattgacatgtgcctgctgagaaggaatcacagtgcaggactgtggagagtggtctgaaraaaaggatgtgggttatttgcagagtgtagcaggttccttggactgaggttgcagggagaaggaactgagccagagagaacaagtgcttttccaattaaag

SEQ ID NO: 276456 - DNA, 551 bp, Homo sapiens
tcttttttaaaaagttatatggatagcttaaaatttctataggttttcatacgtttactctaaaaaaagcatcagttttcattttggtattttatttaaagtgattttaaagctaattgtgtaataaaacagactcaaattctgtgtgtgtgtggcttgaaatttattcctgaaggcaagaaggatgagttctaccactctctcggctcaggaaaatcatatttmttactaagttaattcctgaaggcaatatacttaaaatgccatgatttcaaatgcactttgaaagatgcagtgatacgcaagaaatagcccctacctgcaaggcatcttcagtttaaaaggaataaacatcctttaggttttcaatttagaactgtgtcacagatgggatggttctgcaagctgaccactgtgaaaatcatacacagtgcttttgagataatataggaagagcctttccagtgctttacaaatgtgaggtattatttatagtaaatgtctggaaagatgaaaaaatacaggaaaaataaagcttgttattagattaa

SEQ ID NO: 276457 - DNA, 543 bp, Homo sapiens
  misc_feature (1)...(543): n = A,T,C or G
ttaacccggtgacattttttccaagttgctaaaagtcagctgaggggataggataggtacaygagtaactaactacaatgagtgaaatgggattaatgtgatactaggagtgtgaaaaaactgcagtgggagaggggctgcatttgttggtggaattagggaaagatctgaggaggtttttctgctaagccagcttttccttaggtgtggaagacacgtggttcagtaatgggagatgattccaggtggtactctgacatggcatgaaacaactttgaattccatggtggaaatatgtgattcctttttccagctaggctgatctcatcagggagaacctctcagcttggggccactagtgatagttcttgaacacatgctcatctgccctttcctcacagagaagccagctacaggctcagaaaatgcagcattaacttagaatntatgttgctttcatgccatttacaccaagtgatactggttttccctggaaagtgacacaacattttctttataaacttcttaaaaaaaaaagctagt

SEQ ID NO: 276458 - DNA, 543 bp, Homo sapiens
  misc_feature (1)...(543): n = A,T,C or G
ttaacccggtgacattttttccaagttgctaaaagtcagctgaggggataggataggtacacgagtaactaactacaatgagtgaaatgggattaatgtgatactaggagtgtgaaaaaactgcagtgggagaggggctgcatttgttggtggaattagggaaagatctgaggaggtttttctgctaagccagcttttccttaggtgtggaagacacgtggttcagtaatgggagatgattccaggtggtactctgacatggcatgaaacaactttgaattccatggtggaaatatgtgattcctttttccagctaggctgatctcatcagggagaacctctcagcttgggrccactagtgatagttcttgaacacatgctcatctgccctttcctcacagagaagccagctacaggctcagaaaatgcagcattaacttagaatntatgttgctttcatgccatttacaccaagtgatactggttttccctggaaagtgacacaacattttctttataaacttcttaaaaaaaaaagctagt

SEQ ID NO: 276459 - DNA, 638 bp, Homo sapiens
ccacaggttggacaagcttgttccaaacagattgagtagctggcacatcatttctccaactaatacaattaaagtccatatgggtacaggtggaccagatgtgacaccaatatctcatacggaactgttccctayagggtttgccttcctcccatgcccatattcagtttagctctgctgattttgtacagtgaagggtacaacataaatagacctctgtgcccacatctaggataaaacctctcggcttaggagggtaataagagtatcatataaaacctaaaagctgtggaggtctgaaagacttggtttcaaaccccagctcccacaattacaggctatgttgatgtgcaaactactgaaccactttgagctttagctgtcatttttaacataaaactggtgatagagctaaaaaaaacaaatgaaataacatttggtgtgtaatgtgcctggaacaaagaatatattctataatactaattcctttcccttctatttataactgatacattttttaaaactcctaataataatacataattgagcttctgaaactgtggtgaattgggagcttcaaatactacaaaaagaatagctatctagtactattaaacggggtggccttggtgaaaatt

SEQ ID NO: 276460 - DNA, 1290 bp, Homo sapiens
ccacaggttggacaagcttgttccaaacagattgagtagctggcacatcatttctccaactaatacaattaaagtccatatgggtacaggtggaccagatgtgacaccaatatctcatacggaactgttccctacagggtttgccttcctcccatgcccatattcagtttagctctgctgattttgtasagtgaagggtacaacataaatagacctctgtgcccacatctaggataaaacctctcggcttaggagggtaataagagtatcatataaaacctaaaagctgtggaggtctgaaagacttggtttcaaaccccagctcccacaattacaggctatgttgatgtgcaaactactgaaccactttgagctttagctgtcatttttaacataaaactggtgatagagctaaaaaaaacaaatgaaataacatttggtgtgtaatgtgcctggaacaaagaatatattctataatactaattcctttcccttctatttataactgatacattttttaaaactcctaataataatacataattgagcttctgaaactgtggtgaattgggagcttcaaatactacaaaaagaatagctatctagtactattaaacggggtggccttggtgaaaattwcacacctgtaatcccagcactttgggaggcggagacaggtggattgcttgaacccaggagtttgagaccagccctggcaacwtagtgagaccccatctctacaaaaaatttttaagtttgtaaaaataaaagagagatttcaagctgggaacagtggctcatgcctgtaaccccagcaatttgggagactgaggcaggaggatcacttgagggcaggagtttaagaccagcctgggcaatgtagtgagacccccatctctacaaaacaaagtagttttccactatcgtggaggttctaatcttatgggagagagaagataacttaatgtaaaaggataaacttcccctcaaaattattgaaataaaaaaaaagataaaccatcaactgaaggcaatatagggtaatagtaatagcttgcacatattgtttccagttttgcaaactcattgcatgtatcctcacataaaccttatgagatgggtactattattgtttctattttaaaattaggaaatgaagtcctaggtccactaagatgtcaaaagacaaaataagcatagatttagttttatttgtgattctagaagtgggagaagtggtctgaaaagctgagcagaggaggttgactttataggcagagaaaggctgaa

SEQ ID NO: 276461 - DNA, 651 bp, Homo sapiens
cacacctgtaatcccagcactttgggaggcggagacaggtggattgcttgaacccaggagtttgagaccagccctggcaacatagtgagaccccatctctacaaaaaatttttaagtttgtaaaaataaaagagagatttcaagctgggaacagtggctcatgcctgtaaccccagcaatktgggagactgaggcaggaggatcacttgagggcaggagtttaagaccagcctgggcaatgtagtgagacccccatctctacaaaacaaagtagttttccactatcgtggaggttctaatcttatgggagagagaagataacttaatgtaaaaggataaacttcccctcaaaattattgaaataaaaaaaaagataaaccatcaactgaaggcaatatagggtaatagtaatagcttgcacatattgtttccagttttgcaaactcattgcatgtatcctcacataaaccttatgagatgggtactattattgtttctattttaaaattaggaaatgaagtcctaggtccactaagatgtcaaaagacaaaataagcatagatttagttttatttgtgattctagaagtgggagaagtggtctgaaaagctgagcagaggaggttgactttataggcagagaaaggctgaa

SEQ ID NO: 276462 - DNA, 563 bp, Homo sapiens
tcatggaagacaaaaagtccatggctgagtgtggtggctcacacctgtaatcctagcactttaggaggccgaggcaggtgaatcacttgaggccaggagttcaagactagcctggccaacatgacaaaactccatctctactaaaaatacaaaaattagctaggcgtgatggtgcatgcctgtagtcccaactactcaggaggctgaagtggragggggcattgcttgagcccaggaggcagagattgtgataagccgagatcacagcactacactccagcctaggtggcagagtgagaccctgtgtcaaaaaaaaaaaagtctataaattggactgtagtttttttttaaaaaaagacaatctaaggctgtaatttatgtctccacatccttttacgtcttcatccaaacaaatgacaaagctgtgtccgctgtacccttttcatcttaagtcagagacaacctgggttttctccttaatgggtgctatgcagggctgcactgctaagtgcacttggctttggcagcctataaatagaaatggaacccctgaggtgcaggag

SEQ ID NO: 276463 - DNA, 439 bp, Homo sapiens
gccagtcagcaggcccggtgggcttagtccagggctgctagctctcctgttggcctctagtggagatggcasagggtcctgcctgctggtggccaagggctggggcgtgccaggtcctgtctttgcgggtgcaggggtgcggtcagctgtgtgggcagttggaacccacctccaggccctcctgccgcttcgcggaaaaagttcgcgtctcctctggcctcgcagcagccatgttcccccaggtcctccccatcagaggcctctgtcctttggaagatcactcctggggcatcgagcgtgtaagggctcgggcaggagaggctcttaattgtttctgagtcaccacgcttttgtcgtgtttcaagagaacagcttgtcaaaacaagacgccagccggactgaggtggtttctaagcagtggcttcacagctgtttccca

SEQ ID NO: 276464 - DNA, 530 bp, Homo sapiens
tgggtatgtctttgctgtacaccacaagtctccctcacgaaagcatgcccacaaaggctaatacaatatcatatgtgctgggcagagcaactaatggcatgtccctcacaaagatgcacacgggaccaagatctaaatgcatcactcactttgctctgtggtataaagatactctcatttatgggtaacagtgataagaaaagtaggaagtgtttatatttatctatagcacagaaatgaaactgttggaaaaactggacaataatgtaagtataaaacattctacagaagaatatggttttgcaatgaccaccatatagggtctgaagaaatcagagttataaactgtcgaagtcctatgctaaaagtgataaacataatttaataaaaarcagaaaagtactgaataaagtttaaaatgaagatcatcatgtattgaaagagtgaatttattaacatcacagtgaacacatgccacctaagggtaagctgataatgaaataagcaaagacctattatgataaattgaa

SEQ ID NO: 276465 - DNA, 553 bp, Homo sapiens
gattcaccagttgcaagaaacccagtatgctcttctcacagccccattgccataaatatgatgctggctacagaagagagaagcacttgtgtagtggttggaagtgattggtcctgaaaatcgttctgatgtttctctaataatcaggaaagctccagaggtgaattaagagacgcaacgcatcatggcctttatgcataaattactgaggaaataatacaggtcccaggacttcttctggtggatccctgaaggtgtgcaaagttgtgcatacagattgattcagcttgtaatcattgtccttctctttataagcttaagtatccttttcattaaatgtctcatgggtgacacaatacacaagtcaaaagccaagtctcaacagatggtcagctgttcctaaacgaacaaaaggtgactgaatgagaaacagactcatattattcrgaaaaaaaagaatacattttcttccattgagcaagaagggggattctgtcaaaaattctttgcttgacctaaatttatttaggcttctaaattttctctaaggctc

SEQ ID NO: 276466 - DNA, 483 bp, Homo sapiens
tcagttattattgctgctatagatgcatattttcttgctgtagttctttttatggaatatcttaagatttatacatttatatagaaaagaaaatcaattaaagaataaataacaatgtgaggcaaattatggttaacacaaacaagataactacaataaagagcaaagtagagatataacaaattaggcaatataatttgtcaaggaggtgaaaaatcttttcttggcatggcatttagcataaagttggccaaaataagtastataaatttgttctataaaattttgttattaatttcaaactttcacagaatgaattgttttaatattgcctttataatttatgtagttaatttcattttttagcacaatccgtcacatttatgacaattgagaatgaaggaattatatttgggcagtggtagcagcagtgagtcatcataatgcattgagataagttctgacctggaaatagcacatttg

SEQ ID NO: 276467 - DNA, 1139 bp, Homo sapiens
gttgtacctactatgggtctggacaaatttataatgatgtgtattcaccattatagtcacatacagagtagttttcactgctgtaaaaattctgtgttcctcctgtttatccctccctccccataatccctggcaaccactgatcttagttttgccttttccagaatgtcatctagttggaatatggtatataaccttttcagactggcttttttcacttagtaatatgcatttaaggtttctgagtatcttttcatggcttgataactcacttctttttggctctgaataatattccattgtctggatgtaccacaatttatttatccatgaacctacggaarcacatcttgttttttttctaagttttggtaatgatgaactgagcttttataaacatctgtgtgcaggttttggtgtggacatattttcaactcctttgggtcaatatcaaggagtgcactttctggattgcatggtaatagtacgtttaggtctctatgaaactgccaaactgtcttccaaagtagaagwttgacaagctgccatgcaggaagtccaactactttgagactgccgtgctaaagaggcaacaactttgtggaaaatgaaattaaaatgtaaacttttaaaaacagaaactttatttctcaacataagctccatcaagttcacaacacttttgtaagcaaagatactagccatttcgtcaaccactaaagaactgaaggtctgggaatttatccatgcagttttgttttgtttttttwaaattactaagaaaaatgtgtgccctttacagatttttgtaaagattagtaaacaaaaagaaatcagcaggagccaaatcaggactgtcacatggatgcctcatgatttacaatcaaaactctcacacaattgtctttgttgatgggagaggtgagcagaggcatagtcatagagaaggaccatctggtgaagcttttctgctaaatatttgcctttctctaaatactctttattatggacagatgttatcattcttaggccctccagaaagctaacaagtaaaattccttgagcatcccaagaaactcttgccatgacctttgctcctgactggtctggtttgctttgcatttctttttcatcagtaa

SEQ ID NO: 276468 - DNA, 508 bp, Homo sapiens
taaataagcaagtcaaaccccagcaaagccataatagacctttcaaagtttcctcaggtctctttcccaccattatttgtgatcagaaaacttacaaaatatgtacccacttattccatttttaaacacagcatattgtattgttaaatttaagaactattgtgtacaataaatctatagaacttattcatctagtataactgaaagtttacatccattgaaaaacccttcattgcctccagccctcagcacctggcaatcgctattgaattttctgttgtagttttttttctttttttctgaaattgtaggagtttcttatgtattttgaaaattaaccccttatcgaacatayggcttgcaaatattttcttccactccacagattgacttttcattttgttaattgtttcctttgctgttcagaagctttttagtttgatgagtcccacttatctacttttgcttttgttgcctgtgcttttggtgtcatatccaataagtaatt

SEQ ID NO: 276469 - DNA, 964 bp, Homo sapiens
tgatgcctagtatttccactgtccttttgtccagagcctagtcatatggctccaacctaattatagtggaaaacttggatrtataatcttcctctgagcctgggatgaagattggtgaataatttgtccccgtttctaccaacatcctgaaataaactagatctacatatttctataactaagatccagttcacactctgagtataaaagaaaatatagaacgactatagaatcatgaaatactgggtcttgtaatactctttagagataatctagtcagatatcagcattttaataatgggattctatttctatacttaggaattcaagtggggaaaataatatcaaaattaaaaaacagaaagctgaaaaaaatacaaatcctttgactaaagatattatttcagaaaaaaagacataattatatatccatttaaagtaggtaaggtgaataagttcaattttgtattttatgtttcaaatgtttagattactatgaaaatgatcaaaagcttatgttcatacaacaagaaagaatttaattgcataaactctttaaagtagtttgaactccataaagtgatatgtattttccagtggagagttagaagataataaaawtgcaaatgttaataccaagcacatgaagccaacagtgatcttgttcataaattatattactaatttctgggtgcatacwtacacactcacagaaatatatattctaagagaatgtatatctgtctatatatcaacatttacggtttttgtttcttattttataggactattttaagaatcaaaattacatttatgtaggctttagcaacccaacacatgctgaatatacatagtcatcatcaatatcattattgtttctattaattagaaagctggcactcagtgcttaaaggaaataagaaaaataaagtaatcaaatacaggagaattaacactgtcataa

SEQ ID NO: 276470 - DNA, 514 bp, Homo sapiens
  misc_feature (1)...(514): n = A,T,C or G
ataaactgactttattttttaaaaaaggaacattttaaagtctgaaaatttttctaggtgcatatagcaaataaaaaacatttattcaggaatacctagtaaaattcagtcagaatagtgagaatctgtggcatttgaaccatgacccagttcctcccttccctttcagctcagcatgatcaaaacttcactaaagccaggtgcattcaagaacacaggactccctattcccagagcttcaagttgaaaggtaggttttcccgggaggagcagatctctggcatttcttatcctccccagctatacgctgcagcagctaactttcaggtgagtgcagcagaggcttgagagcttctttattccaccaagccccgactcacagggcggaggctctatgtcaggcatggtatgctgagaataccgggtygccatcactgtgactccactcattcataggttggaggctccacaccagcaaagtcaagccaagacgaccctangctacaggcctcac

SEQ ID NO: 276471 - DNA, 596 bp, Homo sapiens
  misc_feature (1)...(596): n = A,T,C or G
cattctgtgttaggctcctgtccagtgtgggggtaggatgatgagcaaacacctacatgatccctacccttatggaggttagaaacaagaagaggaaaaaaaatcaatgaaaaaatcgtacacttggaaatttgaaaaatatagatgagtcaaagttttaagcaggaagatgggtatagtaggtaaactcagatttgcaaagagtatcacatcttttcttctaaatcatcttcattctcccccatccaggtgcaggtagggagttccgtctccatctgcgttggggctgcttctcccttccaggtcactcaaggcccagggtgctctagtggcacctggacagtgcaatartggcccccagattccaggatctcatggtcatgtctcttttgtccaatgcagaagtgtccttgaaggccagagccatgctattttggcctcatatgtacaattctctagaggattctttagaggtcttgccatctcttcaggggactatatatgagcaaagagaaagtctccactgctgatagtttcntgctgtctgctcctcccttactctcttccctggatacctagcattatctcttcaatga

SEQ ID NO: 276472 - DNA, 492 bp, Homo sapiens
gacactaaccctgtcttcaccaggcatgtcttttagtgaaaaagacagttattagtcaaatgatcacacaaatgaatttgcaattgcaaatgatggtaaatgcaaggaagaaaaatcaagatagctaacatttatcgtgcattgctctcacaggcggctctgtggattatctcctttagcccactccctcccttacgcctattaagtgaatctgtgttaatatctacagtctacgctggaggaaactcaagtgaggccttgcccaaaggcccccagctggagaggtagagctggaattgaacttgactggctgatgtatgtctctgcatatattcaccacgctgcaaaactgccaagccctactgagccaccagctctgagggtataactcacaccagggctaggcatggtggcctgtgccygtagtctcagttacttgggaggctgaagcaggaggatcacttgagcccgggaagttgaggctacagtgag

SEQ ID NO: 276473 - DNA, 541 bp, Homo sapiens
ctcttgtccataattttgtttattcattaatttgttttattggatgcagagtttctcatcaaacacatttcttttcataaaagaaacagcctgaaactactagtgcttgggagatatgttagccaaarcaggagaaaagaagtagaagagaatagtaaggctattttcattttctatttttggagcttgtcaatatcttgaagtatctatggaagtgaaatacattgtgaataggaatagtaaagttaagtaatatgtgtagataagcccaacacaaaaagaaaaataagaggatccaggacaattgtggtttcccctatcctgcctttccagctacaaaatagcataaaaagcattccaaaaattctgtcttggatgttttaatgagtttctgctagtcatggggttgagactagaggcagtggactcgggaaagcaagagctgttcattattcagtttgaattgaagccaattaactgcactgtgtgttctaaagaaaccttggagagacttcctactcgccttagagatcagaaaacc

SEQ ID NO: 276474 - DNA, 541 bp, Homo sapiens
ctcttgtccataattttgtttattcattaatttgttttattggatgcagagtttctcatcaaacacatttcttttcataaaagaaacagcctgaaactactagtgcttgggagatatgttagccaaaacaggagaaaagaagtagaagagaatagtaaggctattttcattttctatttttggagcttgtcaatatcttgaagtatctatggaagtgaaatacattgtgaataggaatagtaaagttaagtaatatgtgtagataagcccaacacaaaaagaaaaataagaggatccaggacaattgtggtttcccctatcctgcctttccagctacaaaatagcataaaaagcattccaaaaattctktcttggatgttttaatgagtttctgctagtcatggggttgagactagaggcagtggactcgggaaagcaagagctgttcattattcagtttgaattgaagccaattaactgcactgtgtgttctaaagaaaccttggagagacttcctactcgccttagagatcagaaaacc

SEQ ID NO: 276475 - DNA, 534 bp, Homo sapiens
atctttttattacttcttggacatttctgataggtcagcatatctggtttggtgtctcctagataaaaatctttctytgccatttcaaaaataccctctgtttatagtttttctgctcaaaatttttccccaggatgcgaaataattctttattaaagcttttctgtcttttttagaaatgaagctccattcgattttttttttctgttgtactgtacacatcttttttctttttccagtcacccaaatgacagtacaggttctccagctaaatagctttctcctgaaagcacactgaaaatctataacttctatgctggtctccaagggtgaagtgttggctaatgatgtgttttgagtgtggatttcaaatattgtcttacaaatatttgttgcaaaatcaaggagatagagagtaagaagtagatggaggaatacaattttaaagaattgtccagctgatttctgagtttgatgtcagctcataccaaaccctttcaatttacaagtcacaaataactagggcagacctgc

SEQ ID NO: 276476 - DNA, 646 bp, Homo sapiens
tgtctttgtttgaatttttgcagatttctttcttagaacaaacaaggatgagaatacaaaagagagctttaaattttagttgtaaaatactagctggggtggcataaatttgagaactttaagtgtacaattaaaccatctattttcttaatcataaagggaagtggaaatcataagatcacagagaaattaaaaaaattgaaattactatgaacatagcttagaaacttgttttgacttgatttgattatttagcccatcacatgatgtttattttccaaagccacagaccatgtcttggggaaaaaaattaaaaggagatttatagaatttgtctgagatgaatatttaaaaccattcagaatagcagaaccccatagggggaggttctaataatgataaagaaatagtcattccagggagaacaatttaaaatgactctcagaatgctatctcatcagataaaagatttaaacaaatgaaattaggctaaaaagtggattttagcraagtccatctgttatctcttaatgagaatggagatgtcattctttatcctcttgtgtcagattcacttaaccgaggctgagatgcttcactgtgtttattacccaagtatttcagtggtagtggatctaacatgtta

SEQ ID NO: 276477 - DNA, 508 bp, Homo sapiens
cacttcttttgtttggctgataaacctgggtgtatttttcagtcttattcttatttcatcatttattacttcactgggtgtttatttgtygaaaacttctgctttctttatagaatggatggatatcggtatccatatctatacacatatctatatctctattcatctacctatcaagagtgaaaaagagagagaggtggtgggggggggtttagggaattcataaagagatattgtgttgatgaaaatcaaatatgtaccaaaactctttatagaagaatctcttggaattaaagtttaacttccaacgcctatgcctgctttagtgcaaaataaggagtaacaccctgggaaagaataacttgttagtttttttcccagatctatctttcgcgatagacactgtggttcttgaagcctacccactcaccagtgcatctattagtttattcatccatttgtttaaaacatttaatgtgcattgaaacataaatggaaggatggctga

SEQ ID NO: 276478 - DNA, 626 bp, Homo sapiens
tctcaaaaaacaaaacaaaacaaacaaacaaaaacctatgcttcttttttatcattagttacttctcttagttaattttaacagaagggagcattgaaacataaaattgtaatatcatttaataatcagaggctattgataattagaagaaaatatggcacaaataagttttaacataaataataatgacaccaaatgtaatagtttatttgttaattaacaaagttttgtggacaaaaatgatacatactgatcccttctgtgtctcaagaactccttgtatgtgaatggaaacttccatgaattatatattattcaaatttttttaataaaaatgctaatgaaaatgttaacatgtgcataaattaaaatgatcmtaaattaggattaatatcacattaatgaattataatcccacattcattaagataaagtggcatttcaatatttgttcatgttaatacattttatacaataaatgaaagggatacattttgagaatcaataaatatttgatgtaatcttatgctttaactttaaaaaatattcaaaagtaaagtaggagatctagatgcatttggaatctttgttgctattttatgtcttttttataagcctttcttttc

SEQ ID NO: 276479 - DNA, 597 bp, Homo sapiens
catacctgggaatgacattggtttgaaaagagacctaaagaacttggaagcaggttcaggcctcctctatccataggtgttggagagacagtgtagcatcagagaaaatggaaggcagtagtaattgtaaaatgaattgtcattcttgtgaatagtttttattatggtacttcaaaaggctgaaaatagtttacttgtattcttaaaatgttttttttttgttttcccctccctgccacccccaataccatatgtttgcctgtaatattttgggcacagacaaggagaaatgtggcatttatttaaaaggcactaatttgaggacarcagtgagaaaacagatgcagtccatcctaggtgattgaagatggaaaatctaaataaaatgcaaggcaagtgaataataaatgcttaattatctaaagagaccagggtaaagtttcagaacagcctaaactttgctccaggcaagtgagagtatgaaaaataacctgcttaaaaataaactaagttaattcattgacctttttttgaaactcagaccatttttcttcattgggtacaaacaacatttgtctctgtggaacctgtaaaaat

SEQ ID NO: 276480 - DNA, 662 bp, Homo sapiens
aaggagggtttttaaggatctttgtctgtatttccacattgccaagctaaatttggcaagctaaaggctccctcttaggagcttttcctaaccttgcacctagccgcagaaagtaaccaggggctctttagaaggaaacttagatggtgacaccttaccccaaagayagcaggttacaatgggaaaggcccagagagcctcagcacccacttctcacaccaacccaggctcctcccttcttcataattaagcttcagataatgtttgcaatctccccgtgttttctaccatgtgtcagggtgactgatgggcttgtcacagctcagactccctgtaaaccggcactgtgactgctttaaccttccttaatagaccaacttcaagggcaaaccaaggacagagatttgccaggccctccctgatcagtccctccctcccctgtgactttttctttcctctcttctgcctcttgctcctctcaaaatcgtctgcaagatagacctaaggcagttgccgagcaccataagtaaaactattcttaggttacaagctgccagaattttcaagcaagtgcatgtaaatatttcattcctgacagtgagagttattaagagaaaccttgtgcgttttctagaagaattttaagagacatttattcattg

SEQ ID NO: 276481 - DNA, 592 bp, Homo sapiens
agagaaccagctgcaaggtgaacaatctcagtgtcaagagatggagtcacactgccagcattctatcaccaggagagtttgggagaggttgagcagaagtggatttcctatcatggaaccatgtaggaggatcttgtacaaagtagtgcttcagtggggatgtgtgggcagccagctgggtctgttcaccagaaccatcttctcccctttgatacacggttggctacatgcttacacccccstgccacacaggtgactatgtgactgagctctagacaattgaatgtgagctggaatgatgcatgctgcttctgggtgtggtctctaaaaaccactactcattctcctcctgtcagattgggacaaagatgatgatggtggctttggaagtcacatcttaagcgtagcagagcctctttcactctgattttctgaatattcacgtggaagagatctgttattcaatttgctctcccacctgggactcctacatgagaaaggaatgaatgtccattgtgttgggctgttatgcatttggttctatttgcaactgtagcttagatatccttgacgaacataagcagccttcacc

SEQ ID NO: 276482 - DNA, 598 bp, Homo sapiens
ggccttgggcaaggctctttatgtctccaatctcagttgaaaaggaatcacgtccactgagttcctagcacaagtgagaaggaaacccttaatgtcggcctttgcgatttcaaacacatgcagagaaaccgaaggagaggaagggaaatgattaaagggatgggaaatagctggaacaaagctttcaagagagtcctgctggaagtttcccacgtccgttttgcaccctgcgctggtccacagaatggcccgcctcaaacacggctctaatcatatcagccccccactgcagacactctgatgactgctgatggcttgataaaagcccatggytgcagctggcgtcagcaacccttaaagagccctccatcctccagcaggcctctgcggtacggtctggcttgcccagcgtgcagtccagccacagtgggtcgtgacaaaccctgaggtctgtgggtgcacattcatgaatactacctgccttagaagggagtctctgaatctaatataattttgactatgaaatccactctgaatgcagcgtagagagggttctagatacctagaggggcctcagtaaagtttaccccttgtttca

SEQ ID NO: 276483 - DNA, 598 bp, Homo sapiens
ggccttgggcaaggctctttatgtctccaatctcagttgaaaaggaatcacgtccactgagttcctagcacaagtgagaaggaaacccttaatgtcggcctttgcgatttcaaacacatgcagagaaaccgaaggagaggaagggaaatgattaaagggatgggaaatagctggaacaaagctttcaagagagtcctgctggaagtttcccacgtccgttttgcaccctgcgctggtccacagaatggcccgcctcaaacacggctctaatcatatcagccccccactgcagacactctgatgactgctgatggcttgataaaagcccatggttgcagctggcgtcagcaacccttaaagagccctccatcctccagcaggcctctgcggtacggtctggcttgcccagcgtgcagtccagccacagtgggtcgtgacaaaccctgaggtctgtgggtgcacattcatgaatactacctgccttagaagggagtctctgaatctaatataattttgactatgaaatccactctgaatgcagcgtagagagggttctagatacctagaggggcctyagtaaagtttaccccttgtttca

SEQ ID NO: 276484 - DNA, 671 bp, Homo sapiens
cttagaagggagtctctgaatctaatataattttgactatgaaatccactctgaatgcagcgtagagagggttctagatacctagaggggcctcagtaaagtttaccccttgtttcatatatttagctgattggtaaaatgattaatgcggtatagtttacctttagttggccacaagccgtaccactccctgttgcatcactatatgccttaccttctactgtgccctcatatgtgaatgtttgagagagttctttttagtctcctctttaataagaaaaaaatagccaacatttccacaaggtctctttctttccaattttttcgtgaatttcttttaacttttaagctcagaggtacatattgcaggttacaaaggtaaacttgtgtcatgagggtttgttgtacagatgatttcatcccccaggtattaagcctagtgcccattatttttcgtgatcctccccctcctttcaccttccaccctccagaaggccccattgtgtattgttcctttctatgtgtccatgtgctctcatcatttagctccaacttcyaggtgaggatatgcagtatttggttttctgttgctgtgttagtttgctaaggataatggcctccagctccatcgatgtccctgcgaagtccatgatcacaacactattcacagc

SEQ ID NO: 276485 - DNA, 583 bp, Homo sapiens
ttgaggaattttgcaaacatgaagctgctgctgttgctgtcattgtagcttttacctggtgtttctcataacactgacttgaaactttaagggaaggaaaaaaacacattaaaaatgtcttcagtgcctttgttttctttttcagtgtttatttaatcattatcagtacatggacattgctcacagccctccccacttatttttttcttgacaagattgttataatatgttgaaaatactaattatcctattcaccttattaacagggctggataaacaaatcatgttgctgtgcttggtggaagaaaatgcatgtgtgtgtgtgtgtgtgtgtgtggtgtgtgttgcaacctttgtcccctcgggtcataacaaattattgatgccagttcctttaaaaagacaattaatccaattaccttcttgttgaatcaatactaatgtctttttttgtttaacttgcaggtttcggcaagtcaggctacaggcaaagctgaggtaggaaacgtggtttttctgtccctttagaagatagtttgaastgcgtttcttttgtgatggagtgtaacgagcattctagcaa

SEQ ID NO: 276486 - DNA, 583 bp, Homo sapiens
ttgaggaattttgcaaacatgaagctgctgctgttgctgtcattgtagcttttacctggtgtttctcataacactgacttgaaactttaagggaaggaaaaaaacacattaaaaatgtcttcagtgcctttgttttctttttcagtgtttatttaatcattatcagtacatggacattgctcacagccctccccacttatttttttcttgacaagattgttataatatgttgaaaatactaattatcctattcaccttattaacagggctggataaacaaatcatgttgctgtgcttggtggaagaaaatgcatgtgtgtgtgtgtgtgtgtgtgtggtgtgtgttgcaacctttgtcccctcgggtcataacaaattattgatgccagttcctttaaaaagacaattaatccaattaccttcttgttgaatcaatactaatgtctttttttgtttaacttgcaggtttcggcaagtcaggctacaggcaaagctgaggtaggaaacgtggtttttctgtccctttagaagatagtttgaactgsgtttcttttgtgatggagtgtaacgagcattctagcaa

SEQ ID NO: 276487 - DNA, 510 bp, Homo sapiens
tttagtaatctgaaagcaagcttgaaaaatagcaaagagattgctttggatcgactgtgtgtatggataaggggtaggggatgagggaacaattggaaaatcagctggacatgtggatgaagggcactgaaggtgactcttcattgtggggatgatratgataacagtgatggtggtggtggttatagcggcagcagtgagaacagccagcagttattaatgctcactgtatgctaggcactgagcaatgtattgtatataaattacctcttttattccttccaatgaacttaggagaatgagtattaatgtagacttcatttaacagatgagaaaaccaaggctcagaagagtttatgggacccactcagggccatatggctagtaggcaaagttggtatttgattctatgcaatttgccttctgaaccagcggtccagcaaagatgggggaagcaggcttgaaaacccccttgggttaaagtctacgttgctcaacgcaatcttctcc

SEQ ID NO: 276488 - DNA, 510 bp, Homo sapiens
tttagtaatctgaaagcaagcttgaaaaatagcaaagagattgctttggatcgactgtgtgtatggataaggggtaggggatgagggaacaattggaaaatcagctggacatgtggatgaagggcactgaaggtgactcttcattgtggggatgataatgataacagtgatggtggtggtggttatagyggcagcagtgagaacagccagcagttattaatgctcactgtatgctaggcactgagcaatgtattgtatataaattacctcttttattccttccaatgaacttaggagaatgagtattaatgtagacttcatttaacagatgagaaaaccaaggctcagaagagtttatgggacccactcagggccatatggctagtaggcaaagttggtatttgattctatgcaatttgccttctgaaccagcggtccagcaaagatgggggaagcaggcttgaaaacccccttgggttaaagtctacgttgctcaacgcaatcttctcc

SEQ ID NO: 276489 - DNA, 450 bp, Homo sapiens
tggtctcataaactgcaagggtgcctgggaaatgtagtccagctgtgaacccaaggggaagaaacaaattttgatgaactcagagctgcctctaccacaggcactgagcagagacctggagggctcatgatttgtggtgaaactccatccacagcaagagcgaaactaggggttcaacatttgaggggacaytctcacagtagccaagctcacgccctgctccagagctccccatggtgcctggactgaaatgttagtttgtgcagcagaggccccatgtgccagtgttgtccctgggcgggttaaagacggaatttgacacaatacattactgcaaattagagaatgtgaaaaatctcatgctgtggagatttggactctgggtatatttttataagccatggagagtctgcaaatgaaacactgtcaaagagaaaacatgaaaatgtg

SEQ ID NO: 276490 - DNA, 598 bp, Homo sapiens
ttttgtgatctagtaaatagcaggaaatttttgcttacctaatatttattgagtagctgttacatatcaaataaagcacctgactttgttagggtgaccaggttgtccagatttgcccggaatgttcccagttttatcattgaaagtcccacattctggagaaactggaaactatggtcccaggcaaacagagacagttggttgccttaggcactaggggtaaattggtaaacaagacaaaatttcttccctcaaggatctgacagtttgataaaccagaaaataaagataagyactcagcaatttcacacacacacacacacgtatatacatatacatacacacacacatacatatatacccccaaagaattgtaagtaggtattcaattacatgtccatatacgtgagtagcagcattcctcacaataataatgttgtgaaaagaaccccatttccatcaacagaggagaagataaacaaatcgtggtgtatccataccacagaacactatttagccctagaaaagaaagaagtactggtatggatgaaccttgaaaacatgatgctaacattgaaggaaggcagacacaaaaggc

SEQ ID NO: 276491 - DNA, 598 bp, Homo sapiens
ttttgtgatctagtaaatagcaggaaatttttgcttacctaatatttattgagtagctgttacatatcaaataaagcacctgactttgttagggtgaccaggttgtccagatttgcccggaatgttcccagttttatcattgaaagtcccacattctggagaaactggaaactatggtcccaggcaaacagagacagttggttgccttaggcactaggggtaaattggtaaacaagacaaaatttcttccctcaaggatctgacagtttgataaaccagaaaataaagataagtactcagcaatttcacacacacacacacacgtatatacatayacatacacacacacatacatatatacccccaaagaattgtaagtaggtattcaattacatgtccatatacgtgagtagcagcattcctcacaataataatgttgtgaaaagaaccccatttccatcaacagaggagaagataaacaaatcgtggtgtatccataccacagaacactatttagccctagaaaagaaagaagtactggtatggatgaaccttgaaaacatgatgctaacattgaaggaaggcagacacaaaaggc

SEQ ID NO: 276492 - DNA, 598 bp, Homo sapiens
ttttgtgatctagtaaatagcaggaaatttttgcttacctaatatttattgagtagctgttacatatcaaataaagcacctgactttgttagggtgaccaggttgtccagatttgcccggaatgttcccagttttatcattgaaagtcccacattctggagaaactggaaactatggtcccaggcaaacagagacagttggttgccttaggcactaggggtaaattggtaaacaagacaaaatttcttccctcaaggatctgacagtttgataaaccagaaaataaagataagtactcagcaatttcacacacacacacacacgtatatacatatacatacacacacacatacatatatacccccaaagaattgtaagtaggtattcaattacatgtccatatacrtgagtagcagcattcctcacaataataatgttgtgaaaagaaccccatttccatcaacagaggagaagataaacaaatcgtggtgtatccataccacagaacactatttagccctagaaaagaaagaagtactggtatggatgaaccttgaaaacatgatgctaacattgaaggaaggcagacacaaaaggc

SEQ ID NO: 276493 - DNA, 407 bp, Homo sapiens
ctgaagcccagaatgggggatttgggcaatgggaagagaaagggcccattaccttactgacagacagacagacagagacccacagaccaacattccttttctgtttctggattaataacacactggcttcctttgacatttctatgttagtgggaatacttgatcatatcatttcttatggtgataggagttgctgttttagtttcacgtagatgattttagaaattattttcaccgaggcagtattttaaacacacacgtaatgttcacacgtagttcaaaatttcagtgcctctctggctttcttcartctatttcaacaaggagaggttatgcagcttccttccacatatcctagtaagtagtagttatcaatagctaaacatttagtttaatcattaggtagt

SEQ ID NO: 276494 - DNA, 625 bp, Homo sapiens
actttggccaagctgcttaaattattccatctcagtttctcatgtggagaatgggaaaagaaatacctaccttattatattgtttctgtagatcagtagcgatggatctgaaacacctcacgaaaggcctaacccataaatgtcaagaaatgattctrcgtcagtttcatatcccccctctccctattactatgcccagtgacacttggttcctgttaaggaccaagatctgttccaccttattgtcttccacttcttccttcttctttttttttttcttgaaacaaggtcttactctgttaccctggctggagtgcagtggcgagatcatggctcattgctgtgtcaatcttctgggctcaagtgatcctcctgcctcagcctcccgagtagtgggaccacaggcacctaccaccgtgcgtggctaaatttttaattttttgtggagatggggtattgctatggttgtgaattcctgggctcaaacaatcctcctgccttggcctcccaaagtgctaggattacagacatgaaccactgtgcctagcctggtcttcaatatgttgtttccttgacctggaattctttcccctccttacccctgaccactcttcttccaaatcct

SEQ ID NO: 276495 - DNA, 539 bp, Homo sapiens
ctgaggtcccttgtattctgagatctacaggctcaggggccctggaaagsttaaagtgattcttggcccttccctcatcccatcctctgccatcacagactctcagagggaatgctcagaggtggaactgcttgttaacctacggggagaaagttttcagatctttctcttgaagaggagcatgtctggatccatgtggcaagcagatgctaacttagagctagaccctgcagatttcttccctttatagggaagaacacgatagcttgttttgttctgatattttactaactaaagcccttctggattacagacaaaaactccatcactgccaccaataaactaagtttatgtattcacttatatattggttcatttgttcatccatctatacacatatgaatgtatgaatctcgcccccatctgtccacctatccaaccattcattcattaatcatacagttatttcctcacctcactgacatttactgagcatttactccatttcaggcaatatgcttgtcttgaactttaccagg

SEQ ID NO: 276496 - DNA, 546 bp, Homo sapiens
aacaaacctggtaatgccccgggataagcttccctaattagcacagaggtgactgcaggatcactgatgctstcagcccagctcagccctctgaaagccttcacgtcgtcaggggctcttcttattccttggcccactgatgttcccaaatgctctttctaaacctctcagagccacttaccgaagcagccagcctttccccactggaggagcaggatctccaggaagagaaggaatagttagaaaaatgtcttgccatggcctgggggagaagctagagctaccccccgacacctcctccagcaggcaccagtgatggctgagcctggcccagtgggaagatgaggcattcaggctttggtgtgaaatgtctaggtaaatactgactcctttgtttatttgtgctggacagtgacaacacaattacttaacctctcagagccttctttttccaccatgatggaacctacctccctattgtcctgggcagtaagatagttgtggccatccctcctctcccttcacgggggctgtggatatgaattg

SEQ ID NO: 276497 - DNA, 546 bp, Homo sapiens
aacaaacctggtaatgccccgggataagcttccctaattagcacagaggtgactgcaggatcactgatgctgtcagcccagctcagccctctgaaagccttcacgtcgtcaggggctcttcttattccttggcccactgatgttcccaaatgctctttctaaacstctcagagccacttaccgaagcagccagcctttccccactggaggagcaggatctccaggaagagaaggaatagttagaaaaatgtcttgccatggcctgggggagaagctagagctaccccccgacacctcctccagcaggcaccagtgatggctgagcctggcccagtgggaagatgaggcattcaggctttggtgtgaaatgtctaggtaaatactgactcctttgtttatttgtgctggacagtgacaacacaattacttaacctctcagagccttctttttccaccatgatggaacctacctccctattgtcctgggcagtaagatagttgtggccatccctcctctcccttcacgggggctgtggatatgaattg

SEQ ID NO: 276498 - DNA, 1129 bp, Homo sapiens
aacaaacctggtaatgccccgggataagcttccctaattagcacagaggtgactgcaggatcactgatgctgtcagcccagctcagccctctgaaagccttcacgtcgtcaggggctcttcttattccttggcccactgatgttcccaaatgctctttctaaacctctcagagccacttaccgaagcagccagcctttccccactggaggagcaggatctccaggaagagaaggaatagttagaaaaatgtcttgccatggcctgggggagaagctagagctacccsccgacacctcctccagcaggcaccagtgatggctgagcctggcccagtgggaagatgaggcattcaggctttggtgtgaaatgtctaggtaaatactgactcctttgtttatttgtgctggacagtgacaacacaattacttaacctctcagagccttctttttccaccatgatggaacctacctccctattgtcctgggcagtaagatagttgtggccatccctcctctcccttcacgggggctgtggatatgaattgwttttttcatgtgatgttaagggattgctattttaaatacttggcactacagtgatgtagcattggtgcagttcttagatatcwcctagtctaaaatttaaacagaggtatttaagtgaggaagtgatttaaaaaaacccagatacttctaatttataatcctgggattagttcccttgatgagtccaaattagaacattcccctcttaaagcctgaattgttgttcacttcaatcatgaaacccaaacaaacatagtaaaatataatgcataatcctacatgtctatattattggaaaatctggggtttggaaccttggaatctgtattacagtaaaaaagtaaaccaggtgtattagtccattttcacactgctataaagacatacctgagactgggtaataaaaaaagaggtttcattgactcacagttctgcatggctggggaggcctcaggaaacttacaatcatggcagaaggggaagcaggcacatcttatatggtggcagtgaaatgggaaaagtttcctggtccccctcgcagggcatgcgacagggggagtggctcgcttcttcagtgccccg

SEQ ID NO: 276499 - DNA, 595 bp, Homo sapiens
tattatctgattccaaatatattacattctggaaaagataaagttacagagatggagaatagatcactggttgcctgagttagaagytggagtagtgtttgctgtggagctgcacaaaataaattttgggggttatggaattgttctgtatgctgttctgtttctggtgatggtgataaaatgtatacatatgtttgaatttacagaatcataaaccaaacaacagtgattttaccataagtaaatttaaaattatatttatatttcaagagtgaccatatgtaaatgtgtaggcatacatacatatatacacaagtgtgtgtatatatgtgtatatatgtctatgtggtatgtatatatattaatatagagagaattttttgaagaattagtagtgcaacattttgacatcacttatccaatccttcattatttattaatttatctttccatgacttcactcagcaatatagcctgagtgccatctatatttatttatatagatgaattaataaataataaagggtcccaccttcatcacaaattgagttacattaaaacttctatttctcggcctggtgcggtggctcatgcc

SEQ ID NO: 276500 - DNA, 595 bp, Homo sapiens
tattatctgattccaaatatattacattctggaaaagataaagttacagagatggagaatagatcactggttgcctgagttagaagctggagtagtgtttgctgtggagctgcacaaaataaattttgggggttatggaattgttctgtatgctgttctgtttctggtgatggtgataaaatgtatacataygtttgaatttacagaatcataaaccaaacaacagtgattttaccataagtaaatttaaaattatatttatatttcaagagtgaccatatgtaaatgtgtaggcatacatacatatatacacaagtgtgtgtatatatgtgtatatatgtctatgtggtatgtatatatattaatatagagagaattttttgaagaattagtagtgcaacattttgacatcacttatccaatccttcattatttattaatttatctttccatgacttcactcagcaatatagcctgagtgccatctatatttatttatatagatgaattaataaataataaagggtcccaccttcatcacaaattgagttacattaaaacttctatttctcggcctggtgcggtggctcatgcc

SEQ ID NO: 276501 - DNA, 595 bp, Homo sapiens
tattatctgattccaaatatattacattctggaaaagataaagttacagagatggagaatagatcactggttgcctgagttagaagctggagtagtgtttgctgtggagctgcacaaaataaattttgggggttatggaattgttctgtatgctgttctgtttctggtgatggtgataaaatgtatacatatgtttgaatttacagaatcataaaccaaacaacagtgattttaccataagtaaatttaaaattatatttatatttcaagagtgaccatatgtaaatgtgtaggcatacatacatayatacacaagtgtgtgtatatatgtgtatatatgtctatgtggtatgtatatatattaatatagagagaattttttgaagaattagtagtgcaacattttgacatcacttatccaatccttcattatttattaatttatctttccatgacttcactcagcaatatagcctgagtgccatctatatttatttatatagatgaattaataaataataaagggtcccaccttcatcacaaattgagttacattaaaacttctatttctcggcctggtgcggtggctcatgcc

SEQ ID NO: 276502 - DNA, 575 bp, Homo sapiens
ctttgggcctgagctagctgattaaaagatgattcagatgtaattattgtacaccagggatagacagatgcaaaggagtctttgtcaaaacctctatgtctttgtaattccctgttaagataaatttatagccatgggagttatttatatataaggaaatgatggctgagagaagttaagatactgacactaaggggtgcaaccaagactcaaacacactctatgaataaatcagaaagttgtaagccagctggatctttaggtgtaccaaagaggggacatgaggaactcaggaagacagaagcatgccagagtggacagagaacaggctgttcacacagagccttccatagcttcctactggtgtattggaatgtgacacacctctcagtctactctaaatagagtctaaacaatccaccaaggacagcgtatgtttacattacacatgtttacacacagccctgctttgaatgattaacaaaaataagctagaaacccagaacttctatgagcrtgtagcaaagccacagatataattctttctgaaatttttaatttggcatttcagaaaa

SEQ ID NO: 276503 - DNA, 660 bp, Homo sapiens
tccacaatttttttatccattcattcactgatggacacttaaggttgatttcatttctttgctataatggataatgcaaaaatgaacatgagagtgcagacatctcttcaagataatagatttcatttcctttgcatatatayactctgtaaggagactgctggattatatggtagttctggttttaatttttcaaggatattacatattgttttccagaataagaatggctatattaatttacatttccttcgatagggtacaaaggtttcctttcttctatgtcctcaccaacatacctcaatcaacatatctgatttttaaacctcccttgacttgcatatgctatgattctgacctgaaatccctttctgccctatttcactgaaacacttcattacctagccagacacatgcctataatccttcaaggaatgtaaactaatttataaactcatacggtttttctgtttcttggagatttttaaagcatgacgctggttttagtagaggaaatcagtcagtttcagaccttccaatcctaattatgtgaccaaaagtaaaacttatattaagaaataaatttcctttacaccttatatctttttctttgacatcaccaagagattgagtcattgattacttacaagtgagtatcat

SEQ ID NO: 276504 - DNA, 660 bp, Homo sapiens
tccacaatttttttatccattcattcactgatggacacttaaggttgatttcatttctttgctataatggataatgcaaaaatgaacatgagagtgcagacatctcttcaagataatagatttcatttcctttgcatatatacacyctgtaaggagactgctggattatatggtagttctggttttaatttttcaaggatattacatattgttttccagaataagaatggctatattaatttacatttccttcgatagggtacaaaggtttcctttcttctatgtcctcaccaacatacctcaatcaacatatctgatttttaaacctcccttgacttgcatatgctatgattctgacctgaaatccctttctgccctatttcactgaaacacttcattacctagccagacacatgcctataatccttcaaggaatgtaaactaatttataaactcatacggtttttctgtttcttggagatttttaaagcatgacgctggttttagtagaggaaatcagtcagtttcagaccttccaatcctaattatgtgaccaaaagtaaaacttatattaagaaataaatttcctttacaccttatatctttttctttgacatcaccaagagattgagtcattgattacttacaagtgagtatcat

SEQ ID NO: 276505 - DNA, 660 bp, Homo sapiens
tccacaatttttttatccattcattcactgatggacacttaaggttgatttcatttctttgctataatggataatgcaaaaatgaacatgagagtgcagacatctcttcaagataatagatttcatttcctttgcatatatacactctgtaaggagactgctggattatatggtagttctggttttaatttttcaaggatattmcatattgttttccagaataagaatggctatattaatttacatttccttcgatagggtacaaaggtttcctttcttctatgtcctcaccaacatacctcaatcaacatatctgatttttaaacctcccttgacttgcatatgctatgattctgacctgaaatccctttctgccctatttcactgaaacacttcattacctagccagacacatgcctataatccttcaaggaatgtaaactaatttataaactcatacggtttttctgtttcttggagatttttaaagcatgacgctggttttagtagaggaaatcagtcagtttcagaccttccaatcctaattatgtgaccaaaagtaaaacttatattaagaaataaatttcctttacaccttatatctttttctttgacatcaccaagagattgagtcattgattacttacaagtgagtatcat

SEQ ID NO: 276506 - DNA, 622 bp, Homo sapiens
taccttgcagattagtggtttgttttattcctggaaggactacttcactgtaaagggacaaaacacaatgccacaatagatgtcctctgctctggcttytgctttgtcactattgaagaacatggactactcaaaaggagattccaggttagaggcactgttatctgaaagcacatcgcttattgctcattactaattttggtaataatgttaagcagcacaactgtatggcctgagagaaaacattgtagacagagaaaacatttttttctctaagctaatctttaaattgtgttattattgttattaaccatagaaaagcaaccctacatatgcaccagaatcattgacaattccctgttataatacaggattgaaggcaccgtgctcagacctcttgaatcagatttgcctgggttaaagctctggatgctgcattttaatgtacttgccatgcacactccccaggggcttaactatgcaacagataagggaactactcttccaggctacatcataacaggctgtcctgacaccagccacacctgcatcttcatttttttgggggaagttaccatatagggagtgacaatcaaccaatgcaacataatacaaaattaaa

SEQ ID NO: 276507 - DNA, 583 bp, Homo sapiens
ttgctcattactaattttggtaataatgttaagcagcacaactgtatggcctgagagaaaacattgtagacagagaaaacatttttttctctaagctaatctttaaattgtgttattattgttattaaccatagaaaagcaaccctacatatgcaccagaatcattgacaattccctgttataatacaggattgaaggcmccgtgctcagacctcttgaatcagatttgcctgggttaaagctctggatgctgcattttaatgtacttgccatgcacactccccaggggcttaactatgcaacagataagggaactactcttccaggctacatcataacaggctgtcctgacaccagccacacctgcatcttcatttttttgggggaagttaccatatagggagtgacaatcaaccaatgcaacataatacaaaattaaaacctaattttagactcaaagtactgctatttcctcatgtttttgaattcaagtttattcagaattaatttacctaatgatcaacaggaaaaaaaataggtaagtgttttctatccgaatgaaaattcaaaatcgaatgtggtt

SEQ ID NO: 276508 - DNA, 622 bp, Homo sapiens
taccttgcagattagtggtttgttttattcctggaaggactacttcactgtaaagggacaaaacacaatgccacaatagatgtcctctgctctggcttctgctttgtcactattgaagaacatggactactcaaaaggagattccaggttagaggcactgttatctgaaagcacatcgcttattgctcattactaattttggtaataatgttaagcagcacaactgtatggcctgagagaaaacattgtagacagagaaaacatttttttctctaagctaatctttaaattgtgttattattgttattaaccatagaaaagcaaccctacatatgcaccagaatcattgacaattccctgttataatacaggattgaaggcaccgtgctcagacctcttgaatcagatttgcctgggttaaagctctggatgctgcattttaatgtacttgccatgcacactccccaggggcttaactatgcaacagataagggaactactcttccaggctacatcataacaggctgtcctgacaccarccacacctgcatcttcatttttttgggggaagttaccatatagggagtgacaatcaaccaatgcaacataatacaaaattaaa

SEQ ID NO: 276509 - DNA, 609 bp, Homo sapiens
actgttatctgaaagcacatcgcttattgctcattactaattttggtaataatgttaagcagcacaactgtatggcctgagagaaaacattgtagacagagaaaacatttttttctctaagctaatctttaaattgtgttattattgttattaaccatagaaaagcaaccctacatatgcaccagaatcattgacaattccctgttataatacaggattgaaggcaccgtgctcagacctcttgaatcagatttgcctgggttaaagctctggatgctgcattttaatgtacttgccatgcacactccccaggggcttaactatgcaacagataagggaactactcttccaggctacatcataacaggctgtcctgacaccagccacacctgyatcttcatttttttgggggaagttaccatatagggagtgacaatcaaccaatgcaacataatacaaaattaaaacctaattttagactcaaagtactgctatttcctcatgtttttgaattcaagtttattcagaattaatttacctaatgatcaacaggaaaaaaaataggtaagtgttttctatccgaatgaaaattcaaaatcgaatgtggtt

SEQ ID NO: 276510 - DNA, 609 bp, Homo sapiens
actgttatctgaaagcacatcgcttattgctcattactaattttggtaataatgttaagcagcacaactgtatggcctgagagaaaacattgtagacagagaaaacatttttttctctaagctaatctttaaattgtgttattattgttattaaccatagaaaagcaaccctacatatgcaccagaatcattgacaattccctgttataatacaggattgaaggcaccgtgctcagacctcttgaatcagatttgcctgggttaaagctctggatgctgcattttaatgtacttgccatgcacactccccaggggcttaactatgcaacagataagggaactactcttccaggctacatcataacaggctgtcctgacaccagccacacctgcatcttcatttttttgggggaagttaccatatagggagtgacaatcaaccaatgcaacataatacaaaattaaaacctaattttagactcaaagtactgctatttcctcatgtttttgaattcaagtttattcagaattaatttacctaatgatcaacagraaaaaaaataggtaagtgttttctatccgaatgaaaattcaaaatcgaatgtggtt

SEQ ID NO: 276511 - DNA, 620 bp, Homo sapiens
tggtctaatttgcaatatatgcttttctctgctatgtcaaattttcccccataatgagttctttttaatttttttgtagaattaactacaagttttcatattaaattctaatgctcctcaggggcatagaaaggacaaagtcataagttgtttttaatttctgctttggtctatagccacattatagctatacactggccagaggaaaataaatggacaaaaaattcagtaaagcagatcctaatgcactatacagaatgaagaatcatggaacgctgcatattatgattattctattcatgggacagtaaataatttttatctcttgcagcaactctaatccataaatacagaattccaatagccatgtgcagagaaaggttgctgatgcaattyatcaaaaaaggtaccaggatcaattagcaaggtctaactaacatgggtggagcaggtggaaggggtggcttttattctggttcaggtattccttagagacattgcaggtttggttccagattatcacaataaagcgaatatcacaataaaatgaatcatatgattttttttgcttttctagttcatattaaagttgcatttgtactgtaatctattaagtgttt

SEQ ID NO: 276512 - DNA, 383 bp, Homo sapiens
tttagaattaaagacagttgcagcctcgctctgggttaggctccggtttataggtatgttgtggctggtttgatcttctacccagaccactcaaactttctccatatcagccgtaaagctgtttcacttttttaacatttgtatgttctctgaagtagcatttttaatttttttcaagaactctttctttgctttcaaaacttggctaatggttgacacaacaggcctagcttttggtatttccaggctgttgacacaacttcctcactaagcttaatcaattttagctgctgattcaaagtgagagaggtgcaaytctttttttttttttcacttgaacacttagaggccattgtagggttatcaatttgtctaatttcagt

SEQ ID NO: 276513 - DNA, 572 bp, Homo sapiens
gcgtaccccggatcctctagagtctgctgatggatatagatagaaagagttctaagaagaaaaaaaaaacacacactttgtctagacaaaaggatgagatcttggtgtggggggttaaaggatgaagctttttcgattcttctagcatcrtgctagacaaattccagaaacaaactggatgcttatgatggaagcagcagaggcaaaagaggtggaggtggcagtggcaacagcagcagctttgcagactcttttatcttgctgttttacaccaacattaacccggtcataggatgtgtgcaatagaatgggtgccctaaaacttcaggtttagtatctgcaacagcagaacaggggccaccggaaattcaacagcatggagattacagggtgtgggaaaaaagagacacttggaatttatgtacacataagattttgggctgtactttgaactgatcacatgtggaactgatcagaattaacaatacaaaggttaagactacatataagtctggatcacttccaaatccataatgaaccttagatctttcacacactgaatgtaccagaat

SEQ ID NO: 276514 - DNA, 589 bp, Homo sapiens
ttataagcagctgtgaacaccctgcccaggtggtcaggtgcactaaatgataaggaggtacctgccacaatttcccttcttgccctcccctgactgttgaactagtgacattcaaacacactaacgaaattctctcattctttttgcttgtgtacaccccccaggtttccaataaagcagttgcccatagatcctctctctctcagctctacctggttggctgagcctacttccctggagctactcccatacggcttmttgagcagcatgccactcctttctctctaagatatgagtgtaataaatcattttatttcatatgcctctgagagtgtaatttccagggcagtgtgggaatgatccttaaaggctccacgaggggaacttactttcccatttgtaatacaatccttcagcaagtaggggacatttctaaatgaaaatgtgattgactctgatctcagctgacagctaaagaaggttctcagtctttatgcctgtgatgtttcagtgtgtatggtctttcatcacttcctacagttgacatatggcagtgcctaacacactggaatggcttctctgtttacat

SEQ ID NO: 276515 - DNA, 572 bp, Homo sapiens
gcgtaccccggatcctctagagtctgctgatggatatagatagaaagagttctaagaagaaaaaaaaaacacacactttgtctagacaaaaggatgagatcttggtgtggggggttaaaggatgaagctttttcgattcttctagcatcgtgctagacaaattccagaaacaaactggatgcttatgatggaagcagcagaggcaaaagaggtggaggtggcagtggcaacagcagcagctttgcagactcttttatcttgctgttttacaccaacattaacccggtcataggatgtgtgcaatagaatgggtgccctaaaacttcaggtttagtatctgcaacagcagaacaggggccacyggaaattcaacagcatggagattacagggtgtgggaaaaaagagacacttggaatttatgtacacataagattttgggctgtactttgaactgatcacatgtggaactgatcagaattaacaatacaaaggttaagactacatataagtctggatcacttccaaatccataatgaaccttagatctttcacacactgaatgtaccagaat

SEQ ID NO: 276516 - DNA, 572 bp, Homo sapiens
gcgtaccccggatcctctagagtctgctgatggatatagatagaaagagttctaagaagaaaaaaaaaacacacactttgtctagacaaaaggatgagatcttggtgtggggggttaaaggatgaagctttttcgattcttctagcatcgtgctagacaaattccagaaacaaactggatgcttatgatggaagcagcagaggcaaaagaggtggaggtggcagtggcaacagcagcagctttgcagactcttttatcttgctgttttacaccaacattaacccggtcataggatgtgtgcaatagaatgggtgccctaaaacttcaggtttagtatctgcaacagcagaacaggggccaccggaaattcaacagcatggagattacagggtgtgggaaaaaagagacacttkgaatttatgtacacataagattttgggctgtactttgaactgatcacatgtggaactgatcagaattaacaatacaaaggttaagactacatataagtctggatcacttccaaatccataatgaaccttagatctttcacacactgaatgtaccagaat

SEQ ID NO: 276517 - DNA, 620 bp, Homo sapiens
caaaatatgtttaccatttcacaatctgagtgtaatctttattgagaaacttatattaaatctaataaaaagtatgycagaaactttatgaccaaatgtaacacaaatcatgaatgagtgctacagcaagtatgaatgaattatgtctgctgtccgagcaatataggagaaggcaataagacacttttagactcatgtaagtttcaaactatgactctaaaaagttcttgctaaagtacatgcattctcccagtggctgcatatgtttgcctgacaaaacccacagttggacaatgagtcccaaggtgttagcattaaattcccactcacatagtaagttcttcaaccaagcggctgagctgacagcattgtagaatgcttttccataaacaaattccactctatagcctgtttttctcttagtttctgaaaagaattgtaatagtgagctgagactcttaaacagaacaaagaaggaaagaaaaatctttgattaaacaaaatcctcagacaacagattttcctttataatattgtgtcacctgagattaaactacaaatctcccttctttcacactaattgttaaaaactttattaaaatgtttttgcaccccacaat

SEQ ID NO: 276518 - DNA, 1131 bp, Homo sapiens
cttaacaacatgtattttactgaataatctatgaaaaatttaaacaacagaataacaaagataattatttcattcacagaacaaatgttttttgggtgtccaatagttaaagatatttgtattgagtgcttgaaaattaacagtggaaaataaaaatgaatatgtttacatggtaagatgtatatagtacattgtaaggagaaaaatacattttaataatgagtataacacctgtatattattctaaatatgtaactagatgtgaagtttatattgaacataccagagtatgaataacattcatccactgaygataaattatggctggatttttttcctcatttataacatcaattatataaatataaattataaaaataagtttaaatttaggtagatttaagtttgaagatattaaattgcttccttatctgaaaaaataaagatcatatctgcattatagggatagtgtaaacattaaatggcacgtaaagtaactaaaaattacctaatatagtttgtgccagcaaaaatatttaagtgtgtattcacatataattatcactagaactgtatgagaaaagawcactgcaacctccacctcccaggttcaagcaattcccctgcctcagcctcctgagtagctgggactacaggcgcatgccaccacacccagttaattttttgtattttagtagagatggggtttcaccatgttggtcaggccggtctcgaactcctgacctcgtgatccgcccacctcggccttccaaagtgctgggattacaggcgtgagccactgcacctggcccaaaagttttaagtattggagwtttttttaatattttatttatttttttcagcttttgttattacttgacttttggatataagccattttaactggggcaagatgatatctcattgtagttttaatttgaatttctctgatgatcaatgatgttgagcaccttttcatatgcctgtttgccattcgtgtgtcgtcttttgagaaatatctattaaaatattttgcccatttttaaataggattattagaatttttcctgtagagttctttgagttccttatatattctggttattaatcccttgtcagatggatggtttg

SEQ ID NO: 276519 - DNA, 1119 bp, Homo sapiens
gtttggacctatctatattctgcatgtccagaacccaaagctgatttgtgatatggaggaaataatatagaagaaggaagactgattccactgccactccagaatacactgatctgagttccccactcatttttctgggctcccctctcattttgcagggmctcagaagataaggaataatatacttcagaagtgggtttaagccacctggcttaggagatcctttctcaggttctatacatcaggggtccccaaccagtaccagttggtgacctaataggaaccgggctgcacagcagaagatgaatggagggtgagcaagtgagcgaagcttcatcattatttgcagctgctccccaccattcctattaccacctgagttctgttttgtcagatcagcagcggcattaaattctcataggagcgtgaaccctactgtgaatcgcacatgcaagggttctaggttgcgctctccttacgagaatctagcacctgatgatctgtcactgtcacccatcacccctagatgggaccatctawcccactgtgaatattagagaaaaatctcttgtgattccagcagggggaagaaaaaaaccattgtgaaatataccacagctttctgatcttacttaacaaggcctttcatcaggagaaacaaagttcgttagggactaacctaactaagggaagaaaaatacctaaccctggaatttagatttatgtggaggaaagaaaatactcaactccagctcactccaattatcttgtcttacctaaggtgaggaaaaactgagaagcacwagcaaagtccaaagattataaactggtgaagttcataattctacaatttaatcataagactatagaatgcttctactcctcaatgccttaccactacataactaaaggcctattttccagattttcttctatccagaacgtgatgtgcacctttcaatgaaaaatataagatatactaaagggaaaacaaacagtttgaagaagctaaacacacgtagaaccggaagaaaatgtggaaagaatgttggctttatcagaccaagaattcaaacaaaataaaaaagtagaattactaagctgagggcattaatggaa

SEQ ID NO: 276520 - DNA, 561 bp, Homo sapiens
tgatagatattaatccatctatgtcaataattaatttaaacattgtggtctaaataccccaattaaaagacacagattgtcagagtgaatgaaaaaacaagattgaactatacatggtctataataaacccctccttaaatataaaagcacataaagattaacacartggacaaatataacatgctaacattaatcaacagaaagtgggagtagttacattaatttcagacagcacaggattcagaccaaagaaagttatcagttataaaagtgagcattacacaatgataaagtgatcaacgctccaagaatccatgcaaatccttaatgtgtaatcacctaacaacagagcctcaaaatatgtgaagcaaaaactaataacattgtgaggaaaagtagataaatccacaaatatagttgaagactttaacaccccctcccttagaaatgtatagattcaccaggcagaaaatcagtaaagatatacttgaactcaaaagcattaccagtcacctagatataattaaaactgttgactactttatccaatgacagcacat

SEQ ID NO: 276521 - DNA, 585 bp, Homo sapiens
taacaccccctcccttagaaatgtatagattcaccaggcagaaaatcagtaaagatatacttgaactcaaaagcattaccagtcacctagatataattaaaactgttgactactttatccaatgacagcacattacatattactattaatctcacacagaacattcaccaagatagaccacatcctgrgccataaaacacaccttaacaaatttaggagaatgggaatcatataattcctgctctcagaacacaatggaattaaacttgaaatcaaaaacaaaaagatagctggagaatccgcaaatactcataaacagcagagttctaaataacaatttgtctaagaagaaatctcaactgaaattacaacatgttttaaaccaaataaaaatgaaaacacaataaaatttcagatacgcagtgaaagcactgcttaaaataaaatttatgatattgaatacatatcttagaaaataagaaaatgagatcttaaatcaatcatctaagcttttgccttcagaatatagaaatggcagagcaaactaaattcaaagtaagttacatgaaagaaaaagagcagaaa

SEQ ID NO: 276522 - DNA, 585 bp, Homo sapiens
taacaccccctcccttagaaatgtatagattcaccaggcagaaaatcagtaaagatatacttgaactcaaaagcattaccagtcacctagatataattaaaactgttgactactttatccaatgacagcacattacatattactattaatctcacacagaacattcaccaagatagaccacatcctgagccataaaacacaccttaacaaatttaggagaatgggaatcatataattcctgctctcagaacacaatggaattaaacttgaaatcaaaaacaaaaagatagctggagaatcygcaaatactcataaacagcagagttctaaataacaatttgtctaagaagaaatctcaactgaaattacaacatgttttaaaccaaataaaaatgaaaacacaataaaatttcagatacgcagtgaaagcactgcttaaaataaaatttatgatattgaatacatatcttagaaaataagaaaatgagatcttaaatcaatcatctaagcttttgccttcagaatatagaaatggcagagcaaactaaattcaaagtaagttacatgaaagaaaaagagcagaaa

SEQ ID NO: 276523 - DNA, 585 bp, Homo sapiens
taacaccccctcccttagaaatgtatagattcaccaggcagaaaatcagtaaagatatacttgaactcaaaagcattaccagtcacctagatataattaaaactgttgactactttatccaatgacagcacattacatattactattaatctcacacagaacattcaccaagatagaccacatcctgagccataaaacacaccttaacaaatttaggagaatgggaatcatataattcctgctctcagaacacaatggaattaaacttgaaatcaaaaacaaaaagatagctggagaatccgcaaatactcataaacagcagagttctaaataacaatttgtctaagaagaaatctcaactgaaattacaacatgtkttaaaccaaataaaaatgaaaacacaataaaatttcagatacgcagtgaaagcactgcttaaaataaaatttatgatattgaatacatatcttagaaaataagaaaatgagatcttaaatcaatcatctaagcttttgccttcagaatatagaaatggcagagcaaactaaattcaaagtaagttacatgaaagaaaaagagcagaaa

SEQ ID NO: 276524 - DNA, 593 bp, Homo sapiens
ataccaactgaagttctaatcagtcctctttaggcatgccaaagagttttcatggctggacttcaatttctctagcatccaggacagacatccttcaaggagcaaggaactcaacactgcaccagtgtatcccagagtactcatttttaaaatttttatattattttagagatgcagccttgctatgttkcccaggttgatctcaaattcctagactccagcgatcctcccgctttggcttcccaaagttctgggatgacaggtgtgagccaccacacgtggccccagaatactctttcacagctgtccctgggagatactgtcagtcccctacaggtgacatagtggattattcttctttcttcaaaactagcttagtctttgaataaggacatggaggtgaccatataaccatcctgggaaatgagtcagtggccatgaggacatttacttcaaaagaaagagtaggagcagatggtaaatactttgcgaccctaaatggattctgtgaaaacaaacaccgaacaccaagacaaccagaagtcaaacctctgcggaatcagtctatgatggctgctgaggggagacggaaa

SEQ ID NO: 276525 - DNA, 549 bp, Homo sapiens
tatgattatttcattatatattacaatgtagtaataacagaaatgaagtgcacaataaatgtaatgcactggagtcatccaaaaaccatcccccaactctggtctgtggaaaaaattgtcttccatgaaagcaaaaatgttggggaccactggcctaaacaacagaaattgatttctcacagttctggagggcaggaagytcaagatcaaagtgccggcccattcagttcctggcgagggcctggtttgaaatggatgccttcttgctctttccttgcatggcagagagaaaggtcatctccctggttctcttcttataaaaagcacaaatctcatgaggaagatatcctcatgacctaattacctcctgaaggccccacctccaaaaaccatcacattagggattagagtttcaacatatgaaccttggagaggcacaacattcaggacctggcacagtgtaaataacgaataccattgattaaaaatagggaactaaaattgaaagaaagaaatatacaaatcaaccatgacagttggagattataa

SEQ ID NO: 276526 - DNA, 549 bp, Homo sapiens
tatgattatttcattatatattacaatgtagtaataacagaaatgaagtgcacaataaatgtaatgcactggagtcatccaaaaaccatcccccaactctggtctgtggaaaaaattgtcttccatgaaagcaaaaatgttggggaccactggcctaaacaacagaaattgatttctcacagttctggagggcaggaagctcaagatcaaagtgccggcccattcagttcctggcgagggcctggtttgaaatggatgccttcttgctctttccttgcatggcagagagaaaggtcatctccctggttctcttcttataaaaagcacaaatctcatgaggaagatatcctcatgacctaattacctcctgaaggccccacctccaaaaaccatcacattagggattagagtttcaacatatgaacyttggagaggcacaacattcaggacctggcacagtgtaaataacgaataccattgattaaaaatagggaactaaaattgaaagaaagaaatatacaaatcaaccatgacagttggagattataa

SEQ ID NO: 276527 - DNA, 537 bp, Homo sapiens
cacacctcattgaaggaattggggaataaagagctgacctaagtaaccttggaaaatgatgtttttgctctttgactggaaataataagtttaaaattaaaaataatttggtaattgatacacagatttaaaatgttccttcattttctcccttctctccaagaattgttattaatttgatggtgcatcttaaaatttatggcatttagtgtcttacagagattaattttatagcatctttaaagcttctagtacatcctctaacacagaattaccacttaattaatagtagctgtttacacttcttaaacctttaacgtagttaaaatcacagtgtgtatacaattctgtactctgctatttgctatatttgaatgtctctttgttttgatggtgataatagtaataataaattttatgttatagctttccatagagttgatgcacaattattcccctattctcagacattcaaattacatacrgttttgtgatttgttgcaatttccttgtggacacataaaactgtttttgagt

SEQ ID NO: 276528 - DNA, 584 bp, Homo sapiens
gacagatgtggataattatacttgctacttcgctaggaaataattctcatggtcttttaaatggaattcttaatatttatcctatttttccatagtttaatcaatctctatctcacctcattaaccatttatcataaaattgttattctttattttctttacttctaaaaacagcttcgytgagatacaattcatatatgaattatgattcatttaaagtgtgcaattcacttagtgtaatggcttatgcctgtaatcccagcactttgaaaggccaaggctaggggggatcacttgaggccaggagttggagaacagcctgggtaacatagcaagaccccatctattaaaaaaaaaaattaccgactgtggtagcacgtgcctgtagtcctagctactcaggaggctgagacaagaggattgcttgatcccaggagttttagaggagttctaggttacagtgagctataatcacatcaatgcactcccagcctgggtgacaaagaaagaacctgtctgggaaaaaaaataaagtgaacaattcaatagcttttagaatatttgctgatatattgcaaccatta

SEQ ID NO: 276529 - DNA, 499 bp, Homo sapiens
aggtgtatggggaatacattcaaagctctttaccagtcaccttctttttgtgagggactaatatgagcactggaggtacagagaaccagtctgtactctcaagaatatacagtccaggatgagaaataaattgccatgttgtgctttaaatggtaagacagaataaatcattgtaagcrgggacattctcaggttgcactgtactttcttctcttgttctgggccactgtgacactgctgtacaccctattcttcttccccacttgcattctgagtgagtagttttgttttgtttttgtttttgtgtttttgttttttttttttaagccaaagattccctaacattagctagttaaaaatcacagacctttttggttagttagttttagggattttattataaattgctacacagataaagatcaaacacaaaaatttaaaatatggaatattgctaatattttgtgacttttaaattatttatagtcctaagtattta

SEQ ID NO: 276530 - DNA, 446 bp, Homo sapiens
atatatatatataaatacgtattacatacatataaatctattagagtaggacctggcacgtcagcagcactctatatatgttagctataattattctcttactaaattctcacatttgtyctgcagagaactgaagtgtttttcttgaattactaaagacaattttaaggcacagagaagccaaataacttgtccaaaatcaaacagaaaacagcagagccaggtctcaaagacagatatgtcaggctccaaagctttatgtctttccctctggccctaccttctccaggatttaatcagatggaaaacaaaatctcacttcacattccatgtgtaccaactacttggagcaagactgatcctttcccatgtctaaatataaacactctacatcaccagcagttgtggacaataccattgcactttttcttttgagatattttaaa

SEQ ID NO: 276531 - DNA, 530 bp, Homo sapiens
acttaggccagggatgaattaaatttggatctatgagtcaaatacttgtccagagattggacaatgtcttacactttctttctctgccctgatagcaatgctactgttttaatggtctccacttaatttgtcaaactacagggactcaattattttgtagcgttctccacatgaatattcttagcttggatggccatggatgttaatagcaatgtacctttttctcttagcatctcttctttagcatattctaccctaacttatcgctaaacttttctatcccgctgcacatttgtggtgttgggttggaatttttgatgtcttttttttttaaagcttaatttcttcggacttccttcaaagcaaaaactcaaattaattggaccaatatactsctgccctttgctttatctcggaacattgtttttcttccaatgtgccaatccctgagaatgaaatctagataaccaacagtacttccagaactagaaattttcaatacatttgcatctcatccatgttgtaaatgg

SEQ ID NO: 276532 - DNA, 1127 bp, Homo sapiens
ctataggtggcaaggatctggtcaatgtatgctgtatcctggatttgttcaatctagccagtatgccagcaaagctcagctttaattgttgaagactcaattacttagcaatgcctttacttgttcagtgagtttcatgtcagtcatatgcatccccagcacttgtgatcttgtaacttcaggaatattaaaatgtgatctttttccacacaaaaaatgggtacatttggcagcagaaattgtttcttctatgtagccctaaatagtcatctgtatgcacaaattcctaagagtgaaaatattttaagggtatctaaaagtctagaaaattgatcaataattagtcaagaaatgggaagttttaatcagtaccttaaattttcccaacacacacacacacacacacaagcagacatcattgcaattttgacatattttttctcttyaatctggcttgtatgcctaagtgtcccatgtgaaatctacagaagattggtcaagctaaatgcagaattgtacaagcacaataacattcagatgaatgaaagaaggggacagaaaggtactatagtttatawatattgcctcttctacaataaccgcatattctgaaataataaagattagattgtataatattggaaaaagaaggaaatagactattatcagaaatgtttcatatacatcatctctagtgagcttaaaaatgagcctgggaagacagaggcaaatactggagagcaagaacacatctcagtcaagatactagggaaattacccagaggttgactttctgaagactggatgagagacggcaagttccaggctgggaaaatgtgagagacagctttwatgggaaatgcaggggtttaaaattccaggaacaaaaggatgaaagaagtaaattacagtttcttgaaacaggcactctgcaaacatgtatattatattttgtttatcttcaggaaaacttgcactgacggtattatttgtaggagtttacagaagagcaaactgtggcttacagagttctactggcttgcccaaggtcacactgacaatatgtgtcagagccgcttttgaatcttaagaagatataaggagttcagaatacttgtgtaaaaaca

SEQ ID NO: 276533 - DNA, 1129 bp, Homo sapiens
gctggttggtggatacaaagttacagctgaatgagagataattttgactgttctgtatactgtaggatgaatatggttaacaataacttagtgtatattttcaaaaagccagaagagaggatcttgaatgttcacagcacaaataaatgataaatgtttgaggtgatggatatgctactctgatttgatcattacacattgtataaatgtattgaaaaaycactctgtatcccataaatatgtataattattatgcatcaactaaaaattaaagaccacacatatatgcacacatagacatgcacatgaacacacatactcatgcatatgtgtatacatgcagagttacacatatacacaaacacacatatatgcacacatagacatgcacatgaacacacagacatactcatgcatatgcgtatacatgcacagttacacatacacacacatgcacacatagacatgcacatgaacacacagacatacacatgcatatgcgtatacatgcagttacacatatacacaaacacacatatatgcacacatagacatgcacatgaagacactatgcacwcattgcattttcctcttggtgacagcacacattaaatgcctactcgatcacattgcatacctgtttcattttaccttctcatgaaataaagagtagcaggtgctcattttacaaacaaggctctgagatgggtgcacatttctcaagatccactgtttagtaagtggtgggaccaggtccaactgatgcttaaaaagcttcctatcctccctcaccaccaagagagagcaaacagagagctccttggtggaagtgcacccttgacttgcaggcagttcagatttcattggatttttgtttttgtacctgctaagaatcaggctttagacagtggcttgcttctagtttgggttaatttcatctctgggtcagcatatagtaacccaggggttctccaaaggtgatgcctagaccacgagcatcaacgtcacctgggaatttgttaaaaatgcaatttttcatgctcaagwcttactgactatgaatgcagatgttctcagagagtagtgcctggactatcagcatcaacaccacctgggaacttgttaggca

SEQ ID NO: 276534 - DNA, 1252 bp, Homo sapiens
cctctcttttggccttcttttcctctgctcctactcataagcgtgcagggttagtttggtgaatggcttcacactttgccacctctgtgcctttgaccatgttgatgcttccctcaggaaaattgctccatgcctctgcattcataaatccaaacagacacacccttactttctctgtgtcttgccttctcacacataaggaacatctattatattggcattgttaaataatcatctcactagttttgacaacactccttcccattggagtaaggatggagttcgctatgatctccagcttactgggatagtctcagtcagagctttccattcctgtagcagcaggaaaggggaagagaggaatgagaaaaaggggacacttctcactggagtcaactccttttaaggagccttcctgtaagtctctcttyctccctttctgccgttatctctttacatctcatgggtcagaatgtggtcatgtggtcatgccttgcaagggagtctgggaaatgtagtcttttagctgagtgataaatgtttctcatactagcaaataagaggacatcaagtaggcactagtgtttatgtcactgtccccttgaactcacccaccacataaatagctagggcawtatggctcagtagtattccattgtgtataggtaccccatttgctttattcattcatctattgttggacacctaggttgattccacatcttggctcttgtgaacagtagagtccagwttcgacatctataggaagctctctatctgtcatcctagacctgcccctttctcaggcttctgcaccctggaaatggtgccttcttttaatgtttgttaaggagaattttaatcgtagattaatacaaccttggagtgaatggtgcaatgaaaacccatggacccatcactcaccctcaacagtgatcaacgtgtggccaattcttttttcatttccagctcccaaaaggcttcccctcccatactattttagataaatgccagaattatataatttcattttatttatagttatttagagacaagttctcactgtcatccaggctggggtagagtggcatgatcatggctcactgcagccttgacctcctgggttcaagtgatcctcccgcctcagtctcctgagtagctaggactctaggcacgcatcatcatgcctggctaattttgatttttcgtagagatggggggtctcattttgttacccaggctggtctcaaac

SEQ ID NO: 276535 - DNA, 617 bp, Homo sapiens
tatggctcagtagtattccattgtgtataggtaccccatttgctttattcattcatctattgttggacacctaggttgattccacatcttggctcttgtgaacagtagagtccagtttcgacatctataggaagctctcyatctgtcatcctagacctgcccctttctcaggcttctgcaccctggaaatggtgccttcttttaatgtttgttaaggagaattttaatcgtagattaatacaaccttggagtgaatggtgcaatgaaaacccatggacccatcactcaccctcaacagtgatcaacgtgtggccaattcttttttcatttccagctcccaaaaggcttcccctcccatactattttagataaatgccagaattatataatttcattttatttatagttatttagagacaagttctcactgtcatccaggctggggtagagtggcatgatcatggctcactgcagccttgacctcctgggttcaagtgatcctcccgcctcagtctcctgagtagctaggactctaggcacgcatcatcatgcctggctaattttgatttttcgtagagatggggggtctcattttgttacccaggctggtctcaaac

SEQ ID NO: 276536 - DNA, 617 bp, Homo sapiens
tatggctcagtagtattccattgtgtataggtaccccatttgctttattcattcatctattgttggacacctaggttgattccacatcttggctcttgtgaacagtagagtccagtttcgacatctataggaagctctctatctgtcatcctagacctgcccctttctcaggcttctgcaccctggaaatggtgccttcttttaatgtttgttaaggagaattttaatcgtagattaatacaaccktggagtgaatggtgcaatgaaaacccatggacccatcactcaccctcaacagtgatcaacgtgtggccaattcttttttcatttccagctcccaaaaggcttcccctcccatactattttagataaatgccagaattatataatttcattttatttatagttatttagagacaagttctcactgtcatccaggctggggtagagtggcatgatcatggctcactgcagccttgacctcctgggttcaagtgatcctcccgcctcagtctcctgagtagctaggactctaggcacgcatcatcatgcctggctaattttgatttttcgtagagatggggggtctcattttgttacccaggctggtctcaaac

SEQ ID NO: 276537 - DNA, 594 bp, Homo sapiens
caaagtagttcctggactaaaccacagagagagggaggcttgtctaaagactacaattttttttttttttttgagacaaattcttgctctgtcaccgaggctggagtacagtggtgcgatctcggctcactgcaacctctgcctcttggattcaggcagttctccctgcctcagcctcctgagtagctgggatcacaggcgcctgccaacatgcccggctaatttttgaatttttagtagagagagggttttgccatgttggccaggttgatcttgaactcctgacctcaggtgatccgcctgcttcagcctcccaaagtgctgggattgtaggtgtgagccactgtgcccaaagactacacattttaaaatcacaatcatttcctaaatcctctcccgtttcccatacctttccccatgcaacatccttttagtaagactgggaggagatgtatgcagtgggtacgttcaaactacacctgtgcaatyctgcataatctagccttctttaattctgttactccctgtttattgctgaatggagtcattcaaacattggctcagaaaatatttgagcttctgtttgatgccact

SEQ ID NO: 276538 - DNA, 561 bp, Homo sapiens
ttttatccagagccatcccttacccatgacccctgtggtgagcagcacctccaggtgtttccctgtcgtctcaggctttctggagctacactctgaatcttgtctttgagcattgcaagttggctaattgaggtgtctgagtccctgttagggtcatacaaatctaaagttggtcagataagggggattcacaggggcagcccagaaccagtaactgcactaatggaaggaataaaatattaagaattgtgcatagtttaggcatccaaagcatcttgtctcaaggtgactttctaacagtggatattggtggaaaaagggaagcaaatgtcagtggaaatggggaagtagaagttgctgggtaggaagtagagataaagggaaggaagagctctcctggcataagaaacaccctgagtgagggggacagagagagcttggggcattgggggaatggaaaggtgaagcctagagatggagtccrgagacagcaccaggtgagggtgaaggagaagccaaggtcagaccatgcaggacctcaaaaaggaaattagtctgttt

SEQ ID NO: 276539 - DNA, 604 bp, Homo sapiens
accttgggaaaaatggctcatcctctctgatactcagttttctcacccacaaaaaggagacattactggagagattgaatattacatccattaaaatgaagcgtgggagctatcgctggtgtgttttgtaagtggyggtttcctttcccctgttcactttgaagctgcaagtggattgttgacccgtggccaactcagtgccataaaccctgaaaatcctggtaatgatttccaagcagcaggtaaaactcagaatcactcacacgacttcttgtcccacttaaaattttccctgagttattcttttccttttgcaaatagaaacaagaatacaatggaaaaaagtgctacctacccaaactctgcaggtaaatatccataagtagttcaagcctaggaacggccttcaatgacggacagggcggttttgtttttgtcacatgccgggttcattataatccttggaaaagcaggttcccagagaaatgctgatacagcttgtctctgtgttgctatgatacatgcaaagcatcacacacaattagatcctgaaatacggacccaagtttttaattaccgagttcctgcctgtcttgcaggggag

SEQ ID NO: 276540 - DNA, 489 bp, Homo sapiens
gtgtttgggggcttttaagaatttagcctaataaggggtgttagctaatgataaggaaggagatcaggcttgggaactccaccctgggcagctctgaaattactggccctggagctggcagaactccggaagtccaggttcattagttctgtctgcccagcaatgatggcagcagtaggaataataatctctcgtattcacagagggctttactcgttctcattttcgccctctcttgctctgtgcagccattgcatgctggagtttatagtattacagctctgccctggctggttgtctgacttggccaaccctctttacttgtttgagcytcattttcctaatttataaaatggagcccaatactacttatcttatgggttgttgtgaaaagtgaggtttagatcagaagaggcatagagttggtggtgggctgttaaatcagctctttgaaacagaagccctgatgtgtagtgtttgtcaatttcc

SEQ ID NO: 276541 - DNA, 530 bp, Homo sapiens
tgggttctcctggaagccagagtcctgaaaggtagggactgtgtgtgacctagcactgtgtccccaccaaccatcaaaaagagtgcctctgtaaacatttctgaaattgattaaattccatccaaatgcaggcttccccttcctgggggtctgtgctttgggacaaggtgtctgcagtctcttggcatgtcctatgatgagtccttcgaggggacctgctaaaaccctctcttaccccatagagagkcagaggggcagaagaggtttcttgaagcagcaaatgtacccctccagagcagaaagggactttggagctgtctaggccagggttttctggagggaggagcaagtgacttgcccaaggtcacccttggcaagcacagtcagggcccctcactctgcccaggaccacagcactgctggaaaccagcccaggccccctcaggctccttcctctgtgagatcttaatcaagaattttccacagctgcccagggacagggtgtgtaggaatggtgtgagcagataaag

SEQ ID NO: 276542 - DNA, 536 bp, Homo sapiens
tgactcaccttctctccagctcaaggtaagaagggtggcagcaggagtaaaagctcagccacaggacgtgctcttcctgccaaacagctggattctgcacatgcttgggaatgaggtcctgctggtttaggaaaacaaacattaagaattcccaaagtcttgggtggaaaagcctgttgcttttcagaggcaaggccatcaccatttggcaaggggcccaaggccccaggcagctgtggtaccatctgtttctgaaggagtggggattttaccccctgaaatgtcagtttgtggcttaaactctgggttctacaggcccaaaataaatagtgccaggaaggtgcccctgaacagagctaaccagggttcagattggcaccccatccccactggggcaagcaggactcttagcaattaaggcctaagacggctgacaggtgggacatggcagaaattcagtgcttccaccacagctactcaatgtgccacratcatgggccacacaccactctgaatacttagaaaattattggttt

SEQ ID NO: 276543 - DNA, 1084 bp, Homo sapiens
ggcctgctcttacctatataaatcagattcagctctgtgtgctagacattaaacctgaagggaatattttagctggttggaccttgaattcactctgggggcttgaggtctaagtgaccatgggaaccactcttccttgggagatggagcttggagtcaggacagagccagactggaacaagaaggggagcccttggggacaaccacatggctcaaggcacacttggctggagggttttcttgctcaagaactcagcaaaaaggatgagggcccctgatccaaggattctgcaggtgacttgctgcctgttcacttgatggatgcctggattcctgcaccccagccatcccccatcccttgcygcagtctgtgctggggcagtagcccagctgtgcccagtgaggccagcccctgcctgcagggaggtggggggtggggaaggacagggtggaagtagcttgaagtgtcctgaccttccctcgagggagactgcctggcgtgtgtwaggtgataccggaagagttaaagaggaggaagcagctacaagagatgatgtattcgcaaaataaaaaggactaactagatgaacaagattaactgggtgtggcaatgaggcatacattgagaatatctcctatgtttccaacttgtacagctgggagaattgtgatgcctttttctgcatgtttgcttgccagtgtgtgtcaagaggtggaaggaagtggtaaatgatgagttcagtcttcttgaattaaggagtatttggaacatccaagacagactatttcagcacacctggccaatgacacaccctaccaacagctgtgccattttaggttcaagcaggacctttgtaacacttataaaaacaaagtttgaattttcaaaaaaggggagagttgtttccctccatgaatctgagcaaaaaacctctcgccaagtcaattcactggaagtttttctactaactcttagctcctcaagggaaggcactctctcatttatctctgtwtcatcagaacctaggcattcaggaaacgtttgttgaattaatgttagaataaatctctgttctattatgag

SEQ ID NO: 276544 - DNA, 538 bp, Homo sapiens
actgggtttgggttactttgaggtttgtttgcttgtttgttttaagagatggggtctcattatgttgcccaggctggagtgcagtggctattcacaggcatgatctcactgctgagcagcacgggagttttgacctgctctattactgacctgggccagttcacccctccttaggcagcctggcagtctccagctcccaagagtcatcatactgacactgaacttagcatggacacccatgggcatagcgcactacagcccagaacttttgggctcaagtaatcctctcacctctatctcctgagtagctaagactacargtgtgggccactgcatctgactaattttggaaataattgagagtaatgaagagaaaaggagaaaaccaggtcactggtctgcaatatcttgcaaaattaattaaaaggaaaagtgtcatgtttcttcattataaatggctctcacctttggaccaactcccagaagtccaccttggccccccgcaaggtcaacagcgctgtttgaagtcaattctgta

SEQ ID NO: 276545 - DNA, 538 bp, Homo sapiens
actgggtttgggttactttgaggtttgtttgcttgtttgttttaagagatggggtctcattatgttgcccaggctggagtgcagtggctattcacaggcatgatctcactgctgagcagcacgggagttttgacctgctctattactgacctgggccagttcacccctccttaggcagcctggcagtctccagctcccaagagtcatcatactgacactgaacttagcatggacacccatgggcatagcgcactacagcccagaacttttgggctcaagtaatcctctcacctctatctcctgagtagctaagactacaagtgtgggccactgcatctgactaattttggaaataattgagagtaatgaagagaaaaggagaaaaccaggtcactggtctgcartatcttgcaaaattaattaaaaggaaaagtgtcatgtttcttcattataaatggctctcacctttggaccaactcccagaagtccaccttggccccccgcaaggtcaacagcgctgtttgaagtcaattctgta

SEQ ID NO: 276546 - DNA, 550 bp, Homo sapiens
aggctggatattctagatctatttttgactccttcctcaactaccaaactcttcaatatctctactattccgtatctcttcaccactccaatggatggtcagtataaagtttccctctcaactgacattgaaaaagcatttcgctttgttcatcctgcctccagtatctccatttcagtgtttcaggtctaccctgtgattttttttttttttttttgagatggagtctcgctctgttgcccaggctggagtgcagcagcacgagctcagctcactgcaacctctgccttctggtttcaagcgattctcctgcctcagcctcctgagtagctgggackacaggtgcatgccaccatgcccggctaatttttgtatttttagtagagatggggtttcactatagtggccaagctggtctcgaactcctgacctgcctacctcaacctcccaaaatgctgggattacatgcgtgagccactgcacccggccagggattttaacctttaaaaataaagctcttgttccaaaacactaaatgtctccctagttt

SEQ ID NO: 276547 - DNA, 550 bp, Homo sapiens
aggctggatattctagatctatttttgactccttcctcaactaccaaactcttcaatatctctactattccgtatctcttcaccactccaatggatggtcagtataaagtttccctctcaactgacattgaaaaagcatttcgctttgttcatcctgcctccagtatctccatttcagtgtttcaggtctaccctgtgattttttttttttttttttgagatggagtctcgctctgttgcccaggctggagtgcagcagcacgagctcagctcactgcaacctctgccttctggtttcaagcgattctcctgcctcagcctcctgagtagctgggactacaggtgcatgccaccatgcccggctaatttttgtatttttagtagagatggggtttcactatagtggccaagctggtctcgaactcctgacctgcctacctcmacctcccaaaatgctgggattacatgcgtgagccactgcacccggccagggattttaacctttaaaaataaagctcttgttccaaaacactaaatgtctccctagttt

SEQ ID NO: 276548 - DNA, 1185 bp, Homo sapiens
gctagtagcacctgctttcccccagagtttcaacaaacagaaatgtctccataaattgtcagtgttccctagctaggcaaccccttcctctctctctggctaagaataactttccttgtgatctggattataaacttgtctcaagcaatagatacatrgttttcatacctgtgttctttaatctgtacttcattttcaatctcaaaactagcattgtaattgtaaaatgaacataatttattacatttttaaaaaaaaaattgagtatccctgctcctatatttagattgtttaaaaattcagtattttgaaattgtgtttagaattcttaaaagacagaggctggagggctggggctgagggagggtggtgggcctgcggggacattcttactgtgcaaacatagcgataaaaacatgtcattttccaaagcaaaaacaaaaacaaaaaaaaagaattcttaaaaggtataccagaagacacaagtctatggtttctgagtttctatgcttaacattttaaagaacttgaaaaataagtgcttttcacaccatttaacaagaatgatgctttctctccttgtggtagggagwgctagtagcacctgctttcccccagagtttcaacaaacagaaatgtctccataaattgtcagtgttccctagctaggcaaccccttcctctctctctggctaagaataactttccttgtgatctggattataaacttgtctcaagcaatagatacatagttttcatacctgtgttctttaatctgtacttcattttcaatctcaaaactagcattgtaattgtaaaatgaacataatttattacatttttwaaaaaaaaattgagtatccctgctcctatatttagattgtttaaaaattcagtattttgaaattgtgtttagaattcttaaaagacagaggctggagggctggggctgagggagggtggtgggcctgcggggacattcttactgtgcaaacatagcgataaaaacatgtcattttccaaagcaaaaacaaaaacaaaaaaaaagaattcttaaaaggtataccagaagacacaagtctatggtttctgagtttctatgcttaacattttaaagaacttgaaaaataagtgcttttcacaccatttaacaagaatgatgctttctctccttgtggtagggag

SEQ ID NO: 276549 - DNA, 592 bp, Homo sapiens
gctagtagcacctgctttcccccagagtttcaacaaacagaaatgtctccataaattgtcagtgttccctagctaggcaaccccttcctctctctctggctaagaataactttccttgtgatctggattataaacttgtctcaagcaatagatacatagttttcatacctgtgttctttaatctgtacttcattttcaatctcaaaactagcattgtaattgtaaaatgaacataatttattacatttttaaaaaaaaaattgagtatccctgctcctatatttagattgtttaaaaattcagtattttgaaattgtgtttagaattcttaaaagacagaggctggagggctggggctgagggagggtggtgggcctgcrgggacattcttactgtgcaaacatagcgataaaaacatgtcattttccaaagcaaaaacaaaaacaaaaaaaaagaattcttaaaaggtataccagaagacacaagtctatggtttctgagtttctatgcttaacattttaaagaacttgaaaaataagtgcttttcacaccatttaacaagaatgatgctttctctccttgtggtagggag

SEQ ID NO: 276550 - DNA, 990 bp, Homo sapiens
tcatcttgcaaatctgaaactctttacccattaaacaaccacgcctcttttcttccttccctcagcccctgaaaatcactattctattttctgtctctatgaatttgactcctcagggtttctcatgycagtggaatcatacagtatttttcttttttgtgactggcttatttcatctagcacagtatcctcaagattcatctatgtttaacatgggtcagaatttccttcctttttaagtctggataatattccgttgtatgtatataccatattttgcttatccatttcgccagtgatgggcatttgggttccttctacatgctggctgttgtgaataatgctactatgaacacggtgtacaaatatcgctttgagatccagatccaattattttggataattgaagtggttttgctggatcgcgtggtagttctgttgttaactttttgaggaacctccacattattttccatgctatgttggaataattttacaatggtacaacaaaaatgttgcatcattttacaattccawtttctctcaaaaaaaaaaaaaggaaaagtattgcttcatttttcttctagcttcttatgatgctcttgaagagtattagtttttgtatgtgcctattwtgtttctttcccccactcctgaaaacttctaggtgccattattggtggcagttaagtgtgcaaactctagaagcagactacctgggttcaaatctcagttccaacaatcattggttatgtgactctgggaaatttgtttaactgctctgtgcctcagtttccccatctgtaaagataataacagtacctacctcacagagttgctgtgaggatcaaatgactccctacctttctgtgctcctctgtatccgttgatgtaaaccttcctcaagttgggttggttccacacaccatttctggagaggggtagggtctagaacaaggcgggcaagctttacctgtgaaagagcagata

SEQ ID NO: 276551 - DNA, 453 bp, Homo sapiens
tttctctcaaaaaaaaaaaaaggaaaagtattgcttcatttttcttctagcttcttatgatgctcttgaagagtattagtttttgtatgtgcctattttgtttctttcccccactcctgaaaacttctaggtgccattattggtggcagttaagtgtgcaaactctagaagcagactacctgggttcaaatctcagttccaacaatcattggttatgtgactctgggaaatttgtttaactgctctgtgcctcagtttccccatctgtaaagataataacagtacctacctcacagagttgctgtgaggatcaaatgacyccctacctttctgtgctcctctgtatccgttgatgtaaaccttcctcaagttgggttggttccacacaccatttctggagaggggtagggtctagaacaaggcgggcaagctttacctgtgaaagagcagata

SEQ ID NO: 276552 - DNA, 415 bp, Homo sapiens
tccgctacgatggccaacctctgccaaacccaacctgaccagtggccaacctgagcatcacgrtgttcagcccactgatggctgcctccagatgctccctgaagggacaggaagggaagactcaacccaagtttatttcctcatagattgctccagccagaggttcccaaggtgtgggaaacacaccactcacatacacaagatgattttgggtagtaacaacacagctcaataacattgaatcacacagtgaaaaggttattcctaaccaggtgcggtagctcacacttgtaattccagcctaggcaatatagcaagaccccatctctacaaaaaatagcaaaattaacgaggtgtagtggcatgtacctgtgatcccaactattcaggaggctgaggtgagaggatcacttga

SEQ ID NO: 276553 - DNA, 645 bp, Homo sapiens
ggtaggatttcaggtaagcatgcagaaggggtagaacttttctaggtaaagaggcagaaggatgatgtgggcagaaggaacatctgacaagttttcatgtttggcagaaggaacatctaacaagatggcgtgcttgggagaaggagcagcaggtgcaaaaggtaagatgcttgagtgaactttgcagggtttatgagcagttctattttgctgttgcagaaactgagatgggagtggttgggaatagggaaaaacctaggtaaggcaagctcatgatagactttttaatactttatagtattaaactgagtagatcttatcctgcaggctatgggaaatttaccaggtagagtgctttgggctgcaaatactaaaggacctaactaacagtgactaaaacaataggaagcagagttgctttggtgggtggttcagtgataacactgggtcccactkggtgtccctgtttcagctgtgctgttttgtacatgtctcctttcatggctggctaattagcaagagctccaaatatcatgttctcacaacacaatttctgaaggctggaagggctgcttttcttctcatgtttctttgaaatagggagaaaactcagaagcttgcagtgggcttcctttcacattttat

SEQ ID NO: 276554 - DNA, 572 bp, Homo sapiens
tagtaattgcctaccagtagtataatcaatattaattctagtatagtctcaagrtatggtcctaaaggaatactttgtgaaaaaaaagaaagatctaaagcatgcacaaaaatgtacatgattttttttaatgaaggcagagtctcactatgttgcccaggctggtcttaaactcctgggcttctcaagtgatcctctggcctcagcctcctgagtagttgggattacatgcatgtgtcactgggccctcttatactttcaatattctgtgtttttctattgttgacttaaaatgcatttttttctttaatagtggatgagattcctggaaatcctgtaaaaaggtacgacttacagattttaaaatattatatgttacctgagggaatatagagaaaagaaactaacatctgttgagtgttgtactctggggtagacactattttatgtgcttgtctcatctcatatagttatcacagcagctttgaaaggttctctgttattataacctactttttcctaattagctaactgtggttcagagaggttgattaattgccccatgtccccat

SEQ ID NO: 276555 - DNA, 572 bp, Homo sapiens
tagtaattgcctaccagtagtataatcaatattaattctagtatagtctcaagatatggtcctaaaggaatactttgtgaaaaaaaagaaagatctaaagcatgcacaaaaatgtacatgattttttttaatgaaggcagagtctcactatgttgcccaggctggtcttaaactcctgggcttctcaagtgatcctctggcctcagcctcctgagtagttgggattacatgcatgtgtcactgggccctcttatactttcaatattctgtgtttttctattgttgacttaaaatgcatttttttctttaatagtggatgagattcctggaaatcctgtaamaaggtacgacttacagattttaaaatattatatgttacctgagggaatatagagaaaagaaactaacatctgttgagtgttgtactctggggtagacactattttatgtgcttgtctcatctcatatagttatcacagcagctttgaaaggttctctgttattataacctactttttcctaattagctaactgtggttcagagaggttgattaattgccccatgtccccat

SEQ ID NO: 276556 - DNA, 643 bp, Homo sapiens
tgttaatatcttttctagtgtcttccaactataagcataaattaatattttagatttaaaatatttaaacttttaaaagccccaacccatgttctgctaaatatatgttttcaatccatatattactgcttagaattctgattagtatttttcctccaagtagaaagttaatggaatatttctttttccatttttctctctctgaggtagtaatgttccagcttttaggtagtggtatatgaccatatttaactaattgaatgtctcgttttacagtatacaattcaattctatatcacagaaatgtttaccaaaagctagttataaatactactcagtattattggaaatatactatgaaccaaagtctctacrtctatatttctccatgtaccttactgtatgtgatgtttttctccttttccttggctttggctttattccttggctttctttcaagctcaaacttgattgactggtcaagttatgtctttttgtttgtttgtttctttctttctccctccttcccaatcttttaaaagtgatttatcccaacctatgtttttcctcctagaacacattctctacaacgtctcttctttcaatccatgtgtctttactgccagcatacttagtgtagctt

SEQ ID NO: 276557 - DNA, 643 bp, Homo sapiens
tgttaatatcttttctagtgtcttccaactataagcataaattaatattttagatttaaaatatttaaacttttaaaagccccaacccatgttctgctaaatatatgttttcaatccatatattactgcttagaattctgattagtatttttcctccaagtagaaagttaatggaatatttctttttccatttttctctctctgaggtagtaatgttccagcttttaggtagtggtatatgaccatatttaactaattgaatgtctcgttttacagtatacaattcaattctatatcacagaaatgtttaccaaaagctagttataaatactactcagtattattggaaatatactatgaaccaaagtctctacatstatatttctccatgtaccttactgtatgtgatgtttttctccttttccttggctttggctttattccttggctttctttcaagctcaaacttgattgactggtcaagttatgtctttttgtttgtttgtttctttctttctccctccttcccaatcttttaaaagtgatttatcccaacctatgtttttcctcctagaacacattctctacaacgtctcttctttcaatccatgtgtctttactgccagcatacttagtgtagctt

SEQ ID NO: 276558 - DNA, 394 bp, Homo sapiens
aatcagtgacaacagtaataaattataacctaaagaatacaataaaaatatataaatctacactaatagaaatgaataattgtctaaataatggaaaagggttgaccctttctcataattgtattcccattaagaaatatagatagaatgatggaactagaaaatccccatttggcaaacaccacagtagaattattgcagacaaaagtgaagaatggatagtaaaattagtgagtgacsctatggtcagagacaggacatttgcataatctcaaagtatctctcaagaacatatttaataattacaaagggcaacatagtaactttacattggcagacagctccataaccaaatgattaactttaatgccagcagtaagaagacctatccata

SEQ ID NO: 276559 - DNA, 543 bp, Homo sapiens
tagtagaataaagaacaaaagaagaaaatcattttagaatctcaacaggtgtagaagaagcatttcttacagcacttagctatgaaaaaaatgtgagttttttttttttttagaaagycaagtatgggagagtactttattaacttgcaaataatatattccaaaaacctattgtgaatataatacttaggttagtttctttaaatttcataattgtcataaatgtctgctttcttagatgtttttgcattctaatggaatctaatggaaatcatggccaacaaaataagaaaagaaaagggaacgaatggtgtaagaattaaaaagtaagagataagccattagtgctgacaactcttcagaatgaccacataatacaagatcaatagaatgcctccactccatgtgcttgcacactttttctgtaaaaaacaagttagtaaatattttcacccttgcaagccataagtctccatcacaactattcaactctgccattgtggtgtaaaagaaagcagccatagacaatctgtaagtgactgg

SEQ ID NO: 276560 - DNA, 993 bp, Homo sapiens
attacaggcatgagccaccgtgcccagcctagatccttactttacaaaatatactataatgaaagccagattaaagatattaatttaaaattagaaagtcaaaatagtaaatatagtggactatctttataatcttgtaatggaaaagagatatatttacacgaaacacaagatatgcttgtcaatttgacaaaaattagagataycttttttacaaataatattataggcaaagttagtaacagatgacagaatggcagaggatatcaataatatctgaaacagtcaagggattaaaatcttaataacaggaaactcttgcacatcaaaagaaaagaaaatggacaagtactggaatagaaatcacacaaaaaaggaaaactgaatgwgggcagggatttgtgtcagttttgtgtctccggcgtctaagagaatgcttacgagctggagacacaaaatacatatttcttaaatgaatggtcttcaatttttaaattcttttccatttctawttataaactctacatctcattctctcatttattttattccattttctcctttttatgtgtaatatcttcagtatctctaataagcacatctctgtctatccccaagacacatgctaagcagcttaatgtgatgcccatgcatctccaaggtgtttcctaagggaaaagggagattttggaatcttgcaggatcagattttgttctttggaaataataactgagtagatgaaaatctgtaagacaatcactctttaaaacatttactaccttggaagaccgggaggattgagggttgagtcaagaacaagcatccttactaaacatattttatttaaataagaaagcttttgaccaccaacaaaattgtttttaaaaatacagcaacaacaacaaaaaccagtgatcctgtgagatgtaattacacctcaggacaccacataattttaattatgccagaatatgttggaatatggtgaaatg

SEQ ID NO: 276561 - DNA, 595 bp, Homo sapiens
cggcttaacttgcccaaaataataatgattgtaatgagcactggctgttggtttcttatgtacttggtactttgcacgtattaacccagtcagtcctcctaayagttgtgagagagatagcattcttatccccattttacagatgaggaacctgaagcccaggtgataagtagtttatccaaggtatcatagctagaagtcgggtgcaggcagtctggctccagagcccctgctctttccgctgacctagctgacttcccaagagtcaaagtggattcttccccaagaccaaccaattacaatgactgaatcagtcagtcaacttcgaactgggctccaagagagaacgaaccatcatgcctctctaaatcctcatttctagtttgaatcttcaaggagagatagacactaagtagctagttttgctggaatggctgattttatcaatgttttcggtgtgtgagtgtgtgtgtgtgtatatgtatagaactaaattaaactgataatttgaatgcttacacttccattagttcaatttgtgtatgtgagccctcacacacatacatacacacacacaaactgttccagaacagtg

SEQ ID NO: 276562 - DNA, 595 bp, Homo sapiens
cggcttaacttgcccaaaataataatgattgtaatgagcactggctgttggtttcttatgtacttggtactttgcacgtattaacccagtcagtcctcctaatagttgtgagagagatagcattcttatccccattttacagatgaggaacctgaagcccaggtgataagtagtttatccaaggtatcatagctagaagtcgggtgcaggcagtctggctccagagcccctgctctktccgctgacctagctgacttcccaagagtcaaagtggattcttccccaagaccaaccaattacaatgactgaatcagtcagtcaacttcgaactgggctccaagagagaacgaaccatcatgcctctctaaatcctcatttctagtttgaatcttcaaggagagatagacactaagtagctagttttgctggaatggctgattttatcaatgttttcggtgtgtgagtgtgtgtgtgtgtatatgtatagaactaaattaaactgataatttgaatgcttacacttccattagttcaatttgtgtatgtgagccctcacacacatacatacacacacacaaactgttccagaacagtg

SEQ ID NO: 276563 - DNA, 224 bp, Homo sapiens
tgagccacgccctttcaccctcctctaccccgccctgggctggtgaaggtgcgcgccaggatgtggactacygagccctgaagaaataagtccttccactttgaccccatggaggattgcctgtgaggaacttaaacgagtctaccagtgtctagacacgggggcaggtctgtccggcacagcagctccctcaaggaggagaagagtgaggagaaaggaaactc

SEQ ID NO: 276564 - DNA, 604 bp, Homo sapiens
ctggatacccagaagctaagaaggtggccaaggaggcggccccggaggcaagccgccatttgggagcggagcagagcccggccggtgctcccgaaggcagcaagatgttgcgagccacagctccctgctggttcccacctggatacccagaagctaagaaggtggccgaggaggcggccctcgaggctccagaattcccactgccctctcatcagcctgcccagagcttcgggctctgggtgccccagatgcacaagcaggcctcagcatttgtggacatccaggcggagccccaraacaggggtccggcggtgcccccagcgtggcccaagatggtgacggagtcgtgctacttccctgcgcagaggggatcggcctgccgcttgccagccgccccaaggctgacagagaggccctcgggagtccgcatctcagcccccaggaagaggaagacgatcgcccactcttccagcccttgcttggtcacaggttacacagatgccaagagaacccgggtggccagcagcagccaacgctcccgtggctccaaggtcggcagacagccagggaagacgcgcaacaggtcagggatggcatgcaagac

SEQ ID NO: 276565 - DNA, 552 bp, Homo sapiens
accccaaccccccactcccggtcccccggaatccctgccgcggcccctcgggcctgtccacatccctctgcccctcccagacctctgtccttccaccaatcgcctcccgcagccccgagccgccactcccagtcccccgagtccctgccgcgcgccctcgcgcctgtycacatccctctgcccatccgagacctctgtctttacaccactagccaccccacgtgggacttccatggcttctgagtacaaggccagccccccggcccaccagctttcggaatgcctgcttacctctttttctgtagaggcaccacagggaggtgggtgaagcacttcggctctggagttacagatctgggttcaaggccaaattccaccacttactaggtttgtaatattggacagataacgtctttgcgcttctaccttttggtctttaaagtgtgatcaaaagagacttagactcccacatagtaataataataataatggcaaacttaacaccccactgtcaacattagacacaccaacgagacagaaagttaaaaaagg

SEQ ID NO: 276566 - DNA, 552 bp, Homo sapiens
accccaaccccccactcccggtcccccggaatccctgccgcggcccctcgggcctgtccacatccctctgcccctcccagacctctgtccttccaccaatcgcctcccgcagccccgagccgccactcccagtcccccgagtccctgccgcgcgccctcgcgcctgttcacatccctctgcccatccgagacctctgtcyttacaccactagccaccccacgtgggacttccatggcttctgagtacaaggccagccccccggcccaccagctttcggaatgcctgcttacctctttttctgtagaggcaccacagggaggtgggtgaagcacttcggctctggagttacagatctgggttcaaggccaaattccaccacttactaggtttgtaatattggacagataacgtctttgcgcttctaccttttggtctttaaagtgtgatcaaaagagacttagactcccacatagtaataataataataatggcaaacttaacaccccactgtcaacattagacacaccaacgagacagaaagttaaaaaagg

SEQ ID NO: 276567 - DNA, 594 bp, Homo sapiens
gtgatttcctctaaggctaagaaaatgctgaactggctcttcagggtcggcccaataacgcaagaccacagtgcacacatcacttgtttcaccttggcacagtctccctcaggtccctgctctaaattccccttttcaggtcatccactttagtggccccgacccataagaggaggggaaaggagagcctagggcatagggggacagccacacacraatgcatcccctcagggatccctaaagagggggctctcagacagggttgcctcaaccccaccgatcccaaatgaatttcaagtttgatggctgaatcagaataaagtcaaaccactataggctagaacataccctttcagccccacgctgaaccagacagacacaatcaggctgtgctcggatggggtctcaggccaatttgtggtggttctcaaactgtgttcctagaagcatcccatgtgcccccagggccaagaggtccaggttctacccccacccacatcccctgaatcagagcagcttttttttcattttaaaaattttgatctgtttcacacattatatttgtttgaacttcccatgtttaaaaattttgaa

SEQ ID NO: 276568 - DNA, 594 bp, Homo sapiens
gtgatttcctctaaggctaagaaaatgctgaactggctcttcagggtcggcccaataacgcaagaccacagtgcacacatcacttgtttcaccttggcacagtctccctcaggtccctgctctaaattccccttttcaggtcatccactttagtggccccgacccataagaggaggggaaaggagagcctagggcatagggggacagccacacacgaatgcatcccctcagggatccctaaagagggggctctcagacagggttgcctcaaccccaccgatcccaaatgaatttcaagtttgatggctgaatcagaataaagtcaaaccactrtaggctagaacataccctttcagccccacgctgaaccagacagacacaatcaggctgtgctcggatggggtctcaggccaatttgtggtggttctcaaactgtgttcctagaagcatcccatgtgcccccagggccaagaggtccaggttctacccccacccacatcccctgaatcagagcagcttttttttcattttaaaaattttgatctgtttcacacattatatttgtttgaacttcccatgtttaaaaattttgaa

SEQ ID NO: 276569 - DNA, 648 bp, Homo sapiens
gcactatctctgagaagaaaccaagtctagctcttctttctttctctctccttctcttgtcttctcttctcttctcttctcaagacagaatctcgctctgtcgccaggctggagtgcagtggcgcaatctcagctcactgcaacctccacctcctgggttcaagcgattctcctgcctcagcctccygagtaagctgggattacaggtgcccgccaccacacccggctaatttttgtatttttagtagagacagggtttcaccatgttggccagatggtctcaatctcttgaccttgtgatccgcccacctcggccttccaaagtgctgggattacaggcgcgagccaccgcgcccggccaagtctagctcatttttcacaatggtaaaagacttttggggtctgtctggtgactggtgttcttcatggtgactgggagttggctaggctgggacgcttgatcgttggcggccttcactgaacagctgtctctgctggagatttcttttctggaggaaagaaatcctcataaaggaaggagtgacatgggtgcctgccctcaagggttgtgcatcctaattggggagattggctagctcctgaaaagtcaagacagtggagatgtgtgacccagtaagtgccggggtg

SEQ ID NO: 276570 - DNA, 648 bp, Homo sapiens
gcactatctctgagaagaaaccaagtctagctcttctttctttctctctccttctcttgtcttctcttctcttctcttctcaagacagaatctcgctctgtcgccaggctggagtgcagtggcgcaatctcagctcactgcaacctccacctcctgggttcaagcgattctcctgcctcagcctcccgagtaagctgggattacaggtgcccgccaccacacccggctaatttttgtatttttagtagagacagggtttcaccrtgttggccagatggtctcaatctcttgaccttgtgatccgcccacctcggccttccaaagtgctgggattacaggcgcgagccaccgcgcccggccaagtctagctcatttttcacaatggtaaaagacttttggggtctgtctggtgactggtgttcttcatggtgactgggagttggctaggctgggacgcttgatcgttggcggccttcactgaacagctgtctctgctggagatttcttttctggaggaaagaaatcctcataaaggaaggagtgacatgggtgcctgccctcaagggttgtgcatcctaattggggagattggctagctcctgaaaagtcaagacagtggagatgtgtgacccagtaagtgccggggtg

SEQ ID NO: 276571 - DNA, 648 bp, Homo sapiens
gcactatctctgagaagaaaccaagtctagctcttctttctttctctctccttctcttgtcttctcttctcttctcttctcaagacagaatctcgctctgtcgccaggctggagtgcagtggcgcaatctcagctcactgcaacctccacctcctgggttcaagcgattctcctgcctcagcctcccgagtaagctgggattacaggtgcccgccaccacacccggctaatttttgtatttttagtagagacagggtttcaccatgttggccagatggtctcaatctcttgaccttgtgatccgcccacctcggccttccaaagtgctgggattacaggcgcgagccaccgcgcccrgccaagtctagctcatttttcacaatggtaaaagacttttggggtctgtctggtgactggtgttcttcatggtgactgggagttggctaggctgggacgcttgatcgttggcggccttcactgaacagctgtctctgctggagatttcttttctggaggaaagaaatcctcataaaggaaggagtgacatgggtgcctgccctcaagggttgtgcatcctaattggggagattggctagctcctgaaaagtcaagacagtggagatgtgtgacccagtaagtgccggggtg

SEQ ID NO: 276572 - DNA, 597 bp, Homo sapiens
tataaaatggtaggaaaggagatatataactatatttaatgtactacaatatgatctatatataattcatatacttatatatatcaacataatatgtatctaatgcatgtacatatgtacacatgttacattgctattaggattaaatgctacattgctatttgaattaaatatgtctcatgtcttttcgtatttacatatacatgtataatacacagacacacacattttaactcccctttgattctcatacacttttagttattttctatggctcacacaatcgttattataaacccctttggatttactacctcagtctgttttttgtttctgtaacagaataccacagagtgagtactttataaaaaaaagaaatgtatttctcacagttctggaagttgagaagtcccacatcaaggtgattgcatcttgcaagggccttcttgctgtgttatcccatsgcagtaggcaagagggtgagggagggcaagaaacagagagagaaccaaactcacttttgtaacaaactcattgtctcaataagaatccaattccccaataatgacatgaatccattcatgacagcagagccct

SEQ ID NO: 276573 - DNA, 578 bp, Homo sapiens
ttaattatgtgtttaatcccatttatctccattccaccctagttctcacacccctactctctaaccacaaacaatcattcgttttgtttggatgtttatagcaaatttggtatcgctgtatgccaacgatgtattcaacatttaatttacatgcattcttaatttacatagatagkatttgttatacatcccattcaacatcttactttgtcccctccacacttgttttacatgcctatttctgcatgttttctcttctgtttttacatggtactccgtggtgtacctcaccatttttacctattcactatcacaagaagaggcatccagatactgcctcgaacttctcacaccacaaataacactgagagaaacacacttacacatgtccttatgtaaatcccaatgagaattttctttagtaaatatgcctaagagcgaaaccactggtttttctagtatgcacgtatttaatttgtctaaatactatcagattgctttccaaaatggctgtatcagcttgttttcccaccagcaggtcaccagggtctccgtatccccacgtcgccattcctagt

SEQ ID NO: 276574 - DNA, 564 bp, Homo sapiens
agtatatacctagaactgtaacaataacagcaaaaactggaatgcagcacctttgtgctcagaattacaaaagagagttcattttcaatcaacatgcacttactatatgaaaagcactggattagatgctgtggagcagaaaaaagaattaatacccatcctcaaggagcttaccatccagttacaagcaaaacctgaactcacagaactataaaaatgtaagactaaaaaatgtagcatttctcattaactaagtggaaaataccaaatcactttcctttacttttatcacctcttttacaacccttctcccaactggatggcagtcatccttctgctgggctttcataattctctggagctcctttaaaatatgtgctccttgtactgaacctgcctgaatctgttttcacatctgtgaaatgggatastgaggaccaacccccactgagttatcgtagaattaaatgggtcaatgacaataaaatgcttaggatattttctggcacatgagagctactcaatcaatgataaccagtgtcaatattattattattattatga

SEQ ID NO: 276575 - DNA, 610 bp, Homo sapiens
tcgcatagctgttcacttattattaagtaaatcataatcacacagtgccctaatttacttatttacctaataagacttttaaatacctatatacctgagttttcattctactagagtagattaggcagtatgcagataaatatacaagatattaaatagaatgtgtcatgacataggtgctaaccaacttttgtgggagcttggaggattatttgacttatgtcttaagtaagatgtaagaattgaacccacaaggatgtgtataatatcccagtagaacagataaaacaaaagcgtggaggcacaaaaggtgtkcagggaaagtcagcaagtttgagttgccagtcacatgaaagagcacaaggcagaggcaaggaagacatgattaaaatgtaataatcaactagaactgaagaaaggtgaaacaaaaatacaggatcagatgtctcttgatctattatgaggaaggtatcctcactgactcctactaatgtaccagaatcatttatttttttttagggtgaggaacatcccaggctcacagcttgagggccaaattattatttataacttccaaaatcagttcaagtccttacacagaatttttgat

SEQ ID NO: 276576 - DNA, 595 bp, Homo sapiens
aaaatagaggcaggatacatgggagctctctgcactatcttttgaatttttctatagatctaaaactattctcaattaatattacgctcactctctccaagcaaaggataaactattgtgtgtttttcccttggccagtctcatgaagcactcactttatttttttccacttaataaagaagtaaatgcataactaacttaaaagaaaaattttaattaaaaaataatttaactgacgaccaaatacttaaccatggtgaccctaccagatagtgttcatgagaaggcttcctggacactaagctgatttcctaaataatatccttcacacacaaataaaaaagcaagctatacttttctattgttaaccagaaaaagtgcctaaaacctttycttttcaacatattccattttctcattaaaacagaaaaagcaggacattagcagttaaaaacgccacctttattaataaaacattcattttttaaaaaaatagagaaaaaggagaaatgctatggatacctaaggaagcatgattgcaatatattgagtcctttttgtgcctattaaggcttttcaggataaacacagtata

SEQ ID NO: 276577 - DNA, 615 bp, Homo sapiens
attatgaatttgtttaaataaaactgttcttggaggaaatatgtaaaaagttgttgaaacatttatatcttctgacataatagttgtgcttttgagaaagtttcctctttaattaaaggtaaattaaagttgaaaacaactggaaaacttcatcatagtaaaaatacttttttgtcaaaaacctagattttcatttcaaaaagattagctaattacattattatgctatgtcaagaagctgtcaaaaatcttgttttcacagattattaaagacattataatacatcatgctatgatattaaatggaatcaaaggagtcatgtaaaactataatttcaaatatatacacraatatatagcagaaaatgcaacaaaaggaaatgcatcaataattgaacaagagttctacgagtagtaagcaaacatttttagctcatattttcataatgtgtattttctaaaccttttcccttgaacaggaactactttacattttccccataataaaaatgttacatatgtctataaaacatcatatttgatatgctttttaaaattgatttactcaaaagaaagcaattattcaaaatcaggactcttgtatgtagctgctgt

SEQ ID NO: 276578 - DNA, 570 bp, Homo sapiens
acctatagattaatttgaggatgattgacatcttaacaatattggactttccagttcattaacatgatacatccccattcatattgagttcttctttaatttctcttacacatgatgtatagtttcagcatatagattttacagatgttttgttaaatttagccccaaatatctcattgctttgggggctaaagaaaatgatactgctcttaatattttatattttccaaatgtgttttgctggaaaatagaaatacaactaaaattgtatattaggccaggtatggtggctcactcctataatcccagcactttgggaggccgaggcaggtggatcacctgaggtcaggagttcgagactagtcaggccaacatgacgaaaccctatcttactaaaaaatacaaaaattagctgggcgcagtggcaagcacctgtaatcctacatacttgggaggctgaggcaggagaatctcttgaacccagaaggtggagkttgccgtgagctgagattgttccattgctctcctgcctgggagacacagcaagactccatctcaaaaaaaaaaaaa

SEQ ID NO: 276579 - DNA, 448 bp, Homo sapiens
acattatcaaccatcatgccagaccctttaacatattatttacagttattttcaagtctctgctgtctctaagttcgtttctgttaatgccttatcttttaaaatgggtaattatagtgtttatttgttaattttkatgtatcataggttttattgaagagcagacattctctataaacaacaaaaaattagagactgaggtaaataataattaaaaccataatttggcacatcttttctttggccactactttgagatgttgagtaaatctagtaagagattaagctgaatttcacttttttgctatagttaccctcaaggcactacagatttaaagccctgaaattgtggaatgctattagtagtctccacatacaattgtcacaggggagtctctctaaactcttgcccctctttcagtagtagacagctagtgctcatgactcc

SEQ ID NO: 276580 - DNA, 488 bp, Homo sapiens
ataacttctgcttcataaccaatattgcacacatccatcttcaatggggtgggcgctcctagaaaatcaactctccacactccaagacacattctcatttctcaaagcaccatgtagtttgtattctaactaaaagtacaactgagtgattgcataataagagattgaatgaaagtacatcagtattgtttattttttctcatcctaaaaacaaaacaacagaatgcttctgctgaagtattatccagacagaacascagcagtgagagatgaggtaataaattttcattctattttgctaggtaaatacagactaggttaattaacccattttcaaaatcatgtatttcaaaatttttcaagcaacatattttatgaatacaaaacatcacatatttttcttgctactgaaaaattttgcattggtaccagaggacgtggggaaaacaccagcatgaaaacttctgacactacttaatttctgtgat

SEQ ID NO: 276581 - DNA, 550 bp, Homo sapiens
atgtatttcaaaatttttcaagcaacatattttatgaatacaaaacatcacatatttttcttgctactgaaaaattttgcattggtaccagaggacgtggggaaaacaccagcatgaaaacttctgacactacttaatttctgtgattgacagcatcatatgatcattcatagcttacataattctaaaaacatatccattgtccttacagttaaaatgattgcccaaaaaattacagttaagaccaatggtttactaaccgattttactcaaccacaagcaaaactaagattttattgatttcttagtgatttaaattgaaatgccaaatgttctagtacaagtacatctctctctyttgtttttttttgagatggagtctcgcttcgtaacccaggctggagtgcagtggcgcaatctcgtctcattgcaaccttcgcctcctgggttcaagtgattctctcacctcagcctcccaagcagctgggattacaggtgcccgccagcatgcccggctaatttttgtatttttagtaaagaaggggtttca

SEQ ID NO: 276582 - DNA, 566 bp, Homo sapiens
tacataacacaataaaccttctagtcaaragaataaggaacataacacagactatagctaaactgctgacattaggctcagctcatagatcttgcttaccaactatttgctgaatgaataataatctacacatcatttacatgtgttttatattttggcatgggtagtgctggcttttcaatgaaaggcattcttgggcctacacaaatactttcattatctgactgatgggggtacaggctgatttatgggtgtgtttaccctgtaagtgattctctaactctggaggaactgaaaagtatctaggttctccatcttgtgatttcagacttagctggttcctatgaaagccaagtgcaataccccagagcaggggagatgaacattttatatgcaaatgattgatgtattgtatatagaaagaattggaaaatttcaaaatatatatatatttctataggaaggaaggcatggggtggatgtgtttttaactattacacatggattaactcaactttttaataaactggggaaactaggactttcttctagagtaagtgaataat

SEQ ID NO: 276583 - DNA, 393 bp, Homo sapiens
aattttcccacctggtaaatttcagattactctttaagacccaggtgaagtgttgttttatctgcaaagagtctcttaaggaagttcattctctcctatttgctataatattaatttgaacatttctttattattacmtgatgttgcattgtatttatgaaggatgattgtatgcatgaaggattataccactaaacttcagcttcttgaagaagtagtccatttcttcttgatctttatattaccagtgccacaaataagcactaagaatacttaaatgagttacttgcattattttgcataatgcactttagtgtttggcaggcctatactcaaagctcactctgacacttagttgggtgattcaattacctaatttctcaaaatcacatt

SEQ ID NO: 276584 - DNA, 393 bp, Homo sapiens
aattttcccacctggtaaatttcagattactctttaagacccaggtgaagtgttgttttatctgcaaagagtctcttaaggaagttcattctctcctatttgctataatattaatttgaacatttctttattattacctgatgttgcattgtatttatgaaggatgaytgtatgcatgaaggattataccactaaacttcagcttcttgaagaagtagtccatttcttcttgatctttatattaccagtgccacaaataagcactaagaatacttaaatgagttacttgcattattttgcataatgcactttagtgtttggcaggcctatactcaaagctcactctgacacttagttgggtgattcaattacctaatttctcaaaatcacatt

SEQ ID NO: 276585 - DNA, 393 bp, Homo sapiens
aattttcccacctggtaaatttcagattactctttaagacccaggtgaagtgttgttttatctgcaaagagtctcttaaggaagttcattctctcctatttgctataatattaatttgaacatttctttattattacctgatgttgcattgtatttatgaaggatgattgtatgcatgaaggattmtaccactaaacttcagcttcttgaagaagtagtccatttcttcttgatctttatattaccagtgccacaaataagcactaagaatacttaaatgagttacttgcattattttgcataatgcactttagtgtttggcaggcctatactcaaagctcactctgacacttagttgggtgattcaattacctaatttctcaaaatcacatt

SEQ ID NO: 276586 - DNA, 393 bp, Homo sapiens
aattttcccacctggtaaatttcagattactctttaagacccaggtgaagtgttgttttatctgcaaagagtctcttaaggaagttcattctctcctatttgctataatattaatttgaacatttctttattattacctgatgttgcattgtatttatgaaggatgattgtatgcatgaaggattataccactaaacttcagcttcttgaagaagtagtccatttcttcttgatctttatattaccagtgccacaaataagcactaagaatacttaaatgagttacttgcattattttgcataatgcactttagtgtttggcaggcctatactcaaagctcactctgacacttarttgggtgattcaattacctaatttctcaaaatcacatt

SEQ ID NO: 276587 - DNA, 1136 bp, Homo sapiens
tgtcagcagtccttgaagctcattaccctgtctgttattcaagcagaagcagtgaagtgggatggaagtagagaggtgaaacatagtttaaatgttttccaaatttgttggtttatgtttctgtgcatatgtgatcttaatcatatctgacttaccaccaaattaaatttgaaattcagttatacagtatccaagttcatgaaaattaatgagytggtttccaaataattatttttttaagaaataagatgttattttagcttatactatctcacaaagctaaaatccaaagttcagttatggctttctaggttattgcaataaatttccaattcttagatttttatattaatacaaatacctcgtgatccagagcaaattttaccattctatatctaaagagttttctccaagttgttcatcaagttatgtaatagatgagataaagcttccactgaaaaacgtcctattcattaacttacacctaatggggaaatactagaaaacaaaaccaaaaagttatcagacctcatgtgtttattagaagaaawgggatataaggcagatgaagtgcaacccagcaggtaaattgctaggaaacatagattccatccaaatataacaaatcaccatttggtcagaaaattattcttctatccattagctagctgaccttgaacaatctatacaactgtctgcaacatctatcttacagcgctgctgtgatgactggagctaatttatatgtcaaagcataggtttgtaaaaatagtactaaaatgacagtgataataattgctaatgttaagttatattcagcaagttgttgtatttctctagactttaatttcctcatgtggaattcttttcaccacattttataggaatattatttactaattcattcaacaaatatcacctaggcatctacactgtgccagacactgttgttggtgccggggacatacaacagtgaacaaaacaaaattcttgctcttgaggwgcttcctttctcgtgggggaggctggccgcaaacaagcaaatccatagaatgtcagatggcaataaatactgtggaaaaaaggggagcagaattggaaaaacagaattggaggtggtgggaaattgagcagcg

SEQ ID NO: 276588 - DNA, 575 bp, Homo sapiens
gcttggtttctacattccgaacctgggaagtggctccttgggagattgatatactccaaccatatcacttatctctgcctctgaatctcaactccaaccgtatttgatctctctgctatatatttttgcctttccaaatgctttctgacaagaacttgcaaaaaaatacagaaaaacatgtttttttaattccctgaactcattaaatgaaaccaaatcttccagagtctttaaattttttatgacaaatttagtaactttaatagacagttgatccctgctttcacctccaaattttgaacatgtaattttaattttcctctgattattgtagaaaatgaatttatatgagtgaaattacaattttgagtgtttgctatattatttgtctttcttaacattactttttttagtaataagcttttatttctaatattaaactttatgataaataaattttacagtatttcggaaatacagaaaatgacacttgcaaatttgtaagttcaacttttcaaaacaaaagycttcaattttcagcttttattcctttacatataatttaaatttcttct

SEQ ID NO: 276589 - DNA, 550 bp, Homo sapiens
aattgtcacacttttggcatggataacacacaggattgtgccttcaaaaaggttaactagataggtcttcacttgcctcttgcaaagcaccaatagctgcactctggaagcccagacctattttgaagtcttgagaaatttttcacaccagatgctagaaagaagtttttgaatcagaagttcaatgggcttttcataatatctaatttcatgaagcactacagyataaggcttgcggtgaggtttcttcacccctccagtagagggtgcacttgcaagcggcatttgtagcattcggtgaggtttctttacccctccggtagagggtgcactcgcaagaggcatttgtagctagttatttttagctagttgcttcctgggcagtttactatgggtcatttgcaagcagtccactttgtaggagccatggaatagagatttccttacttacaccccttgtcctttggctgcagctcagtgaactagaggctgcactggtgttagagcaagaaatttttcttcattacataaatcctggcacatagtaagt

SEQ ID NO: 276590 - DNA, 233 bp, Homo sapiens
gtatactttttaatgtaacttcttttgctcagttaygttcatgaaattaatccatatttttacttgtaactgtacattgtttattctcatttctgaagagtattcagtttagccattctggcatagtggctttaatttacatttccacagtgactaaggatgttaagcatcatttcttacgtgctcttgatctaagtaattggatattttcccactttattggcagcattttt

SEQ ID NO: 276591 - DNA, 233 bp, Homo sapiens
gtatactttttaatgtaacttcttttgctcagttacgttcatgaaattaatccatatttttacttgtaactgtacattgtttattctcatttctgaagagtattcagtttagccattctggcatagtggctttaatttacatttccacagtgactaaggatgttaagcatcatttcttacgtgctcttgatctaartaattggatattttcccactttattggcagcattttt

SEQ ID NO: 276592 - DNA, 598 bp, Homo sapiens
aaccaaactggatgttggagtaagcaaagaaaggaatgcattgagaaaactcagtgaagtagcctgattacacagaccttcactgtaccatataagcaataatactggaagatatttaagtagttaaatacctgggaacagatcctagacagccctaaagccaaggttacttgttaaaaagacatacatatgatgtttggatagtttacttgatttttactccaggtatatcctgagatgtttataaactaaagattcttgaagaagctagcaaaagaacagaagacgaaatatcaaccaacaatcacttttaaaacaagataaactgtggccaaaggagatacacaaattcttaagttctgtctccagacagtttaatgctttcattcttcagtgacacactggaragctttcactggtaaatatattcaagacaggaaaataaatcagagctgtttatcaaactggacacaatgtacaaagattggacataatgaagaaattatgtgggtaatagtcataggataatggctcccatttcactcaattttgaagttattgctttacacatagataaaacaattagaagaaacaaaaa

SEQ ID NO: 276593 - DNA, 446 bp, Homo sapiens
tccaaagcatttcagagatattcacagcagcccctcccatcacaggcccagaggccgaggagggaaaaacagttttctgggccagacccagggccctgctgttttgtgcagcctggggacaggatgccctgtggcccaggcactccagctccaaccatggctaaaaggggccaaggtacagctcaggccattgcttcagagagtgcaagccccaagccttggcagcttccgtgtggtgtggggcctgtgggtgtgcaaagayaaaagagttgggcttcgggagtttccacctagatttcagaggatacatggaaatgcctggatgtccaggccatatggagaacctctgctaggacaatgcagagtggaaatgtggggtttgagctcccacacaaaagtccccactggggcactgcctagtggagctgtgaaaagagggccactgt

SEQ ID NO: 276594 - DNA, 527 bp, Homo sapiens
gcactgtagggaagacacaattgtgttttaaaatttcagaaggacatgagatttgggaggggccaggggcagaatgatatgattttgttctgtgtccctacccaaatctcatcttgaatagtaatccccacatgttgacggatggacctggtgggctacaataggatcatggaagtggtctcttccatgacgttctcatgatactgagttctcatgcgatctgatggyttaaaagtgtgtggcatttccctgctcactcttcctctctcctgtcatcatgtaagatgcatcttgcttccccttcaacttctgccatgatttcaagtttcctgaggcctccccagacatgcggatcagtgagtcaattaaacctctttcctttatgaattaccgagtctcaggtacttcttcatagcaatgtgaaaatgaactaatacagacaattttaaaaaacagagataatactatgtgtctcaaattatgaatgtatgtattggaatcaaactatataaagtgtctagcacagt

SEQ ID NO: 276595 - DNA, 587 bp, Homo sapiens
ctggttttctctggggtgagtggcaggaggtatctttcagctgggattaaaaccaagcacattgcttcaagaatttcttactgcttgacttgaatgaaaatgttattactgatgataattttggggcataatctcatgcctaactggtattggaataatagtaagatgtgtaataaacacatgtgagtcttgagaattccgctctgattttgactcaacagtaagttacttgataaagtttgtcctacagtctcactacttctcagcaaamttcttactgtgtgatcagatactaaatttctttcagtttattcccagtaaatctgatggaatgtctagattctgcagactttgatctaaagactgaactaaatccaatgaactcaagagaacaacttttaagtagttattaagctgatattctgtgttcagacctgtgcctgggactgaaagaacataaataaatgtaactgaggaagtgttctttctctttgatctagatggtaacttacctaggggacaaatgggagtgggcagatctgaagaaaggaagaatctgttgtaatagtctaaatgtgaggcaatga

SEQ ID NO: 276596 - DNA, 587 bp, Homo sapiens
ctggttttctctggggtgagtggcaggaggtatctttcagctgggattaaaaccaagcacattgcttcaagaatttcttactgcttgacttgaatgaaaatgttattactgatgataattttggggcataatctcatgcctaactggtattggaataatagtaagatgtgtaataaacacatgtgagtcttgagaattccgctctgattttgactcaacagtaagttacttgataaagtttgtcctacagtctcactacttctcagcaaacttcttactgtgtgatcagatactaaatttctttcagtttattcccagtaaatctgatggaatgtctagattctgcagactttgatcyaaagactgaactaaatccaatgaactcaagagaacaacttttaagtagttattaagctgatattctgtgttcagacctgtgcctgggactgaaagaacataaataaatgtaactgaggaagtgttctttctctttgatctagatggtaacttacctaggggacaaatgggagtgggcagatctgaagaaaggaagaatctgttgtaatagtctaaatgtgaggcaatga

SEQ ID NO: 276597 - DNA, 481 bp, Homo sapiens
gaactcaagagaacaacttttaagtagttattaagctgatattctgtgttcagacctgtgcctgggactgaaagaacataaataaatgtaactgaggaagtgttctttctctttgatctagatggtaacttacctaggggacaaatgggagtgggcagatctgaagaaaggaagaatctgttgtaatagtctaaatgtgaggcaatgaattataaggtttccataatagagatgaaaagagacagaaagataaactaccaaaagaattaaaggagcttgataagttcctctgmaaaggctaaattaaaatgagacgtaaatgatcaatgattgacacaagatagtacagcagataaaaatatggatttcggtgtctatgagaactgaattcaagtcccagatctgacattggaattcaacagttacatgattcttctcagtttcagtttccttttgtgtaaaatataacaaacagtacttc

SEQ ID NO: 276598 - DNA, 555 bp, Homo sapiens
atgatagaaatttatttctcacagttctggaagtggcagtcccatcaggctgccagcattgctggcttctggtgagggttctcattcagtttgcagatgacyaacttctcatgtatcctcatgtggtcgaagcagagctagttagcattctggtcttttcctataaagacactaattccattaatgagggctcaactcttattacctaattactttccaaagacacctcctcctaaatgccatcgcactgggagtagggcttccacatatgaattttaagaagacacaaacgttcagtccattgcactgtatgttttcattttctctagatcagtcacttttttcctacaaaatttatacatatttagtcttcctccatctcatctagtatctcctaaaattatcaattttaattaaatttccaaggtttttcttttttctttttagttactgttgctctgcagaagagtggccatgtctctttgttcataactcctgtcatgtggggatagaatgtggtgagagggtccataaattattgggtctatgcataaa

SEQ ID NO: 276599 - DNA, 473 bp, Homo sapiens
ttctgtggctggggtgggctgggatagcaacggatgttatagagggattacaaaaaagattgaggaatcgtttagtagggatggatacgtgcattatcttgattgtggtgatggtttcatgggtgtatccatatgtcaaaacttacccaattgtaccttttacataaatgcagtttgtgagatgttttaatgttaactatgacycagtaaagttacgtgtgtgtatatgtccatgtatagatatgctatatataatatataataatacacataataggtaatacataccatatataataatacacaatacacataatatacaatgcatatgtcatataatatataacaatgtaatacacatatacacacagacttacataatatatattgcaatatatacatatatattgaatgaagattaaaactatgtgtgtgtatataggtatataaatgactttttgctaaaagctatt

SEQ ID NO: 276600 - DNA, 578 bp, Homo sapiens
  misc_feature (1)...(578): n = A,T,C or G
tggaaggaaaactaaaacacgatgtgtccgtgtccactgattgtaatcaactcaagggctctgatagcactctacataaagatgaaaaatgtccactcaaacttctctacctcctctatgccaggcactgctaggtattgcaagacaaagaaatgaccgggtaatgatgggtagtaggaatatacacagcctccattaatggaggtaatttgaacctacggagtggtaaatagatgacttcctgctttcttctttggaatctgtggattctttcgaaaaagttagatattggttgtattataaggyataaaaaggctactgtgcaatgcacctgttagacatctaggcaggaaggagatggtcaggctttccaaagtgatagcactttcaagcgtaacctagaaggtaccctgctcattcagatcttacagagtgacagcctgagttacttattaagaagatgaagaaaattcctcataaatcatgcagagcaaagaagcttatattttctatttagagattanaagatgccccaagacatagcttctatttgcccttagctgagataggtgaacaca

SEQ ID NO: 276601 - DNA, 609 bp, Homo sapiens
tacttttggcaatggtgatctagggattcagaataaacctcctgaaaataagctagatactctgtgggagtgatggggtgatattctttgcatttacatgtcttgggggccatagtacttcccaaatctatggattgatgtcttttatcaaggttggaaaaccacaccttcatggtaaaattgttgaaaactaagacaaaaaacaaagctaaaatctgacagagagagaaagggaagacatattatcttccaaacaccaattattgacttctatatagaaacaatgaaagccagtgaaaaattgaatgataaatttaaagggcagaaaataacacaattgtcaacttagaattgttaaaataaaattctacataaaactatacctcaaaaatgaatgtaaattaaaagcatattcagacaacaaaagcaaataatttgttgttagcagatctgaaatttagaaatactaaaaggaatgttcaggcagaagaatatgatcccagataaatgctcagagatttaggaaggcttaaacaatattgaaaaaagtaaataggtaastaaatctaaatttaaaaataatttctgaggagctgcaagaaaacaata

SEQ ID NO: 276602 - DNA, 620 bp, Homo sapiens
accagggacttgttatcaaagaggtttcatgacttacttgctcatggtcacatgtccagttgaagtataaaagcatatttagtagttccaaaatagacattcttgaggcttctaatatagaactgaatttaaaataaaacaaaaatagcttttcttttgcaacaggtttgccaccagaacacaggtattgtaaaaaccacccctaaaagccacartggaaagtgaataaaatttgtatccacatggttgccttggaccccaggttcaggcaagtccaccactaccagccatctgatctataaatgtagtagcattgacaaaagaaccactgaaaattttgagaatgaggctgctgacatgggaaagggctccttcaagtattcctgggtcttgaataaactgaaagctgagcctgagtatgatgtcaccattgatattcccctctggaaatctgagaccatcagatacgactatcattgatgccccagaacacagagactttatcaaaaacatgattacagccacatctcaagctggctgtgctgtccttattgttactgctcacatatacatcacagtagatgaatttgaagctggaatctccaagaatgggccgagcc

SEQ ID NO: 276603 - DNA, 622 bp, Homo sapiens
ttgcaacaggtttgccaccagaacacaggtattgtaaaaaccacccctaaaagccacaatggaaagtgaataaaatttgtatccacatggttgccttggaccccaggttcaggcaagtccaccactaccagccatctgatctataaatgtagtagcattgacaaaagaaccactgaaaattttgagaatgaggctgctgacatgggaaagggctccttcaagtattcctgggtcttgaataaactgaaagctgagcctgagtatgatgtcaccattgatattcccctctggaaatctgagaccatcagatacgactatcattgatgccccagaacacagagactttatcaaaaacatgattacagccacatctcaagctggctgtgctgtccttattgttactgctcacatatacatcacagtagatgaatttgaagctggaatctccaagaatgggcmgagccatgagcatgtccttctggcttccacactgagtgtgaaagaactaattgttggttagcaaaatggattctgctgagccactctacagccagaagaaatacaaggaaattgttaaggaagttagcacttacagtaattggttacaaacctgccatagtag

SEQ ID NO: 276604 - DNA, 551 bp, Homo sapiens
ggactgcacttatctataaagctgctaacccctgagtcttgaagggagaagataaataccagttaccagtctttyggttgcacaacgaggccaggacaagagccctttttatggattggtttcataaatggtttctccctgaactcaggaagttctttgccagtatctttcaaagtttgttttgtaagtggattttcaactatgcagggacctgcacttctaacctccacactgttaaatggtcaactatgtatattagaacatatcattcaaaactatatgtaacaaacacctagtatggcactgttgtgtatgcagtcagtagagggtgccatgatagttctgctatataatggaatttctaacctagaagagagtgtagaaaatcttggtatatagcaaatatgttttaataactttaatgcaaagtagcaagtaacaaatgcacagtaaatgctattgagtttagagagagaaagaactagtgtagtcagagaagacttcttaggagaagtgattttttacttgaacttcatgaatacctaggattt

SEQ ID NO: 276605 - DNA, 351 bp, Homo sapiens
ataaaagaattgaacaaccactatcagtcaaattcacctagttgaaatttatataacactatactcaacaacaatagaatatatattttttcaggcacacatggaatatacaccaaataaaccaaattctgggccattcaaaataaataaaataaaattctaaaaatatttaaaaattgaaagtatgcagagcttattcttagatcacaatagaaattaactagaaattaataacagagtagtacctgaaagattactaaataattgaaaattaaacagcacacatmtgagtaaactattaatcaaaatagaaatcacaatggaaattagaaaatattttggattggatga

SEQ ID NO: 276606 - DNA, 548 bp, Homo sapiens
tttaaaaattgaaagtatgcagagcttattcttagatcacaatagaaattaactagaaattaataacagagtagtacctgaaagattactaaataattgaaaattaaacagcacacatctgagtaaactattaatcaaaatagaaatcacaatggaaattagaaaatattttggattggatgaaataaagaaactacataaagaatttgcggaatgcaagaaaagcagtacttagaggaaaacttataaacttgaatgcttaaaaatcaatgatatgtttctatcttgagaaactagaaaaatagaatcaaattaaactaaatgtaagaagaagaaagaatagagataacaaattaataaaaaaaacaggaraaaagaactgagaaataataatgaaatcaaagagtggttctttgatgagatcagtaaggttaataaacctctagtcagactgatcaggaaaagtaacagaagacacaataaaccagtctgaagcatgaaagaggaaacatcaaatgctctagattttaagaagataagagaatatt

SEQ ID NO: 276607 - DNA, 468 bp, Homo sapiens
atgagtgcacacttctagcatctgtttctcacaattcaagacagagttagaaaacacaaatgataagctttgagttgctttctggaagaagtttgacagcacacctaatgtctcgactatcccaactgttgcctgtgggccaggcttttaattaggctgtatctgggagctgatgaagcaatccatagtcctcttggagcctgaaatggcatctcacagctcctcctgctggaatgctccagtgatagaactaagcttccarctaagccacctgtctctaagagtgggtggaacttggtatccactggagtgacaaagagcaaagcaatggattgaaagagtgtgctgtctgaacaagagtacagacatttgccacagatactctgtccagtttagtgcagagcaagtgagagataaactctagcttccactgtttccttgaagagaagggaaactagacctcacatc

SEQ ID NO: 276608 - DNA, 571 bp, Homo sapiens
cattaggaaccaaaaaaaaaaaaaaaaaagaaaagctcaagtagtcaaacaacaatgaaagaataaagctaaaggcattatattacctgacttgaaattatactacaaggttatagtaagcaaaacagcatgatgctgatataaaaacagacacacttttcagtgatacagagcagagaacccagacataaaaccacatacctaaaattaagttttcttcaataaagtcaacaaaaatatatacactggggaaaggacaacctattcagtaaatggtgytggaaaaattgtattgccatgagcagaagaaagaaactgggccccatctctccaggctagctgatgaagtaccaaactgtatactgtatacaaagactaactcaagatggattgaagacttaaatgtatgatgtgacactatataagtcttagaaaaaaaaactgaggaaaaactcttctagacgaattggcctaggtaaataatttatgaccaatttgtcaaatgcaacaaaaacacaaatagacaaatggaacttagttaaactaaaaagcttctgcaaagcaaaatata

SEQ ID NO: 276609 - DNA, 605 bp, Homo sapiens
gttcagacagctgggataggcgagtcccctctgcaaaggctggtttaaatgctctgtctgtgagtgggttttggctgagtttggtctggttttcttttcttctttagcaggacagcactgagttcaatgcctcacaattgctgtgttctccctccctcagtgcccagagatgctctccacaccatggagccaccacttcaggggatcgaggaggggtcgtgttggtgatttaggactgttttttctatctcttctgtgcctctttcagcaatatgaagttaaaaccaggtactatgagcactcacctgattttttattctcataaggtttttttttctatgtagatagttgttaacttggtgtccttgcatgggggatgatccatggagctctctgttctgccattttgcttcatcccaagactcattggtgaaatgattgatttctggttttagagcagggacaagaaaaattaaaaataagcctrgaaaatattttagcacaaagaaaaaagtactcaaaaataataaagacatgttaaagaacaaaaagactagcttaaagggactcttaactgagcagattaggacaatttaccagttaaa

SEQ ID NO: 276610 - DNA, 561 bp, Homo sapiens
tttaatgttacatgtttaataaaatcttattataaaattaaaatttstaaaccaaaccacttcattatgtaaatttgtttatttaatgtgttccttatcatcatagcttaaatttattttaattatgctgtattaaaacagtgtggtgtgttttaaaactaaacaattcaattagcataaatatgtaagcaaatgcctttcttggcttggtcaaatagagttgcttaatccatttgtgctactctcacaaaataccaaaatacagactgggtgatttacaatgaatagcaatgtatattgtttatgattctggaagctggaaagtccaagattaaggtgatgcagctggttagggtcttcttgctgtatcataacatgatagaagacatcaccacacagcaagagagagcaataaagggccatactcaattttataacaaatctgctctcccaataatgatctcatgctcatgataatgacattaatccattccttaggcagagcccctatgacctaatcatctcttaaaagtcccacctctcaacactgttgcactgggg

SEQ ID NO: 276611 - DNA, 561 bp, Homo sapiens
tttaatgttacatgtttaataaaatcttattataaaattaaaatttgtaaaccaaaccacttcattatgtaaatttgtttatttaatgtgttccttatcatcatagcttaaatttattttaattatgctgtattaaaacagtgtggtgtgttttaaaactaaacaattcaattagcataaatatgtaagcaaatgcctttcttggcttggtcaaatagagttgcttaatccatttgtgctactctcacaaaataccaaaatacagactgggtgatttacaatgaatagcaatgtatattgtttatgattctggaagctggaaagtccaagattaaggtgatgcagctggttagggtcttctygctgtatcataacatgatagaagacatcaccacacagcaagagagagcaataaagggccatactcaattttataacaaatctgctctcccaataatgatctcatgctcatgataatgacattaatccattccttaggcagagcccctatgacctaatcatctcttaaaagtcccacctctcaacactgttgcactgggg

SEQ ID NO: 276612 - DNA, 583 bp, Homo sapiens
caagctatcatttcattatatttctgtcaccagtttcatcattatgtgtgtttactttcctgaaaatgacattatgacaactctcctttattatgcaaagttattgccttgaaacctctatgtgggaaaacgaaagcatttagtcaactctgctgtgaaggaagacattatagaacttggcttttgtgtcacaataaacattttagcttcttaagaaacctcagggatgaaccagacagcaaaaactgagtgattttagtcaccagaaactgtgataattccccttcagtgttgttcttggattgctttcgtagcattaaaaaactgaatttagtaagaaaagtctggtagatattcagagttaacaaagtaatgaaattattkttataggaaaagaataaaagggatgagatttgttttgatctatttttaaccttttaaaataaagggggagatgtcaaaattatgttctatatgttgtctatttataaaaatgaaagcaatatctcctacctcactggagagtgggtttaggtaaattgacattggaatggctctttgatatttatgtaaaagacgttac

SEQ ID NO: 276613 - DNA, 1950 bp, Homo sapiens
gggtggattgattattcagtgcccttaagtgccacccctaaattatttaaaggaaactaagcaatctaaattcttccgctgcctgaattatttaggtcataaatgtttcctgttgaatgcttttgtggtcacgttttatgttttggtctaagtgaataaaattagctttaatgcaataatacgaaagcaatggctagaaataatacatgaagtgacagttattgtttttgttcttatgaaactgatgaagcagatatcagcaataatatgcatttttaatgttttagtaaagtcttgcaccaacaagaaatcattcctctstgtgtgtgtgtgtgtgtgtgtgtgcttgcacatgcatgtgtcttttatcttacatgaaagccaatagcaataaatgttcctctgccaaatttttaacttacttgctaaatctgctgttgctagctcaggtttccatacctattacaatattttatgttggccataatatacttaccacagtggccaattaccttgctgaagagaagctggcaatctgtcattttatgtgaaatctcatgcattctctctggagtgtagctttgattatattgctaaaagataacattgtwaagccttactagagcctcgtttttgtcattaaatttaattgcctctcatttactggtgtttttagcaagtccaggccacatgatttgaatttcagattttatttctcttctcattttcttgttagggaggtgggaataggataaggaaggtcagttaaaagttacgaaaataaataaatgaatcagaagtagaataagtaataacaaaattattttgttcaagtgatacactcaaattaaattgaatcaaaaawattttaaatgtaatgacagtcctttgacagagatttatgtttgcaggtaacagaagccaactcaagatattttaaggaaaaagaaaaaaaaacctagatgggctgggaagataaatttattatatggacaaagaaatttatcatagaatccaagggaagcaattccaggtctcccaaagagactgcaacaggaagttggaaagttgtagcattctcactacatttcctaagtctgattctctttggactttctttttattttcctctctcagtagatggcctttcctgtttgcatagaatgcagaacttggctaacccagagttctgaaggttagatttggaagtgtcaggagaagcccagactcatctaaaatttctgagagaagaatctcatcaacctagctggagccaaatgwaagccttactagagcctcgtttttgtcattaaatttaattgcctctcatttactggtgtttttagcaagtccaggccacatgatttgaatttcagattttatttctcttctcattttcttgttagggaggtgggaataggataaggaaggtcagttaaaagttacgaaaataaataaatgaatcagaagtagaataagtaataacaaaattattttgttcaagtgatacactcaaattaaattgaatcaaaaatattttaaatgtaatgacagtcctttgwcagagatttatgtttgcaggtaacagaagccaactcaagatattttaaggaaaaagaaaaaaaaacctagatgggctgggaagataaatttattatatggacaaagaaatttatcatagaatccaagggaagcaattccaggtctcccaaagagactgcaacaggaagttggaaagttgtagcattctcactacatttcctaagtctgattctctttggactttctttttattttcctctctcagtagatggcctttcctgtttgcatagaatgcagaacttggctaacccagagttctgaaggttagatttggaagtgtcaggagaagcccagactcatctaaaatttctgagagaagaatctcatcaacctagctggagccaaatg

SEQ ID NO: 276614 - DNA, 535 bp, Homo sapiens
tgggaataggataaggaaggtcagttaaaagttacgaaaataaataaatgaatcagaagtagaataagtaataacaaaattattttgttcaagtgatacactcaaattaaattgaatcaaaaatattttaaatgtaatgacagtcctttgacagagatttatgtttgcaggtaacagaagccaactcaagatattttaaggaaaaagaaaaaaaaacctagatgggctgggaagataaatttattatatggacaaagraatttatcatagaatccaagggaagcaattccaggtctcccaaagagactgcaacaggaagttggaaagttgtagcattctcactacatttcctaagtctgattctctttggactttctttttattttcctctctcagtagatggcctttcctgtttgcatagaatgcagaacttggctaacccagagttctgaaggttagatttggaagtgtcaggagaagcccagactcatctaaaatttctgagagaagaatctcatcaacctagctggagcca

SEQ ID NO: 276615 - DNA, 567 bp, Homo sapiens
tactaagctctagaactacaagccttaccactgtagactgagtatgttgataaaagcttcctggagatgcctgagaaatatagcgcctcctggtgagctcttgacaacgatcaagtattttataatttcaggttgaggtttttcatgttagctcccttgatatcagctcttccaacaattacatacctccttgattcatatattaaatcttatatacctagaatacatgcgtcacctctgtgttcttgattgaccsatgtcagataaaaagattgttaaaatctattatcagatttgattctttttcctatgctatacaatgtacctgacctctggagtctgtgatcttaatcactctaaaattaagttcaaaggactctgttgttttattttcatctcaaacagtacttttacttgtttgatgtggagtttgattaactaacttagggtgaccaaagttttaattcttttttttgttattattattattttttttgagacagggtctttctctgtcacccaggctggagtgcagtggcgcaatctcagctcactgcaagctctgcc

SEQ ID NO: 276616 - DNA, 567 bp, Homo sapiens
tactaagctctagaactacaagccttaccactgtagactgagtatgttgataaaagcttcctggagatgcctgagaaatatagcgcctcctggtgagctcttgacaacgatcaagtattttataatttcaggttgaggtttttcatgttagctcccttgatatcagctcttccaacaattacatacctccttgattcatatattaaatcttatatacctagaatacatgcgtcacctctgtgttcttgattgaccgatgtcagataaaaagattgttaaaatctattatcagatttgattctttttcctatgctatacaatgtacctgacctctggagtctgtgatcttaatcactctaaaattaagttcaaaggactctgttgttttattttcatctcaaacagtacttttacttgtttgatgtggagtttgattaactaacttagggtgaccaaagttttaattcttttttttrttattattattattttttttgagacagggtctttctctgtcacccaggctggagtgcagtggcgcaatctcagctcactgcaagctctgcc

SEQ ID NO: 276617 - DNA, 583 bp, Homo sapiens
atcttttaaaccacaggaaaatgtttagtacattttctgaacatagctaaacaacacgtttttaccaaccactctagctcatcgcctggattttcttaagacagcagcttgaggagggagaaaacatgcaggaaaatgtaagatttctgtacccatcctctgaactaatcttcaaagtagaggaaacagcaaaaattcagagcaatgcgggatgattgcaggaggctgttactgctcagaaaaaaagttagcaaaactgagagtcctttaagaagagctagtgtcatccctctcaggctgtatacaagaagcaacaagaattttaaaagaaagcctatcttgctaaaaacttgccatcaatttccctggcaaaattacctaatcgtgatttttgttcagatctcagactgtcaagtctctcattctatgttttagctcataatctatgcggcagcccccacccgcaacacacacacatacacacacaaatctagaaatactagtgycctttgtgttaagactgataagcaagggagaattgggataattatttggagcaatattataccaattcagtcagtga

SEQ ID NO: 276618 - DNA, 499 bp, Homo sapiens
attatataatatatatacacacatacatatatatatgtatacacacatacctatatctatgtgtgtgtatagatacatatatatgagaaaagaaattctcttgggaccagaaatggagatgcagctctaaaagaaagaagccaaccagaggtacagctctaaacaaaagtaacctccatggatctgaagctgactctgcactaaagcagtgaggagatcttttctttaaaaagaagaataatgaagacataaagcacttgagaatcccaaaatatgtgaggaaattcaacaccagcacgttcccagctaaggtggaacaaggtgacacttcgacttcttgtttcaattctcataccgtgaacaactgtcatggtctatatagtgccatgtttttcacacttytgtactttttgttggtgattcccttgcctaaaatggcccttaagcataatgctgaagtgttggctagcattcctaagaacaagaggactgtgatgtg

SEQ ID NO: 276619 - DNA, 622 bp, Homo sapiens
tgaagattcaatgaaagatgtatgcagaaacaattttctacaaaaaaaaagcagttttgatctgtaatcatgagtacaacaataataagctatgatagtccatcctttaaaggtaaaaaagaatactcctgagatccacatgtgctcatatcattttcatttctaaccaaattacagaatacttaaaaaagaataaaaggtgacttttacctgagagagttcagtaacaaagcaaattatratatgtaaacttcagagtcattttaagtataatgagcagaatagacaaaaagaagatatgtggttggttgttacactatggggcaaaaatgttcttgagcaaaatgtcacagagatacagaatctcactaattagaatgaattagtattggtaaggctcccatcaaatagatttaagactggctgacatgtaatcaacgaagagtaatgataaatgatggtgtgctgagttggggtgatgtgattaatagaatctacagaagtccaggctgccttttatttggcttaatactttcctgagtgaattcaagaagaagttttttcaatcacatcaatttaaatgaagaagaaatagtggagatgatggacgttttaaacccaa

SEQ ID NO: 276620 - DNA, 622 bp, Homo sapiens
tgaagattcaatgaaagatgtatgcagaaacaattttctacaaaaaaaaagcagttttgatctgtaatcatgagtacaacaataataagctatgatagtccatcctttaaaggtaaaaaagaatactcctgagatccacatgtgctcatatcattttcatttctaaccaaattacagaatacttaaaaaagaataaaaggtgacttttacctgagagagttcagtaacaaagcaaattataatatgtaaacttcagagtcattttaagtataatgagcagaatagacaaaaagaagatatgtggttggttgttacactatggggcaaaaatgttcttgagcaaaatgtcacagagatacagaatctcactaattagaatgaattagtattggtaaggctcccatcaaatagatttaagactggctgacatgtaatcaacraagagtaatgataaatgatggtgtgctgagttggggtgatgtgattaatagaatctacagaagtccaggctgccttttatttggcttaatactttcctgagtgaattcaagaagaagttttttcaatcacatcaatttaaatgaagaagaaatagtggagatgatggacgttttaaacccaa

SEQ ID NO: 276621 - DNA, 538 bp, Homo sapiens
cttgtttgacgatgtttggttcctaccctctctggttgatgaaatgccagtgtgagatggatggccaattgaattagagcacaaattccactccagttacttggcagagtgtccagtattggtccaccacaataccaccacgcatctgctcaaggatrgctaagtgcagactgatgggtaagctcttggaagggcataagctcattgcatcccgttaaggctcccaggaaagccaagttctctccctgtcatgagagacacgaagtaaaattggcattgggagatggacgctgaatggcccttgggggccgacccacagggtgtttaacttcagggaacagcagagaaagagcttggcatgatttgttgccccaggctgaggagtttgggaaaagagctgccatacagctcatgcccagtcggctggaagacaatccaagtggaaaggggacaatctgggcctatggtctaccatgtgcacaagcataacattcacttttgtttaaagtgtgaacggaatatttaatccattccagcc

SEQ ID NO: 276622 - DNA, 1137 bp, Homo sapiens
tattaatattttaattgttttgaatttttgacttcccaaggtgaatagaaggtctctgatatgggggaaacaactgtaggatggtactgagaaaatctgtggcttaaacaatcaaagtaaggttttctagaatgtttggaactaaagaatactaaaatccagttcctttccagttccttaaaagcacagagacttttgccacctaagagttttcccacaagctgcctcctctccttagagtacctgccccatccggagccacacccaattatttaactgcctaatttccacttattctttttttttttttcttttgagacggagtcttgctctgtcgccaggctggagcgcagtagcacgatgtcagctcaccacaacctctgcctcccaggttcaagcaattcccctgcttcagcctcccgagtaactgggactacaggcgtgtgccaccatgcccagctaattttttgtattttagtagagttggggtttgaccatgttggccaggatggtcacsacctcctgacctctgcctgcctcagctttccaaagtgctgggattacaggtgtgagccactgcacccattcawtcacctgcccaaagggtgggtgtggggttctgcaagtaccttccctaacatacagataagcatcttttgagatttaaatgccctcttggaacgatgatgtgctcttttgtcttttatgtggagagagctgtgccaatttaataagaataagacctctccwaatgcattaagaccaaaatctggcattattaacagataggtaaatgatgtatctgttggagatttcacttttaaccccacccatggacaagttatgagcaaggacattttgtgcccagaacttgaatcagttctggtctgactggtgggctccatttccaccagttgattcctttaatcaactccacgggtagattcccacctggataggccccaaattatgtgctctcttttctgaggagagatgcttttctcctttcaaatttgaggtcagtcagtctgctacacagtccgactagacctcatgactgtttcctccttaaacatctccaggtctgagtttttctggcaaatacttaaacaaggatacagtgggttttagacatgg

SEQ ID NO: 276623 - DNA, 588 bp, Homo sapiens
tatttttacttcataaacttttatatttcattttaactctgttttgtaataacacttagattaaaagacaaacacattatataaaaatattttctttatattcttattctataagcttttcatacttttattatttctttatttatttttgagacagggcctcgctctgtcatccagactgcagtgcagtggtgccatcatggctcatcacagagtcaaacaccygagctcaagcaatcctcccacctcagcctcctgagtagctgaggctacaggcacacgtaccaccatgccaggctaattttttttcttttgtagagacaaaatctatgttaaacaggctaaggttttccaattttttttttgttaaaaactaaaacatagacacaaacattagcctggatatacagagcgttgagaagatcattagtaatgtgttgcactacagctatgatatcccaaggggagagaaatttttcagctgcattataatcttatgggaccattgttgtatatgtcatctgttattgaccaaaatgtcattatgcacccatgactgcatctggtaaacttcagtaaaggttggcc

SEQ ID NO: 276624 - DNA, 588 bp, Homo sapiens
tatttttacttcataaacttttatatttcattttaactctgttttgtaataacacttagattaaaagacaaacacattatataaaaatattttctttatattcttattctataagcttttcatacttttattatttctttatttatttttgagacagggcctcgctctgtcatccagactgcagtgcagtggtgccatcatggctcatcacagagtcaaacacccgagctcaagcaatcctcccacctcagcctcctgagtagctgaggctacaggcacacgtaccaccatgccaggctaattttttttcttttgtagagacaaaatctatgttaaacaggctaaggttttccaattttttttttgttaaaaactaaaacatagacacaaacattagcctggatatacagagcrttgagaagatcattagtaatgtgttgcactacagctatgatatcccaaggggagagaaatttttcagctgcattataatcttatgggaccattgttgtatatgtcatctgttattgaccaaaatgtcattatgcacccatgactgcatctggtaaacttcagtaaaggttggcc

SEQ ID NO: 276625 - DNA, 615 bp, Homo sapiens
tggcattataatcatctctggatgattcatcttggtctatgtattttgttttaaactagattcaaaaatttaattcagcaaactcttaaatgcctactaaacacccctctgcctgaccaagctgctaaaaaaataaatagaatcttttctgatcatcagtgtttccggcatccttaatttgcagagttgagaaagaagccactgaacaaaatgcagacaagggaaatttgtagytcataattctaaatgtataagcctggatataggagcctgattcttaaaccagatgggatgaactgccataaacctacttaaatagatgtttttatttcagagaaagcagatgacatggcctgattccccaggtgaatctataggtggtttctatggctgtagcctcagaacaggctatggccaccccctttcccctaggaaggaccatcatacagagctatacttctccagggaacctcaggacagtctctgacagctccaataccttgcacagacagtctgtgccatttttgacatactaagtgtgtagccgggaatctttgctcggttcttcatgaacaaataagtggttacccgccctcaggggagaatcagattaag

SEQ ID NO: 276626 - DNA, 546 bp, Homo sapiens
aattaagagagaatagtaattacckccatccccaccccacccccatccattcttcattctttcttttagttagagaatcctctaaaattcatctgggcatagcatttagcgaaaggtgatatttctcagcctcccatttggttaggtatagccatgtgataaagcccttgcaagtaagatgtcagcaaaagtaatgcatacaacttccaggccacactctttttttttttttttgagatggagtttctctcttgttaccgaggctggagtgcaatggtgcgatctcggctcactgcaacctctgcctcccaggttcaagcaattctcctgcctcagcctcccgagtagctggcattacaggcactcaccaccacatctggctaagtttttgtatttttagtagaggcagggtttcaccatgttagccaagctggtctcgaagtcctgacctcaggtgatccacccatcttggcctcccaaagtgctgggattacaggcatgatactcttaaaagcaagctgctcacttcctctttttcccttccag

SEQ ID NO: 276627 - DNA, 482 bp, Homo sapiens
aaacatttgcttcatgaagaccatgctgtatgtccctttccaaactttggcctccccagtagacaagaattctcaagattgaacaccaagaaacagatgctggatgcttggtctccctgcccttcacccacatctggagtctcactttccaaggagtacttcctgctttggatgttagtgttagaataactcagtacagcaaggcaaaattctgtggcttgaacccttggtrtttatagtttgcaatctggccacagtctctcatcttgccgtggtaatttgttcttgagcaacataaagttggatgatacagcattactctcattgtcaaaactgatccaacattgggaaaaagaacctaatcaatttacaggagtccacaaaaaaagtgagcatagaattaaagctgaagattgtgctataataataaaattgtttcaccacaacaaacaggtataatttgcaactaaaaaatgtcagaa

SEQ ID NO: 276628 - DNA, 501 bp, Homo sapiens
tgtctcagtataaaacccgattgtacatttgttcrattctgagataggagaaaaaccgccctatggtgggaggcgagacatgtttgcagtaatgctgccttgttattctttactccgctgagatgtttgggtggagagaaacataaatctggcccacatgcacatctaggcatagtatcttcccttgaacttaagtatgacatagattattttgctcacatgttttttgctgaccttctccttattatcaccctgctctctacattcctttttgctgaaataatgaaaataataatcaataaaaactgagggaactcagaggtcggtgccggtgcaggtccttggtgtgctggagcaccggtcccctggacccactgttgcttctctatactttgtctctgtgtcttatttcttttctcagtctctcatcccacccaactagaaatacccgcaggtgtggaggggcagggccaccccttcacaacataatgaggtatcaca

SEQ ID NO: 276629 - DNA, 501 bp, Homo sapiens
tgtctcagtataaaacccgattgtacatttgttcgattctgagataggagaaaaaccgccctatggtgggaggcgagacatgtttgcagtaatgctgccttgttattctttactccgctgagatgtttgggtggagagaaacataaatctggcccacatgcacatctaggcatagtatmttcccttgaacttaagtatgacatagattattttgctcacatgttttttgctgaccttctccttattatcaccctgctctctacattcctttttgctgaaataatgaaaataataatcaataaaaactgagggaactcagaggtcggtgccggtgcaggtccttggtgtgctggagcaccggtcccctggacccactgttgcttctctatactttgtctctgtgtcttatttcttttctcagtctctcatcccacccaactagaaatacccgcaggtgtggaggggcagggccaccccttcacaacataatgaggtatcaca

SEQ ID NO: 276630 - DNA, 572 bp, Homo sapiens
tcctataatctctaacagctttgataaataatgggcatacagtagactgcatatacttaaagcacataatgtgataagctgtaacatcaaatatataagtatgtactttcaaacccattatttcaattaaggtggtaaatctccaccaaaagttttatcatgccccattttaatttctctcacccacccttttcattctccatcccgaagcaatcactgatctgcttctctcactatgttaagttttctagaacagtatataaatgaaatcatacaacatgtaattttgtttgtcatatatctttcattccacacaattattttgagattcatccatgttgtagtgtgtattcrtatttcattcctttttattgttgagtagtatttcattttaaggatatactataattttgtaaaaccagttacctgttgatgggcatttgtgctgtttccagattttcactaaaattactatgaatattcaagtacaatattttatatgcacatatattttatagctttgggtaagacaaagattttttacatataaaactaaaaacaatctacagaag

SEQ ID NO: 276631 - DNA, 566 bp, Homo sapiens
acaagaggaaggttggaagaaggctgattattcaaagagaagaaacttgagtaggattcctctagatcacaagtctgcaaatgttttctgtaataggtagcatagtaaatattttaagttttgtgggccatacagtctctgtggtaactactcagctttgacattgtaatgtgaaatcagtcatagacaagatgtaatggatgcatatggctgtgttccaataaaactttatttcaaaaacagaaggctagaattccctcatgtactagtttgccaatactgctctagaaaaattaatcttataaaaaatcatctattttcatttttactggttaacttaaagacaggaaaatatttctcatgttcaggcagatgtggactctggtttcagactactttagttcaacccccaactctgccatttgtcagctgtgtcgaaagttacttaatctctccgaraaatgaggttcagtatggtgctgaccttaaagggttgctgtggaaattatgagattatatctctaaagcacttaaaataatatctggtgtgtagaaagagctatagt

SEQ ID NO: 276632 - DNA, 592 bp, Homo sapiens
actgtccatgtagtcaagtattcaatttagtacatttttagagcttccaaaaagatttaaaatgggagaaaaaaggggcaactgaagatgtaaaaaaaatctaatccaacaacccattttataggtaaaactaagacccagtatgtgcccaatgacacaaagccaggtggagagagccaggattgggagcctagtcccctaacaaccaaatcctctcattctcatttcaatttactttctctgccaatactgaatctctctagackctcctgaatgttaacttttagttttccagataagcaatactacttactcccgtatttcaagtaagggttttacccatgtcaattcagtcaaactggtttgctatcttctactcagcaatctatgattactccttaatagcttatagtcatagaaatacagtgatgctctattcaagtggatctgtacatgattgtacatgatgctggacatctaagttatcacaaagaacttggagctcatggcagaaccatcatccaggtgaccttagcaaggtatttacactctaaaataaacacaaagacactgacacattcttaatagaaac

SEQ ID NO: 276633 - DNA, 359 bp, Homo sapiens
actatcatataacccaacaatcctcattctgggtatatactcaaaggaaatgaaattaccaactcttaaagacacctgcactctcatgcttatgtttattgcatcattatttacaattgccaagatataggtacaacctaagtatcctttaatggataaattaataaagaaattgtggtatatataaacaatgaatacgattcagccttaaaaatgaaacagatattgctatttgtgataacatagatgaacctagggaatattatgctaagtgaaataagccaggcagagaaagaaaaatactgcgtgatctcrtttatatgtggaatctgaaaaacaaacaaaagcaatctcaaata

SEQ ID NO: 276634 - DNA, 565 bp, Homo sapiens
tctttttatactgcatatcccttaaaaattatggtagcttttatgaatttcaatagctttgaattttaaccttcatatgaaagatataagtgatgtacaaaccaccattacggtattagaatatctgaatttcatgtatacttttaccagtgagttttatactttcagatgtctttgtgttactcattagtgttcttttcttttagcttgaagaactttgtcatttcttgtaagacagatctggtggtgatgaactttctcagcttttgtgcatctgggaaagtccgtcttcacctctgaaggacagttttgctggctatagtattcttggttgacagttttattttttctcttmagtacttttaatgtatcatccccactctctccttgtcttatggtttctgctaggaaatctgctgctagccatgttggaacttctgtatgtgttatttgcttattttcttttgctttcgggatcttctctttatctttgatttttgacagtttgattatattatgttttggaatactcttgtttggattatataatatatgaatgcagagc

SEQ ID NO: 276635 - DNA, 1092 bp, Homo sapiens
tctttttatactgcatatcccttaaaaattatggtagcttttatgaatttcaatagctttgaattttaaccttcatatgaaagatataagtgatgtacaaaccaccattacggtattagaatatctgaatttcatgtatacttttaccagtgagttttatactttcagatgtctttgtgttactcattagtgttcttttcttttagcttgaagaactttgtcatttcttgtaagacagatctggtggtgatgaactttctcagcttttgtgcatctgggaaagtccgtcttcacctctgaaggacagttttgctggctatagtattcttggttgacagttttattttttctcttcagtacttttaatgtatcatccccactctctccttgtcttatggtttctgctaggaaatctgctgctagccatgttggaacttctgtatgtgttatttgcttattttcttttgctttcgggatcttctctttatctttgatttttkacagtttgattatattatgttttggaatactcttgtttggattatataatatatgaatgcagagcwttttaagcttgctctattctgctattaatgcctctatcgcatttttcattttgctcattgtatttttcaacaccagggtttctgtttgatataaaaacatttaatctctttttwaaatttctttcttgtcactttttatttttctcatttcattaaattgtttatctgtattttcttgaagttcactgagattccttaaaacagttattttgaatcttcatccggcagttcatctatcttcatttcattagcatcagtcactggcactttattttgtctctttggtaatgtcatgtttttctgactgttcttgatccttgtggacatgtgtcaatgtctgtgcatttgaaaaagtagatacctattctagtcttctagactggccttgtctgaattagcccttcaacagtcagctccttcagagattcttggcaggcagtctggcagagtcctgaagccttgggtcactgaggctggcacagttctgggacaggctagaagcctgggggctgctgggactggcttg

SEQ ID NO: 276636 - DNA, 570 bp, Homo sapiens
acactataattcatactgtattattaggaaattggaataaaagtagaattaaatgttcagttataagtatatttttcctttgtagaakaaaccttggtgaattttctttaactctttattattaaataatttagtattttgaagtggctaatgaatggatgaatgagaacctataatatggtgtgctggctggtccctttggaaaattttgtagccatataagctgtggtctttgccaccacaaacttgtactgcgactgagaaaatgaggcaagtgtatatatggaatgccagtatgcaatatagtttttttcagactataagtcatatattatcagaggataagaagatcaataagaaagttatcaagaaaggcttcttggagcaagtaaaatttctctctattataatcatctctccatatataacaggcaaaaattttctgactgggtgaccttaaacacttcaactttcacatgtataaaaggggatcacccacaggctgttctctgttacatgaagctagttgcctttgcttataggcctccagagctagactgtggtggaaga

SEQ ID NO: 276637 - DNA, 267 bp, Homo sapiens
ttgtagtttttgttttaattattgttttcatttaytcttaaaacatcatttgttatggactgacttgtgtcccttgccctcccccaaattcttatgttgaaaccctaactcccagtgtgattatattgtgagatagggcctttagtaaggtaaggaaggttaaatgagctcattaggatggggccctaattccataagactagtgtccttataagaatacgaggagacatcagaaatgcctctctctgcacatgtacaaaggaaagg

SEQ ID NO: 276638 - DNA, 708 bp, Homo sapiens
ttgtagtttttgttttaattattgttttcatttactcttaaaacatcatttgttatggactgacttgtgtcccttgccctcccccaaattcttatgttgaaaccctaactcccagtgtgattatattgtgagatagggcctttagtaaggtaaggaaggttaaatgagctcattaggatggggccctaattccataagactagtgtccttataagaakacgaggagacatcagaaatgcctctctctgcacatgtacaaaggaaaggwccaggccaggcaacattcacwgcaagctgacttaagaggtctggcagttctcctcatagcctgggctaccgggtgagtctcctctgcctttggaaaggggagcaaagtaggggaaggactgcatctggtggtttgagccaggtcatctgcaatacaacagaacaggaggtagacttcaaaggttttgactctagtccctgactctaggatggcacttctggacccatctgggacatgtgggaccttgctgccctgaggggaaagacacaggcctgaatggctatgccacctgtttattgtggagcactaaggccttgagtgaggtaggcagtagccagagagtggttacagaaggcgttcatgagacccagtgctgtgctggttttaggtctgacccagcacagtcatagttgtgttggccacaggggtgcttgtgacac

SEQ ID NO: 276639 - DNA, 614 bp, Homo sapiens
ccaaagaaaataaaatcagtatgtcaaagagatatctacactcccttgttcagtgcagcattattcataacagtcaacatacagaatcaatctaagtgtccatcagtggataaatggataaaaaaatgtgaaatatatatacacaatggaatactattcatccattaaaaagaagatgatcttgttatctgttacaacatggatgaatctggagaacattatgtcaagtgaaataactcagccacagtaaggcaaattgcacatgatctcagatatatgtggaatctaaaaaagttgaacttataaaagtagagagtagaactggtggttaccaggcactggcatagttggggatggataattgtagagatattggtcaaaggttacaaaatttcacacagaaggaataagtacaagagatctattgcatccagtctattggaggactagagttaataacaataygttgcattctcgaaaaatgctgagtgaatattaaatagtctccccacaaaaatgataattatgtgagataatgctatgttaattagctagatttagccattccacggtgtatatatacttcaaaacatcatgttgtacatgataaacac

SEQ ID NO: 276640 - DNA, 612 bp, Homo sapiens
ggatggataattgtagagatattggtcaaaggttacaaaatttcacacagaaggaataagtacaagagatctattgcatccagtctattggaggactagagttaataacaatacgttgcattctcgaaaaatgctgagtgaatattaaatagtctccccacaaaaatgataattatgtgagataatgctatgttaattagctagatttagccattccacggtgtatatatacttcaaaacatcatgttgtacatgataaacacatacaattttatctgtcaatttataataaaataaaataagccattaaaaaattacatacatgcaaaagaatatttgagattggttatctatggaaggaatatgagggtaccaagaatgggaggttttggtgtacactaaagttgtatttattaacctgggtgctggtttcgtgggtgtgatcatgtcataataatttrctgacctatactcttgtgatatatgcattattctgtgtgtacattataattcaaaaataaagttggttttaagaaagatatacatagcatcttttaaagatataaaacatacagaaaaatctttaaagatttctttaaactctgataaatg

SEQ ID NO: 276641 - DNA, 612 bp, Homo sapiens
ggatggataattgtagagatattggtcaaaggttacaaaatttcacacagaaggaataagtacaagagatctattgcatccagtctattggaggactagagttaataacaatacgttgcattctcgaaaaatgctgagtgaatattaaatagtctccccacaaaaatgataattatgtgagataatgctatgttaattagctagatttagccattccacggtgtatatatacttcaaaacatcatgttgtacatgataaacacatacaattttatctgtcaatttataataaaataaaataagccattaaaaaattacatacatgcaaaagaatatttgagattggttatctatggaaggaatatgagggtaccaagaatgggaggttttggtgtacactaaagttgtatttattaacctgggtgctggtttcgtgggtgtgatcatgtcataataatttactgacctatactcttgtgatatatgcattattctgtgtgtacattataattcaaaaataaagttggttttaagaaagatatacatascatcttttaaagatataaaacatacagaaaaatctttaaagatttctttaaactctgataaatg

SEQ ID NO: 276642 - DNA, 221 bp, Homo sapiens
gtctgaaattggaacttatgtttaaaagggaagaagagcataacaatttggaaaamttgcagcctgaccatgtggtagaaaagaaaaactgattttctgcggagaaattcaagctgctggctgaagaaatttgcatacgtaaaaaggacctgaatgttaatagccaagacaatgaggaaaatgtctccagggcatttcagagaccgtcagagcagtccctc

SEQ ID NO: 276643 - DNA, 221 bp, Homo sapiens
gtctgaaattggaacttatgtttaaaagggaagaagagcataacaatttggaaaaattgcagcctgaccatgtggtagaaaagaaaaactgattttctgsggagaaattcaagctgctggctgaagaaatttgcatacgtaaaaaggacctgaatgttaatagccaagacaatgaggaaaatgtctccagggcatttcagagaccgtcagagcagtccctc

SEQ ID NO: 276644 - DNA, 605 bp, Homo sapiens
gaacttacctcaacataatgaaagccatattcaacagaccaaatggggaaaaactgaaagcctttcctgtagtatctggaacacgagaaggatgcccactgtcaccactgttattcaacatcgtactggaagtcctcgctagagccatcaggcatgataatgttataaagggaatccaaattggaaatgaagaagtaaarttatccttgtttgtagatgatatgatcttgtattttgataaacctaaagattccacaagaaaactattagaactaatgaacaaaatcattaaagttgtagaatacaaaatcaacatacaaaaattagtggcatttctacattccacagtgaacaatgtctctacaatacaaactataaaaaagtaatcccatttacaatagccaacatacaattaaatacctaggaattaacaactaaataagtgaaagatctctccaatacaaactctgaaagaaattgaagaggacaccaaacacaaaaacaaaaccaaaaaacaaattccatggtcatggattggaagaatcaatgtagttgaagcatccatactacccaaaacaatttacagattcaatacagtccctatt

SEQ ID NO: 276645 - DNA, 568 bp, Homo sapiens
catgatgtgcttattccacattgcttgcctgtatcaaataatctcatgtatcccataaatatacacacttactatgtacccataaaaataaaaataaaaaaataaaattatagcactttaaaatatacattataagcagcctratcaaggtggaaatgtggtaaatgcaatgtaattaatttgcatcttatataattaattcaaaataaatcaatatgatttttttatacatatattatacaatattttgtgaaaattgttatttataaaataagacatatgataaaaggcattgtattagttttttatattacaaactagaagccttttaagagagaaatgtattgtcttcagttctgtaggctgaaagtctgaaatcaagatgccagcaggactgattccttctgagtgctatgagggagaatctgttccagggcttgcccctagcttccggtagccttaggcattacatagctgtagatggacttttccctgtgctttcgcatcatctttcctctatatgtgtttgtatatgtgtccacattttaccttttttataaggacacag

SEQ ID NO: 276646 - DNA, 568 bp, Homo sapiens
catgatgtgcttattccacattgcttgcctgtatcaaataatctcatgtatcccataaatatacacacttactatgtacccataaaaataaaaataaaaaaataaaattatagcactttaaaatatacattataagcagcctaatcaaggtggaaatgtggtaaatgcaatgtaattaatttgcatcttatataattaattcaaaataaatcaatatgatttttttatacatatattatacaatattttgtgaaaattgttatttataaaataagacatatgataaaaggcattgtattagttttttatattacaaactagaagccttttaagagagaaatgtattgtcttcagttctgtaggctgaaagtctgaaatcaagatgccagcaggactgattccttctgagtgctatgaggragaatctgttccagggcttgcccctagcttccggtagccttaggcattacatagctgtagatggacttttccctgtgctttcgcatcatctttcctctatatgtgtttgtatatgtgtccacattttaccttttttataaggacacag

SEQ ID NO: 276647 - DNA, 568 bp, Homo sapiens
catgatgtgcttattccacattgcttgcctgtatcaaataatctcatgtatcccataaatatacacacttactatgtacccataaaaataaaaataaaaaaataaaattatagcactttaaaatatacattataagcagcctaatcaaggtggaaatgtggtaaatgcaatgtaattaatttgcatcttatataattaattcaaaataaatcaatatgatttttttatacatatattatacaatattttgtgaaaattgttatttataaaataagacatatgataaaaggcattgtattagttttttatattacaaactagaagccttttaagagagaaatgtattgtcttcagttctgtaggctgaaagtctgaaatcaagatgccagcaggactgattccttctgagtgctatgagggagaatctgttccagggcttgcccctagcttccrgtagccttaggcattacatagctgtagatggacttttccctgtgctttcgcatcatctttcctctatatgtgtttgtatatgtgtccacattttaccttttttataaggacacag

SEQ ID NO: 276648 - DNA, 491 bp, Homo sapiens
tgctattgtgaataaataagcacagtttttaattgttgccttatacagttgccttttaaaacatgggataagaaaagtgttacaaacataataaatatgtttatattgtctttttttaaaattatactttaagttttgggatacatgtgcagaatgtgaaggtttgttacataggtatacatggagygaaaatatttctaaacaatgtatctgatgaaaagttaatattcaaaaaatgtaaggaactccagctcaatttcaaaaacaaaaaacaaacaaaaaacaaaaagaccccacaacccaacaaataccttgattaaaaatgggccaaatacgtgaataagtaattctctaatagagacatacaaatggccaaaaggtttatgaaaggtgctcaacatcactaatcataaggaaatgcaaatcaaaactgcaatgagatgtcactttgcacctgctaggatggttattgtaaacaaccactacaaaaa

SEQ ID NO: 276649 - DNA, 552 bp, Homo sapiens
attttttttcttctctcatgcagtacccatttaaatatttaaagacagctttcatgtttccactaaatgttctcttcctccccactcacatgaaacatctagttttttttatttcttcctcctaaacctttttagcattctggttacattcctgctttaccccagttggaaatggctgttttaaaatgtggtaaccatgctattgaggtaagctctaatctaacgggggatgcagtcgagtgcttaccttgtttgrattcaggcggtatgtgtcatcagtgtatgttacagggtcaatttgtggctccattggcttatgttaaactttcagttaagagaacattttaggagatttgagcccagtatgaaattcatgtgacctgttctcgagacatcttgcacacctgagcagttgcctttcagcatcctgtagattgcttatcccaggcaaatcctaacggcgctacttttgagtccctctctttagctcgagagctccttgaactgtgattcttttatccagcattccttcttccttcccaacttctgatt

SEQ ID NO: 276650 - DNA, 590 bp, Homo sapiens
ttcttcttttatccaacaccttggtagctttctccagtttcattgccatcgtttacctctgttctttcatttcctgatctgagtacttggtctgagacatttccatttttctaccgtcctacctctctacttgcatgacttcaaatgccatctacttgctgatgaggacaaaattggtatctctgacctaggtgtctcttctaggctgtggacctgtgtctctgacagctggttttactaagatcttgggcgtttctcagcatctgggatttaacatgagcccttagtgtgtgctcccagctgctttccctcaagattttccctgttgcagtaaatagtgtcctttattttttatttttaaatttatttttatttttaggatttgtgagtacataataggtatatatatttatggggttatattagatattttgatagaggcgtgcaatgtataatagtcacatcatggaaaatagggtatccatccgttcaagcatttatcstttgtgttacaatctaactatactcttttagttattttaagatgtacaattaaattattttgagtatggtcactctgttgtgttatc

SEQ ID NO: 276651 - DNA, 496 bp, Homo sapiens
tatacaaatgcttttagcagctttatgtgcaacagccgaaagttacaagcaagttaaatatcctgcaacagatgaactgattttttaaaatgctggtgtatctataaaatggtccattagttagcagtgagatggaatgaactgttggtatgtgctacaacatagaagaatctattctaagtgaaataatacagacttcaagtatatactatataattctatttatataaaattacaggaattgcaaagtaacattttagtggatgaggctacttccgtagggtgtgagagagatttcaaatggtaggaggaaactttggggggtaataatgcacagggtcactatcttgattatggtgatagtttcagaggtatacatatatcaaacttaccgaaacktacactataaatatatgcagcttattgtatgtcaactgtgtttcaataaagctgtctttaaacaacaaataaaaataggtcaagcatggtagctcac

SEQ ID NO: 276652 - DNA, 496 bp, Homo sapiens
tatacaaatgcttttagcagctttatgtgcaacagccgaaagttacaagcaagttaaatatcctgcaacagatgaactgattttttaaaatgctggtgtatctataaaatggtccattagttagcagtgagatggaatgaactgttggtatgtgctacaacatagaagaatctattctaagtgaaataatacagacttcaagtatatactatataattctatttatataaaattacaggaattgcaaagtaacattttagtggatgaggctacttccgtagggtgtgagagagatttcaaatggtaggaggaaactttggggggtaataatgcacagggtcactatcttgattatggtgatagtttcagaggtatacatatatcaaacttaccgaaacttacactataaatatatgcagcttattgtatgtcaactrtgtttcaataaagctgtctttaaacaacaaataaaaataggtcaagcatggtagctcac

SEQ ID NO: 276653 - DNA, 563 bp, Homo sapiens
gaagccacgcaaatcatagaggcctgactgccacttccctgtgagaagcaagcacaggaagatagtcaaccagggggtgcattcttttttcatttcttaataagaggtaatagacaatctatgctgatgcaaatactaatctacttctgtgggtcaattgtctctgctcarcaaaaaactcctgtataaagtataggaatggaatgacaagtattctctacattattatgaaatattaagctgtgaagtcaatgaacatacacaaataacacatggaaaaatgattagaaaagaggcatacccatcaacatactcagaagtctctggacctttgaactcacccccacaactctgtacaatccttggtcatttatacctatgggaagaaacaaactattagcaaaatagaagactatcatattttaaaagccatcaaacagttgcattcaaaatctttgctaactaacattagcagcattcctgttaactataaaaataacctttgaaaaaatcaagtgtttaacaacttgttttactagctttttatctgtaagttgtggtta

SEQ ID NO: 276654 - DNA, 563 bp, Homo sapiens
gaagccacgcaaatcatagaggcctgactgccacttccctgtgagaagcaagcacaggaagatagtcaaccagggggtgcattcttttttcatttcttaataagaggtaatagacaatctatgctgatgcaaatactaatctacttctgtgggtcaattgtctctgctcaacaraaaactcctgtataaagtataggaatggaatgacaagtattctctacattattatgaaatattaagctgtgaagtcaatgaacatacacaaataacacatggaaaaatgattagaaaagaggcatacccatcaacatactcagaagtctctggacctttgaactcacccccacaactctgtacaatccttggtcatttatacctatgggaagaaacaaactattagcaaaatagaagactatcatattttaaaagccatcaaacagttgcattcaaaatctttgctaactaacattagcagcattcctgttaactataaaaataacctttgaaaaaatcaagtgtttaacaacttgttttactagctttttatctgtaagttgtggtta

SEQ ID NO: 276655 - DNA, 563 bp, Homo sapiens
gaagccacgcaaatcatagaggcctgactgccacttccctgtgagaagcaagcacaggaagatagtcaaccagggggtgcattcttttttcatttcttaataagaggtaatagacaatctatgctgatgcaaatactaatctacttctgtgggtcaattgtctctgctcaacaaaaaactcctgtakaaagtataggaatggaatgacaagtattctctacattattatgaaatattaagctgtgaagtcaatgaacatacacaaataacacatggaaaaatgattagaaaagaggcatacccatcaacatactcagaagtctctggacctttgaactcacccccacaactctgtacaatccttggtcatttatacctatgggaagaaacaaactattagcaaaatagaagactatcatattttaaaagccatcaaacagttgcattcaaaatctttgctaactaacattagcagcattcctgttaactataaaaataacctttgaaaaaatcaagtgtttaacaacttgttttactagctttttatctgtaagttgtggtta

SEQ ID NO: 276656 - DNA, 1166 bp, Homo sapiens
gaagccacgcaaatcatagaggcctgactgccacttccctgtgagaagcaagcacaggaagatagtcaaccagggggtgcattcttttttcatttcttaataagaggtaatagacaatctatgctgatgcaaatactaatctacttctgtgggtcaattgtctctgctcaacaaaaaactcctgtataaagtakaggaatggaatgacaagtattctctacattattatgaaatattaagctgtgaagtcaatgaacatacacaaataacacatggaaaaatgattagaaaagaggcatacccatcaacatactcagaagtctctggacctttgaactcacccccacaactctgtacaatccttggtcatttatacctatgggaagaaacaaactattagcaaaatagaagactatcatattttaaaagccatcaaacagttgcattcaaaatctttgctaactaacattagcagcattcctgttaactataaaaataacctttgaaaaaatcaagtgtttaacaacttgttttactagctttttatctgtaagttgtggttawtcggggttcgccgtctcagaggaaggatgtgcccctattaatttaatgtgaccattcatttggaaacaaatagtttctcagagtttccttaaaacaaataagattactaattgtgaaaatgaatattcagtcctgatgtgcctggatttattatttcaattttgcatttgcatttctgcagacaccacaagactcttcaactccctcccacagaagacwgtcctctatttccacccacgctcacctcacacccattttgattaaaacagagacagagagaaactctagtttacttgctgtaaattttctgaggacagctgttctttattttcttcattgcccttggcaatttaaaattaatgcgcaattggtaaaatatgtttcaggttcactctggacatcttcctttccatacccctgaagattaatactgaaattatacattgtaatcttctaccagagcccatcttgagaaccccatacaattctaaagtgctctggaggcaaagcaatcttcaagcggtaaggttttccaaaaatctaaaactttgctttgcaaaggaagataaatttgcttttacatgcaacaaatgaaagattgt

SEQ ID NO: 276657 - DNA, 608 bp, Homo sapiens
tcattgctcgtgtgctctattagaaacttttttttttggtgaacagaagaaagaagttactataaagacttgaccttgagtaaaattaggcaacatgcttttatcatctctggaaaaaatgcatgattcatagatttatactttgtttttttcccagaaactctatgagaaactgattacatttctataactttaaaaactttttttggcttcagcagtttccccttctcataataaaatgtagggcagaacttgttacgtgctgggtttttttttttttttccttttcaacattcctcttaraaaagcaatagaatattcctgattgttaccattataagttttgatatctgcttctttgtttattcacttaagagctactctgtttacaataatgtctccttagacttgtgaatgtttctctctgcttttttcgttgtgtattttctgaatttataagctcagtaatctgtcacttaaaacacaagggtaaagcctgtcttctacatggtttgatagagctatagaacatgcagttgaaagagacttaatagatacagagtgaaatgtagaatacagataataggcagtttcttatgcttgggctg

SEQ ID NO: 276658 - DNA, 638 bp, Homo sapiens
agtagcaaaccaaggaaatgttatatactttacaaaagtgctttaatattaaaggacacatatattttgagatatttttattctacacaattttccagaaacaactcaaagaaaaaataattaactgatccttttaggtacttaaatatatactttaggataaagagccataaacacaccaagccaattaactacatcgcaattagatgtcaactaattaataattgtaaaaaactaattattttaagcctttctcttgtatttcagaatctttggaagtcaagtcyttcctttagctccctcatcttattcctgactttttatattgcaaactctaggaaaaatctaaaattatttgactatgaatactggtattaagtaaaacttaaaatggcaaaacattttaaattggacaggttgggaaccaaacatacccaccctgagtatgttatattaaaaagtcaaaaagcaacagatgctggcaagactatggaggaaagagaacacacatacactgttggtgggaatgtaaattagctcagccactgtggaaagcagtttgaagatttctcaaataactcaaaacacaactaccaatcaacccagcaatcctattactgaatatatatccaaaagac

SEQ ID NO: 276659 - DNA, 1190 bp, Homo sapiens
aaatcctgatatgtatttgaataatgtttaagttctctggaattgataattgataaagcattaaacaatataatatagaaacactttaatgagttaattgaaaagttgttcaattttccttattaactctttgctgaccaatgcgtcatgttagagagagagaaattcatctctcagattttttttaaagcaggcttaaacaaaaattgtttcgtrttttcttaaattcactgcatttttattttatcattcccttgtgcaggagaaggaatttttattttcatcagagacaaccagaaaattaatgtttcaactctccctgaaaatccttctaaaatgtaccctttcttctttagtctgtatgtatgggcaatgtgtcccaattgaagctgtctttttcagctaaagacttttccaagtctttaggagtgagttgagtatcagtgatccaggtaaggtactataaatacagaagaaacagtaaagtgtgttgatctttactcccaaggtagaggacacagggagaggtgggagtaaaagtcaatttaaagacaattaaatctactagaaaaactcttattgtgattacatttttttacaagaaaaaatatctgagataactgatctatgttgaatawaggagtataaaagtaagcatgaaatagtgaaaagactcaaaaagtctttatcatcctttgtttacttatgccaataagagcttgaaagctgtatttgcaaaggctaaaacacaaagcagataatctctcaatggataattgagtcgacactattaaagtctgggagttttaaaggcagcagatgtaatggctttcatttctagaatttaaaaactcaatgagaaaagaagaagtaaaaataaataaattgaaacagaagccaatatataacccactatagctatgcaaataattatttttccattttcttctgatctctttcacctttcttttccatattttaccccttcccctttcctactttctcttctataatgtcattaagcaaawacatagctttttccatcttctctacctatatgcagttcctaataattcctgaataatatcttaaatcacaatttatagcatatcaacaaatcttaatctagctcacatctcataaaagacacaaacatataaaagtgtgaccaagaaggaaaaagagaaagc

SEQ ID NO: 276660 - DNA, 616 bp, Homo sapiens
ttgtctctacaaaaaaatttaaaaatcagctgagcatggtagtgtgagcctgtagtcccagctacttgggaggctgaggcgggaagatcactgtgcccaggaggtggaggttgcaatgagctatgatcgcaccactgcacttcagcctgggtgacagagtgagaccctgtctcaaaaacaaaacaacaacaacaamaaaaaaaaaacaggacaggtaagaggacagagttcttatcttccactgtgggaagtcaatagatagcgtcaaaaaaaaaatcaagtagcagcaatataaacttatttggatttatgacaataaacaccaaaaaaaatcagctaaaatagttgaagttgtttgtctacaagaagcaggaaatgagataagggtaatagtagccactgtcgtcctccattacaagcctcataggcctatctgactggtactctttaaacaatgtgcttgtaaaacactgataaaatgtgtacaaaacactgataaaattaaatcaaaatttaaaaaatttcctaattataacattaatgcatgcttacataatttgcaaactgctcaaagaaactaagaattaagaaattttgccatccaggtaaattatta

SEQ ID NO: 276661 - DNA, 620 bp, Homo sapiens
aatactgactgtctgtatcataatttaaaatctgtatcacagcctaccaaaataatgacatggtctttgctacaacttctgagaaagtcatactactgctgtcagaatctttcagaacactaaagcttcaggtgctaaaacagcatayaggctaagcttttcaagttatactattagcttctgtttaaatgtttgcataaaatttcaacaaaaggaacacaaaaataatgcttcaagatttcaaagacatcactagtgtttatcaccttatagacgaaaagcaaggaagctgactagataaatatcaaggcacttcccccctctctgcctctaagcttctgaacaaaatttttgctctactttaaaaatgtcatcagttatgcatttttaggaatcacagtttggtttgacatcatacggaacagtagatatttaagcagaggaaaagcttgaatctctgtattgattttctaactgctaagattcattttactgttgaactgttacacacattttcctgattattccacataaaagtaaaactaggtctgtttaaagtatacacacatatatagcacatcaataacctggggttttctttttactatattgtttttata

SEQ ID NO: 276662 - DNA, 612 bp, Homo sapiens
cagcctaccaaaataatgacatggtctttgctacaacttctgagaaagtcatactactgctgtcagaatctttcagaacactaaagcttcaggtgctaaaacagcatacaggctaagcttttcaagttatactattagcttctgtttaaatgtttgcataaaatttcaacaaaaggaacacaaaaataatgcttcaagatttcaaagacatcactagtgtttatcaccttatagacgaaaagcaaggaagctgactagataaatatcaaggcacttcccccctctctgcctctaagcttctgaacaaaatttttgctctactttaaaaatgtcatcagttatgcatttttaggaatcacagtttggtttgacatcatacggaacagtagatatttaagcagaggaaaagcttgaatctctgtattgattttctaactgstaagattcattttactgttgaactgttacacacattttcctgattattccacataaaagtaaaactaggtctgtttaaagtatacacacatatatagcacatcaataacctggggttttctttttactatattgtttttataatcacagacatgcttgctaggtaatacaatc

SEQ ID NO: 276663 - DNA, 612 bp, Homo sapiens
cctcatcagtaaaacggaaagaatataacctgctatgcaaatttcttataagaattagagataatatatgtaaaataccttggcacattgtatgcctggcacataacagagctcaataaaatcctcatcatcctcatatacataggagacaaacaagcaccactgtaagaaaggtcaaattccagccaacctaggtgcctatcagtrgtggattagatgaagatggggtacatatacaccatggaatactacacagcctaaaaaagaatgaaatcatgtcttttacagcaagatggattaagctggaggccataataataaacaaattaacacaagaacagaaaaccaaatactgcacattctcacttagaagtgggagctacacattgagcacacatggacataaacacgggaacactagacactacagactactagaggtgagagggagggaggggaacatgaatggaaaaacaatctattggctgctatgcttactacctggtgacagtatctataccctaaatctcagcatcacataatatgcccatgtaacaaacctgcacaagtacctccttatctaaaataaaagttgaaattaaaaaaaaaaag

SEQ ID NO: 276664 - DNA, 612 bp, Homo sapiens
cctcatcagtaaaacggaaagaatataacctgctatgcaaatttcttataagaattagagataatatatgtaaaataccttggcacattgtatgcctggcacataacagagctcaataaaatcctcatcatcctcatatacataggagacaaacaagcaccactgtaagaaaggtcaaattccagccaacctaggtgcctatcagtggtggattagatgaagatggggtacatatacaccatggaatactacrcagcctaaaaaagaatgaaatcatgtcttttacagcaagatggattaagctggaggccataataataaacaaattaacacaagaacagaaaaccaaatactgcacattctcacttagaagtgggagctacacattgagcacacatggacataaacacgggaacactagacactacagactactagaggtgagagggagggaggggaacatgaatggaaaaacaatctattggctgctatgcttactacctggtgacagtatctataccctaaatctcagcatcacataatatgcccatgtaacaaacctgcacaagtacctccttatctaaaataaaagttgaaattaaaaaaaaaaag

SEQ ID NO: 276665 - DNA, 488 bp, Homo sapiens
aaatttcttaagagggtatatcttatgttaagtactcttaccacaaaagggaaaaaataaagcaaaaaggggagaacttttggaggtgacagataagtttatggcattggttgtgatgatggtttcatgggtgcatactaatttccaaacacatcaagtttacacattacatatgtacagctttttgtatgtcaatcatacctcagtaacgtggttaaaaataaattttagaatggctgaaaattacaactattcagtttatggatgtctctcaatatgtgcacatacaaaaaacaacagatgtctttcataagaaatgctaaatgcctgtgcatgtaacatggtaaatttaaattttatttcattaagttttttagtttcccatctcagaagagtgattagaactmactgaaaggtgaaatttaatctgttttaaagtaactttcctgaatgtgaaataattaataattgcagatatttggaaaata

SEQ ID NO: 276666 - DNA, 534 bp, Homo sapiens
agcattctaataatgcaccttgaggagttagaaaaccaagaacaaattaaatcaaaaattagcagaagaaaagaaataataaagattggaacagaactaaatgaaatagagacttaaaaaaatactaaagattaacaaaatgaaasgttggttcttcaaaaaaataaacaatattgataaaccactagctagactaaccaagaagaaagaagatccaaacaaaaacagaaatgaaaaaggaaacattacgactgacatcacaggaatacaaaagatcatcagagactacgatgaacaattatacactgacaaactggaaaacctgtaagatacagataaattcctgaaaacatacaacctacccagattcaatcatgaagaaatagaacacctgaacaaaccaataacaggtagtaagattgaatgagtaagacaacaacaacaaaaagcccaggaccagatagatttacagctgaattctaccaaatgtacaaagcactaatatcaatcttcttgaagttatttcaaaatatc

SEQ ID NO: 276667 - DNA, 534 bp, Homo sapiens
agcattctaataatgcaccttgaggagttagaaaaccaagaacaaattaaatcaaaaattagcagaagaaaagaaataataaagattggaacagaactaaatgaaatagagacttaaaaaaatactaaagattaacaaaatgaaacgttggttcttcaaaaaaataaacaatattgataaaccactagctagactaaccaagaagaaagaagatccaaacaaaaacagaaatgaaaaaggaaacattacgactgacatcacagraatacaaaagatcatcagagactacgatgaacaattatacactgacaaactggaaaacctgtaagatacagataaattcctgaaaacatacaacctacccagattcaatcatgaagaaatagaacacctgaacaaaccaataacaggtagtaagattgaatgagtaagacaacaacaacaaaaagcccaggaccagatagatttacagctgaattctaccaaatgtacaaagcactaatatcaatcttcttgaagttatttcaaaatatc

SEQ ID NO: 276668 - DNA, 568 bp, Homo sapiens
ctacagattcaatgcaattttaatgataacatcccatcatttttcacagaactagaaaaaacagtcctaaaatgcatgtggaatcaaaaaagaacccaagagccaaagcaatcctgagcaaaatgaacaaagctggaagcatcacattgcctgacttcaaaatataccrcaaggctataataccccaaacagcatcatactggtataaaaataggcatatagaccaatggaacagaacagggaacctaaaaataaggccacacacttacagtcaactgatgtttgacaaagacaccaagaactcatattggagaaaggacaatctcttaaataaatggtgctggaaaaataggatagccacattccagaagaaggaaactggacccctatttctcaccacataccaaaatcaacttgaagttgattaaagacttaaacacaagctctaaaactataaaaatactagaagaaaacctagggaaaactcttctgggcattggtctaggcgaagaatgtatgactgagacctcaaaagcatagataacagaaataaaaatagacacacggg

SEQ ID NO: 276669 - DNA, 568 bp, Homo sapiens
ctacagattcaatgcaattttaatgataacatcccatcatttttcacagaactagaaaaaacagtcctaaaatgcatgtggaatcaaaaaagaacccaagagccaaagcaatcctgagcaaaatgaacaaagctggaagcatcacattgcctgacttcaaaatataccacaaggctataataccccaaacagcatcatactggtataaaaataggcatmtagaccaatggaacagaacagggaacctaaaaataaggccacacacttacagtcaactgatgtttgacaaagacaccaagaactcatattggagaaaggacaatctcttaaataaatggtgctggaaaaataggatagccacattccagaagaaggaaactggacccctatttctcaccacataccaaaatcaacttgaagttgattaaagacttaaacacaagctctaaaactataaaaatactagaagaaaacctagggaaaactcttctgggcattggtctaggcgaagaatgtatgactgagacctcaaaagcatagataacagaaataaaaatagacacacggg

SEQ ID NO: 276670 - DNA, 1177 bp, Homo sapiens
atagtgatacagcatttcccccaataattacccccccaaaaatggctggtgcactgaagaaaactttaattcccctacagttttaactaggctcagccatgaacatggggaaggctggcatttgtgcaatgacactggggttctccactacatgtctggtcatcctatcagtaccttaaacctgcccacaaccagttcctaaaaaggaaaagcagtgttcttttgccagcaaaattggggtttagttgaaagtaaaaggatgtatttgaaaagktatatctgcctttaaagaataaaaggatctatctttgcacctgataacaaattaacaaaatctcaaatggataaagcttgtgtgatgagaccaaatcacacaaagtgaagaagtcgaattttgtttaatttaaatgatagagaatagacatgcgctgagttacattttccttaaaaaatcaccctgaatgctatgtagaggatgggttgtaagggggcaaacatagaagcatggagaccagttagatagttactgcagccaatwcaattacaagccactttccttgtttttcattttacagtcgtgcacatgaaaagtataggcaggcttttagctacgatgggccaaacatttggttcctagacttctatagtttgagctggaaacattaaaatwattaaactgcagccattagtcttcatgaataatattaaatgcctgagtcaggaaaagttttaggagaggatacgattttcttttttacttcaaaaacacatgaaagggcataatctggacagatatttaaggaagagaggttgaagaatgccatgcattccatctcagactaggctatggggactctacgtgggaggtctggatttaaatccagttttgaatgactgaatgtaatcggtgatggtagggcactacagctttcccaaagctgtcaatttgtgtcattatcaaaagcacttatttggtacctaatatgtctatgcatggcagatgtttaaataggaatgtccctgcctttctggggcctctgatctaaaatggtgcagatactcttggaaatggggtaaatagcagaaccttgggtgggagagagcatgtccagtagtatttttttagtgtgtaattagggtgggagagactagaaagttttaactggtggagaataca

SEQ ID NO: 276671 - DNA, 639 bp, Homo sapiens
caattacaagccactttccttgtttttcattttacagtcgtgcacatgaaaagtataggcaggcttttagctacgatgggccaaacatttggttcctagacttctatagtttgagctggaaacattaaaataattaaactgcagccattagtcttcatgaataatattaaatgcctgagtcaggaaaagttttaggagaggatacgattttcttttttacttcaaaaacacatgaaagggcataatctggacagatatttaaggaagagaggttgaagaatgccatgcattccatctcagactaggctatggggactctacgtgggaggtctggatttaaatccagttttgaatgactraatgtaatcggtgatggtagggcactacagctttcccaaagctgtcaatttgtgtcattatcaaaagcacttatttggtacctaatatgtctatgcatggcagatgtttaaataggaatgtccctgcctttctggggcctctgatctaaaatggtgcagatactcttggaaatggggtaaatagcagaaccttgggtgggagagagcatgtccagtagtatttttttagtgtgtaattagggtgggagagactagaaagttttaactggtggagaataca

SEQ ID NO: 276672 - DNA, 639 bp, Homo sapiens
caattacaagccactttccttgtttttcattttacagtcgtgcacatgaaaagtataggcaggcttttagctacgatgggccaaacatttggttcctagacttctatagtttgagctggaaacattaaaataattaaactgcagccattagtcttcatgaataatattaaatgcctgagtcaggaaaagttttaggagaggatacgattttcttttttacttcaaaaacacatgaaagggcataatctggacagatatttaaggaagagaggttgaagaatgccatgcattccatctcagactaggctatggggactctacgtgggaggtctggatttaaatccagttttgaatgactgaatgtaatyggtgatggtagggcactacagctttcccaaagctgtcaatttgtgtcattatcaaaagcacttatttggtacctaatatgtctatgcatggcagatgtttaaataggaatgtccctgcctttctggggcctctgatctaaaatggtgcagatactcttggaaatggggtaaatagcagaaccttgggtgggagagagcatgtccagtagtatttttttagtgtgtaattagggtgggagagactagaaagttttaactggtggagaataca

SEQ ID NO: 276673 - DNA, 639 bp, Homo sapiens
caattacaagccactttccttgtttttcattttacagtcgtgcacatgaaaagtataggcaggcttttagctacgatgggccaaacatttggttcctagacttctatagtttgagctggaaacattaaaataattaaactgcagccattagtcttcatgaataatattaaatgcctgagtcaggaaaagttttaggagaggatacgattttcttttttacttcaaaaacacatgaaagggcataatctggacagatatttaaggaagagaggttgaagaatgccatgcattccatctcagactaggctatggggactctacgtgggaggtctggatttaaatccagttttgaatgactgaatgtaatcggtgatggtagggcactacagctttcccaaagctgtcamtttgtgtcattatcaaaagcacttatttggtacctaatatgtctatgcatggcagatgtttaaataggaatgtccctgcctttctggggcctctgatctaaaatggtgcagatactcttggaaatggggtaaatagcagaaccttgggtgggagagagcatgtccagtagtatttttttagtgtgtaattagggtgggagagactagaaagttttaactggtggagaataca

SEQ ID NO: 276674 - DNA, 578 bp, Homo sapiens
ttcgtccctaactcacgaaatctgcaaaggacatatatataaaacctaaatatatgtctttataggtgctttatgacattattttaaagggatctcaattcatgrtgaattcttaaaaaaaaaaaattctacctccatttgttacaatctggcagtgcttaccaatagggatcaaattctacaggttcactttctctagactcaagggcagagtaaaaggggtggggagaaaaccctctgccagttggtggctttggcagaaggcttgtttagagataagcattattgaacgagcttcactttgccctacacctaaggtgataaaactgatagacgtcatgactttcagaaagagcaagaggtaacctcactgtccagtcaacattgcttttgtacaggacagaatgtaagtccaagacagcatgtagggcactcctgaatatgtaacccctgtagaagttgtcctctcatctctggctctgatcttactagagatttttggggcgggggaatgaaatcagcattttaaaaaattatttatcatgtgctaagtactgtactatgtgctatttgtaata

SEQ ID NO: 276675 - DNA, 617 bp, Homo sapiens
aaaataataaagtaggaaaacctgttctaccaaatagaaaaacttacaagccatactgaggaagacagggtggtgttgccccaagaatggacacatagaccaatgggacagaaaagagcctgaatcaaactcatattcatgtagatacttgatatgtaagaaggtgacattgcagaccagtgggaaaaaggtggtctttttgataaacgttgttgggacaattgggtaaccatatggaggaaaatccccaaatacaaaagtcaatgctagaatgattaaatactgaaatgttaaagctataaagcttttagaaaatatattggaatatgttttcatgacttcagggtttggaaggattttttaagccacaaaagcagaattagagttaagtctataattgattgggtcaaagtccatgctcttttgattatgayacattttaacagagggacaaatatctctgtcctgtggatttcttgatgctgcatttatatttatgaaagaaaaaagacaaagagagactggattaaaaaatcttggaagagccttggaagtaacgctatttcttaacaacaaacaccatcatctttacacatacatgactaatgccccaaaat

SEQ ID NO: 276676 - DNA, 603 bp, Homo sapiens
catgaatgggtggacataggtgcaatttgcaagcctcctgtcattgttattgttgtcaagaataataacatcgtacctatatagtacctcctatttccacactcttttcttctctccattttctcaaacaacgctatcagatgagggagagctttcatggaaggaagacccttgtcygagggctcagatacctggaggtggcagtttggttgtggctacaaatggggctgacgatgctggagattctccaggcaaggagctttcaactaggttccaccccctcattaataggcagcctgggattcgtttctactctgccactgccgctctctccagcctctaggtgcagacaagaatgagaaggagatcagacgttttacaatgtgtgaggacgtagacttgagtgtgatttgagaaagacagttttcctgtctgaggaccccactattccacacacccccatatgtacacacacatatacatagaatatttaatatgaaaattacattgctctagctacagtttgctaatatctctgtgccccaaccccttatttccatgccccaacccctttcccacttttctggaaggtaagaacccctg

SEQ ID NO: 276677 - DNA, 603 bp, Homo sapiens
catgaatgggtggacataggtgcaatttgcaagcctcctgtcattgttattgttgtcaagaataataacatcgtacctatatagtacctcctatttccacactcttttcttctctccattttctcaaacaacgctatcagatgagggagagctttcatggaaggaagacccttgtccgagggctcagatacctggaggtggcagtttggttgtggctacaaayggggctgacgatgctggagattctccaggcaaggagctttcaactaggttccaccccctcattaataggcagcctgggattcgtttctactctgccactgccgctctctccagcctctaggtgcagacaagaatgagaaggagatcagacgttttacaatgtgtgaggacgtagacttgagtgtgatttgagaaagacagttttcctgtctgaggaccccactattccacacacccccatatgtacacacacatatacatagaatatttaatatgaaaattacattgctctagctacagtttgctaatatctctgtgccccaaccccttatttccatgccccaacccctttcccacttttctggaaggtaagaacccctg

SEQ ID NO: 276678 - DNA, 567 bp, Homo sapiens
cccttgtacttaggggcacaaatacagcaagagcaagcccagcttggtaatatttttagaaagatatacaaaaattctaaatcatggggagtttgttaaaattaacatttaacctttcattaatgaccttaaagtactttttaaaaagacataaaaatgagagaaaataaggtgctttggcctgtcagcttgtagacccaggactttgtctattgccattttattctgacccttttgttctttagtctgaggcacaracgtggtcctcgctaccaccctttctttgtccccacctccatgaagacctagcaaataatagaaagagcccgagagagcaggaaagattgagaaagaacagggaggataaaaattaagatcagacaatcaaaaaggaataataattaaatcaaagtttcgaaattgtcatgatgtagtcccaaattatacaaccatggatgtaggtgcaaatccaggttgtgtgggtcctaaaacttatgcagtctctggccctcttgaagaaaaatacaaacgtctgatctgctaatgttatataaacaaatgaccaag

SEQ ID NO: 276679 - DNA, 567 bp, Homo sapiens
cccttgtacttaggggcacaaatacagcaagagcaagcccagcttggtaatatttttagaaagatatacaaaaattctaaatcatggggagtttgttaaaattaacatttaacctttcattaatgaccttaaagtactttttaaaaagacataaaaatgagagaaaataaggtgctttggcctgtcagcttgtagacccaggactttgtctattgccattttattctgacccttttgttctttagtctgaggcacaaacgtggtcctcgctaccaccctttctttgtccccacctccatgaagacctagcaaataatagaaagagcccgagagagcaggaaagattgagaaagaacagggaggataaaaattaagatcagacaatcaaaaaggaataataattaaatcaaagtttcgaaattgtcatgatgtagtcccaaattatacaaccatggatgtaggtgcaaatccaggttgtgtgggtcctaaaacttatgcagtctctggccctcttgaagaaaaatacaaaygtctgatctgctaatgttatataaacaaatgaccaag

SEQ ID NO: 276680 - DNA, 545 bp, Homo sapiens
aaattacattattattcttctcttgacatgtttacttgtgagaaaaaagtattactacccaactttagccagccacttctgtttttgaaggttttttgttgccttagacatagctgaaaatttttcctctgtgacaatcttgatgtgacagtttcaacaggctgtaaatgaagtgaccctgacactcctctctcaggacacatcaatgtgggacatgttctttattgtttgtgaagaactgatggttcatcttttggaaaaacacaaaccagctgtcaaaaggcctttatttgtgcaatagttcagattacagcaccattgggcaacccctgtgaaggatcatccactttaactttctgagatgctggtatttcatcacttttgctgaggttccaggtggtttggttctctggaactgacaatggccccttaccaggtatgtttttggatatagtgattgccatgctgcttccttttgtagtsgggggggcgggtaaaaattgtgctgctggtgatcataaatagcattagttcataaaataaca

SEQ ID NO: 276681 - DNA, 595 bp, Homo sapiens
tatatgagtaaatttccttgatttatcctcttctcatgcctgaatttagtaaaatgaaatataaaagctgcattatcaaaagaaacatatgtacatataatcttgcacatacagtttgggtagaattaaactaacatgcttccaaagggaagttatatgaaaaaatacttttctaaatttcaaataaatgaggccatgttaaatatctataattagtcataggtaaagcaatgaacatacccttygtaaactttaaagcattctccaaaagttatttctatataagtccccaaacatatgtcaagatagatataagatatatgtaatatataatattatatattttttggccatggtggctcacacctgtaatcccagcactttgggaggctgaggtgggcgatcacttgaggtcaggagttccagatcagcctggccaatgtggtgaaaccccatctctactaaaaatacaaaaattagctgggcatggcggtgcgtgcctgtagtcccagctactcgggaggctgaggcatgagaatcacttgaacctgggaggaggaggttgcaatgagcagggattgcaccactgtactcc

SEQ ID NO: 276682 - DNA, 595 bp, Homo sapiens
tatatgagtaaatttccttgatttatcctcttctcatgcctgaatttagtaaaatgaaatataaaagctgcattatcaaaagaaacatatgtacatataatcttgcacatacagtttgggtagaattaaactaacatgcttccaaagggaagttatatgaaaaaatacttttctaaatttcaaataaatgaggccatgttaaatatctataattagtcataggtaaagcaatgaacataccctttgtaaactttaaagcattctccaaaagttatttctatataagtccccaaacatatgtcaagatagatataagatatatgtaatatataatattatatattttttggccatggtggytcacacctgtaatcccagcactttgggaggctgaggtgggcgatcacttgaggtcaggagttccagatcagcctggccaatgtggtgaaaccccatctctactaaaaatacaaaaattagctgggcatggcggtgcgtgcctgtagtcccagctactcgggaggctgaggcatgagaatcacttgaacctgggaggaggaggttgcaatgagcagggattgcaccactgtactcc

SEQ ID NO: 276683 - DNA, 595 bp, Homo sapiens
tatatgagtaaatttccttgatttatcctcttctcatgcctgaatttagtaaaatgaaatataaaagctgcattatcaaaagaaacatatgtacatataatcttgcacatacagtttgggtagaattaaactaacatgcttccaaagggaagttatatgaaaaaatacttttctaaatttcaaataaatgaggccatgttaaatatctataattagtcataggtaaagcaatgaacataccctttgtaaactttaaagcattctccaaaagttatttctatataagtccccaaacatatgtcaagatagatataagatatatgtaatatataatattatatattttttggccatggtggctcacacctgtaatcccagcactttgggaggctgaggtgggcgatcacttgaggtcaggagttccagatcagcctggccaatgtggtgaaaccccatctctactaaaaatacaaaaattagctgggcatggcrgtgcgtgcctgtagtcccagctactcgggaggctgaggcatgagaatcacttgaacctgggaggaggaggttgcaatgagcagggattgcaccactgtactcc

SEQ ID NO: 276684 - DNA, 627 bp, Homo sapiens
tcatacttgaagaaaagattataggcaaagtggcaaaaacaaactagatttggagattaaataagtcttcctgcataagcaggagagaatcactccaagttagatgccattgcctccaaaatttctgtattgaaaaaagaataatttccaagctccagtggcacacaatatttcatccaaccacatttgtggccaataaaggaatctggaaagtccctcagagtctgttctctgccaagggcagaattatattataatgttgacaaagggccaagccacatctcttcctgcatctcccttctccccagttctctaccatcaccataaattacctgtcaaactgagtgaaaacagctgagcagggacccagagatataacttcagtgaacatttccccttataaccaaacatgtggacacgactggtctatcatggactttcaatatgtgtttgttgagtgaatgaacaaactaatgaatgaatacatgaaagaatgcattaaccatgagacagcccrggaatcaatgttaacaatgttatatagcaggagaaaaagtcaaatgcttggcattgactcagaaatactgtagtagttgctcaataaatgactgttaaatgacaaggggt

SEQ ID NO: 276685 - DNA, 520 bp, Homo sapiens
acaatttaggaaatttaatataaattatacattagataatataacttaatgttaaatgttccaaatatgatcattgatttgtaggagaatgcccttgtttttaggggagacgaagaggaatactccttgttttggggagagacaaagaccgtgctctcccctgtgctgtcccctctgccatgttgtcctgtctgtctccttttgtagagacagggtctcattatgctgcccagcctggccttgaactcctgactcaagcaatcctctccccttcgccttccaaagtgctgggattacaggtgtgagtcatcacacctgatcccaaagagaaatatttagggataaattgccttgatgtctgcaactaaatctcaaatagctcagccaaaaacaaatctcaaatggttctaatggctgagccaaaacccaaactgtgtgtgtgtgtgtgtgtgtgtgtgtgcgtrcacgtgtgtgtacatagatagtaaagcaagtggggcaaaatatgaacaattggtga

SEQ ID NO: 276686 - DNA, 1185 bp, Homo sapiens
aaataatttgaaggattagttcaattcttgcttaataaagagagctaaaaataaagtaagcctgaaagtgctgacatcaaaatgagagcttctaatattattacagaagaatgtcattaagttctaataattaacaaatataaactaatacacatggatatcaaatctaattctaggcaagttgaaggagacaatatactctataataaagttttcatatcctgaattgattttcaacaaaaaattttaataaaatatattttctttgcatttcacattatttattcactgatatttcccttttgtaagaaatcattcaagaaacgttgctaataaatactaaaatgtaatggacgctcttatttgtttcagatgtaaacaacttcatgctaatacctagtttatttgcttataaaaagtcctataggtatgggaatgtttagtaagtacgccacacaaccatgaaaagacgtcccttttatttcaaccaaaattaccacctcatttccttttagaaatgaaaaayattgttctctaatacttctaagacttatcatgtgaccacaagaaagttactcaaagacaaaccattcacgttcttcatctgccaaataaaaagatagattagatccttctcgttaattctcccaacatttttcacwagggactcctctaatgggcagctttgaccgaagaggtcagcctctccttcagcttggccwaactttcttaaaacagtgccacagtcctggactcttcctgcccaatcctccctttttcctgctctctttccacaggtgccaggcctgcattaaaggctggaggctctcccgcctaggcctgcttcctccccttcatcctcctcagtcacctctccaggaaacttcttgggtgtcaagtcctgtcttgggtgcttgcttctcagatgatgatactggtctagttggcattgggagttgactgagaaagcagatggtaaaatgggttttgaggactggtatggcaaggaagaccccatcctgagaagtatttaatccatgggcatctcctgatacaaggtggcagcacaaccggttgttactcagataaaacatcaaaggaaactgaccatgcaggtattgttttttattcacttgaaaggtaatgaggagcaatgcttacgaggactgtgcagttattgttgat

SEQ ID NO: 276687 - DNA, 361 bp, Homo sapiens
gggcaaaaaggagtgactaggagtttttcatgttggaatgacacctaatgacagggtttgcagaaagaattcgggataggaaaaactatgagtttcttgttgtgatctcagatggaagcaagaagcatctgagtttggagttttttaaaagtgctgttggagatgagaaagatgaaaggagtagatggcgaaataagaattggcaaaaaatgtatcttccttcttacctcttacccattaaacttcagatcatctgcctttgccgtaactgtttcccccacacaggaagaaataaattagttcctaattcttytgcctttaaatttgcttgcctgaatcaaattgaaattagaattggagt

SEQ ID NO: 276688 - DNA, 503 bp, Homo sapiens
tccaatggaatcatgctggcccattacattgatgaaattatgctaatcagatccsgtaagtgggagagagtgaccactctacacacattagtaagacacttgcatgccagaaggtgggaaacaaatccccaaaatctcaggattctgccacctcagtgaaatccttctagggtgaaaaacaagttgctgcatctgccccactctaacactaagaaagtggcacaatattcagtgggcctattcggattttagaggttacatatacctcatttgggcatgctactctgacctatttactgaaggatctgaaagatcccagctgtgaataggacccagaaaaacagaaaggtctgcaacaggtccaggctgccataaaagctgttctatcatttggttgtatgatccaacaaattcaatgatatttagtcctgtttagaaaaaaaaaaagtgcagtttgctgccagcgctcatttaattttacataaacacactcttcgaggctg

SEQ ID NO: 276689 - DNA, 503 bp, Homo sapiens
tccaatggaatcatgctggcccattacattgatgaaattatgctaatcagatccgrtaagtgggagagagtgaccactctacacacattagtaagacacttgcatgccagaaggtgggaaacaaatccccaaaatctcaggattctgccacctcagtgaaatccttctagggtgaaaaacaagttgctgcatctgccccactctaacactaagaaagtggcacaatattcagtgggcctattcggattttagaggttacatatacctcatttgggcatgctactctgacctatttactgaaggatctgaaagatcccagctgtgaataggacccagaaaaacagaaaggtctgcaacaggtccaggctgccataaaagctgttctatcatttggttgtatgatccaacaaattcaatgatatttagtcctgtttagaaaaaaaaaaagtgcagtttgctgccagcgctcatttaattttacataaacacactcttcgaggctg

SEQ ID NO: 276690 - DNA, 456 bp, Homo sapiens
atgatccaacaaattcaatgatatttagtcctgtttagaaaaaaaaaaagtgcagtttgctgccagcgctcatttaattttacataaacacactcttcgaggctgaagcaaatctgactgattttcaatgtgaaaatgaaatataaaaactgtttttggagttatttctaaacagaaccracaggagaatcatctgaatcatcagaattgtctatttcataaaaatcagattcaccaaatgaatctttggccaacaactgttcaatgacattaacatcacacacaggaatgctgtgttttctatgatttgatattttcagtgatcaagaagaaccagaaataccatttgacccagcaatcccattacttggtatatacccaaaggattacaaatcattctgctataaagacacatgcaaaagtatgtttattgctgcactattcacaatagcaaag

SEQ ID NO: 276691 - DNA, 619 bp, Homo sapiens
aaaagagcgagagctcatttaataccagcagggtggtaccaagccattcctgagttgtctactctcatgacccaaacaccttccattaggccccgcctccaacatcagggatctaacttcaacatgaggcttgcggggacaaacatgtaaatcaagcctgtgcaacctgcaggccgcatgtggcccaggagggctttgaatgcagcccaacacaaactcataaaactttcttaaaacattaaaacattatgaggttttttgccatttttttagctcatcagctacagttagtgttagtgtattttatgtgtggcccaagataactcttctttcaacgtggcccatggaaactaaaagattggacacccctgatataaactatagcagtagcagtgagggttatgcctgggctcagccacatgtacttctacttaattcagaaattggtcagattgcaagtatgccatttggagaatggagtttggagaattagcttctggaaactcacttttggcaaagcagcaytgagcccatgaacttgcagccaataatatgtgactcacaaatatcacaaaagaatatcaaatgtcttattcatcatctaaaggacataattatg

SEQ ID NO: 276692 - DNA, 613 bp, Homo sapiens
tccctgtgttcccaaaccttccctttgtcataaaagccaaggccagccctgcacccagctaagctgcacagctgcacggtgcaacgtgaggcaaaagggtagtagtctgtcctaagactctcataccagccagcctgcctacctagagctcaagccaaaacctatgattacaagatggagcatcagtagagattctgtgaaggtgaaaattcgcatggaaaactaagctcattgctagagtatgacaagaccttaaaaaggtttgcacaaatttctgtgcatattggtttggagtacagaggttagaattctgtgrcaatgagagaagttttcaaatctgcagcaaaaattccaaagcatagaccccaaagcatgaacagctgagaagatagtcattcagttctaggaaggtgatcatgcaaagagtgggcaggggtgaatggaagtggtgaataattttattagctgcaaaatcttgattatcatagaagaagagaagctctataactgtctatggttggtgtcttttctggtgtctcaagagatgttattgtgagaagtatttaagattgacaacctgaagacacggtgcctattcccacgaagagttcta

SEQ ID NO: 276693 - DNA, 592 bp, Homo sapiens
aagttaactcaaagttgaagcatgaaataagcatgcagctttattcactcatttatttattgaaaattatcttttaagaacaatggagtactaggcattgttctagatatttatgatatgtcagtgcttatataaacaaaaagctctggcctggtagcaaggacacagacaaataataatcaacataataaataagttggaagatagaaagtgattatgctatgaaaaaaaatagagcaggatggggcaattggaagtatgggatggggttaatatgaaagacgtttgcatctttaaatgtggtggtaaaagtgggacttgtcaaaggtgacatttaagcaaagatctgaaggcagggaggaakttaaccaaatggaagtgggtggaacaacattcttgatgagggaacagccagcacaaactccaaggtgagattgtgcttggtatattagaggaatagcaaggaggctagtctggagtgcagtaagagacagggatcgcagaagaagaaaaagtcagaaagattgtcaggtgtcagaccttgtgggaccatgtaaagaatttggctcactgtggttgaaagacgagctgt

SEQ ID NO: 276694 - DNA, 592 bp, Homo sapiens
aagttaactcaaagttgaagcatgaaataagcatgcagctttattcactcatttatttattgaaaattatcttttaagaacaatggagtactaggcattgttctagatatttatgatatgtcagtgcttatataaacaaaaagctctggcctggtagcaaggacacagacaaataataatcaacataataaataagttggaagatagaaagtgattatgctatgaaaaaaaatagagcaggatggggcaattggaagtatgggatggggttaatatgaaagacgtttgcatctttaaatgtggtggtaaaagtgggacttgtcaaaggtgacatttaagcaaagatctgaaggcagggaggaagttaaycaaatggaagtgggtggaacaacattcttgatgagggaacagccagcacaaactccaaggtgagattgtgcttggtatattagaggaatagcaaggaggctagtctggagtgcagtaagagacagggatcgcagaagaagaaaaagtcagaaagattgtcaggtgtcagaccttgtgggaccatgtaaagaatttggctcactgtggttgaaagacgagctgt

SEQ ID NO: 276695 - DNA, 592 bp, Homo sapiens
aagttaactcaaagttgaagcatgaaataagcatgcagctttattcactcatttatttattgaaaattatcttttaagaacaatggagtactaggcattgttctagatatttatgatatgtcagtgcttatataaacaaaaagctctggcctggtagcaaggacacagacaaataataatcaacataataaataagttggaagatagaaagtgattatgctatgaaaaaaaatagagcaggatggggcaattggaagtatgggatggggttaatatgaaagacgtttgcatctttaaatgtggtggtaaaagtgggacttgtcaaaggtgacatttaagcaaagatctgaaggcagggaggaagttaaccaaatggaagtgggtggaacaacattcttgatgagggaacagccarcacaaactccaaggtgagattgtgcttggtatattagaggaatagcaaggaggctagtctggagtgcagtaagagacagggatcgcagaagaagaaaaagtcagaaagattgtcaggtgtcagaccttgtgggaccatgtaaagaatttggctcactgtggttgaaagacgagctgt

SEQ ID NO: 276696 - DNA, 485 bp, Homo sapiens
acattatcacaacttgtattactaaatgataaaaatgagttgcaaaataatatatagaactttatattttataaatatgcacatgaaaaaatgtttgtaagtatgcacaaactgttaacagttattacttcagaggagtgaaaaataggttgaaaatgagaatgactttcatttttagtatacttaagtacattttyaattttcaattatatgcagtgattttgtcctttaaaaaataggatggacttttttaaatataaggaagacattttctgtgaaacaataaattactcagtatatacttaatgtgcatgaagtatgaggtaggaatacatccactgacattcttgcatttgcataccacttccccaaatatgaactcacttctctgactttgctagggctgaggaatcatcattacaatatctgtaaaactggatttattaagtgcatccatattgtttatgagtcatagaaaatatgtt

SEQ ID NO: 276697 - DNA, 585 bp, Homo sapiens
tccttcattggtaaagaaacatcacaaaaacgttttgagtcattcaattcactttgtaatcaggtctccagtgccataaactgtgagtacttgctaatttgcccctgaagatttattcatgagatatttttcctgaatttaccccatttgatcttgtcctttttttcctcgacaagccaaatacatctgttctgttaaagtgcctgtacctgttaagtgtttgtattatggggaaaatcctcccttaagactccttcaattaatacatctatgactacttttctgcttttttgttcccctttcctactcttctttccatttatttatttttattctttaaataaattttttctctgcaagtcctcaaggcagtactcaataayataaagggtatataattaattggtaggactgtcagaatttaacaaatttcttccaatattttcttccatagaatactcttctcttcctcactctttaaactcttactcccaggaactcccttctgatgggaaaacgatgttccaagaaacctaaaatgactttctctggctctcactgctatttcagttgcacagctgggat

SEQ ID NO: 276698 - DNA, 590 bp, Homo sapiens
gaaccacatcacgtgcaacaggaacagtgtgaaacagtgcaaggattcacaacagctaaaaagtagatcctcagccatactgccaaaggatgtgtcatcatcagtttcctactgaagaggaataagaaactgatatcccaacccattgtgtttcctttgtagtttggtctatataagcaaacatagttctcttgaaaggctgatattccagtgttctcaataaatccttcagtggtccttgttaagttcattataaaagattctcttagtattgttacaaagagatacttgctattggaagaactaacctgaatatcttacctgagtattagacataaaattcaggtgaccartgtggacctatccaggccaacagcctcaaaactgtctagatgctacacatttatgccactgtactgaaggaaatcagggatagaaccaggctacttttgtctaaacaatgtttcttctctagtaccaaagagaggaaaaaaacagcacatctctcattgcatggctcttcccggccaagacactctggtaagatgggataattaaaaatggagagagggagagaaagggagagggag

SEQ ID NO: 276699 - DNA, 590 bp, Homo sapiens
gaaccacatcacgtgcaacaggaacagtgtgaaacagtgcaaggattcacaacagctaaaaagtagatcctcagccatactgccaaaggatgtgtcatcatcagtttcctactgaagaggaataagaaactgatatcccaacccattgtgtttcctttgtagtttggtctatataagcaaacatagttctcttgaaaggctgatattccagtgttctcaataaatccttcagtggtccttgttaagttcattataaaagattctcttagtattgttacaaagagatacttgctattggaagaactaacctgaatatcttacctgagtattagacataaaattcaggtgaccagtgtggacctatccaggccaacagcctcaaaactgtctagatgctacacatttatgccactgtactgaaggaaatcagggatagaaccaggctacttttgtctaarcaatgtttcttctctagtaccaaagagaggaaaaaaacagcacatctctcattgcatggctcttcccggccaagacactctggtaagatgggataattaaaaatggagagagggagagaaagggagagggag

SEQ ID NO: 276700 - DNA, 563 bp, Homo sapiens
ttgtgacaagtgaaaattatatgaatttcggtgtccataaataatgccatattggaatacagtaatacttaaaaattgtttatagcagctttggtgctacaatggcaaagttgggttttgagttattgtgacagagatcatatggcccacaagtctaaaatatttactacctggctctttaaagaaaacgtttgctgmccgacctctaggttagatacttagtccctttcctttctaaaggcccctaggccccttattcaaactagctcatcactctctcctgaaagttctgcaaacctagggaagatagagattttgataggcatgaacatcacagaagtaggagtgttacactctttgcccaagacagacataccaatccacctcacatttgcagaacaaagagagtcagtagtagggactatagaagtgtttcaagggtgcttacagtctgcttacctaaagaagcagacagcagcttccttgaaaaaaaaaatgttttaagtgttcccttgtattagatccctgccacttctcatatccaaacatgaaatatgaattac

SEQ ID NO: 276701 - DNA, 598 bp, Homo sapiens
tattctaaaaaatgttaaattgtatttggtaattcagttgtagaaatctgttttaatttttcttaatagaaacataacaaagatcataaaaacactcattttaatttacaggtggcaaatattcattttagtcaccaattattcaaccacaatgaacttctggaaaagcaaagagtactaagttaacaaattgagtctattttcatcaaattatctaaaatcagccaaaacttaaagacaatttcatattcatgcccaaaggccaaacacaagtttataattcattgggaataaaagaagtcctgttttttaaaatccctcctgatttttaagaaatctgaaggaattcagtttttataaagccagctagtttcaaatagcattaatgttgatgtggtaaattatagaygtcatttaataaaatgtatatttagaagacaaaacagcactatagacagaaagactttttaaaatgtgtgtcaaacagaagattagaaaaaagtttttagtaagaataatcagaagtaaaaacagtgtaactatttttaactgaagtattttaagtcctttcttccaacaaaaattgagtgcctaatac

SEQ ID NO: 276702 - DNA, 1117 bp, Homo sapiens
cttcctttctgcacccctgcatgttaatttctgtggtggcagcacacctgttctcctgcagcctccattgctcaatgtgggttgttctctcttcccttagaattgtgcatctcagaaattttttctttatagcccttatttcttttctctctgggagtcttatcttccaccacagccttaattttaattatcataaatggctcaattctacacatcgtcccatagagctggcctgagttccagatgtataaatctaacagtcactggaattgaaattggcattgcaaaatcaacatattaaatattaaactggccatatctcctctcyacaccaaatctatgcttcctccttccaattcatggcactactttctatccaggttttcatctggataatgagataccttggagtcttttctttctattccctcagcccccttcacatccaaggtgactggaaaatttaatcaatttgcattcaaggtaattattaataggtaaggacttaatactgccawacgtccatatatttatagtcaacaaatacaacttaaaaatacatggaagatacaggtgatctgtcttagtttaggtgtttgtgtcctctctagataactgatacattttcatcacacttttctcacaggcaagaaawgtctactccaggagcaaggattatgttaaccacttctcttccttaatttagttttattttgtctttctgatttattaggtctatgtgataacactattataactgactttggagttattatttttcaccaaatagatcttgcacactatatttgctcaaataagatataattttagtgagaattcctcatctcttatttgattaggggactatactacagatttttaatagcgagctatttcacaaagcaagtgtgttaccactcagattgcttaggtataaagaatatacaaagaaaaaaagtaaatggattgtttccagggtgctctggtttaattatatcgcacaatgcctttggttcatctttcttttgttgatctcaaagctactggcaactcagctagcctttactgagtgattaccgtgggcaggtttcttctcagggtttcaaccttatactcc

SEQ ID NO: 276703 - DNA, 599 bp, Homo sapiens
acgtccatatatttatagtcaacaaatacaacttaaaaatacatggaagatacaggtgatctgtcttagtttaggtgtttgtgtcctctctagataactgatacattttcatcacacttttctcacaggcaagaaaagtctactccaggagcaaggattatgttaaccacttctcttccttaatttagttttattttgtctttctgatttattaggtctatgtgataacactattataactgactttggagttattatttttcaccaaatagatcttgcacactatatttgctcaaataagatataattttagtgagaattcctcatctcttatttgattaggggactatactacagatttttaatagcgagctatttcacaaagcaagtgtgttaccactcagattgcttaggtataaagaatatacaaagaaaaaaagtaaatggattgtttccagggtgctctggtttaattrtatcgcacaatgcctttggttcatctttcttttgttgatctcaaagctactggcaactcagctagcctttactgagtgattaccgtgggcaggtttcttctcagggtttcaaccttatactcc

SEQ ID NO: 276704 - DNA, 541 bp, Homo sapiens
ttctttactagactcatgattttcaaaattttaagaattaaatttggagtaaaggaactccgaagatctgaaaaagcctgtgaactggatgtccagaaagatgtaaatacataattattgatagaaaattttgggatgtttttcaaaagcccccagaagttcctctaaggaacccttaggggtcataggaaagctcagtgctgggtagtgagctcctaagagcagagaaatgccctcctgtgtgcatctctagatctggtacagtttcagcattcataggggtgctataaacatttgttacgttgaatcatggaggataagtatgtatatactcgggtgttgttgttgctgttgtttgagatagagtcttcctctgtcacctaggctggagtgctgtggtgcaatcttggttcactgcaaactccrcctcccaggtttaagccattctcccaccacagcctcccaagtagctagtgtaagccaccatgcctggctaatttttgtatctttagtagagacgggatttcgctatgctgcccag

SEQ ID NO: 276705 - DNA, 601 bp, Homo sapiens
ttttgcagtttatgcttatttaaatatttgataggtattttctgccacttgagagttgctattaaattttatataataaacttcacttgcaaactgacttccttctcagacaaatcaaatgacagcaaacaaaaataatgcctattaactattttaagtacattactgtaccctgtggggaaaatcaggaaacaaaaactgtagtttcagaatttcagatggattagttattcagaaattgtcttgaggacatgccctaaccttttgatatcactcatcaaaggaaaatgtgactcacaaagactttaatcccctttcctcccaacrggagatacagtctgtatagagagctgtttgcatttataactcacttaaatcatgtcttccagatacttcaggtttaactcacagtgctacactcaaactaaccaatttaataaaaggattataaaatatttgaagcaaacttatgcatattttattcaatggtttatctccaaacagtagatatctactgatgaactatttgaacattagatgcatcaaattcatattcattgtagctcatatttttccttatcattcctaaattcatatatac

SEQ ID NO: 276706 - DNA, 601 bp, Homo sapiens
ttttgcagtttatgcttatttaaatatttgataggtattttctgccacttgagagttgctattaaattttatataataaacttcacttgcaaactgacttccttctcagacaaatcaaatgacagcaaacaaaaataatgcctattaactattttaagtacattactgtaccctgtggggaaaatcaggaaacaaaaactgtagtttcagaatttcagatggattagttattcagaaattgtcttgaggacatgccctaaccttttgatatcactcatcaaaggaaaatgtgactcacaaagactttaatcccctttcctcccaacaggagatacagtctgtatagagagctgtttgcatttataactcayttaaatcatgtcttccagatacttcaggtttaactcacagtgctacactcaaactaaccaatttaataaaaggattataaaatatttgaagcaaacttatgcatattttattcaatggtttatctccaaacagtagatatctactgatgaactatttgaacattagatgcatcaaattcatattcattgtagctcatatttttccttatcattcctaaattcatatatac

SEQ ID NO: 276707 - DNA, 603 bp, Homo sapiens
tttaggaaacttgaaaattatcatgttgcaaaataatttctaaacttttgttggaatttaatttttgtcatstaaggccaaatgcctgcctgggtcagtgtacaaagtcatagtcctatctatgaatgggttcaaaatttcataaaaaccacagttctaagtcaggaccagtacctttatttgttttctgctcctgaaatgctgtcatgaatatcgatgcactatacttccaaagtaaactagattttgatttataacaaagcaataataacaagaaccaaaccagaataaaacaaaaaacttgcctcttctcaataaatttgtttcatcactctctttcctcactctgacccctcttacaaagtagtccaaacagaaaacactaatataagaaacatctgacatgtagtgacaaaggatcccttctagcaaagcacacgactgcattttaatgtgagagccataggaaagacacaactggattcttttaaagctttttatgtgttcccctcaatttatacatacatattaataaactaaggtggtatcgtccagtccagtacactaagaatacttccatgttggaataaaagattgttgaag

SEQ ID NO: 276708 - DNA, 557 bp, Homo sapiens
tgagtgagaggaaagtgaaaagttctttcctagtgaaagaggtctttcctatggcagcagaagagtagatttacagcaacctaaaagaaaacagatggctgaatcctttcaytccccttacgtacatgtggtccaacattgtctcaacaagactgtagccctacaaccaacaatcgaaagagtgacatcaacacataaaaggaaggaagtgcacattcagtggaaaccccaatgagaaatacgcttctgccaagactatcaggttggtatagtacttgcgatgtcttggcaagaaatcatgaaatacttgaagaaattaaataattattagggggatgcttacttcactttactaggggaggtccttgagtacctcttctaacatctaaagtcttctcctctccagaggaattgtgctccgttccctggttacttctcctttacttagggatttcagaattgtgaataaggaaagaatgacctggtaagtgccagccctggacacatttgcccacagatgctgtcctccccctttctttagttgctctttttctcag

SEQ ID NO: 276709 - DNA, 391 bp, Homo sapiens
ctgcaaacaggcaattgccttgccatgtgataagtgttctacagggagcagtgcatggtgccacaggagcctatagttggtgttggagacataatgtttaaacacagacctgaaagttgagtaggaggaagccaatcaaaatgtgaggaggaaaataatccacccagaagaaatagaatgtgcaaaaacctgtaatgaagastgaacatggtatattcaagaatctgaaataaggtatttttggttttggtaagaatgcagagtgaaatttcaaaggtaacaagccattcggcaggagaaataaacaaaggcaagatcacgaatggatttttacattttgattaacttttcctttattaaaaaaaaagagaagccactgaaagatatcaag

SEQ ID NO: 276710 - DNA, 568 bp, Homo sapiens
tgaggtagaaaagcacggatgtatascctaaactaatgccagaaagaattgcaagaagcaaatggacttgctagatgtctagaaagttgactcatcaaaactttgcaaaaatttggatgatgtctgtggtagcaataacaacagttaatacttacatggcacttactatgttcccatactcatctaagtgttttgcttatattaagccatttaatacgcccagaaaatgtctcagttagatagtattataatttctgttttagatgagcaaactgagcaacagaacatttaagtaacttgtccaaattcacatagctagtgggtgggaaagccagggtttcaacccaggcattctggctctgaaatgtaagctatttagtacgaggctactctgctgatccaaatgacagttactgatttagtattcatattcaaagtactgtgtcaagtacactatagtcattagtttgtttaaatggtggcaattgatgaagttgaagaagacacaattaggtttcttgcttagttacaaagatagggagcgcagcagacgagcacaagttgaaaa

SEQ ID NO: 276711 - DNA, 568 bp, Homo sapiens
tgaggtagaaaagcacggatgtataccytaaactaatgccagaaagaattgcaagaagcaaatggacttgctagatgtctagaaagttgactcatcaaaactttgcaaaaatttggatgatgtctgtggtagcaataacaacagttaatacttacatggcacttactatgttcccatactcatctaagtgttttgcttatattaagccatttaatacgcccagaaaatgtctcagttagatagtattataatttctgttttagatgagcaaactgagcaacagaacatttaagtaacttgtccaaattcacatagctagtgggtgggaaagccagggtttcaacccaggcattctggctctgaaatgtaagctatttagtacgaggctactctgctgatccaaatgacagttactgatttagtattcatattcaaagtactgtgtcaagtacactatagtcattagtttgtttaaatggtggcaattgatgaagttgaagaagacacaattaggtttcttgcttagttacaaagatagggagcgcagcagacgagcacaagttgaaaa

SEQ ID NO: 276712 - DNA, 568 bp, Homo sapiens
tgaggtagaaaagcacggatgtataccctaaactaatgccagaaagaattgcaagaagcaaatggacttgctagatgtctagaaagttgactcatcaaaactttgcaaaaatttggatgatgtctgtggtagcaataacaacagttaatacttacatggcacttactatgttcccatactcatctaagtgttttgcttatattaagccatttaatacgcccagaaaatgtctcagttagatagtattataatttctgttttagatgagcaaactgagcaacagaacatttaagtaacttgtccaaattcacatagctagtgggtgggaaagccagggtttcaacccaggcattctggctctgaaatgyaagctatttagtacgaggctactctgctgatccaaatgacagttactgatttagtattcatattcaaagtactgtgtcaagtacactatagtcattagtttgtttaaatggtggcaattgatgaagttgaagaagacacaattaggtttcttgcttagttacaaagatagggagcgcagcagacgagcacaagttgaaaa

SEQ ID NO: 276713 - DNA, 1679 bp, Homo sapiens
gatttaacttgagaggaatctctcttaaccaaatccaggaaaatttgacttccaaaataatgatagaaattgattatagcccattgaataaagtaaaaatctataagttgatattggtatatatgaatgaatgcatgcatgagtcactgaacagtaaattaataaattaaaaagggaaaacctttatttatagaatatcaactaataaaaggaaaagagaaaacttcccacaacattctaaaagagcaaytggtctcacataaaacgaggaacaccacttacatcctacgagtgggaaagagaaaagagtatgcagatatgggaatgttttatatttgtagttgagaaagaaaaatatttcatttttctttttggtggtgatggtgttttctctctgtcaagtatgatgtctgaaatggctgtccagaaaatgggcatgatatcaaattagaaaatatggaaggaccttgaggagcctattgatgttggaaatwtcactgtttctaatgtctgtcatctccactcctattatgttcatgaagtttaacattatgggtttttttctataatttccatttagttatttttataagtattctttctttactgaaattttctgtgttgtcacttgtttcaggataatttgaaattaaatattgaagcwtagtaacgatgacttcattaactatgatgaaaatccatattagataattgcaacatctgattcatcttagtgttatatcaattgtcttttctcacttaggttgtggttgtcttggttcttggaataatagctaacttttaattgtatcctggccattttgtctattatattaggagattctggattctatttcatttttttaaagcagttaccctatttctagcctactttttaatcctgtaattctaatggcaatttaaatgttagaaccttggtggtgttattttgatctgattggtttatgtggtactgtaggaattcccacttgcctgttgatgttccctgagtgtgtggaaggagttttctcagtctgggttgctgtgtctctcacagtggcagaagggtggcawttgctgtttgctatatagatcagcctcatagatcaaatagacataaattaagtcaatggaaaagaattataatgctgattgaatgcagagttttgtttgatttgtgttccaggcctgatcagatcattgtttttattaatattatttcagagcattcctttaaaggaatctacaatagaaagaatggggcaaattttaagggaattgctagtattaggttatctatagtcatctatattacaataaaagcagtattccacatccttgatcttacaaacttagtgcctgcacgatatctacacwctttactgtagtcgatatatcaataaaccccagttctgaacaaaatttggggcaaattgggtatttccagtgcttgtacatctaatcttactgtcgatacttgttggcccttctgtactattttctgtatccaaagctagctgaaggagaattacttaggtcaagataaagagggtcacaagaaaacaaagggtagctgaatttcagaaaatatatcccatatactgctctcattttcttctgaccactgcgatccttatacaaaacacctacgatttttgcttgctttcagatgacatggg

SEQ ID NO: 276714 - DNA, 605 bp, Homo sapiens
ttgctgtttgctatatagatcagcctcatagatcaaatagacataaattaagtcaatggaaaagaattataatgctgattgaatgcagagttttgtttgatttgtgttccaggcctgatcagatcattgtttttattaatattatttcagagcattcctttaaaggaatctacaatagaaagaatggggcaaattttaagggaattgctagtattaggttatctatagtcatctatattacaataaaagcagtattccacatccttgatcttacaaacttagtgcctgcacgatatctacacactttactgtagtcgatatatcaataaaccccagttctgaacaaaatttggggcaaattgggtatttccagtgcttgtacatctaatcttactgtcratacttgttggcccttctgtactattttctgtatccaaagctagctgaaggagaattacttaggtcaagataaagagggtcacaagaaaacaaagggtagctgaatttcagaaaatatatcccatatactgctctcattttcttctgaccactgcgatccttatacaaaacacctacgatttttgcttgctttcagatgacatggg

SEQ ID NO: 276715 - DNA, 607 bp, Homo sapiens
aagaactccctttatcgtttttcgttggacaggtgtgatgttgatgaaatccttcagcttttgtttgtctgggaaagtttttatttctccttcatgtttgaaggatattttcaccaaatacactattctggaataaaaatgtttgattttcttttttcttcagcactttaaatatgtcatgccactctctcctgtcctgtacggtttccacgaaaagtcttctgccaaatgtattggagcttttttgtatgttatttgtttcttttctcttgctgcttttagtatcctttctttatccctgacctttagaaattagattcctaaatgtcctaagacaatcttatttgggttaaatctgcttggttttctataacartcttgtacttgaatattgatatctttctctaggtttgggaagttttctgtcattatcccttttataaactttctactgcaatctttctttctctctctacctcccttttagtaactcttagatttgaggctattttctagtccttgtaggcacacttcattcttttttgttctttatacttttggttcctcaggccgtatgttttcaagtagcttgcattcaagttcactg

SEQ ID NO: 276716 - DNA, 512 bp, Homo sapiens
gacagtggtgattgcatagtcttgtgtatgtactaaaatcattgacttgtgcacttttagaagggtgaaactttaaaaattatttctgtatattgcatatgtaaaaattatatttcaattataaaattatgtttcaatttttaaaacatagctcttacaaaatttcaagttaaatttttgtaaccatatgctctggtttttgtacactagatgggaagacatgtccattttttttttaaaaaatgtaattctaatctagtataccctttataaatctttaagctcctttctttcttattmcattccacacacactacatgatattttatcattataacatatcataaagattaagaaattaggaactcttccttttcgcagatagtctagctttgctgcagcagtgaaattcttattatgactatcataacttagtaggtattttaacgtgaggataaaacagattgagtaacccagtactatagacaagaaatagaatccaattgctagat

SEQ ID NO: 276717 - DNA, 551 bp, Homo sapiens
gttacttcttataaagtgacccaccaaacaatacacagtttggactacaagagagcaacagagtttgcttatgccactggaaaccgttcaatcacaagagaagagaagccttagaccaagggatacaaagatcacatatcatttctctctttttgtgcttttaccaggaaggcgattttgtgccccaataagccaaccctaactagggatcctgttttatttagaatattaagccattcaccttaatgcatgctctgttttatatccattgcctatttgcaaatgataaattcttacccaaatgtccctattacatgttcaaagcagctgccttctctatatctagttgcaggtgttattttgggcacttcttttaatattcaggaagaaaagagaaaatmgcttgttaaaaagttaagatacctcttaaaacttgatcgtctccccaccttctgaacccagccatcataataggcctcatcttttcactcaattgaaaattcaactgttggaattcatggtcttgctgtgttgtttgctccctctttgat

SEQ ID NO: 276718 - DNA, 551 bp, Homo sapiens
gttacttcttataaagtgacccaccaaacaatacacagtttggactacaagagagcaacagagtttgcttatgccactggaaaccgttcaatcacaagagaagagaagccttagaccaagggatacaaagatcacatatcatttctctctttttgtgcttttaccaggaaggcgattttgtgccccaataagccaaccctaactagggatcctgttttatttagaatattaagccattcaccttaatgcatgctctgttttatatccattgcctatttgcaaatgataaattcttacccaaatgtccctattacatgttcaaagcagctgccttctctatatctagttgcaggtgttattttgggcacttcttttaatattcaggaagaaaagagaaaatarcttgttaaaaagttaagatacctcttaaaacttgatcgtctccccaccttctgaacccagccatcataataggcctcatcttttcactcaattgaaaattcaactgttggaattcatggtcttgctgtgttgtttgctccctctttgat

SEQ ID NO: 276719 - DNA, 574 bp, Homo sapiens
aacagtgagtggggagagcagagagaaagtcctgccatgcgtgggaagctcattctcaagaggaagagagaggacctgagccaagcattccatttttactttctaaatttgccatctakataaggcactagcctcttttaggtggaacagctgaaaggatggacaaaacccagaagttgtctgtccaaccccaagtactgataaactccttctcctttctcacttacatgtccaacatctcccatcccccaatgaaccactcttttcaggccagcctattgttgatctattcactgcaactgggaaactatgtatgttgctccttctgtctcattatttctagtttttgtttggttgcccaggggtgattcaattctcacagtgtgggtggtgagttctgtgaattgttggtttgggagtagaagaaacacattaatacttggaaatcatattcttctaaaaagctacacttggaaaacacatgagcgttaaacagtttttgcaaaaactaaatttaaatgttaatcatggaatgagcacacagaacataatagatatataaatataaatattc

SEQ ID NO: 276720 - DNA, 574 bp, Homo sapiens
aacagtgagtggggagagcagagagaaagtcctgccatgcgtgggaagctcattctcaagaggaagagagaggacctgagccaagcattccatttttactttctaaatttgccatctagataaggcactagcctcttttaggtggaacagctgaaaggatggacaaaacccagaagttgtctgtccaaccccaagtactgataaactccttctcctttctcacttacatgtccaacatctcccatcccccaatgaaccactcttttcaggccagcctattgttgatctattcactgcaactgggaaactatgtatgttgctccttctgtctcattatttctagtttttgtttggttgcccaggggtgattcaattctcacagtgtgggtggtgagttctgtgaattgttggtttgggagtagaagaaacacattaatacttggaaatcatattcttctaaaaagctacacttggaaaacacatgagcgttaaacartttttgcaaaaactaaatttaaatgttaatcatggaatgagcacacagaacataatagatatataaatataaatattc

SEQ ID NO: 276721 - DNA, 1163 bp, Homo sapiens
aatacatgagattcaaagagtaaattaccttagaatgcaaagaacaaataaagaaaaagaaatataataaaaggaaaagtagcaaaggaattatagttcatagaaaaagaaagtgccaagaaacagtttaaaaagttcaacctcatttattattaaaaacataacaaagacagggaggtatcattttaacttcagactttccaaaaattaaattaaataatatctaaagtgtaggaagcagaactcttgctactgcagatggaagaagaagttgctctcaatgattttggcacttatcrtctgactgactgtatttttttcttgctttatttatcattttttttctctcactagactacaaagaccagtttgcaaatataagactcagtctcctttgttcacagtaatacttcatgagttaaaacattgtgttttaactattctataaaattctatatattctgtaaacatttattagaaaaaatgattgggtatacttttctgagaatcattttcctcacccataaagtaaaaattaggtcctaaaaaatgttggcagggaagcattaaagaagacatatwaatacatgagattcaaagagtaaattaccttagaatgcaaagaacaaataaagaaaaagaaatataataaaaggaaaagtagcaaaggaattatagttcatagaaaaagaaagtgccaagaaacagtttaaaaagttcaacctcatttattattaaaaacataacaaagacagggaggtatcattttaacttcagactttccaaaaattaaattaaataatatctaaagtgtaggaagcagaactcttgctactgcagatggaagaagaagttgctctcaatgattttggcacttatcatctgactgactgtatttttttcttgctttatttatcattttttttctctcactagactacaaagwccagtttgcaaatataagactcagtctcctttgttcacagtaatacttcatgagttaaaacattgtgttttaactattctataaaattctatatattctgtaaacatttattagaaaaaatgattgggtatacttttctgagaatcattttcctcacccataaagtaaaaattaggtcctaaaaaatgttggcagggaagcattaaagaagacatat

SEQ ID NO: 276722 - DNA, 581 bp, Homo sapiens
aatacatgagattcaaagagtaaattaccttagaatgcaaagaacaaataaagaaaaagaaatataataaaaggaaaagtagcaaaggaattatagttcatagaaaaagaaagtgccaagaaacagtttaaaaagttcaacctcatttattattaaaaacataacaaagacagggaggtatcattttaacttcagactttccaaaaattaaattaaataatatctaaagtgtaggaagcagaactcttgctactgcagatggaagaagaagttgctctcaatgattttggcacttatcatctgactgactgtatttttttcttgctttatttatcattttttttctctcactagactacaaagaccagtttgcaaatataagactcagtctcctttgttcacagtaatacttcatgagttaaaacattgtgttttaactattctataaaattctatatattctgtaaacatttattagaaaaaatgattgggtatacttttctgagaatcattttcctcacccataaagtaaaaattaggtcytaaaaaatgttggcagggaagcattaaagaagacatat

SEQ ID NO: 276723 - DNA, 616 bp, Homo sapiens
ctcaaaaaataaatatgttgaggaaaagactcttttctyatttaccctatgaaattgcactgcctggtaaaataataaaaaataaaccaaagataataaatattaggaaagataatatgtgaaataataatcatttattttttcagaagaagacaaccaacttatcagtagtactttgcattatattcagtgtcctgtaagctcaacacttatgcagaaagtttactgcatatatttgctgttattaaaagagcacgaattaacatgcagttatgcatgaagaggaagcatatgggacaaatgttgaaggagaactgtatatacatttggtttagtaattcaacatcattaatttgtgtttgaaatgcaatacatatttatcttaaaagatttggggccaaaaatatgcaaattacatggcttcatagaattgacaataaagtaaaacaagagacaatacactaaaccgagaatggtgctaaaccaagagtaatttgtaatagaaaggaagactatcaactactgaacaccaggtgcacttcgaatgctgattcagagacttcaggaagagatttgctaattttggattataaatagtacattttagtaaccaaaa

SEQ ID NO: 276724 - DNA, 616 bp, Homo sapiens
ctcaaaaaataaatatgttgaggaaaagactcttttcttatttaccctatgaaattgcactgcctggtaaaataataaaaaataaaccaaagataataaatattaggaaagataatatgtgaaataataatcatttattttttcagaagaagacaaccaacttatcagtagtactttgcattatattcagtgtcctrtaagctcaacacttatgcagaaagtttactgcatatatttgctgttattaaaagagcacgaattaacatgcagttatgcatgaagaggaagcatatgggacaaatgttgaaggagaactgtatatacatttggtttagtaattcaacatcattaatttgtgtttgaaatgcaatacatatttatcttaaaagatttggggccaaaaatatgcaaattacatggcttcatagaattgacaataaagtaaaacaagagacaatacactaaaccgagaatggtgctaaaccaagagtaatttgtaatagaaaggaagactatcaactactgaacaccaggtgcacttcgaatgctgattcagagacttcaggaagagatttgctaattttggattataaatagtacattttagtaaccaaaa

SEQ ID NO: 276725 - DNA, 616 bp, Homo sapiens
ctcaaaaaataaatatgttgaggaaaagactcttttcttatttaccctatgaaattgcactgcctggtaaaataataaaaaataaaccaaagataataaatattaggaaagataatatgtgaaataataatcatttattttttcagaagaagacaaccaacttatcagtagtactttgcattatattcagtgtcctgtaagctcaacacttatgcagaaagtttactgcatatatttgctgttattaaaagagcacgaattaacatgcagttatgcatgaagaggaagcatatgggacaaatgttgaaggagaactgtatatacatttggtttagtaattcaacatcattaatttgtgtttgaaatgcaatacatatttatcttaaaagatttggggccaaaaatatgcaaattacatggcttcatagaattgacaataaagtaaaacaagagacaatacactaaaccgagaatggtgctaaaccaagagtaatttgtaayagaaaggaagactatcaactactgaacaccaggtgcacttcgaatgctgattcagagacttcaggaagagatttgctaattttggattataaatagtacattttagtaaccaaaa

SEQ ID NO: 276726 - DNA, 1128 bp, Homo sapiens
ctcaaaaaataaatatgttgaggaaaagactcttttcttatttaccctatgaaattgcactgcctggtaaaataataaaaaataaaccaaagataataaatattaggaaagataatatgtgaaataataatcatttattttttcagaagaagacaaccaacttatcagtagtactttgcattatattcagtgtcctgtaagctcaacacttatgcagaaagtttactgcatatatttgctgttattaaaagagcacgaattaacatgcagttatgcatgaagaggaagcatatgggacaaatgttgaaggagaactgtatatacatttggtttagtaattcaacatcattaatttgtgtttgaaatgcaatacatatttatcttaaaagatttggggccaaaaatatgcaaattacatggcttcatagaattgacaataaagtaaaacaagagacaatacactaaaccgagaatggtgctaaaccaagagtaatttgtaatagaaaggaagactatcaactactgaacaccaggtgmacttcgaatgctgattcagagacttcaggaagagatttgctaattttggattataaatagtacattttagtaaccaaaawcacacataaagctttgcttcacctgtgcctgtttaggaaaagctctgcctgcaacatcgtgaaccttgaagacatctacatcattaaaaaccagcagttttgctgaggcccatagtctgcctgattttcttacctttgttaagggctgtgccwttgctgaggtcactgtgttctcatttctgcttgccaggctacctgtgcctgcccgttggccagtgttggggtgtttttattttgctccctgacattttcctctctgtgatttattttttaacaagttgcctagcctaaaaaaatgttgagatttcctagggggactaacaaattgagagtttaaaaaggaatgttaaatgatagtcaaatatcacatttattactggtagaagatggagttgagggagaaagtcaaattcacttgctgatcttaccccacaaataggcagatttacccaccaagacacaagtaatactgtaaagtttcccacaaggcagagtggaatggcaggcagcc

SEQ ID NO: 276727 - DNA, 511 bp, Homo sapiens
cacacataaagctttgcttcacctgtgcctgtttaggaaaagctctgcctgcaacatcgtgaaccttgaagacatctacatcattaaaaaccagcagttttgctgaggcccatagtctgcctgattttcttacctttgttaagggctgtgccattgctgaggtcrctgtgttctcatttctgcttgccaggctacctgtgcctgcccgttggccagtgttggggtgtttttattttgctccctgacattttcctctctgtgatttattttttaacaagttgcctagcctaaaaaaatgttgagatttcctagggggactaacaaattgagagtttaaaaaggaatgttaaatgatagtcaaatatcacatttattactggtagaagatggagttgagggagaaagtcaaattcacttgctgatcttaccccacaaataggcagatttacccaccaagacacaagtaatactgtaaagtttcccacaaggcagagtggaatggcaggcagcc

SEQ ID NO: 276728 - DNA, 536 bp, Homo sapiens
ggaatgggctggcactaaacactgcaaagactttggattttagttttaataagttggagctactaacaagttttaggagcaaagytaccaactaaagttttaagaagtatatgtaaattattgcttataataaactttaaatataaaatataaattaatgtcaatttgaaaagaatttattcaccgagtacataaacccagcactttgggaggccgaggcagtcagatcatgaggtaaagagatcaagaccatcctggccaacatggtaaaaccctgtctctactaaaaatacaaaaattagctgggcatcgtggcacgcgcctgtagtcccagctactcaggaggctgaagtaggagaatcaaatcacttgaacccaggggcagaggttgcagtgaactgagatcataccactgcactccagctctggcgacagagcaagactccatcaaaaaaaaaaaaaaaaaaggaaaaaaagaatttattctagtacttacatgtttgtgctgaatatatgataaagagctactactttgt

SEQ ID NO: 276729 - DNA, 536 bp, Homo sapiens
ggaatgggctggcactaaacactgcaaagactttggattttagttttaataagttggagctactaacaagttttaggagcaaagctaccaactaaagttttaagaagtatatgtaaattattgcttataataaacyttaaatataaaatataaattaatgtcaatttgaaaagaatttattcaccgagtacataaacccagcactttgggaggccgaggcagtcagatcatgaggtaaagagatcaagaccatcctggccaacatggtaaaaccctgtctctactaaaaatacaaaaattagctgggcatcgtggcacgcgcctgtagtcccagctactcaggaggctgaagtaggagaatcaaatcacttgaacccaggggcagaggttgcagtgaactgagatcataccactgcactccagctctggcgacagagcaagactccatcaaaaaaaaaaaaaaaaaaggaaaaaaagaatttattctagtacttacatgtttgtgctgaatatatgataaagagctactactttgt

SEQ ID NO: 276730 - DNA, 536 bp, Homo sapiens
ggaatgggctggcactaaacactgcaaagactttggattttagttttaataagttggagctactaacaagttttaggagcaaagctaccaactaaagttttaagaagtatatgtaaattattgcttataataaactttaaatataaaatataaattaatgtcaatttgaaaagaatttattcacygagtacataaacccagcactttgggaggccgaggcagtcagatcatgaggtaaagagatcaagaccatcctggccaacatggtaaaaccctgtctctactaaaaatacaaaaattagctgggcatcgtggcacgcgcctgtagtcccagctactcaggaggctgaagtaggagaatcaaatcacttgaacccaggggcagaggttgcagtgaactgagatcataccactgcactccagctctggcgacagagcaagactccatcaaaaaaaaaaaaaaaaaaggaaaaaaagaatttattctagtacttacatgtttgtgctgaatatatgataaagagctactactttgt

SEQ ID NO: 276731 - DNA, 536 bp, Homo sapiens
ggaatgggctggcactaaacactgcaaagactttggattttagttttaataagttggagctactaacaagttttaggagcaaagctaccaactaaagttttaagaagtatatgtaaattattgcttataataaactttaaatataaaatataaattaatgtcaatttgaaaagaatttattcaccgagtacataaacccagcactttgggaggccgaggcagtcagatcatgaggtaaagagatcaagaccatcctggccaacatggtaaaaccctgtctctactaaaaatacaaaaattagctgggcatcgtggcacrcgcctgtagtcccagctactcaggaggctgaagtaggagaatcaaatcacttgaacccaggggcagaggttgcagtgaactgagatcataccactgcactccagctctggcgacagagcaagactccatcaaaaaaaaaaaaaaaaaaggaaaaaaagaatttattctagtacttacatgtttgtgctgaatatatgataaagagctactactttgt

SEQ ID NO: 276732 - DNA, 505 bp, Homo sapiens
tatttattcaatggtgtgtatatatgtgtgtattgaaaacaggtggaaagagagaaagttaatgagggtggaaaaggaaatgggaactagaygactgaggaatgtgtgcaaagacatggaggccagtgtatatgggactgtaacattgtatttatggaagtagagttgaagatgctgggtggccagaaattaaggtagagttgcaaactggatatgaagaggtttctattacagactaatgaattttggacttatccttaaagatttgatgacctacacaatatgcaaaacaaagaagtggcatgataatatttgcattttaggaagatcattctggcattattatgtcttggagtgaacagcctagaaggctgaaaatattcaatcagccaagtaagacattataaagactttaattaaggctgtctggtaaaggggatgggaagtaatggacactaatgagaaccatcaaagatgcaaaactgatgagagatggtgcatgaat

SEQ ID NO: 276733 - DNA, 567 bp, Homo sapiens
tgaattttggacttatccttaaagatttgatgacctacacaatatgcaaaacaaagaagtggcatgataatatttgcattttaggaagatcattctggcattattatgtcttggagtgaacagcctagaaggctgaaaatattcaatcagccaagtaagacattataaagactttaattaaggctgtctggtaaaggggatgggaagtaatggacactaatgagaaccatcaaagatgcaaaactgatgagagatggtgcatgaatggtgagggcaggtgatgtcaaagctgcatgattccagcttattcagctaggtgcatagtggtttcattaattgagataggaaataaaaagggaaggaaaagtgtctggctaaaaggtcagtaaaattaaggatttgattttacacatattaagtttgaagtgttgtgaagcagttagcttttccagtaggcatcatgtctcaayggaaagatttgagctgaaaatatagacatgagtttaacagcctaggcatggaaactgcatgagtgtgtgccataaaaaagagaagaaaactggggcc

SEQ ID NO: 276734 - DNA, 581 bp, Homo sapiens
cagctgcaggcaacatttttgtccccatgctaaggtttttaaatgctgtatatmaaatacattcactaatggttaccatggagaataggagtatttctttggggtataattcatatttatacataatgtcaagtattagacatgtgattttgtcttctgtcttctgtacttacggtatactggtttttcctcatggcatttggtattttaattaaataatgcctttcttctttccgtgctaacatgagaaaagtctgactatgtaatgcagggttccattttattttccttgtttacattaccactttattttaattgtctatcttgcggagagaattataagcataagtttgagatggttataattatagtggcatttacgttaaatagtggagaacatattttccaagtttaaaagcacacttagttctcctagtttggcgattcagaacattagactgaaatgggtgctgtactgattgagttgttatatttttgctcaaagtttttaaagggacaaccaaataagctgtgtttctggaagaaaaatttctgagcacataaatttaaaatgtttttta

SEQ ID NO: 276735 - DNA, 581 bp, Homo sapiens
cagctgcaggcaacatttttgtccccatgctaaggtttttaaatgctgtatatcaaatacattcactaatggttaccatggagaataggagtatttctttggggtataattcatatttatacataatgtcaagtattagacatgtgattttgtcttctgtcttctgtacttacggtatactggtttttcctcatggcatttggtattttaattaaataatgcctttcttctttccgtgctaacatgagaaaagtctgactatgtaatgcagggttccattttattttccttgtttacattaccactttattttaattgtctatcttgcggagagaattataagcataagtttgagatggttataattatagtggcatttacgttaaatagtggagaacatattttccaagtttaaaagcacacttagttctcctagtttggcgattcagaacattagactgaaatgggtgctgtactgattgagttgttatatttttgctcaaagtttttaaagggmcaaccaaataagctgtgtttctggaagaaaaatttctgagcacataaatttaaaatgtttttta

SEQ ID NO: 276736 - DNA, 566 bp, Homo sapiens
tctaattggtaattgatgggggaaagttctgctttgtaattcacaaggtggggtggggaattgtctactgggaactgtaagtaaggctagaaggagtcttattcacccattgtgcccctttcttagatcgaagttaaaaatcraaaggctgtgctttgttagaaaatagtatctttagagatttcccccccagagcatttcaaagttcaatgtttaagaatttggctcttgcatttgtgtgaactggcactcttttcagcaacttccagtacaaaatgtaggaaacatgtccttggatactacccacattatttttcagcccaatccttgatgtaccctgtatcttcctggttttcctagacctgctcaactccaggtattaaaaaaaaaaatgcatatgctcaaactccaaacttcagcctttgtctttcagaattttcagagataatcatattcatacttggaacattggagagtagatggattttggaattaatctcacaagcccaggctactccaaacccagaaagctacaagcatttgttacccacccttctttctcccat

SEQ ID NO: 276737 - DNA, 566 bp, Homo sapiens
tctaattggtaattgatgggggaaagttctgctttgtaattcacaaggtggggtggggaattgtctactgggaactgtaagtaaggctagaaggagtcttattcacccattgtgcccctttcttagatcgaagttaaaaatcgaaaggctgtgctttrttagaaaatagtatctttagagatttcccccccagagcatttcaaagttcaatgtttaagaatttggctcttgcatttgtgtgaactggcactcttttcagcaacttccagtacaaaatgtaggaaacatgtccttggatactacccacattatttttcagcccaatccttgatgtaccctgtatcttcctggttttcctagacctgctcaactccaggtattaaaaaaaaaaatgcatatgctcaaactccaaacttcagcctttgtctttcagaattttcagagataatcatattcatacttggaacattggagagtagatggattttggaattaatctcacaagcccaggctactccaaacccagaaagctacaagcatttgttacccacccttctttctcccat

SEQ ID NO: 276738 - DNA, 566 bp, Homo sapiens
tctaattggtaattgatgggggaaagttctgctttgtaattcacaaggtggggtggggaattgtctactgggaactgtaagtaaggctagaaggagtcttattcacccattgtgcccctttcttagatcgaagttaaaaatcgaaaggctgtgctttgttagaaaatagtatctttagagatttyccccccagagcatttcaaagttcaatgtttaagaatttggctcttgcatttgtgtgaactggcactcttttcagcaacttccagtacaaaatgtaggaaacatgtccttggatactacccacattatttttcagcccaatccttgatgtaccctgtatcttcctggttttcctagacctgctcaactccaggtattaaaaaaaaaaatgcatatgctcaaactccaaacttcagcctttgtctttcagaattttcagagataatcatattcatacttggaacattggagagtagatggattttggaattaatctcacaagcccaggctactccaaacccagaaagctacaagcatttgttacccacccttctttctcccat

SEQ ID NO: 276739 - DNA, 593 bp, Homo sapiens
cagcctttgtctttcagaattttcagagataatcatattcatacttggaacattggagagtagatggattttggaattaatctcacaagcccaggctactccaaacccagaaagctacaagcatttgttacccacccttctttctcccatccttccagtaatgaggacctgccagagaagtgggtttcttcccaatcactgattagtatttcaattcccctgctaggayaagaaaattcctaggaagctgaggctttttgctgtggctttcacaacctaggttctatctcagttcttctgtggggagtatttattatgcccatagtcaatgccactgggtttgcttcaaacaagagtgaattcctggaagaaaaaaagtgcttgctgcctgactcctatgtataagtatgttgccaggagattcctgtcacaaaggcccagcccccagatcagatactatgattaataatataagcctggaagattctaagtttgtgctgccttgtcagccctcacttgaatcggtagcacccctgctcccaccgatgccattcctataggtgaggtagacccctcatcactgacccatgccc

SEQ ID NO: 276740 - DNA, 593 bp, Homo sapiens
cagcctttgtctttcagaattttcagagataatcatattcatacttggaacattggagagtagatggattttggaattaatctcacaagcccaggctactccaaacccagaaagctacaagcatttgttacccacccttctttctcccatccttccagtaatgaggacctgccagagaagtgggtttcttcccaatcactgattagtatttcaattcccctgctaggataagaaaattcctaggaagctgaggctttttgctgtggctttcacaacctagrttctatctcagttcttctgtggggagtatttattatgcccatagtcaatgccactgggtttgcttcaaacaagagtgaattcctggaagaaaaaaagtgcttgctgcctgactcctatgtataagtatgttgccaggagattcctgtcacaaaggcccagcccccagatcagatactatgattaataatataagcctggaagattctaagtttgtgctgccttgtcagccctcacttgaatcggtagcacccctgctcccaccgatgccattcctataggtgaggtagacccctcatcactgacccatgccc

SEQ ID NO: 276741 - DNA, 593 bp, Homo sapiens
cagcctttgtctttcagaattttcagagataatcatattcatacttggaacattggagagtagatggattttggaattaatctcacaagcccaggctactccaaacccagaaagctacaagcatttgttacccacccttctttctcccatccttccagtaatgaggacctgccagagaagtgggtttcttcccaatcactgattagtatttcaattcccctgctaggataagaaaattcctaggaagctgaggctttttgctgtggctttcacaacctaggttctatctcagttcttctgtggggagtatttattatgcccatagtcaatgccactgggtttgcttcaaacaagagtgaattcctggaagaaaaaaagtgcttgctgcctgactcctatgtataagtatgttgccaggagattcctgtcacaaaggcccagcccccagatcagatactatgattaataatataagcctggaagattctaagtttgtgctgccttgtcagccctcacttgaatyggtagcacccctgctcccaccgatgccattcctataggtgaggtagacccctcatcactgacccatgccc

SEQ ID NO: 276742 - DNA, 1075 bp, Homo sapiens
cttactatacaagcagtagaagtgtatcctttcttgctgatttttcaagctatttattttgttcacatcttatacagaataatttctgtttcaagtttttgcctcttttctttacacagaaaagatagttccttcrgagtattcattgtgaaagaaggcaccttcttgaattttatattgtattatagcttctattggttttttacttttccttgggcttaaaacttgtgtgaaaatctttctaagtatgaaatgtttgttctatactctatcctacatctataacttacacaattcttgcaactgaacccagtgaacctctttactgttaccaccatctacccactcataaacatcagatatctactggggaaacaatctaattttgggaatactgaaacagaaagatcaagagatacatcccagagcatttcttacattgcagaaactagataaagtacagactaaagaaaagaaccgggggtggtggaaaatggcctgcagggaaataaatagaaacacagtgttctgaagttttctccatactggcatatgagataaawcttttcctcacaaaaccaagaaggacgtctacawgctaaagcagaatggttctgcttgaaagggtgggaaatatcttgcctacttgcccttttccgtttttccagaatttctcctgtgccatctgttaagagctctagggaagatctctactggctaccaaccctggataccatatatgatatgtttctatatcctgccttaatttccttaatggtgaagatttatgtcagtcagtgttcaacacaatttagtagctatgagagcaggagaataactggtccaagttttgactcttcttgaacttgctgcaatttttccattcgatcaatataaggaaatcatgattaatgcgtaatgtttcatttaatatacataagtgggaaaaatgttgacctctgatgactggttacaaatgactcgaagaaaacaaaaatcaataaagaaattagctaaatcgataaagaaattagctaaccttgagttaactcccaatattttacttatttgcttt

SEQ ID NO: 276743 - DNA, 622 bp, Homo sapiens
catgcagtagaaatgatgctgcatgactttcaggtcccagtcttaaaaggcaacamaactcccacctggctttctctctctcagacacatgccaccatgttgcaaagaagctcaggctggatggagaggccacatgtgggtattctggctgatagcaccaggtaggcctggaacctagagtcaatactaactatcagacatgcagtgaattcaaaaaattagattccaatgccaagactttaagtcttttagctgatgaggaggcaaaatttcctccccaacctctcaactgacccaaagaaattatgagtgaaaattggcagttccaagatggccaaataggaacagctccagtctacagctcccagcatgagcgacacagaagatgggtgatttctgcatttccaactgaggtactgggttcatctcactggggcttgtcagacagtggatgcagttcaccgaacatgagctgaagcagggtgaggcattgcctcacccgggaagcgcaaggggtcagggaattccctttcacagccaagcaaagctgtgacagacggcagctggaaaatcgggtcactcccaacctaatactgtgattttccaatggtcttagcaaatg

SEQ ID NO: 276744 - DNA, 622 bp, Homo sapiens
catgcagtagaaatgatgctgcatgactttcaggtcccagtcttaaaaggcaacaaaactcccacctggctttctctctctcagacacatgccaccatgttgcaaagaagctcaggctggatggagaggccacatgtgggtattctggctgatagcaccaggtaggcctggaacctagagtcaatactaactatcagacatgcagtgaattcaaaaaattagattccaatgccaagactttaagtcttttagctgatgaggaggcaaaatttcctccccaacctctcaactgacccaaagaaattatgagtgaaaattggcagttccaagatggccaaataggaacagctccagtctacagctcccagcatgagcgacacagaagatgggtgatttctgcatttccaactgaggtactgggttcatctcactggggcttgtcagacagtggatgcagtkcaccgaacatgagctgaagcagggtgaggcattgcctcacccgggaagcgcaaggggtcagggaattccctttcacagccaagcaaagctgtgacagacggcagctggaaaatcgggtcactcccaacctaatactgtgattttccaatggtcttagcaaatg

SEQ ID NO: 276745 - DNA, 622 bp, Homo sapiens
catgcagtagaaatgatgctgcatgactttcaggtcccagtcttaaaaggcaacaaaactcccacctggctttctctctctcagacacatgccaccatgttgcaaagaagctcaggctggatggagaggccacatgtgggtattctggctgatagcaccaggtaggcctggaacctagagtcaatactaactatcagacatgcagtgaattcaaaaaattagattccaatgccaagactttaagtcttttagctgatgaggaggcaaaatttcctccccaacctctcaactgacccaaagaaattatgagtgaaaattggcagttccaagatggccaaataggaacagctccagtctacagctcccagcatgagcgacacagaagatgggtgatttctgcatttccaactgaggtactgggttcatctcactggggcttgtcagacagtggatgcagttcaycgaacatgagctgaagcagggtgaggcattgcctcacccgggaagcgcaaggggtcagggaattccctttcacagccaagcaaagctgtgacagacggcagctggaaaatcgggtcactcccaacctaatactgtgattttccaatggtcttagcaaatg

SEQ ID NO: 276746 - DNA, 1251 bp, Homo sapiens
catgcagtagaaatgatgctgcatgactttcaggtcccagtcttaaaaggcaacaaaactcccacctggctttctctctctcagacacatgccaccatgttgcaaagaagctcaggctggatggagaggccacatgtgggtattctggctgatagcaccaggtaggcctggaacctagagtcaatactaactatcagacatgcagtgaattcaaaaaattagattccaatgccaagactttaagtcttttagctgatgaggaggcaaaatttcctccccaacctctcaactgacccaaagaaattatgagtgaaaattggcagttccaagatggccaaataggaacagctccagtctacagctcccagcatgagcgacacagaagatgggtgatttctgcatttccaactgaggtactgggttcatctcactggggcttgtcagacagtggatgcagttcaccgaacatgagctgaagcagggtgaggcattgcctcacccgggaagygcaaggggtcagggaattccctttcacagccaagcaaagctgtgacagacggcagctggaaaatcgggtcactcccaacctaatactgtgattttccaatggtcttagcaaatgwaattatctctaaagctttatctagaataatatgaattttggagagacttctttgtagccaggagcacaaaatttatgtgctcgaagagagagagagggagacaaagagaaaaggggaagagcacagagaaagacaggaagaaaggatacacaaaagaatagatgttgataagtgaaagccctactgctcaccacactgctcagagtcaccacaatctttcacctggattactatatcagcttctaacaggtttctgtctggactcacccttggtcctcctgaccatgataccagttataagtgagaatcagaccacaactctgawtttctgaaatcccatttgtattagtccattcttacactgctataaagaactgaccgagactggataatttatgaaggaaagacatttaattgactcacagttccacaggtctagagaggcctcaggatacttaacaatcatggcggaaaggaaaacaaacacgtccttcatcacatggtggcaggagagagaaatgagtgcccagccaagggggaagccccttatgaaacttactaccaggagaaaaggatggaggaaatcgccctatgattcaattatttccaccttgtcccttccatgaca

SEQ ID NO: 276747 - DNA, 593 bp, Homo sapiens
gatgagatgtagtaatgagtaatataattgcctttttaatgctgtagtaggtatgytgtggtcattaattatcaacttgactaattattattggtaacaattaatctttcctctgataattattgctgatgaatatacatgttttgcccccattaccttttaccatgacatgaagatgatatatgtgattattaaactacagactgtctaaaacagagttaaataatttgatatagtaaaggtatccttgagctcagataaattttcattaagccatggaactgcaaaaggcatttgacctaatgacatttttcagatattaaggttatctcattccccactctccctcgcagatttgtttctttgtatttcatatatgacggtgcagagcttctggctgccttaaatagaggagttattcagaagtgtgcttctgtaaatgagagggtgtatgtaatcttagcactgagaaaaaggagtagaaaaaaagtcttacaatgctaactcttaaaaattcttcatagtaattaccaaatttcatgcagatgttcttcaacttacgagagggttgtatcctgataagctcattgtaa

SEQ ID NO: 276748 - DNA, 341 bp, Homo sapiens
gtttaacttgaggtttactgatttacgactatcatccaagaaataataaaataattagataatatattggtttctttgaagagaaagtatgggtggtgaatgatgtattcttacaaacaatacaggaggaattcataggcagtggtttgtctaaacaaagaagggttgtagtaacccgcagtttttcttacratcaatatgaacctgggaaatggcactacttaaactaaatatacgataaggtagtggaaagccctgtggttaagagcaggaattccgaggtcaggagaccctgtgttggaggctcatctctctatttagtatgaattttaacacaagtt

SEQ ID NO: 276749 - DNA, 478 bp, Homo sapiens
agaaacatttttaaattacatgtaaatacagatataacttttagacaaaactattttcaaaatcaacagtatcatatttattaaataatttgtctcaatccatcagtaagtctgttgaagaacatttttttgttttctgaaatattctctttaagcctaattgatattctgtcctctaatgtgaggaagtatgtaagcagaaggatggttcatagctagtcactttattcctccaggtcattctagagagaattttaatgtggatttcacattgcatcactggtatgggtggcttattttgtctgactctctaaatagaytcatgctggaaccttactccatttgtgatgtccttcaacatttgaccaagcatactttgtcagattggtctaaactctatagtggtaacaaaattaaaacattttataatctagtacagcccactcagacatcatgctcttcttttatctctactgaa

SEQ ID NO: 276750 - DNA, 478 bp, Homo sapiens
agaaacatttttaaattacatgtaaatacagatataacttttagacaaaactattttcaaaatcaacagtatcatatttattaaataatttgtctcaatccatcagtaagtctgttgaagaacatttttttgttttctgaaatattctctttaagcctaattgatattctgtcctctaatgtgaggaagtatgtaagcagaaggatggttcatagctagtcactttattcctccaggtcattctagagagaattttaatgtggatttcacattgcatcactggtatgggtggcttattttgtctgactctctaaatagactcatgctggaamcttactccatttgtgatgtccttcaacatttgaccaagcatactttgtcagattggtctaaactctatagtggtaacaaaattaaaacattttataatctagtacagcccactcagacatcatgctcttcttttatctctactgaa

SEQ ID NO: 276751 - DNA, 468 bp, Homo sapiens
aacattccctcaataaactatgattctctaaaaaattaatttatctatttctctttttyaaaatttattttttcaggctgggccacttattacctagaagagtaaattatgtgagcataattcccattcctgaattaatgctttttatttgttacactttaaatatggtaggtttcttttcttagttcatgataagtcattcagtcagtcagttcacattgaacacaccctctgtgccagttgtttctttatgccagtaggagctgggataaaaaaacataaaagttaaataggtaccctggcttcaaagagcttgcagtttagtgataaagagaggcctgcaaacaggcaattgccttgccatgtgataagtgttctacagggagcagtgcatggtgccacaggagcctatagttggtgttggagacataatgtttaaacacagacctgaaagttgagtaggaggaa

SEQ ID NO: 276752 - DNA, 517 bp, Homo sapiens
tgcatatatgaaccatccttgcattccaggaatgaagcctacttgatcatgtagaattaacttttttaatgataatttttacatctgtgcttatcaaacatattggcagatagttttttttttttttcatttgtctttaccaggtttttgtatcagggtgatgttggcttcatagaatcaactagggaagagtccctccacctcaattttatggaatactttcaataggacttgtgccagctcttctatgtacatctgctagaattcagctgtgtatccttctggtctggagctttttgtgagtgagtaggttttttattactgattcaatttcagaactcatgttcgtctgttcagggtttcaagttttttttttttttttttttttttttaraccagtctcattctatcacctaggctgaagtgcagtggtgcaatcttggctcactgcaatctctgcctcctggaatcaagcaattctcttgcctcagcctcctaagtagctgggattacaggc

SEQ ID NO: 276753 - DNA, 1865 bp, Homo sapiens
aacttgcaatagggtaccttcagaagactagcgtcaacctaagtgtttttgctcttctgcacccattcttcacccctttattatattttaaaaaaccaaaaaatcacttttatcaaarattttttttttagtgccacagcttggttgcatttttattcatattctctcttttttgtcaatgattccttccaattattatagggatatttttgttggttaggttaaactttaagtgtgtattcagcacttccaggcaatatccactatatttcccagtgaattcactctcacaatctcaaaatggactgatctggtggctctgcttttattttactaaaaatattcaagcaatgagaagaaaacttatttatcttgctggcaccacatttaccaaatacatacacgtgtccctatatatcttccctcctgctacatgcatccaatactactgctcttatagaagatgctattcttatgtatttgattccactcattttcttcaaggaattttgctctgcaaatatatcacctcttttctgcattatcagattttttctattaatctattattcctattagcatgcaaacataatgtaatgttttccatgtgtaacaaacaatwaacttgcaatagggtaccttcagaagactagcgtcaacctaagtgtttttgctcttctgcacccattcttcacccctttattatattttaaaaaaccaaaaaatcacttttatcaaaawttttttttttagtgccacagcttggttgcatttttattcatattctctcttttttgtcaatgattccttccaattattatagggatatttttgttggttaggttaaactttaagtgtgtattcagcacttccaggcaatatccactatatttcccagtgaattcactctcacaatctcaaaatggactgatctggtggctctgcttttattttactaaaaatattcaagcaatgagaagaaaacttatttatcttgctggcaccacatttaccaaatacatacacgtgtccctatatatcttccctcctgctacatgcatccaatactactgctcttatagaagatgctattcttatgtatttgattccactcattttcttcaaggaattttgctctgcaaatatatcacctcttttctgcattatcagattttttctattaatctattattcctattagcatgcaaacataatgtaatgttttccatgtgtaacaaacaatwaacttgcaatagggtaccttcagaagactagcgtcaacctaagtgtttttgctcttctgcacccattcttcacccctttattatattttaaaaaaccaaaaaatcacttttatcaaaaatttttwttttagtgccacagcttggttgcatttttattcatattctctcttttttgtcaatgattccttccaattattatagggatatttttgttggttaggttaaactttaagtgtgtattcagcacttccaggcaatatccactatatttcccagtgaattcactctcacaatctcaaaatggactgatctggtggctctgcttttattttactaaaaatattcaagcaatgagaagaaaacttatttatcttgctggcaccacatttaccaaatacatacacgtgtccctatatatcttccctcctgctacatgcatccaatactactgctcttatagaagatgctattcttatgtatttgattccactcattttcttcaaggaattttgctctgcaaatatatcacctcttttctgcattatcagattttttctattaatctattattcctattagcatgcaaacataatgtaatgttttccatgtgtaacaaacaat

SEQ ID NO: 276754 - DNA, 1118 bp, Homo sapiens
aacttgcaatagggtaccttcagaagactagcgtcaacctaagtgtttttgctcttctgcacccattcttcacccctttattatattttaaaaaaccaaaaaatcacttttatcaaaaattttttttttagtgccacagcttggttgcatttttattcatattctctcttttttgtcaatgattccttccaattattayagggatatttttgttggttaggttaaactttaagtgtgtattcagcacttccaggcaatatccactatatttcccagtgaattcactctcacaatctcaaaatggactgatctggtggctctgcttttattttactaaaaatattcaagcaatgagaagaaaacttatttatcttgctggcaccacatttaccaaatacatacacgtgtccctatatatcttccctcctgctacatgcatccaatactactgctcttatagaagatgctattcttatgtatttgattccactcattttcttcaaggaattttgctctgcaaatatatcacctcttttctgcattatcagattttttctattaatctattattcctattagcatgcaaacataatgtaatgttttccatgtgtaacaaacaatwctcacaatctcaaaatggactgatctggtggctctgcttttattttactaaaaatattcaagcaatgagaagaaaacttatttatcttgctggcaccacatttaccaaatacatacacgtgtccctatatatcttccctcctgctacatgcatccaatactactgctcttatagaagatgctattcttatgtatttgattccactcattttcttcaaggaattttgctctgcaaatatatcacctcttttctgcattatcagattttttctattaatctattattcctwttagcatgcaaacataatgtaatgttttccatgtgtaacaaacaatatacacaatgaatggggaatgattgctgtcatttttcaatcatccaaaatttatttcagtaagatacattaaaattaaacatataaccaatatacattaacaatatcacttaatataatctcttggcaccaacttttccctatgcattacatacaaaaata

SEQ ID NO: 276755 - DNA, 1030 bp, Homo sapiens
ctcacaatctcaaaatggactgatctggtggctctgcttttattttactaaaaatattcaagcaatgagaagaaaacttatttatcttgctggcaccacatttaccaaatacatacacgtgtccctatatatcttccctcctgctacatgcatccaatactactgctcttatagaagatgctattcttatgtatttgattccactcattttcttcaaggaattttgctctgcaaatatatcacctcttttctgcattatcagattttttctattaatctattattcctattagcatgcaaacataatgtaatgttttccatgtgtaacaaacaatatacacaatgaatggggaatgattgctgtcatttttcaatcatccaaaatttatttcagtaagrtacattaaaattaaacatataaccaatatacattaacaatatcacttaatataatctcttggcaccaacttttccctatgcattacatacaaaaatawtggcaatgtctcagaagatccccatggaatgggaatgtcaatgaaatggatgtctagggtttatgtgcctccagggaagaatcagaaagcccaagacaatcccaacacattttctgagcctgtgtcaacatgagagaacaccacatttttcctgtcatagagtgtgtggaagtaaggtaagagagacttccatcctgaagtagggagaaggaggctgcagagtggaagaacatatgaactgggggaccaggaaagatgagggtgatgtccagatgctggaaaacataaagagatatcagtcaatgtggaggatgttattagataacaagtaacccactccccagtgcctaagtacccaaggaaatataatgtatctgtttagagaaaagaggaagcagtgtgggatcctgaaatgactgaaacaatcttaaatcgactgaaaatattttggtgcttgagwtaaatttatgtttgagaaaccacctagaaacattgtagctgactaaattacattgtttttgtttttggtcatc

SEQ ID NO: 276756 - DNA, 577 bp, Homo sapiens
attaataatcagaacaaataaaaagaggagaaaacaagaataagcatactttgtgcttatatcccactagacatgcttgatccactcgtcggctattttgggaagaaagaggaaagactagaggggaagctgttcacctatatagcagtagtatttgaagaggcagtaatgagattactagtggtttttattttcctattctctgataggatttttttttatcttataacctaatgggattcacactttaagatttcttgtgcctccagatcaaaacaaratgcctctcttcagttaatatacaactttctctcagaaagatggaatggtttcttactaagagctgttgcatgcctacaaaatattcagatgcattcaaactacagtttattctttaacatttcaacacaatatattaaacatcatttttactattatatattttgaaatttttaagttgcatttaacaaaaaaaaatcatttacggtgtgtttaaaagggttagtttttagtctgaagttaatgtggtagagtcagagatcttagggttgggcactggaaataacaggatattggt

SEQ ID NO: 276757 - DNA, 565 bp, Homo sapiens
acccttgtcttacaacatatgcaaaaatcaactcaaaatgaattaaaaactaaatggaagaccagaaaccataaaactctagaagaaaacaggggaaaagctccttgacactggtattggcaacacttttttggatgggatgcaaaaagcacaggcaatcaaacaaaaataaacaagtgagactacaacaaactataaagcttctgtgcagcaaaggaaataaaatgaaaaggcaatctggattgggagaaaataattgcaaccrtttatctaataagagtttaatatacacaatatagaaggaactcacacaactcaatggcaaacaaaacaacccaatttaaaaatgagcaatgaacctgaatagacatttctccaaagacagttggcaagggtgcagagaaaagggaacactcgtgtaatgttgggaatgtagattagtgtaactattgtggacaacaatatgacagttcctaaagaaattaaaaatagaactatcatatgactaagcaatctttcttttgagtatattcccaaataaagtgaaatcactgcctcataaaca

SEQ ID NO: 276758 - DNA, 571 bp, Homo sapiens
actcattcactcttcatgcacactcagaggaacagccatgcaaagacacagcaagcgggaggccatctgaaagccatgaagacagccctcaccaaaactgaaccctgctgacacttgrtctggaacttctagcctccagaactgtgagaaataaatttctgttgttttgctatggcagcccaagcagactagtagagtgttgcaactcatacatgctattttccttcccagaaagaaattaatctatttcatctcattccttggctattagactaagaaaacacacacacacacacacatacacacacacacacacacacataaacacacacatgtgcctgtttccaatttttctttatcagttaaatcactgtttaattccactttggatactatttttatatcatccttgtatgggctttttcataacctatgtcttgggatttccaatttcatgttcttaaaactgtatgagtgactcttccttatctaattttcccaaagcagacctacatcttttgccaacagtgccaaatatctccagagaaacctcttacaaaatccctttgac

SEQ ID NO: 276759 - DNA, 571 bp, Homo sapiens
actcattcactcttcatgcacactcagaggaacagccatgcaaagacacagcaagcgggaggccatctgaaagccatgaagacagccctcaccaaaactgaaccctgctgacacttggtctggaacttctagcctccagaactgtgagaaataaatttctgttgttttgctatggcagcccaagcagactagtagagtgttgcaactcatacatgctattttccttcccagaaagaaattaatctatttcatctcattccttggctattagactaagaaaacacacacacacacacacayacacacacacacacacacacataaacacacacatgtgcctgtttccaatttttctttatcagttaaatcactgtttaattccactttggatactatttttatatcatccttgtatgggctttttcataacctatgtcttgggatttccaatttcatgttcttaaaactgtatgagtgactcttccttatctaattttcccaaagcagacctacatcttttgccaacagtgccaaatatctccagagaaacctcttacaaaatccctttgac

SEQ ID NO: 276760 - DNA, 601 bp, Homo sapiens
ttcacccctgttttgctgcttaggtgcttgagatgatgggctgagtctacctgactctgaccatacacttgccttgtttatgatgctcatccccttgagacctcaagagctgaccttgagactttgcatagtggcttgagacagtggaactaactggctaaccaagaaccaagaggtttttttggccagagtttaggacagaagtccctacagcagggctctagagactgcatactcaratctaaaaaatctgttagtaggatacttgcatattagatgtccattcaccaagttgtctgagaacattttctgcaaatgtggcagacagtgacaaagatttcaaaagtttgtacagctatggagaagattatagacaccttaggaacacccttctcccatattaccagtcatagagtaatctgttggccagtcttaggagagagattaacaaacctctaaatcgacacgtttaacggtacagatccaatgccaagtatatcaaattaagacccaagatcttgttataagtgattgtgtctatcgctctgtgtgtgtgtgtatgtgtgtgtgtgtatgtgtgtgtgtgcacgtacttggcttt

SEQ ID NO: 276761 - DNA, 601 bp, Homo sapiens
ttcacccctgttttgctgcttaggtgcttgagatgatgggctgagtctacctgactctgaccatacacttgccttgtttatgatgctcatccccttgagacctcaagagctgaccttgagactttgcatagtggcttgagacagtggaactaactggctaaccaagaaccaagaggtttttttggccagagtttaggacagaagtccctacagcagggctctagagactgcatactcaaatctaaaaaatctgttagtaggatacttgcatattagatgtccattcaccaagttgtctgagaacattttctgcaaatgtggcagacagtgacaaagatttcaaaagtttgtacagctatggagaagattatagacaccttaggaacacccttctcccatattaccagtcrtagagtaatctgttggccagtcttaggagagagattaacaaacctctaaatcgacacgtttaacggtacagatccaatgccaagtatatcaaattaagacccaagatcttgttataagtgattgtgtctatcgctctgtgtgtgtgtgtatgtgtgtgtgtgtatgtgtgtgtgtgcacgtacttggcttt

SEQ ID NO: 276762 - DNA, 619 bp, Homo sapiens
ggtacacctcacatgtctctaaaacaattgctccatccttattgtagggtcttgtattcagagcatatccctgagtttatttgtgcattgcatatatttctatatgataagcctataaaatagagcatcccagccagatcaaaagaaatgtagttgagtaaactaatggtagctcaaaatctgatggaatctcaggaactaaggtaattaaactatgtggggaataagtcttgagctctcggcattatcaagagcttgggaactcagatcagaagatacaattagctgcctttgcaaacacattgttagaaggcaaagaataatagacttmaatcagttttgtattctgaattacaatcttgctcttacattaatggaccaataaccatgtcaaagtcatagatgattctgagattaaatactatgaggtttaaaaaaatcttcatgctctcagtaatgccatggatcagatactaatgatacaaggtcacattaagaaagggcaattggaaggcacctgtttgctaataaagacttattgaagtcataagcaatcaagacagactttgattctgaacataaacagcaaacagaatatttcatagtggaggtaaaaaat

SEQ ID NO: 276763 - DNA, 622 bp, Homo sapiens
atagacttaaatcagttttgtattctgaattacaatcttgctcttacattaatggaccaataaccatgtcaaagtcatagatgattctgagattaaatactatgaggtttaaaaaaatcttcatgctctcagtaatgccatggatcagatactaatgatacaaggtcacattaagaaagggcaattggaaggcacctgtttgctaataaagacttattgaagtcataagcaatcaagacagactttgattctgaacataaacagcaaacagaatatttcatagtggaggtaaaaaattgagtctagtttccaaaacagcaaaagtcaagattactgccagagcatcctgtgttggtgatgcaatccctgagtgggcaagaatgacctcattatgtggtatattttgggcattgttcagagcctcgttcccccatccacccaaagattctgtgagctacttagaattccttagtcaattacatttccacttgtgttagctagagttgatttctgttgttttcaataaagatccttgactgacattttgctctcatatagtcagaggattcatcacttccaatagatastgaacagatcagtgatggaaggaaatggttcgagc

SEQ ID NO: 276764 - DNA, 635 bp, Homo sapiens
ctcttggcctccacaatcacatgagccaatttccrtaacaaatatcctcttatatgtatctctttatatcctgtcggttctgtttctctggagaactctgataatacaatgagactcttcagaacatgtcaatctcacagttaattttaagtttttgagggtttaagtaggtcccttgagatttcagcaccccagcattttttgtcactgaaatcatgaaaattctgactaggcctttgcttgcctgcacaaaagccaacatcccttgttcccacaaactaaaaaattacaaactgctgatgcactatttctttgtcaagcaggaggagatagcttcagggtcacaagaaaattttgcagaaggaatgaatgtctttatgcctttaaggacattgcaatcaaactgctgacgcccagaagtctggttgttcaagatgttatctgagactgaagaaacacagatttttcccttggttcctggcaactccccctctcttattctctagctgcataaaaactccctgctgatttttgttgttattgttgttaagatggatttgagagttcttgccctcctgccctctcactttggccaaatccaatgaacctttcacatctccaaccacctgtgtgtc

SEQ ID NO: 276765 - DNA, 635 bp, Homo sapiens
ctcttggcctccacaatcacatgagccaatttccataacaaatatcctcttatatgtatctctttatatcctgtcggttctgtttctctggagaactctgataatacaatgagactcttcagaacatgtcaatctcacagttaattttaagtttttgagggtttaagtaggtcccttgagatttcagcaccccagcattttttgtcactgaaatcatgaaaattctgactaggcctttgcttgcctgcacaaaagccaacatcccttgttcccacaaactaaaaaattacaaactgctgatgcactatttctttgtcaagcaggaggagatagcttcagggtcacaagaaaattttgcagaaggaatgaatgtctttatgcctttaaggacattgcaatcaaactgctgacgcccagaagtctggttgttcaagatgttatctgagactgaagaaacacagatttttcccttggttcctggcaactccccctctcttattctctrgctgcataaaaactccctgctgatttttgttgttattgttgttaagatggatttgagagttcttgccctcctgccctctcactttggccaaatccaatgaacctttcacatctccaaccacctgtgtgtc

SEQ ID NO: 276766 - DNA, 710 bp, Homo sapiens
taatacaaattattgtacaaatgtacagagttcggttcaattattgatcaactcaggtctacaatgtttgaaaattaaataattctaactgtgcaaactgacgttcaattttttttagtaacagcaaaattgtamattttaaataatggattagcaccatcacatttctttactcaagaaatttcacgaggaagtatgtattactgacagcgttttcagaaaatatacagagcccctgacttacaatggtttaagttttttttctttttgctgggcttttcagggtaataaatacattatcggtttataatatttgtgacttaggattgtcagatatgacaccatcatagtcaagaagcatctgtataaagaaacatctttttccttgtagttttaaagtgtcttatgttggcaccaggctagatggctgtggcttcagaataattttttaatcttcccaaaccctcccattaaaaacaaagcaaccaagataacaagacatagaataaacaaacaaacaaaaaccaaaaaagcccactagcaaaataataaaaattgaagtggaaattaataaaatataaaaataacagagaaaacagtaaaaccaaagtttgcttatcaagaagatcaataaaattgacagactttaagtagactaataaggaaaataaagaaaattcatattaagaaaattaggaatgaaaaagtgt

SEQ ID NO: 276767 - DNA, 640 bp, Homo sapiens
ttaaagtagagatttcgagtagatttttgaatgtacaagtgtaaagcaaaagagaaagagagggcttagagatagatatgtggaggtctgatcatatggctgatcatttaaagctactgtttcaaaaattaagtataggaggaaaagagttcagggttctgaaggattcagtaaagtaaaagaagaggaggctgaaaaaaataaatactaagtctttttttgagagccaagaaaattaagtgttttmgagtagggcaatattttcaagtcctgctgagattcaggttgagaatgaatgatttggcagcctaaagatccttggtaacctgggcaagcgagagcttaggaacaaaagccagaatgaagtaggttgaaaagagaaagaaagtaaggatccatgcatctgtcttcgaaatgggtctcttgtcacgtgcaattttttcttaactatccataggccactagcatagcctttgtaaatgtaaaacaaattgtgaaattctgttgtttgaatgcatatgcttctattacaaatagcaacaattctcaaatcttaatgtttataaaagcagctgaggtatgtctattataaatgcttcctactatcattgattgtgattcacttggcatgagaaaaggc

SEQ ID NO: 276768 - DNA, 661 bp, Homo sapiens
tgttgttattcctttagatcaaacttcaaagaaaaagtctgatgaatcaactattcatttactgaagctgaatttttgcttgccactagtttttctactgtgatgctcctttgatttctgttctgtctgcatcttttatgcctttcatgcatgtggagaaaattatagtgtagtctttactcaaaaaagaaatttcatcatatccccaaatcttggaaaatttaaagtacttttccaagtttgaaaatgattttagacagaagccttagacacagaaattaataaataagtctattgtattctaaataattgaacttttcagtagctaaggctgcagaacagacaggaatcaatttcacgagggatatcctagactgaacatcaagtgcaatgtatagttcctgagccagttatcacctggcttagaaaaatatttattaaaatataataaagttaagaccagttgggcagaagcagtacagtgcagtggccaagggtttaggattttgtaatagcccttatcctgtttttgccactactagctctcagcttttaatgaagttaatcatagtcacctttcacttttrtaaaatggtaataataatatgacctattttgtatatttgtactgaggttatatcagatgatttatatggcttgg

SEQ ID NO: 276769 - DNA, 599 bp, Homo sapiens
taataataatatgacctattttgtatatttgtactgaggttatatcagatgatttatatggcttggcacaattcttaattcataataatttaataaacagaaactactagtgttataattattagtaagcttttgctaaaattgtatgtgaccctgataactggtatagccaccaggaccacccacagttgctgccatagccctcaaggatgtccaccagccattagtccccaagatatgagtcacagaagtttgagaagaagctgtagcagctttctcatgtcttcacagaggaagtagatgacaaagtaccaggcactgttctccaaattctgattgaaagggcagtgttctataatatgttatatattttcatggtgcatacatgttattggatgcttgcactactgctgtgaattttacttaataaactttgattargtctttttgagcaggaaacaagcccagcaagaagctgtcaggatgtgattatcctcatatctcccttatggcatcttttttaatatcttatcttcagaactaataaaattaaatttatacagaactcaagaatatgtgttagcactcaaatttattct

SEQ ID NO: 276770 - DNA, 1229 bp, Homo sapiens
ggttgctaatacatacagtttaccaacctggaatatgtaaagggtagatgtgtgctacatttcctttcaaaaacactgactttgamatctaggtttaattttaaattgtcattgaatttggacatttatttgactatctgcctcataaagactggatattaatttttataagacattatcattaattaacttccatgattaaagagacagcagtaaatagctctgttctcccatagcaaaaacatgcataaaggacaataattctggtccatgagtagtgtaccattgacctttgaaaagtatgggtttaaactgtgtgggtccacttacatgaaaattttttcaataactatattagaaaagtttttggagatttttaacaatttggaaaaactcacagatgaatcatgtgacctagaaataccaaaaaattaggaaaaagttagatatgtcatgagttcattaaatatatatagacatagtctattttaaaattttactaccataaaatatgcacaaatctattataaaaagttaatatttatcaaaatttacacacacaaatattacagaccatacaaggcaccatttgcagctgagagagatgtaaacaawggttgctaatacatacagtttaccaacctggaatatgtaaagggtagatgtgtgctacatttcctttcaaaaacactgactttgaawtctaggtttaattttaaattgtcattgaatttggacatttatttgactatctgcctcataaagactggatattaatttttataagacattatcattaattaacttccatgattaaagagacagcagtaaatagctctgttctcccatagcaaaaacatgcataaaggacaataattctggtccatgagtagtgtaccattgacctttgaaaagtatgggtttaaactgtgtgggtccacttacatgaaaattttttcaataactatattagaaaagtttttggagatttttaacaatttggaaaaactcacagatgaatcatgtgacctagaaataccaaaaaattaggaaaaagttagatatgtcatgagttcattaaatatatatagacatagtctattttaaaattttactaccataaaatatgcacaaatctattataaaaagttaatatttatcaaaatttacacacacaaatattacagaccatacaaggcaccatttgcagctgagagagatgtaaacaa

SEQ ID NO: 276771 - DNA, 627 bp, Homo sapiens
ttcagaccacattgttttctgtacaattatttaaatggtgaaaccaatgtttctatcatctagatgatggttagaaaaaagcatttttcatttaagtatacactgagctgccaaatttcaaattatacaaagaaactcaagtgtcaggctcaktgcaatgaagaatacttttctcctataaaacagcttaatggcacagagcttgcatgagtcatacatatccagaccttgaactcactgatgcattcagaagaagccaaagattaatgtttaataaagagcaggtcagctctggccattttaattgcaggaagatggtttgcaatcatttggtgccttaggccattgtggtgttctcttgactattccacaaaagaaatcaatcttgcttttctaaactgttctgataatcagcagtagaaaccagatttttaaccaaattagaagttattgttcaatattatgtcatacatttgcaactgtttcttctcaaaacacacactgggctacaaatccaagaagcaatttttgtagcgtgttttctcatttcaaagtaattaataacactactgaagccacatggctaataatagctagcttttattgagcatatactatgtgtcagta

SEQ ID NO: 276772 - DNA, 627 bp, Homo sapiens
ttcagaccacattgttttctgtacaattatttaaatggtgaaaccaatgtttctatcatctagatgatggttagaaaaaagcatttttcatttaagtatacactgagctgccaaatttcaaattatacaaagaaactcaagtgtcaggctcagtgcaatgaagaatacttttctcctataaaacagcttaatggcacagagcttgcatgagtcatacatatccagaccttgaactcactgatgcattcagaagaagccaaagattaatgtttaataaagagcaggtcagctctggccattttaattgcaggaagatggtttgcaatcatttggtgccttaggccattgtggtrttctcttgactattccacaaaagaaatcaatcttgcttttctaaactgttctgataatcagcagtagaaaccagatttttaaccaaattagaagttattgttcaatattatgtcatacatttgcaactgtttcttctcaaaacacacactgggctacaaatccaagaagcaatttttgtagcgtgttttctcatttcaaagtaattaataacactactgaagccacatggctaataatagctagcttttattgagcatatactatgtgtcagta

SEQ ID NO: 276773 - DNA, 425 bp, Homo sapiens
gtaggacttcattgcacaggtaacagaaaagagctaagaagccaaaaagggcaatgaagcaaactaaagattaataacagcacaaagcagctacccctgctaggctggaaggacatgggaggttagcagtgctacctgagtcagacagtggcaaaggtagggagccacaaaggagatagctgctctgaagtcactgcccaatgcagagagagaagggaagttatatcctgtttctcccttcttcccggctcctccggaagtcagctgacacaggagacggaaaarcatgacccaggagatggaaaaacataaccatcagaggccagtcctcccaccagagatccgaccaaagcagctgaagagtgaggaaaggatcggggatcaagaagtccatgagaaaatcataacaaaattgtaaatcctaa

SEQ ID NO: 276774 - DNA, 522 bp, Homo sapiens
agaatgtgataaactagatcttcagtaacagctttgtagtaaatgagaatggctgtttgttaatcaaccactagtgaaaatcagggtcatgcccttcaattttacttaaattatacaggggaccatattgtgaatttctgatgttttggcttgacatacttaaagatgcatttcagtatcccttttaagaggtctataagtgatggggacaggasgcagagaaattctaggcataaaagggcaggttcccagtgaaaaccccaccctcaagccaaaaagcctgaaactgcggcccaaagtgacaacttacatccccgtttacccactcaaatgttgcctttttctaaactcatgaccccgcccctccctatcctgtgcctgtaaaaatcccagacacaggtggtagaatggactgtggctagatatcagagagaagtggcttgacttcagagggacagcttgatggcataccttcagagaagagtcccccaggagagagccagactccaggggaagattacc

SEQ ID NO: 276775 - DNA, 579 bp, Homo sapiens
atctaaatggagtatcaaagaagagacagtttttcaggactgaacaggtttaatctttaaaattctgactgcaaatgctrtatttgcaatagaactttaatatatgagaacaatgttttaattcaataactcactatgtacctagtttatacacttgatacagaaagaacaagggtctgtgacttaacttctacctcctctgaacccacaatcacttaaatgtgaatttctgaatgtcaagacttgaaagatttctaaaacaagtcttgcttttaaagtgctatgagaataaaatatttgactaataattgtagaacagtgaatagtttacccaaatcacaaagcatgactaagaggctaagaggatgttttaaaatgaaacaatgcaaagaacttggtaggtataacaagcaaactaatgatcatgtagattgctcttggcctgtcttgatagacgcgaaagtaatgatcatggtaaaaatgactttaagatagtagaaataaggcctaactagaaacagtaacatgaaattgagtaaaagaaaatgtagtttaaatatcttaaagcacctgtgtaaa

SEQ ID NO: 276776 - DNA, 603 bp, Homo sapiens
ttgaataaaacagatggccctccccaatgggggtgggtatcaaccaatccacttagggcccgaatagaacaaaaaagcagaaggttagactcattctccctctgcctaactgctggagctgagctatcaaacttttgctttgtatgctttattctcaggccttcagacactgactggattccacagaatcagctttctggtacagaggcctttaaactacacacccstgtcttccctgggtatccagcttacagaaggcagatcatgggacttctcagcttccataattatgtgagtcatcaccttatattaaatttcttttgatctatctgtctgtctatctatctattctattggttttgtttctctggaaaaccctggctaatacagatgttggtaacaggattggttctagaggaatagaattttaaggatgagttttctgaattggttttggggttctggaattgtctctataatcttattagatttaaatctgctaatgaccttatttctagtagtaaagagagcacttatagtccatggttggaaccggtagtacagatatggaaaatatctcttgggtactcctagtcaatggct

SEQ ID NO: 276777 - DNA, 495 bp, Homo sapiens
gttgattgattgcttgctcctaatgttgctggacgaagtgatgaaagaagaagatgagctcaggaattcaaattcgcagcaaaagtgctgtatgtgtaatggtmatgtgctgtatgtacaataatgataatgatttgtaacatgattgaacagcaaccatatgtcaagtttgtgattactactatgcacagatcatctcatttattccttgcagcaactttatgagaaggcattgccattcccatctgatagatcaaaaaatgtgtgtgcttctatgtgtgcctttaaggagacccatatctcttgtaaacacagggctgagattatggaaaattaaaggtacagtctcatcttgtgactagctaaattataatgcaagttgaactcccagccctaaaggtatctactgttaaaatgaaaatattgattgggaaagaatggaatcctatatattggaatggagacgtgtaggaagatgcgatgaagctggggaca

SEQ ID NO: 276778 - DNA, 495 bp, Homo sapiens
gttgattgattgcttgctcctaatgttgctggacgaagtgatgaaagaagaagatgagctcaggaattcaaattcgcagcaaaagtgctgtatgtgtaatggtcatgtgctgtatgtacartaatgataatgatttgtaacatgattgaacagcaaccatatgtcaagtttgtgattactactatgcacagatcatctcatttattccttgcagcaactttatgagaaggcattgccattcccatctgatagatcaaaaaatgtgtgtgcttctatgtgtgcctttaaggagacccatatctcttgtaaacacagggctgagattatggaaaattaaaggtacagtctcatcttgtgactagctaaattataatgcaagttgaactcccagccctaaaggtatctactgttaaaatgaaaatattgattgggaaagaatggaatcctatatattggaatggagacgtgtaggaagatgcgatgaagctggggaca

SEQ ID NO: 276779 - DNA, 619 bp, Homo sapiens
tagaaggggctgtaattttcttggttgattggctgaaacatggaccaaaagatggcccaccatcagcaaattagaaatgcctgacctgccttgatttgatgtagagatgcaaaggcttaggaggattgttatgttagagtggatttgtcatctaaaacatactcacccacacagggagggtccagaaaacatttttccctgatactgtgagaaayaaatttgtggaaggaatcccagcatccttaaagagctttttgttttccataggccagaccttatacagttgtcccttggtatacataggggatttgttccaggacttcctgcacataccaaaatctgcatatactaatgtcctgcattcaaccctgtggagcccctaagatataaaaagttggccatctaaatcgacgggttttacattccatgaatactgtattttcaattgcatttggttgctaatgtcaaatctgtagatagtggagggcaaactatatattaaaaaaaaaatctgcatataagtgaacccatacagttcaaacccatgttgttcaagggtcaactgtagtaggaaatggagatattcaatttggaaacctaaatgcaataggagtaatgc

SEQ ID NO: 276780 - DNA, 540 bp, Homo sapiens
cttacttgatctctatatgcaaaaaygttctaagtcaagtgaacaaaattctaacccaaatcatgaaaacagagagtcatacctgacaggccacagacttcagaaaagaaaaaaatgtcatgaccccttaatgagggtcttgggcctgtatacagactcagaaccccttgaatgaaggggaggctaggaacctatgaggaaggattctgatacagtatcaaaaatttatactgtcaatcattatcctacccttttccacaggcacctatggtattttacaaaggtaactgtgtactgaagaagaggaaataatcaaacctttcaggacataccagacactggctcttaactgacacaaattccaggagacccaaaacatcactgtggcctatcaatcagaatgggagtttaggaaggtcaggtggtcagggaagttttagctcaggttcattgcacagtggacccagtgggtctgtcaatccattctgtgtttatttcttcagctccagaaggcataactggaatagatatattcagcag

SEQ ID NO: 276781 - DNA, 540 bp, Homo sapiens
cttacttgatctctatatgcaaaaatgttctaagtcaagtgaacaaaattctaacccaaatcatgaaaacagagagtcatacctgacaggccacagacttcagaaaagaaaaaaatgtcatgaccccttaatgagggtcttgggcctgtatacagactcagaaccccttgaatgaaggggaggctaggaacctatgaggaaggattctgatacagtatcaaaaatttatactgtcaatcattatcctacccttttccacaggcacctatggtattttacaaaggtaactgtgtactgaagaagaggaaatartcaaacctttcaggacataccagacactggctcttaactgacacaaattccaggagacccaaaacatcactgtggcctatcaatcagaatgggagtttaggaaggtcaggtggtcagggaagttttagctcaggttcattgcacagtggacccagtgggtctgtcaatccattctgtgtttatttcttcagctccagaaggcataactggaatagatatattcagcag

SEQ ID NO: 276782 - DNA, 620 bp, Homo sapiens
gtcgtatggtctttgtacacccagcttataagggtgtcattagtcagttctttatttcttggatcttgggtttaagatgctacacaagtatgagatgttacrttctcaactcttactatattttttctttaaaagtcacacagtttttgtttaaagtggtatgtaggagggttttagaaaacacattttattcccactctcttgttctgttccctcagtaccatctggtatgagggagagcctccttaattgacactaatgaccgggagatccattgcaaattactaaattttgcagattagcaaacatgattagaaaaatcaaggagcctgcattgaactaatgtattttgttgagaactaagaaaaaaagttaagcacattattagagcttaatattttaatataaatagatattttatagaagttgactatgccattagggaacactagaacataatgttctgtggaagaaattagttgcaatttaagagggaaatgtcctcatgctttatgcattttctgaactctacaaatatctatattgtacatgaactaagactaaggtagtcgttcctgaatcttagacgtcatctagtgccatttgttctgatgcaggaa

SEQ ID NO: 276783 - DNA, 620 bp, Homo sapiens
gtcgtatggtctttgtacacccagcttataagggtgtcattagtcagttctttatttcttggatcttgggtttaagatgctacacaagtatgagatgttacgttctcaactcttactatattttttctttaaaagtcacacagtttttgtttaaagtggtatgtaggagggttttagaaaacacattttattcccactctcttgttctgttccctcagtaccatctggtatgagggagagcctccttaattgacactaatgaccgggagatccattgcaaattactaaattttgcagattagcaaacatgattagaaaaatcaaggagcctgcattgaactaatgtattttgttgagaactaagaaaaaaagttaagcacattattagagcttaatattttaatataaatagatattttatagaagttgactatgccattagggaacactagaacataatgttctgtggaagaaattagttgcaatttaagagggaaatgtcctcatgctttatgcattttctgaactctacaaatatctatattgtacatgaactaagactmaggtagtcgttcctgaatcttagacgtcatctagtgccatttgttctgatgcaggaa

SEQ ID NO: 276784 - DNA, 620 bp, Homo sapiens
gtcgtatggtctttgtacacccagcttataagggtgtcattagtcagttctttatttcttggatcttgggtttaagatgctacacaagtatgagatgttacgttctcaactcttactatattttttctttaaaagtcacacagtttttgtttaaagtggtatgtaggagggttttagaaaacacattttattcccactctcttgttctgttccctcagtaccatctggtatgagggagagcctccttaattgacactaatgaccgggagatccattgcaaattactaaattttgcagattagcaaacatgattagaaaaatcaaggagcctgcattgaactaatgtattttgttgagaactaagaaaaaaagttaagcacattattagagcttaatattttaatataaatagatattttatagaagttgactatgccattagggaacactagaacataatgttctgtggaagaaattagttgcaatttaagagggaaatgtcctcatgctttatgcattttctgaactctacaaatatctatattgtacatgaactaagactaaggtagtcgttcctgaatcttagasgtcatctagtgccatttgttctgatgcaggaa

SEQ ID NO: 276785 - DNA, 420 bp, Homo sapiens
gctcttaacatttattactctcaattcccattcctctgttttcccagctctttatcgttcaacaaaatctctcgctttctcctacacaccagtgtaaatagtttaatacacacaatccatatatgcatacaacttttttaggcccagctgtgtgtgtcttctgtatccttcaggaattcagtcatcaataggggaggaggagggakggaagaggagagagagtaaatgcagaggaaaaattcatagcatagattcagagacttttttccctgactttgaggattgcaatatacaatatggtatattgtactaacatagtggtattctcagcttcttttcaaataaaaatctctttgaatttcagttgaagtgtgaaattttgagcttgagcgattgttgctctgacatagccacttttct

SEQ ID NO: 276786 - DNA, 647 bp, Homo sapiens
tttattaaaattcatctggagagaaactttcgcaaaaatgcatcattcattcctgctccttaaaaacaaacaaaattaaaaagaaaaccattttttaagcacttactatgtgcaaagttctgcaacagtgggggaaaaataaatctgcatatgaatgactagaataattaatttttttctatggttttctaggacaatgtttgttcatttcatagtatctagcttttttttaagcttatattggtttacccccactgaaaaaaaaattgagaacacaatacagaagaggggttaattgcctaagctygcatcagaaatgcttgacagcccatggcagcattgaattgaatcaaagaaaaactaagagttggatgatacagcttttaaaactatggtggataaggatgtatagcatattttcaggaaagagaagaatcaatgatgtaccactcaataaaaggaaaaaaagataatagtgaatagaaataagctgtaatttttttgctaaggaaagtgttgtcttgatatgaatagattcaatgtgagggacagaaatgatgctgcattttgttttggtattcctccctgtcattgctgcagttgaaaagcagtcatttctaagaacttgagagatatttctcagcagt

SEQ ID NO: 276787 - DNA, 614 bp, Homo sapiens
  misc_feature (1)...(614): n = A,T,C or G
nnnnnnnnnnnnnnnnnnnnnnnnnnnagatactctttcctccctgggagactaatctccccgctttaatatcttaaaaaggggataacatgcatgtcccacctacctcatatggatactgaaaagataactataatttttcttccatctgactgaacagtgatagctgataacatgaccacatgagcatcagctacctgatactcaccgcaatacaaacattgcaggcagatattttcatttccattaaaacatgtatggttcagtcattatttataagacctacatcaaacatcagccaacttcttctgtaaagggccaaaygttaaacattttcaggcaagtgggccataaggtctccgctgcaactattcaactcaggcattatagcacaaaagcagccatatccaatatctaaataagtaagtgggtgtggccatattccaataaaactttataaaaaacaggcaacagaaaggatttggtccacgagttgtttactgtccctggtctacatcattctaaatactgacgaaataaatacttttctaagaagttcttctccaatttggaaaactttttaaagctaaacagatgacagttttcaaacttta

SEQ ID NO: 276788 - DNA, 529 bp, Homo sapiens
tgaacgcacattgggaatgaaatattatgttcatctaggtggtacaaactttcaaggtgaactccaataatcttaaaaaaagatttgcttatgtagtagtgtccttatttttgaaatcaaatgtaatttttaaacatgcctaattttgcttattttacatggaaggaaacttacagtgtttgtgtatgattgcagcttatctttcttttggactaagagcatatcttttttgactagaaactagaagaacattgtgatakatatcatttttaaatttaaggaatattaggaattagggaaaatttggctgtaaaagtgatcctttaagagaattgatacatttccattgtgtttagcacagatgagtgataaagagtacacagaaggctttggatagaaatagttcatgccctccagggacagataatctaaggccaaccataatcatatgaacacataaaaatgtaaagtgtcatgaaaaaatactgtaaaggtgtttttagtacattataaccatggtaaaaaatat

SEQ ID NO: 276789 - DNA, 615 bp, Homo sapiens
acgccaaactgagaacctaatattggaacccagggaaagagttagacctactaacttttgagtccagagagaaaagcccgtgattgttgagcttagtgtgctgggcactggtatagtagtttacatactttattgtcactgaaatctcataacagtcctgtaaagaagctattatttccctcatttttcagataaggacaggaggtttatggaaatttcttaataagggttaggtatcttttctgctattatccattatgatgatatttaatgaatgrtgaccattcattcactcattctgtattcctgctacaaatatttaatgtacaactatttaatgcaaggcactgtgctagtcattgagcaaatcaaaataaacaaggccaccataagccctaccgtcatagaagtctttgctagtctatgtagcacagagtctgtgttcaaaatgataatagcaaatacttgcatagcatgtattatatacaggtgctgttctgtttgacatatattacttcatttaattctaacagccctttaaggtaagtatttctactgtcttacaaatgaggaaactctgtcatgactagaggttgagcaatctactcaaagtta

SEQ ID NO: 276790 - DNA, 1187 bp, Homo sapiens
acgccaaactgagaacctaatattggaacccagggaaagagttagacctactaacttttgagtccagagagaaaagcccgtgattgttgagcttagtgtgctgggcactggtatagtagtttacatactttattgtcactgaaatctcataacagtcctgtaaagaagctattatttccctcatttttcagataaggacaggaggtttatggaaatttcttaataagggttaggtatcttttctgctattatccattatgatgatatttaatgaatggtgaccattcattcactcattctgtattcctgctacaaatatttaatgtacaactatttaatgcaaggcactgtgctagtcattgagcaaatcaaaataaacaaggccaccataagccctaccgtcatagaagtctttgctagtctatgtagcacagagtctgtgttcaaaatgataatagcaaatacttgcatagcatgtattatatacaggtgctgttctgtttgacatatattacttcatttaattctaacagccctttaaggtaagtatttctactgtcttacaaatgaggaaactctgtcatgactagaggtkgagcaatctactcaaagttawctacttctgtcgctgctggctgatcttgccatgggcccatccatccacaggatttgcaacacactcagctctggctccgtgcctccatttctcacacccaccttcatttttacctaatacttgccctttttttcctcttccctaagaccccctagatctatattttgtgctttctgatccattaatcttaagtaccctaatgaagcttctatcccataagtcgcttatctctctggagaatattagcccaaatcttatagttgacccttaaatgacatggatttgaactgcacagctctactcatgcagaaatttttttcaaacagataaaaaacacagtattcatgggatgcgaaacatgcatatacaaaggcccaactttctcatacccaggggttccacagaactgactttggggacttaaaaatgtatggattttggtatgtgcaggacagggttgtagggtcctggaacccatcccccatgtatacaagggacaaatgtgwattatttgacctaagataatgactttctgatacagattgctggaattttctttcattaacagtgc

SEQ ID NO: 276791 - DNA, 603 bp, Homo sapiens
aataataacccaattgggacaaaagtaataattggactacctgagatgatccaatgggaaggtcggggagaggtactacatggcgctgcttctacaaagccatatacactctactctctaaaagaatttaaaaaatggatatccccttatacatgtttaagtctgcatctaaaaatttccagcaatacagtatagggaatcaaagataatgattgtttttgatttaagtatttatttgttcttcctttaaacaaatgcattttgagcatctgttctataccagccactgtactaatttaggaaacagagaggaataggacacagtctctgcccttgaggtgcttataatttagtggtaaagagtcatgtaaataaataatccaaatgcatgataagtgccttaaagtagttatataccaagtgttgaacagaggaaggggctartatacgaacatggaggatttaaggaagtctttataaccaaagatcacattcaaactggccttgcaggaaaaagtatgtggagaagaagggcattttagacatatgctgtgaaaagcatttagacacggactgtgaaaagcatagtgcatggtgtctttg

SEQ ID NO: 276792 - DNA, 611 bp, Homo sapiens
ggtttatattctaatgcagttgtatatgtataatgactagaaatatatgtaccaaactacagacaatggttattttagaggagtgagattatgttgggggtcaatagcagggaaaacttttactttctacattatgcacttctacattgtttgatttcaaaataagcatatactattccccacctacctccaaaataggggtggaggaagasagtggtagctcgaagtggcaagaaagaacagcctgttttgcaaacttctattatttatttaatttgacgcttcaggtaaattgaggcatattgcatttcaagctatatatcaagatataaatgaaaataagcacctttatgaatttcattatcttagacactgttctagaagtttccaaattatttcttaccagataaacttttttttcaattttgtaaaagataaaatatgcttgtttctggaatacaacatgtaaaatttcattgattctatatatgatattaatgtataaaatgcaaagttggtttttaccttctactgtaacttggtttagaacttaactttgatgagtgtcctgtgtctctggatagagatcttagaaatatttgatgtgtttt

SEQ ID NO: 276793 - DNA, 533 bp, Homo sapiens
ttatttgctattttcactctcctcctcttacacatccratagtagaatttccaagaaatatgatgtgactttttttttgttttgaaaatattgctttttaaattaaaacctgttatttattctaacagataatgggttaattactgctatcttaaaatgaactaaaaaataatttttaaatttctcagtttcaatttctattgcatggttccttgattagcaccgtcagagcttattagaaatgcagaatcttgagccaggtgcagtgacatgcacctgcagtcccagcgactggggaggctgaggcaagaggatcacttaagccccggagtttgtggctgtagtctgctatgattgcaactgtgaatagccactgcactccagcctgggcaacatatctataccttgtttcttaaaataaaaaataaataaataaatgcagattcttgggccccttcccagaactattaactcagaagccctggaggtggggcccagcaatcctgtttcacaagccctctgggggatgctca

SEQ ID NO: 276794 - DNA, 533 bp, Homo sapiens
ttatttgctattttcactctcctcctcttacacatccaatagtagaatttccaagaaatatgatgtgactttttttttgttttgaaaatattgctttttaaattaaaacctgttatttattctaacagataatgggttaattactgctatcttaaaatgaactaaaaaataatttttaaatttctcagtttcaatttctattgcatggttccttgattagcaccgtcagagcttattagaaatgcagaatcttgagccaggtgcagtgacatgcacctgcagtcccagcgactggggaggctgaggcaagaggatcactkaagccccggagtttgtggctgtagtctgctatgattgcaactgtgaatagccactgcactccagcctgggcaacatatctataccttgtttcttaaaataaaaaataaataaataaatgcagattcttgggccccttcccagaactattaactcagaagccctggaggtggggcccagcaatcctgtttcacaagccctctgggggatgctca

SEQ ID NO: 276795 - DNA, 561 bp, Homo sapiens
ccacacacccatacttccttaaccacaattcccaaatccaaaaagctctgaaaacaaaaattatttttgtgtaagtctgggccaaaattcctggcctgactatatrtagtccttatttaacccttttgtaaatattcatatgtttcacgagagaaatatcaatgtttgattaggggctactgtcctaaccctgctaagagttacatatcttatagtatatacacctttacatttttaaagtctaaaatacttgaattccaaaacatctgccaccatgagtttcagttacagaattgtggacttgtgttttcaatcttcattttatagaatgcaggaagttaactaacttcttcaagatagcacagcttataaatgatggagccaggactattatccaaatatctaaatctcgttttctatcccctatccaagactaaccataaatgggaaaaaaatcctatagaggcatatagaggcatttcatattacatgtacctgtaattccctggcccagctcacccagagcacttgccgactgcaggcagcctccaagcccataca

SEQ ID NO: 276796 - DNA, 533 bp, Homo sapiens
aatgactcttcactatgttagtcatatggtaaaattatttactcctctccctataaaaataaatacaattattaactaacatgactactgcttaggaatagtacttaatctttacgtacagggcacagaacaattcacacttcttgcccccagtccctccacctaaaacccagttacacaaacattttaactctggaggaaactgttaaataaataaaaagtggaatgcagattggcggcactttgaaggcaatatagtattataaactatagtacaacatatatagtaaaatattatttcagagatattctggaatttgtatctctgaatacaaaatactttttaaaaaataagartagttcagtatctactttataaaaaaatatatatccaaatttatatctactggcactctttagaggaatgtcataaggagaataaatggccccccaaagatgttctgtcctaattgcaggaacacataaatatgtttccttatatggcaaaaagaactctacagatatgattaaaa

SEQ ID NO: 276797 - DNA, 602 bp, Homo sapiens
ggcggggcggggccgggtgaacagagctgggcgggctcgccagctcttccaggcgccctgggcaagcaatgtgggtgactgagctcgggtgtgtgtgcctgtgtgtgtgtgtgtgtgtgtgtgtgtgtacgtacacaagtgagcgtgtgtgcgcaccccacccagccttccacacgcgcgctgcttagtaccaggccatattgtggtctgatgagtaacgtaagcctttggggtttatatttaccttcttgrtgtgtagtaagtgctctccctcctccctctgttccccaggtaccgtctgactagctccccatttaagagagctggggacaggcaaagcagccctggaagtctcctgtgatttctaagcttaaatgtctatttttcttttctcccatgccttgtaattgggaagagggaaaagtttacttaagagctgttttttaaattattactaacttgtttcaaacaacactctcatactccagataattcaattttcatctctttggagctgagcaaaccagatgaaattatatgaatcccagtttatttcattttgttgtagagttcaacaatttttatgaatttctaatccaacc

SEQ ID NO: 276798 - DNA, 591 bp, Homo sapiens
aaatataatgctgttttatcaggtgacctaattatctatcaacattttacatataatatgcttaatttgttcctacaatgaatcattttcttacaaagaataaaacttcaatgagaaatgaaaaatttcagtctagggcttttaaagaccctcttgtttcacaagagttaccaatatgagtcatcaacctagaagtgggatgaatctgtatgagrgaagagatttgtaacgtagaaaatcccccttaagctggcacttttaaagttaaagacagggccaagcacagtagctcgcgcctgcaatcctagcactttgggaggccgaggccggtgggtcacgaggtcaggagatcaagaccatcttggctaacatggtgaaaccccatccctactaaaaataaaaagaattagccaggtgtggtggtgggcgcctgtagtcccagctacttgggaggctcaagcaggagaatcacttgaacctgggaggaggaggttgcagtgagctgggataccaccactgcactccagcctgggcaacagagtgaggctctgtctcaaaaaaaaaaaaaaaaaaagatagagacagatgggc

SEQ ID NO: 276799 - DNA, 581 bp, Homo sapiens
tcgtttttgagcaagtgactatccagggcatgctcttctcatggcaatggccgaggccccagagggcagcagaaattggggttcaccttaagtcctaggctcagagtaggtgcatagtaacttccacccacattcattggttaaagcaagtcatgtagctgagttcagagtcaataggcagggaagtccattatgcctttagtgggacaaactataaactcacttgtaaagagtgtggatagaaggagtggtgaaaacttggggacaagaatttaatctaccgtagagaccatttttattcagtacttagrgactgcatggtgtaatagaaggagtactagctgtggagtcacacggactatcacttaatagctctgtgcctctctccaagttatttaaaattttctggccatcacttttctcatccataaaaatctgttttgatacctcctcaccttataagagattataagaactgcatgtgatattggggctttgtacttcaggcaccaatgctaattaagaccctctgactgctagctacatctagtgtgtcctgtctctattagtaagaactatgg

SEQ ID NO: 276800 - DNA, 525 bp, Homo sapiens
acagctatttgtctttggggaaaagatgtgtctcccataagaaaggccagccatttgctaatatgtatttgatctggcagttcttttctacatacacttgattccatggcagtctgaatttttggttcatggataagaggggtatttaatccagaagggtcaggggcaacactgggcaggaggcacatgggagaagcgccccctggcattgcttgagagtgtgttctccccgggtctgcagctgctgctccgtccaaatggcctctcttagcagaaaaattgtgccagagacaataaccagagcattcttatttatcttttyagattgaacccaacctgcccaacatctcacagctctttgaatctcaagcctcttgagtcctatgttgctgcacaattccactttcctcccatcttcttgctcgtatgttctcaataagccttttccagtggaattttcttgagagaattaagctttaatgctttaaggcttccattataattataaattaactttccctctat

SEQ ID NO: 276801 - DNA, 461 bp, Homo sapiens
ccccgtctctactaaaaatacaaaaaattagccaggcgtggtagcaggtgcctgttatcccagctacttgggaggccgaggcaggagaatcgcttgaacccaggagacggaggttgcagtgagccgagattgcgccacagcactccagcctaggtgacagagccagactccatctcaaaaacaaaaaagaaaaaaagaagggtcttcagttccaaactgcttcaaacatcttaaatagttcttaattcattatatagaaagctaaagtctctttaagaaacacttcaacatcccttccacagagtgggaatgaatttaaatgatttactcatgcgtattaggaaaacaaacccaaagccaaaaaaataatcaggttacatgaaggtagaatcacatttgggtggraagtgggaggcacaaggatgactgggctggtcataaagatgtcaggtaataggcaa

SEQ ID NO: 276802 - DNA, 623 bp, Homo sapiens
tgagctatgataatgctgggaaggcagagattgattaagtgcatgctttgaaataggtttttaatgatgtgccccaaagggccagctgattctggtactagattgtcagagttttctaccaactggcatctgtgatgtcagagatcattgtaaaaatggcttttagacgtgaaacagggttgccaacccatttgtatgacttcaacaacgtcaaggagggcatttagaatttagaatctgagcacatcacaccagcaccagctccctgtctcttctagccacttaatggagacacaatggagaggtragacagaccacaaactagttcttatagtgtactccaccttttacttttttcctgagacaaatctacccttattctttcttcctcttccttaccccttgcagtagggaggtatcaaggagcataattaaacttgtcaatacggaaagttgttttttctaacacaacaaagtgggaccatctctattcccatctaagccactcaaattgctgagtgctattagaacacagcttattacatggatatggggacaggagagattaaagcaggttcaaaaacacatgaactgcagatgccataggcctcaaatcagctgta

SEQ ID NO: 276803 - DNA, 490 bp, Homo sapiens
ggaggaagttaacttaattcacctcagacttcagcctaagattcaatcaaattcatccttcagcctgtcttgtttcttctttatgtttcttttacttattgctgctaggatcctacayaggatttctatagaaatgtatgaaattctgtggtcactgcatgtcaggattgcacagtatgttacaatacaatttcaaagagaacccacatttgtgagatttacagaccaaggtgtggtggaggaggtagaattgcagatcagataaaaagtgagcttacacttgaacttagttattcactgtgacctaaatttagtcctattgtaatatgtgcctgtcacaacacaaatacccctcttgaaagagatttactcatctatccaagcacttaatttggaaattttattgtcctattgcaaaatgaaacaaaattaaaagtggcctcgagtacttggtaagttacttaaaatttttacaaaaatatcccactca

SEQ ID NO: 276804 - DNA, 587 bp, Homo sapiens
gaatatacattgcagctatatatttaccagcttccagatatatatgcacacacatattaaacatatatatacacatatatataatatgaaaataacaccactgacatgtcagtgacttcagattatgtttttttttttttggagattatgtattttttaatgagttttgaggagaagtttattctcattcacacctaaaatcagccatttgagtggctgttacgtaaggtgacttgggcatcttttaratgtgaaacaaattgccctaccccaacaaaacaagttgctggcctcacttagggactgacttatcaaatccagcctctttagcattgtactccaaactcctcatcaagtagccacaacatcctatgaattcatgtagaacataggaaattgatgaaccttgactttgtaatatttgtgattgcaattacggacactgtataaggcttagcagcactgattcatttgacagatatttattgagtacctactatatcctatttattgttctaggtactggaaataggtaaacaagacggatgtagaccctatgtacaggtaatttggtctgtaatgttaga

SEQ ID NO: 276805 - DNA, 627 bp, Homo sapiens
gcacaggatcacaaataattagggaagcaagacaccatcaaaagaacaaaataaagcacaagtacctgaacctaaagaaagagagatttatgaactcactgacaaagaattaaaaataattgtcttaaagaagctcaatgagctataagaaaaacagacaactaattgatatcaggaaaataatatatcagcaaaagaagaagtttaacaaaaagataaaaactataaaaaagagctgaatgaatattctggaactgaagaacacaattactaaaccaaaaaatcccctggagagctttaacagaagattcagtcaagyagaagtctcaatggtctcaaagacaggctatttgaaattgccccatcagatgaacaaaaagaaaaaagaggctgagtgtagtggctcacatctctaatctcatcactttggaaggtcaaggcaggaggatcacttgatgtcaggacttcgagaccagctgggagaaaaaagagaaaccctgtctctactaaaagctaaggtgggagggattgcttgagcccaggagtttgaggctacagtaagctagctaggatcatgccactgtactgcagcctgggtgacagataaagaccttgtcccttaaaaaa

SEQ ID NO: 276806 - DNA, 595 bp, Homo sapiens
tttgtgtattttccatcatttaaatgtttcatttttacacagttacttcccatcagattcattttatgatgtttactctcccctcatcagacctgcaaacactgcggctccactagtccacttgatttacacagcaaaccagaaccaatgctgagattagattttgcagtcttcatctcagcatggattgaatgctccctttgattccctgttagagctgataactatatttgcctgaaaggtttgggtagtccccaggctttaagcccctttggagtatatttcctaggcatgataagaaagcactgaaaaaattctctggcatgacagaccagggccccatgtttatacctaagcatggtttatgtactagtttgataatttagataatttagtgaaaygacatctcatcagtaactgacctaatgaacactccatagcccttgctatagtgttactttctggtgagcaacgatgaggggttgttgtagagttgctcttttgaatttaaacttcagttccagggctatgtcagtataatgaattctcacatattttgttcctccttttagctggaagagaggagattttcatg

SEQ ID NO: 276807 - DNA, 570 bp, Homo sapiens
gtcttgcaacttgtgtttagcagcagggaggkttataatggaggccccttcatttggcaactacatttaaggaagaatagacaagggagggaagagttggactggaggtctctaagtgtggcaattatagttctactattgacattaaggttcagaatataaatggacctccataaggccaagctgtaaccaagatttaaacgtgccttattcttagtgctggtgaaagatactgataactagcatattactgaataatgcttacaaatgtgaatcataaatgacttgttttgcaataaggtttacgttttttggttttgttgctgctaacaggcacatagaaggagatcaggaaagactgccatctctagatttaaattatcatcagcaacctgaaactcttctgagcgatttacattagctctaatgaaaggaaaagaagttgagagctgccttactcaaagaataggaggttgccttgagattttattttgtaaggatcttactgtttctctatttcatttctttttataaacaagaagctacattaaagagaatccctgccctcct

SEQ ID NO: 276808 - DNA, 654 bp, Homo sapiens
ttactagacactctatccaagtttcccctcagctgacagacacaaagtcaccatgaaggaagaaaaacattttgaaaatcatgcttaatataataaaacaactgcaaaacaaccaaattcaaactctaaagtcttgtatggattattttctagatcagtggttcagatagtgcttttaaattttagacaggaattcacatcgcctcttgtgctctctccaaaatactaattaggaataaagctstgactaaacttgtcattacctgctccaaacaaaagttctttatgcagaaatcaactgctattttattacaatacaaaggtagacatgttgctgttcatattatttgttttcatttggcttcccattataaatgtaacctgttgctttgttaaccattgccaacctggaaagaacaaagtcaagtcaacatattttgaaaaggagtcaacagatttggtatccaaattgtagagctgaaaatgcaattccatttaatgagctgagattatacatttatattagaatatgcctagcaattaaggaaacaaatataagagagacactcaagagatcacggattaataagacagacaaaaacgcatttccattgtaactaagcacaatggttttactattatgaaggatggccg

SEQ ID NO: 276809 - DNA, 563 bp, Homo sapiens
gattgtactctattccccagtgaaatcatgatgatttcttcacagagtcatttaggttagaatataatgccattaacccaccgccggcccccacctcccaaaataagtgagcagaggaagagatagaaaagggggagaggaacaaattttttaaaaatcacattgtcattttaagacctgctctttttggaaagaagcatttctccttgctgttcctctccacctcaaaccccctcagtccacaagtaaacacaagtaaataaaaattgctatcatcttaatgattgagtgcatttgaagaccatggacactcacaatgtgaaatgattagagtggcccagaggagtctttaattaaagatgccattgacaagataacaatggtttgtgaatgttattaatagatatgaatggaaggtgtaccttaattcartaaggggaaagtcactggtccatgagtttgattgcatattgtaaaggagcaccacatactgtaattatttttatttgtatgtgccatctcttttattgcccatgctggaagtagaaataacctgtcctatt

SEQ ID NO: 276810 - DNA, 564 bp, Homo sapiens
gtgtaccttaattcaataaggggaaagtcactggtccatgagtttgattgcatattgtaaaggagcaccacatactgtaattatttttatttgtatgtgccatctcttttattgcccatgctggaagtagaaataacctgtcctattaagatatttaatatatatcatcctttccacttcattttgttatagcctaataaaaatacccaaagacaccagcccacacagagacagctcccacgttttctaagacaatccacatagccctttgaaaacctggacaatcaaccttctattccccacagttataatctttctttaaattaaaccataacaacctccaggactccataaagttatatacaaatatggagcttcgctctgcaaattacrgtgggtgttctggaaactgaaacaatgaagatagccctaaagtgaacagataccttggttggattgcgtggtgtctgagagacaatagtggatcaggagacagccccagggggatctcaaggcatgaaaagactggcagaaggcagaaagctggctccctagagatgtcac

SEQ ID NO: 276811 - DNA, 571 bp, Homo sapiens
gtctcacctcccatttgccctgctgtgtcctcttctttaaatggatattccartgctcagaactgacatctgcacagtgcgggatggtcaatgcaaagggagtggtgacgatcatgtctggaggaccacaggtgacttcaggactcaggagcacctcagagccatctgactggaggcttcacagttgaaaaaaggatagaagagagaagtatgtagaggaggggccatatttgaatgagaatttggttaacagactggggttttcttcaggcttataaatattcctttccaggattttcttttacaaaggactggtctggagaacaagcatttgtcatgaagttctcagacacacggaaggagtttaagcctagatttcaaatctaggttttgacaaacccaccaacaaaatgacaaatgcttctttggaaatacagggcagaattggagaatgcaaagacctggctggtgggtcatgcaccagctactgaatccttattcttgttgatgccattatcaatgagcaaacaaaaactttatagaaatgactggtctggtcatctcattacca

SEQ ID NO: 276812 - DNA, 443 bp, Homo sapiens
gtgagttaaaaatactctagtaaggtcccatatttttataccacataagatgattttaggaaaraacttagagttgatgataaagcaaatgcatgtttaaggcatatctaagacaaatcacattttgtctaaatgttagtgttactgcataaagtaagtgctccaccaatgagacgatccattctctggttttcagatgacaccagggccttaaaaccatgagtttttgcacaaattaaatgttaaagagttatgcaagcactatcatctgctatgtgctagacctctctgctacaatcagacattcacaattaagacattaacccagccttcaagaagctcactatctccaactcaagagattattacaccatccaacaaaaagtgttaggaaaaagggaagcaccactgttaagataaaacaaaggaggaacactgaaacc

SEQ ID NO: 276813 - DNA, 607 bp, Homo sapiens
agcagtaagaaagataaattgccccaaatcacaagaagctgtaaagcagaaacacaaacaaccaagcctctcatcatatatcaaacatttctctgttctgaatctttaaaaaatgtgtttcaaatgccagaaggtgaatgttcaggacagcctgattaagagacagaagctatgcaaagaattagataattcaacaaaatcacctatgttctttgcactgtgctaggttctgtatgaaacacagagagaatataagatatggtttctgatttcaaggagcatgcaatctagttttagagacacaattagcatagaggaaacttaatggatttggacactcttataatgaataatggatamccaaaattaaaggaaaacttgaggcagtaggttcatctgagaccaggagggtttgagagcaccttgggcaacatagcaagatcctatgtctctaaaaataaaaaaaaaattagagagacatggtggcatatgcctgaagtcccagtgacttggcaggctgaggtgggaagatcacttatgcccaggtgtttgaggtttcagtgagccatgatcatgccactgcactccagcctgggcaacagagcaa

SEQ ID NO: 276814 - DNA, 618 bp, Homo sapiens
actttaggggggcatgaacattcagaccatagtataggttgtatagcagatggccatgttctcaaaattagtagtgccttgtagttggaaaggaaattatataattccaaaggttacttacacctagtcttgctggtttgaggaataggtgtcaaggatgactctttccctcctgcttctttcttggcaagaccattttcaagtggagtctttctttctattcctctgtttgtaccatctttttaatttctggattctggtmgagaattttcattgtgtaccagctttaaacagagttaggaaatgctactgtagcttttgtgacctatggaataaatatgagtgaaatggttaaaaattctacacagcagaacaactgaccttagcattccaggtgaaagttttgcttttatgtctcagaaaaaaaacaacaaaaaaaacccctgtttttattgtaatgttttaatcaagtaacataacagctttaatcaggaaattataagtcaatttagtataccaaaatgaaggattattctagttggataaactctgtgaataaaattcagaatatgtgattttggattccattggaagtttggcatcagactgaagagtggt

SEQ ID NO: 276815 - DNA, 1166 bp, Homo sapiens
tgttaagacttttgaagaatgaggaaaaatagggaggaagcaaataataatgatacagactaaataaattatttatgaagacatatatatgtatgtatgtctgaaaaattaaaaataaactagaaaggcttttcttgaaacatccaagcccctctcataaaggatgaaccctttataattgctcartaaatatcaaacccctaatttttttttgctctattttacttgcttgcccaaactaaaaatttgctaaactaatataaatggcataagcagaggttggcaaactatagtctgctggcaccatctgtttttcttccttccattccctctttctttcttctgaaggttcaccagcaaagactggcttttatatttttaaatagttgtatattattggttatatacgtacctatgcacaatatgtttaattttgctttttggctcataaggcctaaaatatttactgtctagacttttaggaaaaagttttccaattcctgatataaaaatcagagagcaaggcaaggcattttcggtgaaaaaagtatatatatggtcaaatggtgaaagaaaatatatcacaagttgtggcaatttaaatataaattacaaatagaagtaagaaaattgacctatgawtcaagtgtatgcacatgatgtaacatctccagtttagaccaaacactagtctataaaacaagcctcaaaattttaaaacgattgaagtaatacaaagtttgctcaccacaatggaattaaattaaaaatcaataatgaaaggacattttggaaagtttawcattgtaaaatcagttaaaagaaaaaagaatagacattacaatggaaaatggtgagatagagaatactaaaactgtagagaaaataaataaggcaaaaagtatattttaaaaaggcattaataatattgacaaacaccatctaataccatattaattgtgaaagactaaacccttttagtctcaaatcttgaacaatacaagaatgcctgtttcgctatttttattagatagtgtactgaaagttctagcctgggcaattaggcaaggaacagaaataaaagtcatgcagactggaaaagatgaggtaaaactatacgtatttgcaaatgacaagatctcatatgtaggggtgaagaatccact

SEQ ID NO: 276816 - DNA, 641 bp, Homo sapiens
aacattaaataaatgtttgaaataatactattattatcacctttttataagttaaaaatactttaaaatcatatagtgattttcccaagattccactgttagcaccagagtcaagatctaaaccaaaaactgacacgaaagaagctacaaaatttaatgatgatgytaaatggcaaatgagataataaaactaaattattaatgcccaaatttagagctccatcccagacttctccccagaatttcagatttacatattgactcatcatttccacttggatatttaaaatacatctcaaaataatatgtcccaaagtgaacccttgccattaccacattcacatcagctcctcctctggtgaataacattccaatccccccattgttgaggtggaaaatgtggatttgtcactttcctctctcatcctatattcaagtcatcagttactccaaatagctttaccttcaaaatatttccttattttgattactttgcatgcttttaccactattgccctagtccaatctaccttttttataacctattgccatagttttctggtctttttgctttttcccttgcttccctgcactatattatcaattaaataaagatcccatcaaattagaaattaataccc

SEQ ID NO: 276817 - DNA, 592 bp, Homo sapiens
ttcttttactatctctttacttctgttgttcaccctatctgcagtgacataactctaccttgcttttttcctgactagaagacaactgtcacacttcaaaaccaaagttaatttctacttttcctccacgaaaattgtctagtcttccccaaattcaatattccctattctgggcttccaaatcattttgtgtagaactatatagtaggcaaagattttctttttgttatttgggttttagaaataactactctaattatcatccttactaaacaaccagctattatgtacctttgtatacttatccatacttgttgaaccattaataatgtgccatgtgatttactaagcatgttacatgctgaatctccagcccctacagtaatccagtgaatttgrtatcattttccatttcacagatgcaacaactgaagctcaaaggattgaaatgaccttttggcttaaaaaactaactttctgtattagtcagggttccccagagaaacagaaccaatagaaatatatagatatacaaaaaaggcattaattattagagactgtctacaaaattatggagactgagacgtctcac

SEQ ID NO: 276818 - DNA, 556 bp, Homo sapiens
aaacttctatactagagggaaatatgggttaaagcattaagggctatgtaaagatcaagaagtctgatatctattcttctgatatattgaaagtaaggtgacctccaccaaaccctatatcagaaataaatgtaagtacagttgggtagaaatggatatacacatttattaaggactgcctaaactatattagtgataagactgtaatagcactcttcttaaatttggaggctaggatagggaccttataaaaatatatatattggaagacatacaacttttctttagaaaactgtacacrtgcattttaacaaacactatttcctagagtcctgaagtatttatagattttcctctgtcaacttaaatatatccatggactacacaaacttgaaattaggagccactgacctatagtctgataatcaatgaatctaagctaggtcctcagaacaagaaggcagacatttaggcagcatgatgttaaaaccataagccaattaatttaatttcattaaaaatcagttaattcagtgagggaaaaagatctacagtt

SEQ ID NO: 276819 - DNA, 585 bp, Homo sapiens
ttaacacttggagaaacatttaaaaggccatacaagttttttcttttattacatgtgttgctgttcttcttatctacacagggttctcatctgttccactaacagaatgctgtcctctacaggatattaaccaggtctcatgcatctctcactgtttcatgccataaaattgcctctcctcattttctgctacatytcagatacaaacgtaatagttaagactaaaatgatccaattcaatgaattcatactcgcatgtgaataattcatactagcatgtgaatgaataacaaattcatcttcttccaaatggtgtgtgtttgtttatttctaagtagatagcaaatgaatagtaagaattcagagactattagggcaatttatcttatcattgtgtcttcaaggtgtctttaaactgtatcacatagatgacaggttacttcacttgtatataattatggtactaacaataatgacactgatgatgataattactatttttctaacactttatattttgcaaagcacatttatcattattatttcatttgatctttaaaaatatcttgtgagataggtatcatt

SEQ ID NO: 276820 - DNA, 524 bp, Homo sapiens
gctttagttaaaattattcaatccatcatttgtgttggtccaaaaggtaatatacacatagagatacaataaatgggctttagaaaaaaagtgaatctatatatattttatactatcaaaactctacaatgaaggcaataagctattggttagctttttgcacttgaaataagtataataccaattttttttccttttttacttgcaaatgctttgattratatgattgatagcccatttctgcaaacaggattgagattttagggaggtgtgaatgtacacataaagtgatccttgtctaagagagcttggaaataaaagtgaaaatgatgctctctaagattaagacaattaattcagtttattatgaataagaataaacatatacattttcttattgaaggtagacaatgcctctgatacccataacactttatctaaagctgattaaagttataagcccatctgaagtaaaacaaacaaataaaaaaacttaattagaagagagattgctcaataatgac

SEQ ID NO: 276821 - DNA, 487 bp, Homo sapiens
tttgtgttgcatttaaaaatttctctttggttcatagcaatttaccataatgaacataagtgtagttttattttcatttattttgcgtgggatttgtagagctttttgaatcaataggttgattttttcatcagttttaaaagtactccttggcctcattgtctctcctttttacttttggaattaaaaagtaaacttatgtttgacctttatgtattatttaygtatctctgatgctatttattgtattttacatttgttttactcttaaatttcagtttggaaattttctttgacttgtcttctagttcataaattattgcattttttaaaaatatgtcctcttaatcccatataatatgttctcaatttcagatatttctcatttgtagacttcacattttattatattacatagattttaattatttggtgaaactctatatagtctcatcaattttttcatcttttttttgtattctcccat

SEQ ID NO: 276822 - DNA, 487 bp, Homo sapiens
tttgtgttgcatttaaaaatttctctttggttcatagcaatttaccataatgaacataagtgtagttttattttcatttattttgcgtgggatttgtagagctttttgaatcaataggttgattttttcatcagttttaaaagtactccttggcctcattgtctctcctttttacttttggaattaaaaagtaaacttatgtttgacctttatgtattatttatrtatctctgatgctatttattgtattttacatttgttttactcttaaatttcagtttggaaattttctttgacttgtcttctagttcataaattattgcattttttaaaaatatgtcctcttaatcccatataatatgttctcaatttcagatatttctcatttgtagacttcacattttattatattacatagattttaattatttggtgaaactctatatagtctcatcaattttttcatcttttttttgtattctcccat

SEQ ID NO: 276823 - DNA, 562 bp, Homo sapiens
agtaatcctggcactttgggaggctgacacaggaggatcacttaaacccaagagctcgagaccagcctgagaaacatggtcaaacttcatctctacaaaaaagtaaaaaatcagctgggcatggtggtgcatgcctgtagtcccagctacttaggaggctaaggtaagatgatttctggagcccagaaggtcaaggctgcagtgagccgtgttcgtgccactgcattagagcctaggcgacagagcaggaccctgtctgamaacaaacaaaccaacaaaaacagcatgctgtttgcagaaacttgaggacttttttttatcattgaagatgataagttgagtgagacatggccagagacatagaaagagaagcagacaggtcatagaattcttttatggcaggcctaacaacttggactttttttatccaaagagaatttgacatattttcaaatgaaatattttgtgcatagagacagttttaaagaaattattataaatgtccagaggctcagagaatttgatccacatgcctaagatcataaggccattcagtggtggt

SEQ ID NO: 276824 - DNA, 502 bp, Homo sapiens
ttgaggacttttttttatcattgaagatgataagttgagtgagacatggccagagacatagaaagagaagcagacaggtcatagaattcttttatggcaggcctaacaacttggactttttttatccaaagagaatttgacatattttcaaatgaaatattttgtgcatagagacagttttaaagaaattattataaatgtccagaggctcagagaatttgatccacatgcctaagatcataaggccattcagtggtggtccaactgaaatgacttgttttggaaaaagtagagtaataagctttcccaatatggagaagaaagaactgagaataatttygagtaacttagtatagtcaaaaacgtttttaaaatgctagaatcagaggacttgagtttgagtagttattttactgtctaataagatatgtatggaaaattatatggatgagtaggagatattaacctacctgtaataatgatggtattgcttttttatttt

SEQ ID NO: 276825 - DNA, 479 bp, Homo sapiens
taccaaacaaaaaagctgcaaaatatgtataattaaaactgagaaatgaaaggagagatagacaaatccacaattatacttacagacttcaacactcctttctcaacaactgatataacaatttataaaaaatcaatgaggatatagataagcacagcaacaccatcagcccaaagaatctaatcaatacttatggaacacttcatctagtaacagcagaatacacattcttttcaagtgcccacagaacatgtaccaaaatagaccatatcctgagccatagaccaaatgtcaacacatttaacggaataygttttatgaccacaatggaatcaaactaaaaatcaatagcagaaagattatgggaatattccagaatgcttagaaaataaacagtatgtttctaactaatccatgggtcaaagagcaagtttcaagagtaatttaaaaatacttttaactaaatgaaaatgatgagt

SEQ ID NO: 276826 - DNA, 540 bp, Homo sapiens
attacagttttttgaaaggtcatcatatctgaaatctccttctacttctctgtttactgtttttttctactstgcaatgctgttatgagaacttctgcaaataaactgagcaaaccaaatgtgtcattttataaacattcacagcatttttctttttgcacattggccattttctccaaaacgttattatcaacctttacaaacacttccattctggaagaactccatgaacttttattagtaatgtttagtgaagaaaaatgatttaatattctttttctctctcattttttccagagtatgtctttcccttcttcctcctccctttcctttttatttctttcctacagtctcttcttccttctcttttttctttctttccttcattcttctgtccctatatctaattttctgtctttacttggttcattgtatggtgcaatgtggctatttttcacatatatgtattttccagaatttttttcttttttggcaccatctgtctttgcatcagacaggtatttctctcatgaatttagg

SEQ ID NO: 276827 - DNA, 506 bp, Homo sapiens
tttctttttctttttctttttttgccaaatttgacagatctatagccattatttctttgaatatgttttctgtcccatcctttctcttcttttcccctaacagcaatgacacaaaatttagatcttttattgcagtcccacatgtcccagtagctctgctttttatttttatttatttatttatttattttgcctatgtttgtctatttttcagattatgtaaatctattgctctggcttcaagttcaatgatcyttttctttgacctctgctgttcagcctgtccactgaggtgttttttattttggtgtttatcatttttagttctaaaatttccatgtggttcttctttacaacttttatttttgctgtgaattctactcttttctgagattttctattcttcatttgtttcaagtgtgtttgtgttgcttttctgaagtatttccataatggctgctttaaaattctcatgagaggattctgacatgtgtgtcatctcagtt

SEQ ID NO: 276828 - DNA, 527 bp, Homo sapiens
atatcaaaaggatttttaaaaaaatctcaagaaaaatgagaaaacaaaaataccgtataccaaaagtaatgcgttgcagcaaaagcagcaccaagaaggatgcttataaccataaatacttacattaaaaaagaaggaagatctcaaataagcaaaccaatttacaaggttcagttctttgcacctcaagtaactgaaaagtctaaaattatcagaaaaaaagaaacagaaaatagagcggaaataaaaaaatagaaaataagaaaaaaaatcaacaaaattaggagtttttttaaacaacaaatctttagctagagagaagactcaartaaaatcaaaaatgaaagaggagacattacaatgaatgcctcagaaattaaacggatcataaaggactattatgaacacttacatggaaacaaattagataacctagaataagtggataatttcctagaaacacaaaacctaccataattcagtcaagaagaaatagaaagcctgaacagaccactaacaaatatgga

SEQ ID NO: 276829 - DNA, 527 bp, Homo sapiens
atatcaaaaggatttttaaaaaaatctcaagaaaaatgagaaaacaaaaataccgtataccaaaagtaatgcgttgcagcaaaagcagcaccaagaaggatgcttataaccataaatacttacattaaaaaagaaggaagatctcaaataagcaaaccaatttacaaggttcagttctttgcacctcaagtaactgaaaagtctaaaattatcagaaaaaaagaaacagaaaatagagcggaaataaaaaaatagaaaataagaaaaaaaatcaacaaaattaggagtttttttaaacaacaaatctttagctagagagaagactcaagtaaaatcaaaaatgaaagaggagacattacaatgaatgcctcagaaattaaacggatcataaaggactattatgaacacttayatggaaacaaattagataacctagaataagtggataatttcctagaaacacaaaacctaccataattcagtcaagaagaaatagaaagcctgaacagaccactaacaaatatgga

SEQ ID NO: 276830 - DNA, 323 bp, Homo sapiens
tatcaaacatgagcagacattataccacttatttttgaagctataatgctgtttggtaagggaataaaacaaaatygtgccccaaatcttggttcactgacagcatcaaggttgactttaaggacaattatctccatggtaagagtctccagaatggctcttctgccctcactttctgcagaacagctttatgtaccacctttataaattctttccttactttttaaggcatttcttgaaggctcctaaaaaaagaaagttctaccctgaggattagttaacagtagacttatcagatgttttctaaatgagaatcagcaggc

SEQ ID NO: 276831 - DNA, 555 bp, Homo sapiens
ttgacccattctaagcaagccactttgcaaattctgcaggaagcataagactagtccataccttgcaacctggaaagaaaatgctagaagtgcaaatagttaaggactagtccttcttttttgttttgcattctcatgattccattctttctatactcatgatgtaccataattgaccctttgtgtcacccactcattggagaatttctgaacatgtgagcatgccacctggtggtggatagatgtttaccaggcatttgcaaaggattgattgaaactttttgggycctttaagaaaaaagcagtatcctgaggcttctgattgcattattaattattcaactgatttgttccaatagttttatttttccagcattacagtcagatcttattcattattaccatgagaatgttttagtaggtcagtataatgagcctaaaataactaaggtaaagttctatagtctgagggattcctgtctttctcacattgcctaggagcgtaatgagaattgaagatatagtatcaataatgcagttcctgattcagaggtc

SEQ ID NO: 276832 - DNA, 586 bp, Homo sapiens
tgttacccaaactcctaaaacaatatttgatttgggtcaaggtagtacaggcactccagacagatgggggaggaggcagggagaattttaaataatcccataaggaaactcttaaagaagtataacatccatcattttgtcaacagtgatttggttaagtctgagattttagagcagttcaatagaattttgaaatctaaaatgtggtgttatttaactgcttagggcacattttaatacatcgatataattcagcactttatcactagttacaacaaccaatctgaaaaaaatatatatatataaatgccacagccacaaattmtttagatgtttaagagaaaaaccacaaaaccccattttattaaaaaaaaaaacaactatgtcaaaagtggtttcaagaaacaagtgagatatatttagtaacagaaagtggtaaccaggagttagcaaccagtttataattaaaataccatgaggatgcaaagattagctgtgtttttatccagaagaacaagaaccaataaccctttgtcaagagccagtacacagtattgaaaaagaaattgtccaaagggacaagatt

SEQ ID NO: 276833 - DNA, 333 bp, Homo sapiens
gggaggattccttgaggccaggagttcaagaccagccttggcaacatagcaagaccctgtctctaaaaaaaaattaaaaaaaaaataaaagaaagaaaaaaaagaaatagcctggtatggtgttccacgcctacaattccagctactgaggagactgaggtgggagaatcacttgagctcaggagtttgaggctgcagtgagccatgattgtagcactgtactcaagcttaggggacagaatgagacacagaaaaataaatactsattttattgagtgtacattcttttaacattttgtgtgaatgggaaatatgaataatactgaagtacaa

SEQ ID NO: 276834 - DNA, 538 bp, Homo sapiens
tatccttatttcaaattaccgattttgtactttatataaatggaatcataaggtattctattgtgtctgactttttcttaacatgttgagattcatccatattttatagtggtagaccattttcattgtattgtattccactgtgtggaattttggtgtctttattaatgaactttaatgaacatttgaatagtcttcagttttttgctattatgaatagtgttctatgaacattctaatttatgtctgctggtaaatgaatgcatgcattttcttgtggataaacacttagaagtggaattgctgagccatggggtatgaatatgttcatctttagtagatactgccaaacagctgtccaaagtggttgtaccaattcagactcccaccagcaatgtatgagaggtgtgattgctccatatctctgyctactctgttactgtccatctatttcattttagccagtttgctaggtacaccgtagtattacattatggttttaatttacattaggctgataactaaagaggttgagact

SEQ ID NO: 276835 - DNA, 538 bp, Homo sapiens
tatccttatttcaaattaccgattttgtactttatataaatggaatcataaggtattctattgtgtctgactttttcttaacatgttgagattcatccatattttatagtggtagaccattttcattgtattgtattccactgtgtggaattttggtgtctttattaatgaactttaatgaacatttgaatagtcttcagttttttgctattatgaatagtgttctatgaacattctaatttatgtctgctggtaaatgaatgcatgcattttcttgtggataaacacttagaagtggaattgctgagccatggggtatgaatatgttcatctttagtagatactgccaaacagctgtccaaagtggttgtaccaattcagactcccaccagcaatgtatgagaggtgtgattgctccatatctctgtctactctgttactgtccatctatttcattttagccaktttgctaggtacaccgtagtattacattatggttttaatttacattaggctgataactaaagaggttgagact

SEQ ID NO: 276836 - DNA, 620 bp, Homo sapiens
tcctgacttcagggaatcttaaaacgtgtgtacatcggaggttgagggtggggagtgagaaagagaaaaataaactaaagtgtgtctgctctacctactgaaatcagccgtaatgcgcctggaccctcacagtttaatgcaagcaagcagcgtacccctttcaytcaagacacagcgattcctctcttaaggggtatatacaaacaagggaaataaatactttaggcacaaaggcagtttctttgtaaaagctacctttagcagctataattgccaaggagctcagaggaactaaacttccttttttttttgcttccagtgtacaagtacctttaatactgatccctttcctcttttgaatcacaggtaattacacacacacacacacacacacacacacacacatacacacacatattcacactccactgcggaattcatactgaaataaaactgggtttgcaattatctgtttttaatatcaaaatgatttgctgcttgagaagagtccccttgtgctaaaaaattttccatctttttcatagcagagaaagctgaaaagcaaggagaaaaggtagttcatcctaataagtggaatacaatggagagacatttcccca

SEQ ID NO: 276837 - DNA, 620 bp, Homo sapiens
tcctgacttcagggaatcttaaaacgtgtgtacatcggaggttgagggtggggagtgagaaagagaaaaataaactaaagtgtgtctgctctacctactgaaatcagccgtaatgcgcctggaccctcacagtttaatgcaagcaagcagcgtacccctttcactcaagacacagcgattcctctcttaaggggtatatacaaacaagggaaataaatactttaggcacaaaggcagtttctttgtaaaagctacctttagcagctataattgccaaggagctcagaggaactaaacttccttttttttttgcttccagtgtacaagtacctttaatactgatccctttcctcttttgaatcacaggtaattacacacacacacacacacacacacayacacacatacacacacatattcacactccactgcggaattcatactgaaataaaactgggtttgcaattatctgtttttaatatcaaaatgatttgctgcttgagaagagtccccttgtgctaaaaaattttccatctttttcatagcagagaaagctgaaaagcaaggagaaaaggtagttcatcctaataagtggaatacaatggagagacatttcccca

SEQ ID NO: 276838 - DNA, 620 bp, Homo sapiens
tcctgacttcagggaatcttaaaacgtgtgtacatcggaggttgagggtggggagtgagaaagagaaaaataaactaaagtgtgtctgctctacctactgaaatcagccgtaatgcgcctggaccctcacagtttaatgcaagcaagcagcgtacccctttcactcaagacacagcgattcctctcttaaggggtatatacaaacaagggaaataaatactttaggcacaaaggcagtttctttgtaaaagctacctttagcagctataattgccaaggagctcagaggaactaaacttccttttttttttgcttccagtgtacaagtacctttaatactgatccctttcctcttttgaatcacaggtaattacacacacacacacacacacacacacacacacatacacacacatattcacactccactgcggaattcatactgaaataaaactgggtttgcaattatctgtttttaatatcaaaatgatttrctgcttgagaagagtccccttgtgctaaaaaattttccatctttttcatagcagagaaagctgaaaagcaaggagaaaaggtagttcatcctaataagtggaatacaatggagagacatttcccca

SEQ ID NO: 276839 - DNA, 493 bp, Homo sapiens
gtgtaggaaatgaggctatttcattatgtagttaagtttggaaaaaatccttcatggaataagaaagcagcagacatcttagtaggaagaccactgaagcacacctttgttaatttaaatgtggcatgtggcaatttgctttgtgtggcttccctggcacaattctcgtgaaaattgtgtagggatattaccttacatttatccagtcaaaattagcatctgtcaatcagatcctttccaagaaagggaatcagttatatcayaaatacacaaatatataacatgtgttttttaccctccagggaaactttaagcaagtagtacaccatcattttttaatgaatggtcaagaaattgaaaacatatataagttgagttaagcagttaaagggaaagacaattagcaatgcctggtaagctaagtggtactccaaaggtttattttatagctacagaaattatctacatgtagagggggtggatacaaactagc

SEQ ID NO: 276840 - DNA, 387 bp, Homo sapiens
cctttttgactagaagtcacccagttcttcatcttgatatattctacacatcttccacaaaccaaacttcccgaaagactctttgacactggccacaaccttgctgaaaaatgtcagtggcttgacatttcccaggttaaattataaaagcttggcagggcacagtggctcacgcctgtaattccagcactttgggagtccaataccagcctggccaacatgatgaaacaccaactctactaaaaatacaaaaattagctgcccatggtggcaggcacctgtagtcccagctactcaggaggctaaagcaggagaatmgcttgaactcgggaggtggaggttgcagtgaaccaagacagcgccactgcactccagcctgggtgacag

SEQ ID NO: 276841 - DNA, 463 bp, Homo sapiens
ccttatggttttctgcctctgtaactttgagcatgttacccagcccctatacgtactaataaatattatttcatattatttcattttggaatttcaggcattttcaaagcccattccaaatacttctttatgaaagactggcctgacaaaagtctgtatcagctcacaacatattcatttttygcatgcaaattcattatctcctcacctggactgtggctctgtgaaaatagaaaatgcatattctctctcacagagcctaacactgtgctcagtcaagacttgccagtaaaaactccaactttaacacctcagttaaagactaggaaactgatctaaaaaaggtagagagaaaaagcaattccctcgaattttgaaggaaataaaaatatggtaacgggaaaggtgaaaaataaagatcctaaatacatagaggattattatgtaaagtgaaaaaccagaa

SEQ ID NO: 276842 - DNA, 598 bp, Homo sapiens
ctattcttaatctgcactgaattaatgtttagggaatggtatatgaacaaagctgttttcagcttgttgtcttcaaattgcctaagctctcagcttcctaaccccaaacacacaacaccagtatcctaacatcattataattagcctgatttataactgttctagaattgtccaacagaggtcagagaaatgttggggaayccaggagcaaatgctcttttgtaaagaccttaggacacccatttctgaccgaaccttctgttgtaaatccttgctttattagcagacactaagcttgatattacttctaggcaatttttgacaatttaaaaatctcttttgacaacattctaaaagtacaagtgaccctattcccttgctgccaccctcctcccaccatccccccaaccacaattcagagaaagtcagaactttttaaaagaacacaaggaaaatgcaatgtaatcacaacgggtcacaaaggattcaattcaaaaggcagcaatgtgaaaactggaatctggggaaccatttttgaagagaaaatgactgaaaactagcaagcacgtagactctaatgctaataaaaaccaaatgg

SEQ ID NO: 276843 - DNA, 594 bp, Homo sapiens
ggattgactgatagaaaaaaggtggggctgtcagcagaagaaaattctggacacagagtaaggcctaagagaaggcttaaaggagctatgaattggcttacttaagctaaggtttttgagaatcttgttcacaaataaattgagctgataggcaatgacataagacgaaactaaagacatgtaaatttgaggataccttaatgagaaaggtattttaatctggttaaagtcttgatccatatctttagtataccataattagatgcttttagaagttctcaataaaaagaggactttgtackttttaatatttttctaactgaggctctttcacttaatccaacaaagaaaggagggaaagacctgcttctagatgatcacattagaaatgagaatatacgcactcatctttgtccaccttttctcggagcttcttcagttgtttactttggctgaatttcaaattttgaattatgttctcgaagtattcatcttctttgtagttcaactgtattataaagaagatttgggaagaaatattaaaaccggtatcttctaaatttttgctaaaaacatagggattttcttaaatta

SEQ ID NO: 276844 - DNA, 594 bp, Homo sapiens
ggattgactgatagaaaaaaggtggggctgtcagcagaagaaaattctggacacagagtaaggcctaagagaaggcttaaaggagctatgaattggcttacttaagctaaggtttttgagaatcttgttcacaaataaattgagctgataggcaatgacataagacgaaactaaagacatgtaaatttgaggataccttaatgagaaaggtattttaatctggttaaagtcttgatccatatctttagtataccataattagatgcttttagaagttctcaataaaaagaggactttgtactttttaatatttttctaactgaggctctttcacttaatccaacaaagaaaggagggaaagacctgcttctagatgatcacattagaaatgagratatacgcactcatctttgtccaccttttctcggagcttcttcagttgtttactttggctgaatttcaaattttgaattatgttctcgaagtattcatcttctttgtagttcaactgtattataaagaagatttgggaagaaatattaaaaccggtatcttctaaatttttgctaaaaacatagggattttcttaaatta

SEQ ID NO: 276845 - DNA, 586 bp, Homo sapiens
aatgactcaaagggtatttcaaggtaatccatagaatacaaaagcaataattttaagtatacccccacccagggaaaggattctaattcctacgcctagcacaatgactagcccataatggacactccaaaaggatccttcattctcaattaattacaccttcttatagtaaatcatcaccatctgctatttgtaaactaaaacctgcatatgcactgtatcggaatcttaaaacattctgatactagcttctttttcctgttactatccctgaataaaaaatgacttttattgctcattttaaagtcatgtaggcaggatctaaaatttttttaacttttaatatataattagatttccttttactaaataaacaaaacaaaagaccaattcccccctcctaataggtgtgatggytgataggtgaaggacaagcaggatccttcgctgtctgtgttggcatacaaaatcagtgaaggtgctccttcctcagtaaatgaagaaacattttttttccatgtaaaacattcatcattcacataaactgggctctggtagaagtggtttgactagcccagtgagactg

SEQ ID NO: 276846 - DNA, 658 bp, Homo sapiens
tatgtcacagtccccatgtcctcaaagtttgcatttcatatcactcttcagaagctttgcagcctcatcttttctgttgctgggcggtggttttttttatacagagatcttcaaaatttaatgtcctggagattcataatggatcttgtaagcagcctcagccgaacctacaaggagtccagaaatgctttccgcaaggtgaagaaaaaatctctcttttcttaagacttaaagcataaagtgatacatggttatgaaggcttaccatgtacactgctaggacatggtgaactttgcaaagggacaaaatgccaaagttcgttatcttgcacatatttaggacatgttgctgaggaagataaatcttcatgggctttaccatcttatgatggtctatgtggcacgatgattgcattgtcctgtaaggagttacatttggttatttaaccagttcatgaaagaatactgtctggattttttgttgttgttactgtgttaaaagtaatttcggggttatctattttaattaatttgattttcaggtgctcattgcacactggacatatacacagatgracaatattgatgtgggcagtctattgaaagtacccctacctggagttaaataagaccttttcttagcctatacctatattat

SEQ ID NO: 276847 - DNA, 596 bp, Homo sapiens
ttgtgctaaatctcccttacttaggttatcctgttattcttaaatttatacacatacaggttctgtaagtactcagagttcagctaaaaccttgaaaagcagtaatgtgttttctcatataccatatttcccccattacrtttattgaatatgacttcacatttatgtttgtgcagtggttacagtgttgtatgtttttctaacgctttctacaatgatattaagttgtaatagcaaaaagttctactggggcatctactgaaaatatgcctagttttcagatcatatataagtaaacaatccatttggattacatttcatcataggctaggaacatgggccttgtgaggagaagtgatgaatatttcaagaacttagatgagacatttgtgaaatgtgtgctcttaacatgctccagacctttccttctggtcaaatgccatttcctttttcttttccgtaggccctttatggtacaacctcagaaacagcaacttggagacgttgtgcaaactatgtcaatgggaatatggaaaatgctgtggggaggctttatgtggaagcagcatttgctggagagagtaaacatgtggtaa

SEQ ID NO: 276848 - DNA, 409 bp, Homo sapiens
tatatttattcacattttattggctaaagcaagttacacggaaacccttaatatcaaaggaaaaattatacaatgctcttgtaggggaatacagtaaataaagttaaatatatgtcaaatattatgactcagcaatccctctctctgtgtgtatcatatagtgaatggaaaaatgaattgtggtacattcaaaaaatggaatactatttagtcacagaaagcagcaaactattagtgatacatgtaaaatcatggatgaatagcaaagacattatgctaagtgaaaggccagacttaaatggttacataacttattattccatttgtattaccttctgaaaaagaggaaattatagatagaaaacagayctgaggttggtaggagatggtggttgggaagggcattgac

SEQ ID NO: 276849 - DNA, 640 bp, Homo sapiens
aaataaaaaaaaaaagacttgacagtgtaactactgttcttttagtgtcagaagtttattttgatgacctacattttctattggaaaagagagtaaatcaggaaattcttatcaggctgacagcatttttagactatgcaatgcgtgggtgaagtgggactaatattgacttggccctaatgcagtcatccgagaatacatattttggttgtttttgcattccataaggttttatcattattatccatgaagattgttttctccgtacatgggaagtgacccctaatagcatcttgcctgggagacaaaagtaagggctacaactcctactgaatttgaaaaattgatttttggagaaggaaaaaatggaaaaggagcraagaaaagtaacagcaatcaagaaattttaatagccatttaaaaaatgctagaaaagacagcattaaagttttatattacttctgtattcaattgtagtagtgtatctgtcaactaatttccccctcaaactgtatggctctgaagtccttattaattactgtatcaaaatgattccttatgatggattttaaacacaggtatatttttcctcttaacaaatgatcatataacattgagaattattttggaaataacagaa

SEQ ID NO: 276850 - DNA, 640 bp, Homo sapiens
aaataaaaaaaaaaagacttgacagtgtaactactgttcttttagtgtcagaagtttattttgatgacctacattttctattggaaaagagagtaaatcaggaaattcttatcaggctgacagcatttttagactatgcaatgcgtgggtgaagtgggactaatattgacttggccctaatgcagtcatccgagaatacatattttggttgtttttgcattccataaggttttatcattattatccatgaagattgttttctccgtacatgggaagtgacccctaatagcatcttgcctgggagacaaaagtaagggctacaactcctactgaatttgaaaaattgatttttggagaaggaaaaaatggaaaaggagcgaagaaaagtaacagcaatcaagaaattttaatagccatttaaaaaatgctagaaaagacagcattaaagttttrtattacttctgtattcaattgtagtagtgtatctgtcaactaatttccccctcaaactgtatggctctgaagtccttattaattactgtatcaaaatgattccttatgatggattttaaacacaggtatatttttcctcttaacaaatgatcatataacattgagaattattttggaaataacagaa

SEQ ID NO: 276851 - DNA, 627 bp, Homo sapiens
gagttagtggtatttggctcctgacatggaagtctttctcttgtcagacaaatccttcccctgcacattcctgctgaaaaatttgttgctgttgtgcctaatggcaagcagtgtggtggttggatatggtctgtactgcccaagcgaactctccacattgatactttaacctctttgtgagttagctttaactttataactattaacccatttattgtttcatcttactccagagtcattttaccragggaaaaattgtcataactatgtagtggtgaagagacataaatgtgcatttaagaaaaacaacaacttgtagtctttaaaatccctttagatgactttatttttgttaaaatttctgcagggtcttcgaagaaaaacataaatatttctgagaaatctggatatttttaggaagtgattgtgcattttgagaaaaataccaattagattacattgtgaccttcaatcaggaaatcttggttctgatgatttgatatttagtctcgatgttttgaattttatatattattcccaagaaagaatgtaacaccaggaaaatttcactgaaggagcaaacaccaagtgaatacagaatgtggcagaagtgcttatgagcaaaat

SEQ ID NO: 276852 - DNA, 570 bp, Homo sapiens
tttacttgtttttaattattcattcatggcaatttaaaaagtcatattttaagtgggatttgtttttcctgaaggkcatttgaaggaacaatatctgggaaggtactagagaaattacaaagcccgagctctttcttataatgccacctatccctgtaagctaaacaaacaaacaaacaaacaaacaaacagttctatatataatagtttcaacacagaacttaacaagtctctttttttgtttgtttaaatctggctttacttgatttaattcctttttagaaagaaatttagggcaaaataaagtgtatattaggatttaaatttatgccacaatttaaaaataaaaccagaggttatatacaatttaaattgggctaaaaattaaaaatttgaggatttaacttgatatagctctcaggatctaaataaagtttaaattatcattaagacactgctaggagaagattaagattatgaaagtaacagttattgatactgctggacttcaaaggcaaagttcatttcttccattaactgcttccagagatgtcatgtaaaaaagttagt

SEQ ID NO: 276853 - DNA, 570 bp, Homo sapiens
tttacttgtttttaattattcattcatggcaatttaaaaagtcatattttaagtgggatttgtttttcctgaagggcatttgaaggaacaatatctgggaaggtactagagaaattacaaagcccgagctctttcttataatgccacctatccctgtaagctaaacaaacaaacaaacaaacaaacaaacagttctatatataatagtttcaacacagaacttaacaagtctctttttttgtttgtttaaatctggctttacttgatttaattcctttttagaaagaaatttagggcaaaataaagtgtatattaggatttaaatttatgccacaatttaaaaataaaaccagaggttatatacaatttaaattgggctaaaaattaaaaatttgaggatttaacttgatatagctctcaggatctaaataaagttkaaattatcattaagacactgctaggagaagattaagattatgaaagtaacagttattgatactgctggacttcaaaggcaaagttcatttcttccattaactgcttccagagatgtcatgtaaaaaagttagt

SEQ ID NO: 276854 - DNA, 488 bp, Homo sapiens
tcatatctgaatcttgaacaggtcttctgacactgtataaggcagactatttctggatgatgagatacatgttagaattggaaagcattagacagaaacaatgttgtgtaaattaccataatcatgaataagagaatggataatggtgctggaagaagcattgtggacaaggcagatatattcacatcctgaataagtatgttttacagtgaagagaaaatttgcttcctccatggtataaggattctaatttaattgtcctgcccctaggtgactggtcagtcctttaggtagtagaattatattagaaacttagccttgatctctgctgttggcaggttggaaatacaacaggaasaggaatcaaataaggcttgttaaaaggaatgtcatattgctaaacctatacataactttaacaatcttgccaatacaggtgctttttctcataaactatagaaaaagactgagtgataacactcaaaact

SEQ ID NO: 276855 - DNA, 544 bp, Homo sapiens
tagtggattaaaacaacaaaaaatgaattttatcttacagttctgtaagtctgaaattcaagatggtcttattgcgctaaaaccaaggtttggcagggctgcattcctttctggaggctctagttgagaatcatttccttgcttttccagctattagaggttgcccacattccctgctttatgatcttccctgrttttctatcttcaaatcaagccttgctacatctctgactattcttcatagttacatgtccttcttttgcaacagaaggaaatagtctctgtttttaaggtcccatttgcttagattgagcccacctagataatccaggataatctcccccaactcaaggtccttaacttaatcatatttgcataatcccttttgccaggtaatgcaacatatacacagcttccagaggacctggacatctatgaagggccattatcgtgcctaatgtcaaaacttcctgttatatgattcagaacagcgtattttacgaagtgcacactgcctgcaaaatttaaagaagctcattcatca

SEQ ID NO: 276856 - DNA, 527 bp, Homo sapiens
gcaactaattaggaagaaatgaattttgtgtctccattacttttccagtaaaattcatctaacaagtgtattacaaacaagtgtatgcaattgaattttaactcaaaattttagaatttgaacaattgatgctagttagggtgtgagctagctccagcacataatcctgtcccgtgaagagaagttttatggcttacatttttagatatatctaagtttactggaactcaaatacagaacaaaatcccaccaaaattaacatatactgtcatatataaatatatacacttttatatgtgtacatatatatgtgtatacacactttaatatatgtatatatgtatatatactttatgtatatgttttacatatatttttaatatatgcrtgtatctgtatatatacttttaattaacagtcatgttacagagggcctactctgacagaaatgtacatctctcagaatcattatcatccagtgcaagtgtcagctaactactgccaataggctagatatctctagcttg

SEQ ID NO: 276857 - DNA, 527 bp, Homo sapiens
gcaactaattaggaagaaatgaattttgtgtctccattacttttccagtaaaattcatctaacaagtgtattacaaacaagtgtatgcaattgaattttaactcaaaattttagaatttgaacaattgatgctagttagggtgtgagctagctccagcacataatcctgtcccgtgaagagaagttttatggcttacatttttagatatatctaagtttactggaactcaaatacagaacaaaatcccaccaaaattaacatatactgtcatatataaatatatacacttttatatgtgtacatatatatgtgtatacacactttaatatatgtatatatgtatatatactttatgtatatgttttacatatatttttaatatatgcakgtatctgtatatatacttttaattaacagtcatgttacagagggcctactctgacagaaatgtacatctctcagaatcattatcatccagtgcaagtgtcagctaactactgccaataggctagatatctctagcttg

SEQ ID NO: 276858 - DNA, 501 bp, Homo sapiens
atgacccagccactgcaaatccaactgtgcaatgatgattcattcttcttttaaaaatttcacagtcacatcccgcagtctgtagaaacaactctttaaccttcagattctgatccctgcccatgtcactacctcctgcaaatgtttaccagctatctgaattgagatctgcattctgcgaagaagccgtggtactttctaccagcatgtcattttacatatgagcagagcatttgcaccaacacatccctcaccctcttcacttgttaactccttcttgctcttcatgtaattgtcttccaaaacatccgatgaggatcagctttaatgctyctattttcaccagctcttgttcttttaagaatacgctcccatcatactaataattaactacttgatttgaagttgcttatttgcttgtttccccaatatgaccatggctgcttgagaggagagactgtgacttttatctctaaatttcactaaatttcaatcatatga

SEQ ID NO: 276859 - DNA, 590 bp, Homo sapiens
tatcatatttatagggaaaagtaagtaagcttttgctattgttgttgcttgttccaagagcagaatgaattagaatcggtgaattatatttaagaaatctcactttagttcaaattaagtatggcagacaaaacattgccattttcattttacttctggatagagcaacattatagaaaagccccaattcctgagatatgatttgaagggaaaagccacgaggaaggcatgcattttacacatatcaaatggtgatatgagggagaaataaaatttttattatgtaatgccatcactaatattttgtgatttttattttatcacagcatattctcctaccttgaatcatatagtaaggaagaatttcctggaacagatattyagcaatgaactggatttcccatgcagaagtacctattctattatggaaattattgagcagtaaaaagaatacatttattcaataaatgtttccttaaatttacttttacatttcttaaaatacgtatcttcattgagtacatactatgtgcccactattctagtatgcaatgaagaaaaattggtaggcaagatcagcatggcctcta

SEQ ID NO: 276860 - DNA, 1185 bp, Homo sapiens
caaaagggtgcaaatgaaaattcttggaaactggaagttggaaaaactagttagaggagcrtagaaaccaaatgtcaaatgattctcctatagtgaatctactcatcagcaattcctggggcaaggaaatggagatgaagaccttcttataaaaagcactattctaatgtccaggagctggactggacaaaaaaactcaatttcagttaacttcccagtcattacatgatgaaaatatgtcccttccctgctgtcaatttagacttcagatgattgagatcaatgacttgctcacattatttcaatcttcttaggaaacatatttgcttactccatgctagagtctaaatgtttgtgtgcctccaaaacctgtatgttggaatttgatcaccagtgtggtggtattgggaggtgagggctttgcgggggtctaattactagttagatggtgaagccctcattaatggaatcagtgacattacagaaggggccccagaaagctgccttgccccttctaccatataaggacagagctagacagtaccatctatgaaccagagagcaggccctcaccagaccacgactctgccagcactttgatcttggacttcccagwgtaacattagacatatcaaatatgttttagatgattcattctagaagtggttaatgattacatcaatgataaaaatagctatttaaatacttcactaatattgcgggctacacacaatttttagatgagtagctgtaattctatcccttttccctggctgaagaaagcttctaataatgcagcataatgaagctggtgtattctttagcatctttaatttgctgtaattttagggattaatcatacattttgtctttttttaattttgaaacacaacttgaaatatttcacaaatgtagctatattcaatttaaaaaccactaataaataacaggtttgcttttgatgwtatagatatctacacattcagctgcatggaacctgggccaagttgcaccccatatttcctacgatagccctgaatctgatgaaattctcttaagcaaaatgtagatgattctttctaactacatggataaaattctaatattcagctaagatgcaaaagattcagttacatctgattgccctaagttaaacacattggcacgaactgcaaagatatgctc

SEQ ID NO: 276861 - DNA, 615 bp, Homo sapiens
attacctgtatgtaacaaaatatttcttttttaaggagaagggagaagctgaatttttaaaaagtcactcaattatgaagcaaagcctcaagttctagtcattgccctataacyaacttcttgtgtgatcctgggtaattgtcttctccagacctcagatatttcacttacatattgaagaagttccatgaaacgccacttgcatatgggctgccaccttgtgatattagcttttctagtttcattctccatctttccacacgcacgtccccatcattcctctccttgtcttccaatttatccttatttggcaattagtatcttgctcaggcatgttttatgtgttttccaatgcaatatccacactatttttaacttatccatgtacatgtaaaatcgcgtatatcaccacttgtaaacaaaccacattttgaggaaaccaggtttcctgtttggagctgcttggagttcacgaggaagccatcctcataataggcaacgtgaatgaagaccaaccaaggaaaagtccagctgagaatggagccacagccttagctgtcctcattccccagcctttaggttgctcctggttgaacctgtccagttcactaggtc

SEQ ID NO: 276862 - DNA, 551 bp, Homo sapiens
tttctactcatgtgtttaattactaaaaatttcttcctcctatctttccctctggagacaaatatatgaagtctagattttcacaagtctggcttgtcttaatatatttattgacggaataaaraggaaaccaaagagaacatatccatttcctcttaactttacaatatgcacctcaagcagggatcatcatcacattagaattagttggggctggagagcaatggtgccatctcggctcacttcaacctctgcctcctgggttcaagcaaatctcgtgtctcagccatctggtagctgggattaaaagcatgcgccaccacgcccaactaatttttttatttttatttttaatatatacagggtttcatcatgttggacaggctggtctcaaactcctgacctcaagtgatcggcctgccttcgtctcccaaatttaattaggtctttagagagcctttgaatatgactattgcaaaagcccttttattttgtgaagtattatatttgattctgtagtcttcaaagtagtcttgtctttagtctcacta

SEQ ID NO: 276863 - DNA, 551 bp, Homo sapiens
tttctactcatgtgtttaattactaaaaatttcttcctcctatctttccctctggagacaaatatatgaagtctagattttcacaagtctggcttgtcttaatatatttattgacggaataaagaggaaaccaaagagaacatatccatttcctcttaactttacaatatgcacctcaagcagggatcatcatcacattagaattagttggggctggagagcaatggtgccatctcggctcacttcaacctctgcctcctgggttcaagcaaatctcgtgtctcagccatctrgtagctgggattaaaagcatgcgccaccacgcccaactaatttttttatttttatttttaatatatacagggtttcatcatgttggacaggctggtctcaaactcctgacctcaagtgatcggcctgccttcgtctcccaaatttaattaggtctttagagagcctttgaatatgactattgcaaaagcccttttattttgtgaagtattatatttgattctgtagtcttcaaagtagtcttgtctttagtctcacta

SEQ ID NO: 276864 - DNA, 537 bp, Homo sapiens
tgattctattgtttctgtaatgtagaattaaagttggatgttaattacctccacaaaatcaaagatcacaatttcaacagtttggtcaacttgcccttyatacagtttctctcaagacatttacatcttgctcttcagttttctatctctggaaagtcacctgattgtttccttccttgatgatttttaaaattatttttctatgaaaaatacctgattataatctaattcctggcacaaaaatatatcttctagaattattttgttgatcctcagagatagtgtgcttgtcaaagtggcattttgaggcatttccaaaacaaactacctgtttaaacctgtttaataatgctttcgtctacctcaaacacttcatttcattcttattagataatgtccacaggatctttccaaatcctatgacttttacacatacacattaacttttctgatccataaaacagattttctttcacatgaatttagattgaggttttattatatgtgagatagtagtaggtatctagtaggcggata

SEQ ID NO: 276865 - DNA, 601 bp, Homo sapiens
cctgcccctttgcagagaaacactgcagaagctaaggcataggaattctacagcatgatgttttggacttcccttttggggatttgaaacaatctgggtgttagtaacgggggaaagaaattgtgatcctgttgcataaaataaagcttaaaagtttagtaaaaatcagtggtaagttaaaatcaggatttatttttattagaagttgctaagatgaatgttttccatatgttttggtttttttagaatgtacaaatctctttatctttaaaccaagagattagcagcacaytaaaaccagaagaattttcagtgaaactagccacaaataagtaaaaaagtacattcaactctaccacataaaagaaacagagtgtgaaaagcaaaagttcatttaaaattctaactttggttatgaaggaaattgacattgtatggatgcctgttgctggataatcaggagccagggtagacaaaggaaggaactcttacagtggtgatcttgtaaagtgcaccattgataaatcgtctccagttacgcaaaacaatgattgtgaatttgcctggcagaaacattgcaccaatagttggttttctgttt

SEQ ID NO: 276866 - DNA, 601 bp, Homo sapiens
cctgcccctttgcagagaaacactgcagaagctaaggcataggaattctacagcatgatgttttggacttcccttttggggatttgaaacaatctgggtgttagtaacgggggaaagaaattgtgatcctgttgcataaaataaagcttaaaagtttagtaaaaatcagtggtaagttaaaatcaggatttatttttattagaagttgctaagatgaatgttttccatatgttttggtttttttagaatgtacaaatctctttatctttaaaccaagagattagcagcacactaaaaccagaagaattttcagtgaaactagccacaaataagtaaaaaagtacattcaactctaccacataaaagaaacagagtgtgaaaagcaaaagttcatttaaaattctaactttggttatgaaggraattgacattgtatggatgcctgttgctggataatcaggagccagggtagacaaaggaaggaactcttacagtggtgatcttgtaaagtgcaccattgataaatcgtctccagttacgcaaaacaatgattgtgaatttgcctggcagaaacattgcaccaatagttggttttctgttt

SEQ ID NO: 276867 - DNA, 613 bp, Homo sapiens
ttctgccaagggactggggtgctcaatttcttcaggaccacatggcagctgattttgggctcaggttcaaagccaaacagggctgtagccaagccccttgggggactgaactattactggacttgaacccagaagcaagctcagcagatcagccacctggatgttgatctgcacttttgaaacaacattccaaggacttgagctctaccagggtttcacaaactcctacctgaatcctgaggctctcacagacagacttttgactctaggtttttagggggcattagcagactaccttctattttaccattttggtgacatcagtccttctatgattctctttatcatatttataagattatctcatttgtccaacaaatttaatctcaccgtatctgagagacccactgttggttgccatggaggttctatgttgaaaataataccaaaaaaagatgaatrtaaatttgaactatcaaattctatggacaactcaataaaaatgttttattcatttcttagttattgagcaggaagtcttaaagtatcgaattatctattattaagacagtatatatttaaaatattttattaaaatttgatttgaatgatc

SEQ ID NO: 276868 - DNA, 431 bp, Homo sapiens
aaggctaaaagaatggccacttgtagagtatacttgaaaaagaattaggtttagtctaaattgtatcatttgaccttcaggatctctttcagtcctaggtggaagacaattttaaggaaaaaaaacctactctttcatacctcaccattttcgtttccataaattgtcctcctttcatcagctcatctctgaaattctacaaggaggtaagtgataaaagcaatttatcttcttttgccaactatctcacctgcttagcaatgagtatcttaaaatagaggggtaatacaacctttatcttacrgaaaggatgtaggaaaatcacagataaataattattacaattctaatttattagggatatgtgaaagaaaattatatcaaagtagtgaaagaaatgaagaggaattaattgctttttagttatttat

SEQ ID NO: 276869 - DNA, 559 bp, Homo sapiens
ttggactcacagttccacatggctggggaggcctcagaaaacgtataatcatggtggaaggggaaacaggcatgtcttacatggcagcaggcaagagaatgtgtgaaggaagtgaaggggtaagagcaccttataaaactattsgatctcatgagaacactcactatcacaagaacagtatgggggaaccacccccatgatcctatcatctcccaccacgtccctccctcaacacctggtgattactatttgaaatgatatttgggtgggaacacaaagccaatccatatcaggccatgtaatatataggaccttgtagatcatattccaaggtgtagaatttgagttttattctaagtgtaaaagccttagatggttttgagcagaagggaaacacaattatgaattgagttgtaagataatcatgctgctctctggaaattagaccatgagtggacaaggattaaagtccagtgaccaatgaaaaggtccaataaaatatcaatagttcaaatgagggactgtggggtttggactaatatccaattgagaagtgagc

SEQ ID NO: 276870 - DNA, 325 bp, Homo sapiens
gatttcctttcttttgagtatatatatayacccagcagtgggattgctggatcatatttatgttaagtgaaataagtcaggcacagaaaggcaaacacttcatgttctcacttacatgtaggagctaaaaatcaaaacaattgaactcatgcacatagaaagtggaaggatgattatcagaggctgggaaaggtagtgagggtatgggggaggtggaaatggttaatgaataaaacaaaaatagaaagaatgaataagacctagtatttgatagtacaacagggtgactatagtcagtaataacttaattgtatgtttctaagag

SEQ ID NO: 276871 - DNA, 475 bp, Homo sapiens
aaagtctgtgctcttgtcaccagaaacaccagaaaaacaattttttaatagttgagttaatagggaataatttcaaatcatttatcttctttcagtaatttcaaatacacagtagtcaataagaagttagaataaatagtggcccattggaaaaagtcaagatagtggacactaagaacctgatcaagagcttaaagaaaccaacaagggtagaatcacaaaattccaaaagaaaatcctagttgattaacttattttgttgatttgcaagaactattgttatggatactgtgtctggaattggtgggttcttggtctcactgacttcaagaatgaagtcacggatcctcgyggtgagtgttacagctcttagggtggtgcgtctggagtttattccttctggtgttccgatgtgttcggagtttcttccttctggtgggttcgtggttttgctggctcaggagtgaagctgcag

SEQ ID NO: 276872 - DNA, 475 bp, Homo sapiens
aaagtctgtgctcttgtcaccagaaacaccagaaaaacaattttttaatagttgagttaatagggaataatttcaaatcatttatcttctttcagtaatttcaaatacacagtagtcaataagaagttagaataaatagtggcccattggaaaaagtcaagatagtggacactaagaacctgatcaagagcttaaagaaaccaacaagggtagaatcacaaaattccaaaagaaaatcctagttgattaacttattttgttgatttgcaagaactattgttatggatactgtgtctggaattggtgggttcttggtctcactgacttcaagaatgaagtcacggatcctcgcggtgagtgttacagctcttagggtggtgcgtctggagtttrttccttctggtgttccgatgtgttcggagtttcttccttctggtgggttcgtggttttgctggctcaggagtgaagctgcag

SEQ ID NO: 276873 - DNA, 615 bp, Homo sapiens
ttgcaattcagcaagcactcctttaaaaatatctttgcctcagcataattcccaaatttctgatatacacagagataattgtgaaagtrttgtatgcaaaaactgttgaaaaagagtcactttcttcaaagcctactcttctacgaaattgttggttgttgtttttagtagggctcactatgctaggtgagcatgagcattcttaccagatatatggtttaatgtggagggttagggtagaagtcagtgaaggagggggaaaattaaaacataaaggctaaagaatattgtttcctgaaaacctgttaaaataagcaaataataaccaattctgtgtgacattttactctctaccaccatgctattcaaaacgtgctttgtgcatgggccaccattgggagcttgttagaagttcacattaccgggccctactccagaccaaccaaattacaatctgtattttaacatgatcttcatgtaatttgtatgcctagcctgttcaagtttgagattcgctggcctatgaggtacatccagctacataacgccacctacttcttaagactattttattaaaaacaatattgttaataccttgccctccacatggccatg

SEQ ID NO: 276874 - DNA, 1231 bp, Homo sapiens
ttgcaattcagcaagcactcctttaaaaatatctttgcctcagcataattcccaaatttctgatatacacagagataattgtgaaagtattgtatgcaaaaactgktgaaaaagagtcactttcttcaaagcctactcttctacgaaattgttggttgttgtttttagtagggctcactatgctaggtgagcatgagcattcttaccagatatatggtttaatgtggagggttagggtagaagtcagtgaaggagggggaaaattaaaacataaaggctaaagaatattgtttcctgaaaacctgttaaaataagcaaataataaccaattctgtgtgacattttactctctaccaccatgctattcaaaacgtgctttgtgcatgggccaccattgggagcttgttagaagttcacattaccgggccctactccagaccaaccaaattacaatctgtattttaacatgatcttcatgtaatttgtatgcctagcctgttcaagtttgagattcgctggcctatgaggtacatccagctacataacgccacctacttcttaagactattttattaaaaacaatattgttaataccttgccctccacatggccatgwttgcaattcagcaagcactcctttaaaaatatctttgcctcagcataattcccaaatttctgatatacacagagataattgtgaaagtattgtatgcaaaaactgttgaaaaagagtcactttcttcaaagcctactcttctacgaaattgttggttgttgtttttagtagggctcactatgctaggtgagcatgagcattcttaccagatatatggtttaatgtggagggttagggtagaagtcagtgaaggagggggaaaawtaaaacataaaggctaaagaatattgtttcctgaaaacctgttaaaataagcaaataataaccaattctgtgtgacattttactctctaccaccatgctattcaaaacgtgctttgtgcatgggccaccattgggagcttgttagaagttcacattaccgggccctactccagaccaaccaaattacaatctgtattttaacatgatcttcatgtaatttgtatgcctagcctgttcaagtttgagattcgctggcctatgaggtacatccagctacataacgccacctacttcttaagactattttattaaaaacaatattgttaataccttgccctccacatggccatg

SEQ ID NO: 276875 - DNA, 615 bp, Homo sapiens
ttgcaattcagcaagcactcctttaaaaatatctttgcctcagcataattcccaaatttctgatatacacagagataattgtgaaagtattgtatgcaaaaactgttgaaaaagagtcactttcttcaaagcctactcttctacgaaattgttggttgttgtttttagtagggctcactatgctaggtgagcatgagcattcttaccagatatatggtttaatgtggagggttagggtagaagtcagtgaaggagggggaaaattaaaacataaaggctaaagaatattgtttcctgaaaacctgttaaaataagcaaataataaccaattctgtgtgacattttactctctaccaccatgctattcaaaacgtgctttgtgcatgggccaccattgggagcttgttagaagttcacattaccgggccctactccagaccaaccaaattacaatctgtattttaacatgatcttcatgtaatttgtatgcctagcctrttcaagtttgagattcgctggcctatgaggtacatccagctacataacgccacctacttcttaagactattttattaaaaacaatattgttaataccttgccctccacatggccatg

SEQ ID NO: 276876 - DNA, 548 bp, Homo sapiens
aatgctaaattttagttaaatgttagcataaagtaatactttttcctgatccaggttagtggagtagagttctttcctcagtctctgaaagtttgggattttaaaatcaaacagattgagattcaaatatcaacatccttctacactgcattaatataagctttccgaaattctgyttcagattgttataatacctacctgtgtgagttggcatgagaacagacaatatctgtaatgacatctagccgaaggtgactgctaaataaatataaaatattgttagtttattcagactttatggacaatgcaagatgcacccgatgcccggaatttgaatccagcattgcttcttattatcatgagacctaagccactttaaactcagttaacgtgtctggaatatgagggtgataatattaatacctactattcagcctttttgtaacaagtacacagtaagaaatgggctagcatagcctggaaaataggaaatgctcgataaacaattaattgaatgaatgagtgacttacatctctaaataaaatca

SEQ ID NO: 276877 - DNA, 633 bp, Homo sapiens
tcaacagcctgaagtttttctgacacaattctcctgctttcctattatccattcacaggtgtcagaccaggctgtatttgttaactatagcccgtaggctaaagctggtccacagcctgttttttgtatggccgacaaactaagaatgatttacatatttcgaagaacgatacaagcgactgaatattaggaatatatgatagacaatttatgtgacccacaaagtctgaaatatttgctctctggtcatttacagaaaaaagtttgctgatccctccgatccctggcaaagacttttgctatctactcctgctgccttttcctattttttttctccacaggcattagccatcatgcttttgcaagtctaactctgtcttggcatcctccttcccagaacacttaaactgacacgtttggtttctatcacattaaattataaagatgcaattattaaaagggcagattcaggrtcagaatccagggctggtctgtgaccctaacacaccagatttctttgatgatactctcacagtgaaaaaaagaatgaaaaatttgagagagaataaaagatggatccggtaatgagaaaaataaatttggtttctgccattattaaccagctagcctagt

SEQ ID NO: 276878 - DNA, 556 bp, Homo sapiens
cagtgaatctgtcagttcctaggcttttctttgatgggattctttttattactgctttgattttatgacttatttgtctgttcaggttttctaattgttcatggttcaatcttggtaggttttatgcttccagacgttcatccattttttctaggctttcaattttgttggcatatttttgttcataattgtctctattggttctctgtmttactatggtgtcagtagtaatgtttccttttccctttttatttatttggttcttctccctttttttcttagtctagagagataaaagttcgtcggtgttggttatctttttgataaaataagtttttgttttgttgatctttttctcattctcaattttatttgtttctactctgaactttattatttcttttcttctactattttgggttgctttgtttttgcatttcaagttcttcgagattatcattaggttgtttatttggagtctttccatttgtttttcatataggcatttattgctataaactttcctcttagtagtgcttttgctgtatcccatagg

SEQ ID NO: 276879 - DNA, 607 bp, Homo sapiens
tgttgaaatcctctgggaagctcctgctaggactctcctctcagaggttctgattcctttgatttgggtgrggccttagaattgggaagtttcaaaagctcccaggtgattctaacatgctgttatggctaagagccactgcatgggtctaaggccttcattttatgaatgaagaaactgggtggagatctccgtggctcacctggctcatcagtggcagaacgagtgctatgtttcaagtttacttctctttccacctaacatcctttgtactgcttcagcccaggacaaggtcttactcatctcatagctactttaccctgcctgcatttaatgaggctggccctgtgataggtgtcccgtaaatattaattaaataaattcatatctagttttcaattgctgataatgaccatattggaaaacttatcaatagaagtggagtgtgccaactgccaagggatttccagagtttccagaggttcagcattgagaaactctctgattgcctatttttaggactcaacaagccatccccacataaccctagaagctgcaatgacttctatcaaagttgcatgataccagctaaatgaagagattttag

SEQ ID NO: 276880 - DNA, 607 bp, Homo sapiens
tgttgaaatcctctgggaagctcctgctaggactctcctctcagaggttctgattcctttgatttgggtgaggccttrgaattgggaagtttcaaaagctcccaggtgattctaacatgctgttatggctaagagccactgcatgggtctaaggccttcattttatgaatgaagaaactgggtggagatctccgtggctcacctggctcatcagtggcagaacgagtgctatgtttcaagtttacttctctttccacctaacatcctttgtactgcttcagcccaggacaaggtcttactcatctcatagctactttaccctgcctgcatttaatgaggctggccctgtgataggtgtcccgtaaatattaattaaataaattcatatctagttttcaattgctgataatgaccatattggaaaacttatcaatagaagtggagtgtgccaactgccaagggatttccagagtttccagaggttcagcattgagaaactctctgattgcctatttttaggactcaacaagccatccccacataaccctagaagctgcaatgacttctatcaaagttgcatgataccagctaaatgaagagattttag

SEQ ID NO: 276881 - DNA, 612 bp, Homo sapiens
acaaaaggatgactcacgccctgggtgggatggtgtgaggtttttgtcatgctactcagaacagcttgcaattttaaacktatgcattgtttatttctagaattttgtatttattatttctggactgtgggtaactgaaagcatggaaagcaaaaacacaggtaagagggaactactgtaattctaatatgctgtaaggggttatagtgattactgttaattcttctgagactagtaacatgtatcgctttttaatatccttcaaatttattaggttccctcaattgcttgtagcttatattttccaaatgacttggcatagaactttctcctagctggctctcctccgcccatcccctctgccactataaaacaagatgatgccattatgaaagtagcagcgtgttctcagaatgacctgcccaagtcagggcctcatgtattacatatcctaagacctgcacatgcattaatactataaaagaggttttgtgagagagacaaatacaaacaccatgaggtcacttcttccagagtataacaggatgcagactcttggaagaaattgtataaatgtcctcttggaaaattttgtctctgagtacagagcac

SEQ ID NO: 276882 - DNA, 610 bp, Homo sapiens
ttaaatatgcttctgtggtacaatactaagattcatcaaaagaggccacaatcactattattaaatagaacgaaactttgtaaagtaccaggtcaagaattaattgcctttaacatacatgtatttcccaatcactgaaagaaaaagtatatggaatattttcattttatatatgcttagtatttaatttcttctattaaataaaatttatagggggccattgatttgaactgagctgctgcaccaggccaacagaccaaaatggagtcactcatgctgaagttccacatcaccaaactgaaactaagttgtctatcagaccttctaagaagtcaggagacagagggagataatagccaagtcmtcaaacaggccagttttagccagcatgatttttaaaacatctcctttgtttatcttttacaaaaaaagtaactttgaaatgaccaaccgactttttgtattctgtttctgcttttctcagcccttttctggctttaaaagaaaactcctctgctcagctcatcagaacactcattctgttttatggaatgaaatgttgcttgatctgacgtttgcaaataaagccaattaagatctttaagctaaa

SEQ ID NO: 276883 - DNA, 605 bp, Homo sapiens
ttttctggctttaaaagaaaactcctctgctcagctcatcagaacactcattctgttttatggaatgaaatgttgcttgatctgacgtttgcaaataaagccaattaagatctttaagctaaatttgttgtaactttgtcttttcacacttttgacactttctaaacatggtggttccatactatcaccagttaatatctcaagacacattgtacactttgggcaatgtctactactaaaaatagtgaaagttaagtttctmtatcaagttctctactgtgataccctgtttttggcttgtcagttataataagatgatgtaagagaaaagaaatagttttctctctgcgctttacagttgttagttggaatgaacccttgtaacaaaagagagattaacaagagaaaaacgtacggaagtttaataacatgtatatctcatgtacacataggagctcccagagaaatgagtaaatctcaaagaaatggctttgagttcaggcttagattttatctccaggtgaaacaaagaaagaatggtgtgggagaaggccagttatgaagaagcatctaggaaaagtaaggtaaacagaataagatttttt

SEQ ID NO: 276884 - DNA, 605 bp, Homo sapiens
ttttctggctttaaaagaaaactcctctgctcagctcatcagaacactcattctgttttatggaatgaaatgttgcttgatctgacgtttgcaaataaagccaattaagatctttaagctaaatttgttgtaactttgtcttttcacacttttgacactttctaaacatggtggttccatactatcaccagttaatatctcaagacacattgtacactttgggcaatgtctactactaaaaatagtgaaagttaagtttctctatcaagttctctactgtgataycctgtttttggcttgtcagttataataagatgatgtaagagaaaagaaatagttttctctctgcgctttacagttgttagttggaatgaacccttgtaacaaaagagagattaacaagagaaaaacgtacggaagtttaataacatgtatatctcatgtacacataggagctcccagagaaatgagtaaatctcaaagaaatggctttgagttcaggcttagattttatctccaggtgaaacaaagaaagaatggtgtgggagaaggccagttatgaagaagcatctaggaaaagtaaggtaaacagaataagatttttt

SEQ ID NO: 276885 - DNA, 432 bp, Homo sapiens
ccagccccgcgcacgcgcgccgcagccttcgcccagagcagcgtctgctagttacctttcacctacttcgcygcgactcgccgcgcggggtaactcgaggtcagactcggggccccgcgcgcttgcgcgccgcccgctgcccgccgcccgccgcggctgggagtccggaggtttcatcttgtgatggtttcggttcggctctcaaatggagggtgtgagctttgcagacgtgccctaattctgggtctggcggggcgacattgggccctctgagctgccaccctggccctgacgccccattactcctcgttccttcctccccccatctgttgtcacgctctcccttttcccacagctggcccctattcagctgtgccgattgccccacatcccttcttcctgcaaaaggcagatgggaagggagctctgtct

SEQ ID NO: 276886 - DNA, 432 bp, Homo sapiens
ccagccccgcgcacgcgcgccgcagccttcgcccagagcagcgtctgctagttacctttcacctacttcgctgcgactcgccgcgcggggtaactcgaggtcagactcggggccccgcgcgcttgcgcgccgcccgctgccygccgcccgccgcggctgggagtccggaggtttcatcttgtgatggtttcggttcggctctcaaatggagggtgtgagctttgcagacgtgccctaattctgggtctggcggggcgacattgggccctctgagctgccaccctggccctgacgccccattactcctcgttccttcctccccccatctgttgtcacgctctcccttttcccacagctggcccctattcagctgtgccgattgccccacatcccttcttcctgcaaaaggcagatgggaagggagctctgtct

SEQ ID NO: 276887 - DNA, 633 bp, Homo sapiens
tattctgttctcgacaaaacccttcaaaggtcctcaaaacccaactggaaaaasagtaaaattaattcccaattccagtgttatcaggtctgttgtgtgctattacacatttacacacaatctgagcattgttctaagccccatcatgggcatattaatggctctaaaggaagccccagacaaaagaggaggataaaatgtagatttttttttttagtttggatctcgtaattatgagccttcagagtcttcctactcccatcagcaggtttcagttaatttttaaatataagccaaatgtctttcaaaaaatacccactcccaattggtgaattttggagcttttgaagacttagtgacagattcttctcaggaagtggccttaaagctgttacagagacttgcaactgagaaagtttccacatgtccacaggtattcattcagggtttacaaattgttcatggcacgggagccatctatttacttcctggtcctgaggacttcagagttatccttacacatgggagtatcttctttgaattgttgctagattaatatctctatgagatcagagagatataaaactagaaaggttgtatctttctaatttgcctattgaccacataaattga

SEQ ID NO: 276888 - DNA, 1567 bp, Homo sapiens
ccattccccaacatccaaagtccacaggacaagtgtttccaacatgacaattgatggtccctgaaaccacacatctgaactcactctgagtcacatggggatttagtgcttcaggaattatctcagaggtaatacatcatgaggaaatctgcagggacaagagtcttgcaaatcaaccttgacaggagagaccccttgaactcrttcacttctgtacaattccatttcgatatgtctctttttcactacttgagtaaaagacagacttagggttgagaagacaaattatctctatggacctcagtctcttaatttataaaatgaagagttctggtaagataacttttaagatctgtttcaactagaaagttatacagccccagaaatctgaagagaagaagaagaattaagattcatggaggacctatgacaaactagacawtgttggggaatttgagaagaatttacgagccagttggagcatttgagtagttaaagcttaaccttagaaaacccaacatatataagaaaggaatcataatcaaaatacagcacatggcccagcggtaaagaatgtttatagttgtaattaagtaaacattgactattgatttaacaaaagattgtaatatgaggctacttggaagttggaaaacccagaaattgagtagggaagtaaaataaacctaaatattcacttgccactctggaaagttagtagataatgtctaaaatgaatgaatcaataaaaaacgaacttatcatttcaaaatatggatgtcaataaaggtataaaagwgaaaagtgattgcctctggggagcaaaattggaccagtaggaggaaggacaaaacgaactgctgttttttcttcataagccttatttatttaattttttaaaaatttatttatttaaaaattaattaattatatgcatatattctttgaaaactagaaaactaaataaaaacaaacaactggttcaacaaccaataatcggaaagwtgttggggaatttgagaagaatttacgagccagttggagcatttgagtagttaaagcttaaccttagaaaacccaacatatataagaaaggaatcataatcaaaatacagcacatggcccagcggtaaagaatgtttatagttgtaattaagtaaacattgactattgatttaacaaaagattgtaatatgaggctacttggaagttggaaaacccagaaattgagtagggaagtaaaataaacctaaatattcacttgccactctggaaagttagtagataatgtctaaaatgaatgaatcaataaaaaacgaacttatcatttcaaaatatggatgtcaataaaggtataaaagagaaaagtgattgcctctggggagcaaaattggaccagtaggaggaaggacaaaacgaactgctgttttttcttcataagccttatttatttaattttttaaaaatttawttatttaaaaattaattaattatatgcatatattctttgaaaactagaaaactaaataaaaacaaacaactggttcaacaaccaataatcggaaag

SEQ ID NO: 276889 - DNA, 1105 bp, Homo sapiens
cttttccactgtctttactctcgtagggttttcaaaaagtcttttttatttaatgtcattttatctgggttttaggggggagtagagataaatatataatttcattttgtcgtatttatattgaatcactgaatgcaactctaagtaggggctgggtcatgcaatgacccagctttatgtaggttacacagaarttattattattattattattattattattattattattttaaggcagaatcttgctctgtcacccaggctggagtgcagtggcacgatcttgattcactgcagcctctgcctcctagtttccagcgattctcctgcctcagccttctgggtagctgggattacaggcacccaccaccactcccggctaatttttgtatttttagtagagatggggtttcaccatgttggccaggctgttccttaactcctgacctcaggtgatctgcccacctcagcctcccaaagtcctaggattacagatgtaagccacagtgcccggccagaaattatttactttttttaaaaaaaaaatgaatgwcttttccactgtctttactctcgtagggttttcaaaaagtcttttttatttaatgtcattttatctgggttttaggggggagtagagataaatatataatttcattttgtcgtatttatattgaatcactgaatgcaactctaagtaggggctgggtcatgcaatgacccagctttatgtaggttacacagaaattattattattattattattattattattattattwttttaaggcagaatcttgctctgtcacccaggctggagtgcagtggcacgatcttgattcactgcagcctctgcctcctagtttccagcgattctcctgcctcagccttctgggtagctgggattacaggcacccaccaccactcccggctaatttttgtatttttagtagagatggggtttcaccatgttggccaggctgttccttaactcctgacctcaggtgatctgcccacctcagcctcccaaagtcctaggattacagatgtaagccacagtgcccggccagaaattatttactttttttaaaaaaaaaatgaatg

SEQ ID NO: 276890 - DNA, 563 bp, Homo sapiens
aagcattcacatgtttgatataaattggcaatcacatgccatacaatataagatactcaggccagtgagcctcatttctggttcctgctgtgctgttgcccagctctacgaccctagacaacttagtcaccccttaagacctttgttttttctttactctaaaaatgaaggtttggggcaatatatgcaaaatatgcactatatgcttaatgtataggtaaatgaaattgactttttctctattactaccttataaagtaagaaaaaaagctaggtcgatttttgccaaacttggaggatattttggggtgataggacttaayagataagctccaaggaatattcgcttcgggcacctattgaggaaagtaaggcagtctccactgtcaaagaattgaggagaaataggctttgatttcaaaatcaaagggcaggcaatccaaatttcaggacctgattgataatggagctgttccttacttgggtaactctaatagctagctcaagggtgaagaacagcaggaacatatttatttaaagattgttaattatttttctggaac

SEQ ID NO: 276891 - DNA, 563 bp, Homo sapiens
aagcattcacatgtttgatataaattggcaatcacatgccatacaatataagatactcaggccagtgagcctcatttctggttcctgctgtgctgttgcccagctctacgaccctagacaacttagtcaccccttaagacctttgttttttctttactctaaaaatgaaggtttggggcaatatatgcaaaatatgcactatatgcttaatgtataggtaaatgaaattgactttttctctattactaccttataaagtaagaaaaaaagctaggtcgatttttgccaaacttggaggatattttggggtgataggacttaacagataagctccaaggaatattcgcttcgggcacctattgakgaaagtaaggcagtctccactgtcaaagaattgaggagaaataggctttgatttcaaaatcaaagggcaggcaatccaaatttcaggacctgattgataatggagctgttccttacttgggtaactctaatagctagctcaagggtgaagaacagcaggaacatatttatttaaagattgttaattatttttctggaac

SEQ ID NO: 276892 - DNA, 565 bp, Homo sapiens
tgtttatttgtactttattcaaatgggctcatactgtacatattccttggtgatcactccttttttacaatactatgtttttcagatgcatccaggaattactgcgtctagctctgttgcatagcatttctttgtatcaacattacaaaatacatttatccatgttactgatgatataatgtgagttatgctgtgtattagtccattctcacactgccaataaagacatacctgagactgggtaacttataaaggraagaagtttaattgactctcagttctgcatgggtggggaggcctcagtaaacttacaatcacggtggaaggctagagagaaacaaggcaccttcttcacacagcagcaggaaggagaactgagtgaaggggaagagctccttataaaaccatcaggtctcgtgagaactcactcactatcacaagaacagcatgggggaaagttctcctatgatttaattacctccacctggtctctccctcgacaagtgtggattatgggaattataattcaagataaaatttgggcgggaacacaaagcctaaccgt

SEQ ID NO: 276893 - DNA, 563 bp, Homo sapiens
atttcactactgggtatatatccagcagaaaggaaatcaatacatcaaagagatgtctgcactctcatgtttattgcagcactattcacaatagccaaaatatggaatcaacccaagtgcccatcaatggataaagaaattgtcataattaaagcagaccaggtttcatagcatacataatcccacaaattacatctttaataaatttacttttaactgagttacattaaaagcttgtgtgcccagacatagcctcaaaaatatgtccatactacattgaaggactgaaataactatagatggacatttttttaaatgtatatttccatggtagaataaataccttttgtttttgtggtttcataaataatttyccctgtaatgcattgcaggttaaaatatttaaattttctacagaaaagtatacttctttatgaaataaaagagaccttcaatgctggactgcattgctgaaatacagtgcagcaaagtattcatcagtggtaccccccatcacttcctaaattgtaagtcttactttttgttaatttaacttttaaaaa

SEQ ID NO: 276894 - DNA, 588 bp, Homo sapiens
aaaagggtaaaatcatactgatgtagagtgaatctaatttttgaatttcaggcsttaatgatttaaacctttgtgcttaagtacggaaaaattaaatcctttaaaagaagttcataataactgaaaaaggccccatctggcaataatgaagacaaattaacaataaaattttgaaaatctggcaatatgatcaagccaaagcatacgaaattacttctctgtacttagtcactggtggtccaaggaaggatcaacttcctgtcttggattctggcgtctaaattaaagcaggaaaatcgactgcaatctgggttccaggcttctggctcacaagcaacaaagctcgaaactcactaaaagcaggaagactttaaccccaacatattctctaagaagaatctgctttttgaatagctgctttcagtttagttcaaacacaagacaatggcataaattcacaccttggaggttagttgacttttaaagcttattgtgctatattaactccttttgtgccaatttatcttgagcaagagggtttttctttaaactacacatatgagctagaatttactacagaagaaaaaa

SEQ ID NO: 276895 - DNA, 584 bp, Homo sapiens
gaaatgcttctatgctgttggtaggaataaaaattagttcagccactgtagaaagaagtttggagatttttcaaagaacttagaactaccacttgaccgggtatatattgaaagaaaacaaattgtttttatcaaaaagactcatgaacctgcacgttcattgcagcactattcgcaatgacaaagagacagaaccaacctaggtgcctattgatagtagagtagaaactaaaataaaagttgaaaaataaaaaaagcttattgtaaatgacccctcccacattagaaagaatacaacttttttgacgtttataaaaacctggtttctagaggaaacactcatccagaattttttttcgagatcaatttaaaggtttttgtacattttccagagttctaatatgttaatgagaacctatgtgaccgtacaagcttgtttctatttatcactgtaacaaactcaacatctatgtgggatttagttcgtacyttaaacaagaacacagattgtcaaatattaaaattatttaaggcattgtgtttataatttgactctgaggggttaccttagaatcatacgtgta

SEQ ID NO: 276896 - DNA, 459 bp, Homo sapiens
gggcctcaggaagcttctacttatgatagaaggtgaagggagctgatgtgtgcagagattgtatgataagatgaagacagaaaggagggggtgccaggctccttttaacaactatgtcttgagggaactattgcaggaactaatagtgcgacaactcactcatttccataaggatggcaccaagacactcatgagggatccacccccatgaccaaaacacctctcaccaggccccatctccaacastgggatcaaattacagcatgaaatttggtgggaccaaacaagtgcaaccaaaccatatccaaactgtagcaagtaaatgctgaagctcctggtaaacagtgacagcacattacccaaatgttacatgaaagttatgaaatgaagtatgtgctggtggggagctagactgtggttatgttccctattacaaagatgatgagtacaatgattgtg

SEQ ID NO: 276897 - DNA, 620 bp, Homo sapiens
cactacagtgattgactagtcagaaagaaagctatggtgatcatgtgataaataggcccttgtcatatgtctatttcattgtgaaacctaaggactcctggactcattccaaatcaccaccaaaatggtaaattgaaagaaaacatataattggaagaatggcagatattagtgccatcatcatagacttgaaacatataccattggyaattcttatttaatttactttttgattgatgaaaaaatgaaataggtctttgaaaatacctgtgaattatcataaacatgatcaaactatgatgacaatcacagctgctgttttcaggtgggaagttgataatgcgtactactggtcccctacacacattctctacctggcctgcgcgtcaaagtttctgtaaatgttagattctaaaagttcacaagtgcttccactccagagaactgtcctctgctgaacgtatatgtcactttttaatcccataagtggatgcctacctttttatcctaagggatatcatgaggttacaaaagctttgctcccttcttcaacaatggaagcagttctgtgttataaatcatgatccagagctcccagagggattagtctgaagaactca

SEQ ID NO: 276898 - DNA, 632 bp, Homo sapiens
ttttctcaaaacactctcatgtcaagcagatgttattgttctttggctctccagaaagtcaacaagcaaaatgccttgagtacaccaaaaaacctgttgctataacctttgctcttgactggtccacttttgctttaactggaccacttccgcctcttggtagccattgtttcgttgtgctttgtctttatgatcatactggtaacgctgtgtttcatctcctgttataattcttcagagaaatgcttcaggatcttgattcctcttgtttaaaatttccattgtaaggtctgctcttatctacagctcatccagacacartggttttggtacccactgagtgggttattcgttcatcattaatttttcagtctgaattatgtaagctgagccaatcaagatgtctatggtgttggctattattctgctgctaattgttggtcctcttcaggaaattaataagattaatgtcttgtttgaaaattgatgtggatagatttcatcttcaacattgtctcactccttaaaatgagtgacccctttgtaaactgctgcttttggcagggaacattgttctcctaaactttttgtaaagcatcagtgatggcatcattcttccacccaaacttcat

SEQ ID NO: 276899 - DNA, 557 bp, Homo sapiens
tttcgttgtgctttgtctttatgatcatactggtaacgctgtgtttcatctcctgttataattcttcagagaaatgcttcaggatcttgattcctcttgtttaaaatttccattgtaaggtctgctcttatctacagctcatccagacacaatggttttggtacccactgagtgggttattcgttcatcattaatttttcagtctgaattatgtaagctgagccaatcaagatgtctatggtrttggctattattctgctgctaattgttggtcctcttcaggaaattaataagattaatgtcttgtttgaaaattgatgtggatagatttcatcttcaacattgtctcactccttaaaatgagtgacccctttgtaaactgctgcttttggcagggaacattgttctcctaaactttttgtaaagcatcagtgatggcatcattcttccacccaaacttcatcacaaatttgatatctgtttttgtttcaattttggcagaattcatgttactctgatggggctctttgcaaactgatgtcttatccttcttagta

SEQ ID NO: 276900 - DNA, 632 bp, Homo sapiens
ttttctcaaaacactctcatgtcaagcagatgttattgttctttggctctccagaaagtcaacaagcaaaatgccttgagtacaccaaaaaacctgttgctataacctttgctcttgactggtccacttttgctttaactggaccacttccgcctcttggtagccattgtttcgttgtgctttgtctttatgatcatactggtaacgctgtgtttcatctcctgttataattcttcagagaaatgcttcaggatcttgattcctcttgtttaaaatttccattgtaaggtctgctcttatctacagctcatccagacacaatggttttggtacccactgagtgggttattcgttcatcattaatttttcagtctgaattatgtaagctgagccaatcaagatgtctatggtgttggctattattctgctgctaattgttggtcctcttcaggaaattaataagattaatgtcttgtttgaaaattgatgtggatagatttmatcttcaacattgtctcactccttaaaatgagtgacccctttgtaaactgctgcttttggcagggaacattgttctcctaaactttttgtaaagcatcagtgatggcatcattcttccacccaaacttcat

SEQ ID NO: 276901 - DNA, 549 bp, Homo sapiens
tcctcacaactttctacattttatctattccatattatattttgcctactcattatgattttctaaactgtgttgtcagcaaataataacaattttgtttctttcttttcaatctgtatagctgcaggttaccttcaataactttttttatgtcgaagaatttcyctactatttctagtttgctatcaatttttttatacgtaggagttgaattttgcaatttttttcttcatctattaatgtgggcatatgcttttccctctattaactatgtcatttcttctccatttatttctattcactcctgcttatgggtaatatttgcttgctgcttgtcatttctaataattttagtttggatactggatattgtgagcattacttctttagtggcttgatttgttattttttaaaaaagagattttggggctctttttggctgtttcctgctgactggtttggcccattagaaggggattatttttaaaaactgttaaagtaattttaaagtatcccttactcttcaagttgtatatacctattttaagg

SEQ ID NO: 276902 - DNA, 534 bp, Homo sapiens
tgcgttcattaccaagaaaacaaaataacagaaacaaaaattcacacacaaaatttttgctgccacaattgccaataatagaaatatctgagcagatactccagcagtatgctccttgtttaagccatgtgaatattttttaactgattttatgaataatctagtatagtttaagaatagaagttactgtttcccagttagtgatagatatttatagtcaccttctattatgtccttttaaaayattctgaaactatgtgtttgaaaaaccatgacaagattttaatgtatattttatgacagacaaaatagtacatcatgtaacggacctgccatgtgcccagtatgttgccacacactacaaatgcaggtgtgaataaaccatgggctatgctctcaagaagtttgcaatagggtgaagaaacagagaagtaaatagaaaagtgcaatacaatattcatgctaaaatatgggtgagaacccagagaagagagcaactaactcagcgctggaaagtaaaattaaaatttcaca

SEQ ID NO: 276903 - DNA, 562 bp, Homo sapiens
gaatagtcttcttactagggtaacttcaataaaatattcatcttcaaattccagtctctaggcaaatttaatttctgaaagaaagaaactgattattccctttaggaaaaactaaattctttgatacattagctatggaagatagagacaaatttatataacacaaaaattgtcaaagtttaattaatgacagaaaaattttagacacttgatgcctgctataatcacttaaggtaatattaaatatagaaatgctcaaagtaaaattttgctttatgtattttgctactatgtcagtgcattcacaaaaagataactttttttttcattgttattrttgggaatataactgtcactcaaagtctttcatttgaaggtaccctccatgtctttggttgtctttgtgatatatttattttgtgttctgaagttttatatttatgagttgattttgcttatcctgcttgagattttcttgaccttttttttcaatatgtagtttggttaagtatgttttactgaatgcagtgttttacttcagttttgtagcattaaaaaaaat

SEQ ID NO: 276904 - DNA, 645 bp, Homo sapiens
ttacctgatgctcactcttcacaatctaaatattcctcatttctttatggttcaatgcaactcatcttctccaaagcacatttgctgaccacaccagccctccatttcccacatacttgaactgtatcaatcatcatgacacttactgatcaatcttgtattaggatataaatagattaaatgcattttttttctatccaatycatgagtgtgtccctaatctccggaaggggaatataaggtgggagtggcaggtatgcaaatggaccaaacatgcactacagtgtccctttgtgatttcctccttcactctctgttggacaaatgacgatgttattatttggaaaatagtaatagagaaagtgaccaaaatttttaaaattacaatgtaattgatgttttacaatttcaaattaatatctgcaaattaagctatgtagagttttttctagatcagtttattcattgtaataggtttaccacagataaataatgagaaattgacataaaattgtatctccaactgttcttttgactctctgtagtagttttttattgctgtgtgacagatttccaaaaacgtagtagcttaatatgttgttgacacattattatttcacaatttttgtgggtcataaatctgcc

SEQ ID NO: 276905 - DNA, 645 bp, Homo sapiens
ttacctgatgctcactcttcacaatctaaatattcctcatttctttatggttcaatgcaactcatcttctccaaagcacatttgctgaccacaccagccctccatttcccacatacttgaactgtatcaatcatcatgacacttactgatcaatcttgtattaggatataaatagattaaatgcattttttttctatccaattcatgagtgtgtccctaatctccggaaggggaatataaggtgggagtggcaggtatgcaaatggaccaaacatgcactacagtgtccctttgtgatttcctccttcactctctgttggacaaatgaygatgttattatttggaaaatagtaatagagaaagtgaccaaaatttttaaaattacaatgtaattgatgttttacaatttcaaattaatatctgcaaattaagctatgtagagttttttctagatcagtttattcattgtaataggtttaccacagataaataatgagaaattgacataaaattgtatctccaactgttcttttgactctctgtagtagttttttattgctgtgtgacagatttccaaaaacgtagtagcttaatatgttgttgacacattattatttcacaatttttgtgggtcataaatctgcc

SEQ ID NO: 276906 - DNA, 577 bp, Homo sapiens
tttagatattttcttcttccaaagggcttaatatataatttgccatcagtcacaaaggacatttgttgatcaaatttagtctgcacaaatgaatagacctctgttaagtgagtagcacatacaatatatagtttcaggctaaaatcattayttctttattgatagaaacaaagaaaaaaacatttggtatttcaaacttcaatgcacaatgataaaaattagttaataaatataggattgtattcgactatcaaatgatcatatataaactttttaaatctgtctgccttgacgattctattaaagtgaataaaagagcaagacaacttatagaatgcttaaataaatgagcaaagcaaagcttttcaaccatgatctgtcatgtgaaaagtatatagcatattgacttcttgacaagttttgtcacctgtaggaaaaagacattcttgtttatggaacttgtaggcatgctctgaaacttataatgcttaactgtcaaatcctctgagtacaagtaaaatatagaagcatttaatttatcacagggccattttaatcttgatttttaaagaacaca

SEQ ID NO: 276907 - DNA, 565 bp, Homo sapiens
gattggaatatggagaatcagaataagcactgtttaaaatgtgattgaaaatatacatgggagccagggcttgttgggcatgtgcatgatttagattttgtccaaagttctatgataagtcaatagaagagttttatgaggtatgacagtctgatttatggctttacagaaaaaaaaaaaaagatgacctacactgctttgtgttttaacaatccttggcagttaagagtgtggaggacaagactagaagtcaggagaccaataagagattatggcaacagctcagccaagatgcagcctgaattataataacagcactggagaggaagagaaggagacaaatattagatttattttgatagtagcaataacagtgcttgcggtattttggacagagggagatagaggagagggaaaaataaagaaagcctccagagatattgcttgagaagctgtgtgaacgaccgagtcatttactgagataaatacattcagatttctgtggataaggagaaattgtcatgtgcaccayggacatgttagttttgagatttgtatacacacc

SEQ ID NO: 276908 - DNA, 1090 bp, Homo sapiens
ttgacaaaaaacattttcatgtagtaaccaggaaagaagctgaactctagagcactgaggaataaatagaatatgagaaagtagagtcccagacactaattatttccagaagtttatctacataggtgagcataggaatggagaagttgctgacaagaattgtggagaaacctgaggtttttaaagaatatgaaatagcaagacaagtttatatgcttatatatatctactagatagggagatattgatggttgaagagaggagaggaatgaatgaacaatgaggagaataccttgaaatagataaagaagatgggacccagagtaaatgttatcgaataataaggagggataaaatttaaatttaayccaagagaacaaaataaatgcacatgcaagaaggttacatgataagtagaaatttgagggaattctaaactgatgatttatgtattcttaatgaattagaagcaagttcattatctgaaattgattaagcagattggatggttgaagaatgctaaagtgtttgaggagaaaagataatatatgaaattattttttagaatagwcagacttcataagagaaagctgccctccctacatcagacttgaggcatagccaatgcactgcagtctctgaagggagttgcagtcagggattcaggccacttaggccggtcatgctctctggatatttgcatacctaacccctgctccttcattcctaggtctctttatctgaggctgtgtgcagagtcctcttcagaaacctctgctaaggcctctatatgggaggaacaggaaaaacwttaaaaacactcttccccactcttactcagtaccaagtactttttcattcctagctctctcctctagccctcctcccttcccccaaccctagagtccataaaactgccagagtcttttgtttgggttccatgaagagtgagacaatctccacatcggtattgatccacctgacctcctactggtgccctgctctgtgggggaaagtggagttggtgctgtcactggttttagagtcttcctcataggatcacagtaagtgattaaaggcttaaccattt

SEQ ID NO: 276909 - DNA, 568 bp, Homo sapiens
acccccattggccctaaattatctgcatgggaatatggggttggcctgaactcctaatccagaagagtagttgctcaagagacctggaratctacctagggatcagagaggggcctctgccccaagatctctgcacaggagggtagggtgactcaggctgctgaacccagcaagcaggttctctgaatgcctggaaatctgcctgggtgtgtagcagagagcccccccaccacccgccccacagcagaatctctacataggaagggtggggtgacttgggcttctgttccaggcaaacgcctgggatcttcctgggtgcaaagcagagaggacctccctgtaccaggatctctgcacaggaaggatggagcaggtcaggctgctgatccagttgagtaggtgctctgaatgcctggagatatgcctgagtatagagcagagagaaccccactgtactatgatctatgcccaggaaggttagagcagctctggatggtgatctagtcaagcaagtgctccaaatgtttggatgtctgcctggggatagagcagaaagggttctgatgca

SEQ ID NO: 276910 - DNA, 568 bp, Homo sapiens
acccccattggccctaaattatctgcatgggaatatggggttggcctgaactcctaatccagaagagtagttgctcaagagacctggagatctacctagggatcagagaggggcctctgccccaagatctctgcacaggagggtagggtgactcaggctgctgaacccagcaagcaggttctctgaatgcctggaaatctgcctgggtgtgtagcagagagcccccccaccacccgccccacagcagaatctctacataggaagggtggggtgactygggcttctgttccaggcaaacgcctgggatcttcctgggtgcaaagcagagaggacctccctgtaccaggatctctgcacaggaaggatggagcaggtcaggctgctgatccagttgagtaggtgctctgaatgcctggagatatgcctgagtatagagcagagagaaccccactgtactatgatctatgcccaggaaggttagagcagctctggatggtgatctagtcaagcaagtgctccaaatgtttggatgtctgcctggggatagagcagaaagggttctgatgca

SEQ ID NO: 276911 - DNA, 568 bp, Homo sapiens
acccccattggccctaaattatctgcatgggaatatggggttggcctgaactcctaatccagaagagtagttgctcaagagacctggagatctacctagggatcagagaggggcctctgccccaagatctctgcacaggagggtagggtgactcaggctgctgaacccagcaagcaggttctctgaatgcctggaaatctgcctgggtgtgtagcagagagcccccccaccacccgccccacagcagaatctctacataggaagggtggggtgacttgggcttctgttccaggcaaacgcctgggatctycctgggtgcaaagcagagaggacctccctgtaccaggatctctgcacaggaaggatggagcaggtcaggctgctgatccagttgagtaggtgctctgaatgcctggagatatgcctgagtatagagcagagagaaccccactgtactatgatctatgcccaggaaggttagagcagctctggatggtgatctagtcaagcaagtgctccaaatgtttggatgtctgcctggggatagagcagaaagggttctgatgca

SEQ ID NO: 276912 - DNA, 1064 bp, Homo sapiens
gttgttgtctatgattttttgtaggtctagaagtacttgttttatgaatctgggtgttccaatattgggagcatatatatttaaaatagtcaagtctctttgttgaattgaaccctttatcatcatgtaattcccttctttgtccttttttactgttgttggtttaaagtctgttttatctgatataaaagtagcaacccctgctcttctttgttctccatttgcatgatgaatctttctccaacccattactttgagcctatgagtgctgttgcatgtgagagtggtcttttgaagacagtagatagaagggtcttgtttatttatctaacttgtcactctataccayttaagtgggacatttaggttatttatattcaagattaatattgatatgtgagatttttgatcccattttgaagttattagcttggattctttgtagtttctattatgtggttgctttatagcaggggtccccaaccccgaggccatggactaatactggtctgtggcctgttaggaactgagctgcacaacagtagatgagcagcaggtgagcttcatttgtatttacagccactctwtacaataggctaaaaatatgcacattgtgttttattttggcaggtgtatcaggctgactgtaataaatwggcatattgaaaaatattcacatacttttagcaattgaagagtaaaatatatggtattcatttcaagataaagtataatcaacatgtgtcattgaggtaattttctcaaaatgatctcttactaagtatcttaaagataaaaaaacaaaatattaaacctgtgtttctaattattgtgtccaatcttggcagatctcagggaggatggttggcaatgttttattgccatatttgatatcacaaacaatattctttttcaagaaatgagtcatttttaatctttttttaggaaggaatcatctttcaattcttatttatttctttatcaggaaatatctttaatgggcctgtgtgtgcagtcaatttcttgtgtaacattgaaaatgtagcaatccaaatgaatcactt

SEQ ID NO: 276913 - DNA, 470 bp, Homo sapiens
actagagaatgctggcttatcttttaaatcaaacttgtctgcaacactaaattaccctttatacggtagtctagagaacttgtaaacactttcggtctcaccactggaaatttcagaatccagctagagtaagtttctatttggtatccatttacattttgtaagtagttaatcacctctttgaaataagaataaaaaaagttgtgttaccttattaagctgtatctgagtccattaataattgtagaaaatcataatgaattaatattctaaaatctaggacttgcttctgactttgttctttactggttacaagatcttgagtaaatagcttctttctttgggtttcactttgctcattcagaaattcaataaaattgcaattttggagtatctgagatccaggyactgagcaggcattgatcatcatatgatgatgaacaagatacagcctgtgccctgtagtagtt

SEQ ID NO: 276914 - DNA, 586 bp, Homo sapiens
tacacatgccatcttgtgcaaattacttaaactgtaagagtttctattttctcagagttaaaacagcagtaataataacagcacatctatmagagtagtcctatattaagcaaaataatttacttaatgggtttagcccagtgcctggcataaagaaagggattgacaattttgttttaaaatctgtttttatttattttgttttgttttactttcattctggttttctattttgttgtttggttttgctttgttttttgtgtataacccaatggtgcttaaccagggacagcttttccctccagggaatatttgacaatgtctgggcacatttctagttgtcataactgggagaggggagctacaagtatgtagtgagtgttaaacatcctaaaatgcactggaaagccctctaaagtaagaattacctggaccaaaatgtcattgtgcttacattcaaaatgtcagtgtgccaaggttgagaaactctgcaagaatctgtcgtttttgttttcttttttaccatttacctacttacatcccatttttattcctctactgccacctgctttttcttcttatttat

SEQ ID NO: 276915 - DNA, 586 bp, Homo sapiens
tacacatgccatcttgtgcaaattacttaaactgtaagagtttctattttctcagagttaaaacagcagtaataataacagcacatctataagagtagtcctatattaagcaaaataatttacttaatgggtttagcccagtgcctggcataaagaaagggattgacaattttgttttaaaatctgtttttatttattttgttttgttttaytttcattctggttttctattttgttgtttggttttgctttgttttttgtgtataacccaatggtgcttaaccagggacagcttttccctccagggaatatttgacaatgtctgggcacatttctagttgtcataactgggagaggggagctacaagtatgtagtgagtgttaaacatcctaaaatgcactggaaagccctctaaagtaagaattacctggaccaaaatgtcattgtgcttacattcaaaatgtcagtgtgccaaggttgagaaactctgcaagaatctgtcgtttttgttttcttttttaccatttacctacttacatcccatttttattcctctactgccacctgctttttcttcttatttat

SEQ ID NO: 276916 - DNA, 1236 bp, Homo sapiens
atcgcttgccttttcactttttgcttcctctcagttatttctgacttctttacattaaatattaatgatttcttgttttattttgctaaaactttacataaaatgtgaaattcagaatggtattttacataacagagtggaggtccagagaagtctaagagctttatttttattcactagctatggctaattgctagacataaaaaaaaatcaagaaatagacatctatattcccattttataatttttttggaactataactgtcatctgtgatattatatctttgcccatctctcttgtaggtcagttaggattcagagtgatgtatttactaaatggaaatgaaataatttatttgtatctatcacattttgacctcttctagcatctatttttaggaaatcgttttaaaacagaastgaccctgcagctgagaccacattcctaagtttgcataatatattaacaaaactaaactaaacaatgtttaatgattttgtggaaggagattccttcacaagcatggaatacaaaattgctacactgtgaagcctctataatgtatacctttggtwttcctggcagtatagtttctatgaatttgttcttagttaagtaatgtttaaagctatatttttatactgaataagaaaaatcacatacatttctctcacagaatattatcatttctcttgaccttcttgatctaataaggcagtaagtgacattgtttcaaaactagcactattttactgagtataaaaaagtaatatttcagtaagcttatattcaaaagtaataaagttagcataaattgatttgtaaaaatgcttagagttatagtgttgggaagattagaatatatttttgcttgttttacttacagataatcattgaagaaaaccaatatggcacttctatatctagagctctggagggagtgaaggatagatgggtttttcctacacatcgcctgtgccacttgaagcaccagacatgagggtcttgagcatagtatgtttaatattttaaagatgacaactgtgttttwcaagttaaaatggcaataattattttttcctagaatgctgtgaattcttggcacataataggtgcctagttaattgttccttcaattattctttctttttccaatcccctttacttacacacagacacacatgcatacactcatacacactcattcaattaatactcattgaggaagttcttac

SEQ ID NO: 276917 - DNA, 618 bp, Homo sapiens
gaaagaagagtataatatgtaaatgtgacagaattcatattgtcaactcttttaagattcctaaaatatgggttcagcaaggagatttatttataaatattgtaatgtttgaattttacttgaagagactattgttttatcaaagaccataagtgtaaaaacagaaagaatttgtcatcagagggtaggaaaaagctcaacatcatcacaatactaggaagtgttttttttttttttttttctctattgactttaattaatctctctctctggacttctgtgagatggaaaaagktttatttttgtttttagagcttgcttgccagatggaattctttgaactactactgctctaactctgccaaccacagcattcacagctaaagattttaatttgttttacaacccgacaaaagtagaacaagtaactgtgtatgtagtggagtagggaggtgagggtcaaccctgaggacacagacatttactattagtaaggtaggcatgcaatgcccacctctttctgtttctttcttctaattattataaaagatccctggcactgaggtcaaaatttaacatttttaaaaatctctttaccattatctctaaaataacaat

SEQ ID NO: 276918 - DNA, 532 bp, Homo sapiens
tggaattctttgaactactactgctctaactctgccaaccacagcattcayagctaaagattttaatttgttttacaacccgacaaaagtagaacaagtaactgtgtatgtagtggagtagggaggtgagggtcaaccctgaggacacagacatttactattagtaaggtaggcatgcaatgcccacctctttctgtttctttcttctaattattataaaagatccctggcactgaggtcaaaatttaacatttttaaaaatctctttaccattatctctaaaataacaatgacctaagtagaagcttggtttttcttcctgttacatttttttttacaacatacaaggcaccacattgcctatagtagttgatatacacaattagatgcattgatttaaatttcagtgtgatcaatttaagtcaggatatattgttaaaagtgctacatattagaaaagccagatagaaatgcttttgaaaacaattttaagcatcacaaataatatataggggatttaattataacatga

SEQ ID NO: 276919 - DNA, 618 bp, Homo sapiens
gaaagaagagtataatatgtaaatgtgacagaattcatattgtcaactcttttaagattcctaaaatatgggttcagcaaggagatttatttataaatattgtaatgtttgaattttacttgaagagactattgttttatcaaagaccataagtgtaaaaacagaaagaatttgtcatcagagggtaggaaaaagctcaacatcatcacaatactaggaagtgttttttttttttttttttctctattgactttaattaatctctctctctggacttctgtgagatggaaaaaggtttatttttgtttttagagcttgcttgccagatggaattctttgaactactactgctctaactctgccaaccacagcattcacagctaaagattttaatttgttttacaacccgacaaaagtagaacaagtaactgtgtatgtagtggagtagggaggtgagggtcaaccctgaggayacagacatttactattagtaaggtaggcatgcaatgcccacctctttctgtttctttcttctaattattataaaagatccctggcactgaggtcaaaatttaacatttttaaaaatctctttaccattatctctaaaataacaat

SEQ ID NO: 276920 - DNA, 618 bp, Homo sapiens
gaaagaagagtataatatgtaaatgtgacagaattcatattgtcaactcttttaagattcctaaaatatgggttcagcaaggagatttatttataaatattgtaatgtttgaattttacttgaagagactattgttttatcaaagaccataagtgtaaaaacagaaagaatttgtcatcagagggtaggaaaaagctcaacatcatcacaatactaggaagtgttttttttttttttttttctctattgactttaattaatctctctctctggacttctgtgagatggaaaaaggtttatttttgtttttagagcttgcttgccagatggaattctttgaactactactgctctaactctgccaaccacagcattcacagctaaagattttaatttgttttacaacccgacaaaagtagaacaagtaactgtgtatgtagtggagtagggaggtgagggtcaaccctgaggacacagacatttactattagtaaggtaggcatgcaatgcccacctstttctgtttctttcttctaattattataaaagatccctggcactgaggtcaaaatttaacatttttaaaaatctctttaccattatctctaaaataacaat

SEQ ID NO: 276921 - DNA, 599 bp, Homo sapiens
atttcaccacttagagaaggcattaaatgagtcacaattttcaggctaatgatgttggggagttataatcttagttgtgatgctggcgggagaagaacacacagttactgatattctttttctatttagtcttkaaaagcatttacttaaagcttttttaatctttgatcttttttctgtagaaaattaaggccttggatatataatatatacatgtattttaaaaatttcctgtaattttcatgtacattgcattttctgcattgacaacaaccttgttagaaacattaatatgcctttttaattgaatcatcaggagacttagctaaagtttcaaagtaaaaaagtaacagagttaggattcaaacctgaactttctgatttatcagggttcccttccaatatttcagtaatactctgtagaaaataatttaggttgtttttgattgtttttgaacccttagtttgaattgtatcagtttttagtggacaatcacattcctcgtgttagttttaaaaattctaggtagtgatgaaaatcaaaccagaattcaacaaatgaagtttctgctgaaagaaagatttggacttaagtcagt

SEQ ID NO: 276922 - DNA, 599 bp, Homo sapiens
atttcaccacttagagaaggcattaaatgagtcacaattttcaggctaatgatgttggggagttataatcttagttgtgatgctggcgggagaagaacacacagttactgatattctttttctatttagtcttgaaaagcatttacttaaagcttttttaatctttgatcttttttctgtagaaaattaaggccttggatatataatatatacatgtattttaaaaatttcctgtaattttcatgtacattgcattttctgcattgacaacaaccttgttagaaacattaatatgcctttttaattgaatcatcaggagacttagctaaagtttcaaagtaaaaaagtaacagagttaggattcaaacctgaactttctgatttatcagggttcccttccaatatttcagtaatactctgtagaaaataatttaggttgtttttgattgtttttgaacccttagtttgaattgtatcagtttttagtggacaatcacattcctygtgttagttttaaaaattctaggtagtgatgaaaatcaaaccagaattcaacaaatgaagtttctgctgaaagaaagatttggacttaagtcagt

SEQ ID NO: 276923 - DNA, 496 bp, Homo sapiens
aagagagatgattacagatcaggtgtttccccacaggtttcttcaagataaattgttcatttgaaaaggaaacttccctatttgtaaaactttacaactggaaaaacaaaaaggcttctaaaactctagcatagcatacagcaggttagtaagacgtcatagatggctttcactctagtatttcaaaggatacattttttctgttcagggattactctcaaggtcttccgtgtgtgtgtgtgtgtgtgtgtgtgtgtgtgtgtgtgtgtrtagcatgtcttttcatatatatatgtgtgtgtgtgtatatatatatacatgtgtatatatgtatatttgtgtatatatatacatgtatatatgtatatttatgtatatatatgtgtatatatatgtgtgtgtatatatatatgtgtgtgtatatatatatttttttttcctagcagggtaaaagacgatttagtcagaaaatattactagcttcctttgcataaag

SEQ ID NO: 276924 - DNA, 1127 bp, Homo sapiens
aagagagatgattacagatcaggtgtttccccacaggtttcttcaagataaattgttcatttgaaaaggaaacttccctatttgtaaaactttacaactggaaaaacaaaaaggcttctaaaactctagcatagcatacagcaggttagtaagacgtcatagatggctttcactctagtatttcaaaggatacattttttctgttcagggattactctcaaggtcttccgtgtgtgtgtgtgtgtgtgtgtgtgtgtgtgtgtgtgtgtgtagcatgtcttttcatatatatatgtgtgtgtgtrtatatatatatacatgtgtatatatgtatatttgtgtatatatatacatgtatatatgtatatttatgtatatatatgtgtatatatatgtgtgtgtatatatatatgtgtgtgtatatatatatttttttttcctagcagggtaaaagacgatttagtcagaaaatattactagcttcctttgcataaagwcttgacttgatgtaattctaaaagatacacaaaataaatgttttaagttttatgtgctgaatcacctatttctgtgctaccaatttcacagcatatgcagccctcactaaattttgcagacatcacaaaaagctgtggagaatttttgtaaatataacactcaaataattacttcatgtacagtccacacgtcatcatagtcatttgccattttcatcgtggcttgtcctttctacattttattattcatttatgatagctattatagccctttcagattctatcttgctctcctgaggaatatttattgctattataggcctcttatgagaagacccaaagatagttagcgcagaaaccctgtgaaatgctacattagtacagggwttggccagcagtgaaagctctcgagttgtttcagagtccctcttgatgaagattaaaaggcaggttactcctggtaaggattcctttttacccaggagaaccaacttatttttgacatgaaagttagaaagcataaattaacacagttctacaaataagagctcttttgaaaaggtcgccaggaagaaagcaagaaaggatttaggatttacatgcaaatagatttgtgaatgcagtttataa

SEQ ID NO: 276925 - DNA, 630 bp, Homo sapiens
cttgacttgatgtaattctaaaagatacacaaaataaatgttttaagttttatgtgctgaatcacctatttctgtgctaccaatttcacagcatatgcagccctcactaaattttgcagacatcacaaaaagctgtggagaatttttgtaaatataacactcaaataattacttcatgtacagtccacacgtcatcatagtcatttgccattttcatcgtggcttgtcctttctacattttattattcatttatgatagctattatagccctttcagattctatcttgctctcctgaggaatatttattgctattataggcctcttatgagaagacccaaagatagttagcgcagaaaccctgtgaaatgctacattagtacagggtytggccagcagtgaaagctctcgagttgtttcagagtccctcttgatgaagattaaaaggcaggttactcctggtaaggattcctttttacccaggagaaccaacttatttttgacatgaaagttagaaagcataaattaacacagttctacaaataagagctcttttgaaaaggtcgccaggaagaaagcaagaaaggatttaggatttacatgcaaatagatttgtgaatgcagtttataa

SEQ ID NO: 276926 - DNA, 561 bp, Homo sapiens
ctagcagaggttctccatgaggacccaacccctacagcaaacttctgcctggacatccaggcatttccatacgtcctctgaaatctaaatgaaggttcccaaaccccaattcttgacttctgggcactggcrggctcaacaccatgtggaagctgctaagactagaggcttgcaccctctgaaaccacagcctgagctttgcattggcccatttcagcatggctggagtggctgggatacagggcaccaagtccctaagctccacacagcatggggaccctgggcccagcccacgaaaccattttttcctcctaggcctctgggtctattatgggagaggctgctgtgaagccctgtgacatgccttggatacattttcaccattgtcttggtgattaacatttagctccttgttacttatgcaaatttctgcagctggtttgaatttctcccctgaaaatgggattttctttctattgcattgtcaggctgcaaattttccaaacttttatgctcttatctgccctttaaaactgaatgtctctaacatcacccaagtca

SEQ ID NO: 276927 - DNA, 561 bp, Homo sapiens
ctagcagaggttctccatgaggacccaacccctacagcaaacttctgcctggacatccaggcatttccatacgtcctctgaaatctaaatgaaggttcccaaaccccaattcttgacttctgggcactggcaggctcaacaccatgtggaagctgctaagactagaggcttgcaccctctgaaaccacagcctgagctttgcattggcccatttcagcatggctggagtggctgggatacagggcaccaagtccctaagctccacacagcatggggaccctgggcccagcccacgaaaccattttttcctcctaggcctctgggtctattatgggagaggctgctstgaagccctgtgacatgccttggatacattttcaccattgtcttggtgattaacatttagctccttgttacttatgcaaatttctgcagctggtttgaatttctcccctgaaaatgggattttctttctattgcattgtcaggctgcaaattttccaaacttttatgctcttatctgccctttaaaactgaatgtctctaacatcacccaagtca

SEQ ID NO: 276928 - DNA, 587 bp, Homo sapiens
gtaaggttgagtgattaacaagataatttctataattgttttctttgtatccttttttatttgtttagcattgttttccacttgtagatgactgcccctatattaatagagtatttaaatttgtgaaataagtgtatagaattggcagcaaggatatgagaaaagaaaacataaaaaatttttaacttccacttcagcaaatctgagctactttaggtaactgcaaggtagttaaaaaataacattcatgtacaatttaaataatgtctcatataatgatttaatttaaatttaataacagagttattgcaggttaataaataccacctaatgattaaaagcatatttatttagattaacagctattaaataatcttatcacacttcctatggttaattttgtttgaaytatattttaaattatttaaaattctatcttatgcccacttctgtttgaaataatctccttaaaatttaagatgaaatccttttctttaacagtctctttaatcatttgcaaactaatttatcattaataaacagaaaacatttactatgagacaacacattatggagacatgtaaaag

SEQ ID NO: 276929 - DNA, 1093 bp, Homo sapiens
gtatataactctgtgttaataaatgaatgagtaataaagacttacaggcagcacatatagaatttccttgtaaaaaattgtagttatgaaaactagaaattttgttcagaagtatatcagatttaagagaaagtctcttgcttgttagtgaagggattgcttgaataattgaccacatagagaaascaggaaattgaaagagagtgtgcaaaatggaaaaacaaataaatgtacaccaaatctttgaatccacctatcacccagaaggcctctgttttgagttgccctgcttttccaaatcgaaccaacgcatgtctttcatgtattgattgatgtctatgtctccctaaaatgtataaaaccaagctgtagcccgatcatcttaggcacattttctcagtatcccctgggctgtgtcatgggccattgatcactcatatttgactcagaataaatctctccaaatgttttacagagttcaactcttttcattgacacaagcaagcaaacaaaacgacaaaaaacagtagagggaggaaataatttgtaaaacaaagtcccagaatgttttcaaggattgtggtaaagwtttctgtatttcactgtcagaaaccttcattcatgttaggtaaagatgatagacctaaatggaaaattaacactttccacttgwcataattcttaatgatagatcctaaagatcacagagcgggacactgaagggacaagcaatgtccatgttctctgggccccaagagctctgtgtgttttgcttctctccattcttgacctcactttcacaagccagtgcttgctcctcagtttttctgatttgaggggcatctataaggtactgtcttgtctagacttggtgagaaagagactggggcatgcatcacaattctttactctaattgctgtcattcttccttcttgatcaatttccccttcaggagaaaacagttgcttcttaagtagcagcacagtgaattctcaaaaatagctgtccgttatgcaaggacgcctgataaagaaatataactaacctaaagtcaccgttggtcagtcaatccatcaattaattttatgaaaa

SEQ ID NO: 276930 - DNA, 584 bp, Homo sapiens
gtccgttatgcaaggacgcctgataaagaaatataactaacctaaagtcaccgttggtcagtcaatccatcaattaattttatgaaaacttaacaataaaataggagtaccataatgggaaaaaatgtacagctgaacatcacagatatgagttaggttccaaaccatcacaataaagcatatttaacagtaaagccagtcacacaaattgtttggtttcccggtgtatatatacaatttatgtttacactatactgtagtatattaagttctcaataacattatatctaaaaagcaatctgcataccttaatttaaaaatactttattgcttaaaaatgctaatgattgctgggcacaggcagtggctcacacctgtaatcctaacaatttgggaggccraggtgggcagattacttgaatccaggagttcgagaccagcctggacaaaatggtgaaaaccgtctctactaaaaacacaaaaattagctggatgtggtggcacgtgcctgtggtcccagctacttgagaggctgaggcaggagatgtgcttgaacccaggaggcagaagctgcactgagccaa

SEQ ID NO: 276931 - DNA, 600 bp, Homo sapiens
aattatattaagttatagtcactctagaggtaaatatgactacacgtttacttttaagcaggtatttaagttataagctaaaatgaaatrgcagaataaggtgatagtgcctagaagcattttacaatgctttcagtgttgctatcacttgtatttaaaagtcaattgccaggtaaattcattaaaaaaaaatgctacctcttcatcttaccgtacatttatattattggcactctagacaggttaagttgattttggaatacacttccatttgtaagttctaatcacatgactggaaaatgatgttatacctcttgggataattaaaagtgtcccatgtgtctcaaaaccagaattgaaaatcacaggtttatgtaactggcaatgagatatctgtggccaattcttttagctaagccaatcagcataatgtcattcttctcttgagtgatctttgaattctatcactaatatttattcattttgctttatttcaagttcacatgaagcccattcatccatatttatgttcattgatttatacaatattgcttactatgttgtatttggcctcataaccctctgccctcacttattcca

SEQ ID NO: 276932 - DNA, 607 bp, Homo sapiens
tttatatactgtattctttctatatgatttaagtatcagttaaaacatatacatatataaaaatatacatttaaattgacatatatgttgattactgctgaagcattgcttaaaaaatataatttctcccagaagtttagatatgctgatattcaatgtgttaaatattaagcttgtcatcttatataaccctcaaaatctcatttacacttccacattaatttttattttacatttgtatatctgttactgctgaaataytttgcttctttatttaagtgaatactttatatacttcttttttcttttctatttctcccttagttctcaaatccaagtagcagccagacgtttgcaattttgctgtatttctttcagagtcaccttttgttttattgctaatctcctggtcagtatcaccatgatggtcctaactgattttctagcttctaatttctatatttttctattatactgttcctcaacctgcttgatttatttctctaaaatggattttagtcaaacagagcacagataaaaatgtacacttgatctcattgtaaatggattaatgtttaaattttacatcctgtatttgaaagcaacc

SEQ ID NO: 276933 - DNA, 491 bp, Homo sapiens
atgtcttacaggtggtgcaaactcaataaaagaaaattactgaattagtcaatgaatgacaaagtgaatgtagtaagtacggaatgatgggttcacataaatgccaaattaggaagtcatagatggtgaagaaataaacaaacatgcaaagatcaaactaggagtgtgaygtagtaaagcaatgaactcaccagtatgtgctattgcatcttttggatataagtcattttaattgaggtgagatgatatctcactgtggtcttgatttgcatttatctggtaacagatggtgagtccttttttatgtacctgttggtcatttatatgtcttttgctgagaaatatctattcggttcttttgtattttttttaactggactatttgggttggattttttttttgtatttgagttgtttgaactctttatacatttagtattttaatcccctgtcagatggatagtttgcaaatattttctcccattccatat

SEQ ID NO: 276934 - DNA, 491 bp, Homo sapiens
atgtcttacaggtggtgcaaactcaataaaagaaaattactgaattagtcaatgaatgacaaagtgaatgtagtaagtacggaatgatgggttcacataaatgccaaattaggaagtcatagatggtgaagaaataaacaaacatgcaaagatcaaactaggagtgtgatgtagtaaagcaatgaactcaccagtatgtgctattgcatcttttggatataagycattttaattgaggtgagatgatatctcactgtggtcttgatttgcatttatctggtaacagatggtgagtccttttttatgtacctgttggtcatttatatgtcttttgctgagaaatatctattcggttcttttgtattttttttaactggactatttgggttggattttttttttgtatttgagttgtttgaactctttatacatttagtattttaatcccctgtcagatggatagtttgcaaatattttctcccattccatat

SEQ ID NO: 276935 - DNA, 1158 bp, Homo sapiens
tatgtacctgttggtcatttatatgtcttttgctgagaaatatctattcggttcttttgtattttttttaactggactatttgggttggattttttttttgtatttgagttgtttgaactctttatacatttagtattttaatcccctgtcagatggatagtttgcaaatattttctcccattccatatgttgttccttccctttattattttctttgctgtgcagaaatgttttaggttgatgtaatcctatttgtcaagttttgctttttttscccatgcttttgaagtcttactcaagaaatatttgttcagaccaatcttccttaaatatttcctcagttatttctcattcccataacatctattagcactttataatttaatagacaggagaaattgactattttattgcctttgtagatcattgtaggttatttaagctgttaaaccagcagtattgtgtgtgtgtgtgtgtgtgtgtgtgtgtgtgtgttctgtgtctgttggacatggcacggggaatttcattcaaagtctttattatgaaactttaattgttctatctttcctctacagaaatttaaaataatacatttcatatgwtatttttctggaagagattgtgtcaaattggtgttatttcttctgtaagtgtttggtggaattcaccaatgagcctagaaatttctgttccaaaacaattttaattgcaaatttaatttcttcaaatgacataggaccattcaggttgtctgtttctccctgggtgggttttggtagtttgtagcttttaaagagttggttcagccaggcgtggtggctcatgcctgtaatcccagcactttcggaggctaaggcgggcagatcatgaggtcaggagttcgagacctgcctggccaatgtggtgaaacctgtctctactaaaaatacaaaaattagccgggcgtggtggcgggcatctgtagtcccagctactcaggaggctggggcaggagaatcacttgaacccaggaggtggaggttgcagtgagctgagagcatgccactgcactccaggctgggcaacagawtgagactccatctcaaaaaaaaaaaagagttggttcatctaaaatttaaaatataggtacatacataaatttgtacatggaactc

SEQ ID NO: 276936 - DNA, 617 bp, Homo sapiens
tccattaatcttatttttaaaatatttattaaaatgatactttgtggtatgtaaaataacataacatctgttcgtctaacatgcaaatatgaaccaaacaaacaaataaaacagactttaaacaatggaataggagaaagaatctgcaagcatatgtaaaattggctcatttgtagaatcattatttctagtaatgtattacggagacaaagatgctacattctcatcagtcagtggatactgtctctttgaatagtagctgcatttaatatgctatatataattagtggaaataaaatattaagaagacacaaataaatgttttatgaatgtacagacaaacccttsaattaaaaggttgaattgagccacttattagcacagggtaacaaatcagttgtttttgatataacactttactgacttcatatgctattaatcagtaattatgaatgaacattatacattacagtgtagcaaaaaagggttcaggtaacactaccacacttattaaaggaggttaacctagaaattaaagttcatgtccatttaagtataagttattttggtacctcattttcaaatttccaagtaagaaaaattactattcagctgat

SEQ ID NO: 276937 - DNA, 622 bp, Homo sapiens
gtggaagcctatgagagtatatatgatatttaaggttttttgttgttgttgttgtttgcattttgaggctttagtccactgctgtcacaatcagggattggagagttgaagttaagaatrtagagttcttccatggtgtgatcttgatcaagttacttaacatcactgcacttcggctctcttatctataaacaggctgtatgatacagtttgaatattttttctcacccaaatctcatgttgaaatgtaatctccagtgttgggggcagggcctggtgggagttgtttgcatcatgcaggtggatccctcatgaattgcttgggccatgcccttggtgataagtgagctcttgctctgagttcacaaacgatctggtcatttaacagtatgtggcacctcctcccgtcactctctctcacttgcttctgcttttgccatgtgacttacctgctcctgcctcaccctctgccatgactataagttttccaaagcctccctaggagtcaagcagaagccagcaccatgcttcctgtaaagcaggcagaatcataagtgaattaagactcttttctttataaattacccagtctcaggttttttttatagtaacgtaagaatgg

SEQ ID NO: 276938 - DNA, 622 bp, Homo sapiens
gtggaagcctatgagagtatatatgatatttaaggttttttgttgttgttgttgtttgcattttgaggctttagtccactgctgtcacaatcagggattggagagttgaagttaagaatatagagttcttccatggtgtgatcttgatcaagttacttaacatcactgcacttcggctctcttatctataaacaggctgtatgatacagtttgaatattttttctcacccaaatctcatgttgaaatgtaatctccagtgttgggggcagggcctggtgggagttgtttgcatcatgcaggtggatccctcatgaattgcttgggccatgcccttggtgataagtgagctcttgctctgagttcacaaacgatctggtcatttaacagtatgtggcacctcctcccgtcactctctctcacttgcttctgcttttgccatgtgacttacctgctcctgcctcaccctctgccatgactataagttttccaaagcctccctargagtcaagcagaagccagcaccatgcttcctgtaaagcaggcagaatcataagtgaattaagactcttttctttataaattacccagtctcaggttttttttatagtaacgtaagaatgg

SEQ ID NO: 276939 - DNA, 558 bp, Homo sapiens
aagaaacttctaagtagcaaagcattcaagagtttgcctggctgcttctaaaaacctacttcagatgtgggagtaaataaatgagttaaagttgaaatttatatttaaacaggaagcagaacatgaaagtttgcaaagtttgcagcctagccatgtggcaaggaaaaatatgtttttttttctggagagaaaatcaagcagacttgaagcaacaacttgatagaggtgtttgcatgaataaaagggagccaacccctaatatsccagacaatggaaaaaagaccctgaaggcatttcagagacctttagggcagcccccctcatcatggacccagaggcctaggaagaaagaatggttttgtgggccaagcctaggaccctgctgccctgcccagattcaagacactgctcctagcatcccagctactctggctccagctttggctcaaagggttccaggtacaactcatgctgctgctctggaaggcacaagccattaaccttggtggcttccatgtggtattaagcctgaaggtgcacagaatgcaagagtgaaga

SEQ ID NO: 276940 - DNA, 625 bp, Homo sapiens
agcccccctcatcatggacccagaggcctaggaagaaagaatggttttgtgggccaagcctaggaccctgctgccctgcccagattcaagacactgctcctagcatcccagctactctggctccagctttggctcaaagggttccaggtacaactcatgctgctgctctggaaggcacaagccattaaccttggtggcttccatgtggtrttaagcctgaaggtgcacagaatgcaagagtgaagaatgtttggcagcctctgcctagattttagtggatgtataagaaagcctgggtacccaggcagaagtctgctacaggtgtggaatcctcacagagaacctctactatggcagtgccaaagggaaatgtggggttggaggtcccacacagagttcccaatgtggcactggctagtggagctgagagaagaggacaaccaccctccagaccccagaattgtagttatactagcagcttgcaccctgcacctggaaaagctacaggcactcaacaaccaatgagagcagcctcaggggctgaaccctgcaaaaccacagaggcagagctgcccaaacatttggagcctatcctttgcaccagtgtgccctggatgtgggacct

SEQ ID NO: 276941 - DNA, 644 bp, Homo sapiens
tgatactacagatatcccagatatagttactaatagaaaggacaytttgcctctacatttctttgtgacttcttgcccacagcttcctaagaagccatggatccagaaacagggttttagtgagatactttagcttttttcatgttttctaaacattaacttcaagaggtgagctttcgacctctacataagttagaaagcattagtctctatgaatatgctgcatttgaaatcttagtcactgttacctgtctggactgggacctagcagacccacacagatcactgttttgtttttccatgaagtttctagtactcagagaggtttcttttctttaaggacatttatgtatattttgttatcactatttatattttctctattgttgctatctgtttgtagtagagagactgtatatgtgtagctgtgaacttagtatatactattaccaatcaaaagagctagatttgaaataaaaatatttctaggcaaggcactctttaatactagcttttcccccctgcttcatctatacaacccactcagttttaaagttttttgacatattctttgatgccctcctgattttatgatgggaatactttttgtctggaaaggttactcaacaataacttttcaaact

SEQ ID NO: 276942 - DNA, 645 bp, Homo sapiens
aggtgccttctataacatgcaaatatgttattaatttattccaaaatagggattattggttttacctgctgtgcagtaaagtcctaactcagcaggcttagcgtattcaaattctgcatgttcgaaagaaaggcctggcctttgatccactcttgcgagatgataacttctaagttcttaaaatgataagtgtgtttgcatacctgtagtcttggaacataccaggtagtttatgataacaatgcacttcatggtggaaaatttgggatacactgtatcagtttggtctctggagggactgaagggtgaagacccagtaaataggatcagtagtaacacaggcactacatggttttataaacaaaccttaataataataaaaaaaaaccctggacaccaagagtctggttagcttccctggttggcaatactatatgtgctgttacccctcaccgctggcagaattaagcactgtctacattattccaatggaaamagataatggtaagcttctgcctattctctccttgactctttcctatgtgtcttttcctttttgctggtttttatctgtatttttttggcttttgtttgcagtacaaacccacaattgtgagtataaacagattttctgagtgataacta

SEQ ID NO: 276943 - DNA, 614 bp, Homo sapiens
agattataattaaaaaattaagccatatatgggatctaaaatttataagatacatttagctttggtaaatttttctatactataaaataaaactgtgatattattttcaatttttttctggttgttatttacattttaaaactaagatttgccactcctatcctaaaagtaagggagataaaaataccaatgatatgtaattcattttattgctttaccaaagatatgtagctcattttattsctttgttaacaatcttctgttcattctatattttcacaagtctgttgttcatcactgtatatcctctatagaaattagttacattgtcaagagacttgggttattttagtgcatttctgatttaggagaagagaatgataatgattcatttctacaaatggtaatatttgcattcatattattcaatttttctcagttcaactaagtaatcagcatagtattttgtttcagcagccagaggttctaaattaattacagcattgtaattcaatagattgcaactttaaaggaagaaggcgggaagcacaggacaatctttaggtggtgacagagcaggagataagtctcagataaaagaacatgcatttcat

SEQ ID NO: 276944 - DNA, 614 bp, Homo sapiens
agattataattaaaaaattaagccatatatgggatctaaaatttataagatacatttagctttggtaaatttttctatactataaaataaaactgtgatattattttcaatttttttctggttgttatttacattttaaaactaagatttgccactcctatcctaaaagtaagggagataaaaataccaatgatatgtaattcattttattgctttaccaaagatatgtagctcattttattcctttgttaacaatcttctgttcattctatattttcacaagtctgttgttcatcactgtatatcctctatagaaattagttacattgtcaagagacttgggttattttagtgcatttctgatttaggaraagagaatgataatgattcatttctacaaatggtaatatttgcattcatattattcaatttttctcagttcaactaagtaatcagcatagtattttgtttcagcagccagaggttctaaattaattacagcattgtaattcaatagattgcaactttaaaggaagaaggcgggaagcacaggacaatctttaggtggtgacagagcaggagataagtctcagataaaagaacatgcatttcat

SEQ ID NO: 276945 - DNA, 560 bp, Homo sapiens
ttttcacaagtctgttgttcatcactgtatatcctctatagaaattagttacattgtcaagagacttgggttattttagtgcatttctgatttaggagaagagaatgataatgattcatttctacaaatggtaatatttgcattcatattattcaatttttctcagttcaactaagtaatcagcatagtattttgtttcagcagccagaggttctaaattaattacagcattgtaattcaatagattgcaactttaaaggaagaaggcgggaagcacaggacaatctttaggtggtgacagagcaggagataagtctcagataaaagaacatgcatttcatactactttaactttcctattgtgtgttctatgtaaaatattcacactgaggaacttcaagtaactgtggctsaataaatgttcattaaagtttgcattatgatttacagatagttgaattacactgtactccataaattcctctatgactgataattttttctgtaccaacaaaatatgtgatttctattatgtaccattttagatctgagttttagtt

SEQ ID NO: 276946 - DNA, 608 bp, Homo sapiens
attaattttaaatcaaataaaacaagatgtgaaaaggtgctgcctactacagactcgctttaagcttaaagacacacatacactgagagtaaagggatgaaaaaagatattataggaaaatggttatcaaamgagagcagagaaacagggttattaaaaacaatagactctaaataaaaaaatacagctaaggagacaaagcattatattattgtaaaggagtcaattcatcaagcggatataacaattttatatatacaaatacacatacacacatacaaattatatatatgcacatacacatccaacatcaaagcaactaaatatatacagcaaatattaatagatctaaagggtaagatagactacaatgcaataatagcaggggatttccatactcctcttttaacagtggacagatcattcagataggaaataaacaggtaaacagtgggtttgaacaatatgttagactaaatatacctaacagacatatatagagcattctatccaacagcagcaaaatgcatattcttctcaacttctcaactaaacattctccaaagtaggttgttatgttatagattatatgttagagcacaggacaa

SEQ ID NO: 276947 - DNA, 1073 bp, Homo sapiens
atggggagaaaattggctttaaattccagatatgaatcttactaactgaatttacctcattaatacagtttcttacctataattatatcgtgtggactggaaataagtgatgatagtracacagatagaaaatgtataaatacttgaaatataaagtaacttggatcatcatttgtacattttccttgtttgttctacatttttttattcacacaaaaataatttgcactgactttctaaaggtcaaaaatatgacaatgtcaccaggagtgaaatcacagatagacataaattaccatagctcattacaaaatcagtctatttgtgattttcaaaattaatcatgtttgataagctttaacaagcattactcatataataaaagtaaataacaattatctgtattgcaatgcaaaagaagaaattgaaattgttgcatgatataaagaagtacaatctacattagacaactttcccaataaagatttaatctctaatttttgagcctgataattagcacacatggtgcattcatawatggggagaaaattggctttaaattccagatatgaatcttactaactgaatttacctcattaatacagtttcttacctataattatatcgtgtggactggaaataagtgatgatagtgacacagatagaaaatgtataaatacttgaaatataaagtaacttggatcatcatttgtacattttccttgtttgttctacatttttttattcacacaaaaataatttgcactgactttctaaaggtcaaaaatatgacaatgtcaccaggagtgaaatcacagatagacataaattaccatagctcattacaaaatcagtctatttgtgattttcaaaattaatcatgtttgataagctttaacaagcawtactcatataataaaagtaaataacaattatctgtattgcaatgcaaaagaagaaattgaaattgttgcatgatataaagaagtacaatctacattagacaactttcccaataaagatttaatctctaatttttgagcctgataattagcacacatggtgcattcata

SEQ ID NO: 276948 - DNA, 1116 bp, Homo sapiens
aagccattgtcctcagcaaacacaggaacacaaaaccaaagatcgcatgttcttagttataagtgggagctgaacaatgaaaacacatggatacagggaggagaacaacatacactggggcctgtcatcgaagggaggggagggagtacatcaggataaatagctaatgcatgtggggcttaatatctaggtgatggattgacaggtgcagcaaaccaccatggcacacgttttcctatgtaacaaacctgcacgtcctgcacatgtatcttgtaacttaaaataaagtaaaactttttaaaaaagtgcatatcacgaaagtagagggtaggctggtggtgttagagtccaggaaagatagggaaataggagggataatgagaggttaattaatgtgtacaaatattcatttaagtaggagaaataagacctggtgtttgatagctcagtagagtgattataattactrttagtcaattgtacatttcaaaatatctagaaaagaatatttctaatgttcctagcataaataagtttataggtatctcaattaccctcagttgattatwaggccaacttttgttgaaccacatttggatacctaaacacatcagcactggataaaatcgaaggtttgtctatagaagccttagatcatgagtggaggagagagcagaaggatctttatcctagggccaacagcttctggtcttaagcacatatccaattgctgtgagggaagcataatgccctatatcaatatctgtcaggatatccttctacactgaaaaatttgtcataaaaatggcacgtttcatttcctgtctttacatgacaaacaccaataccttgtttawcaaatatgtcttactatgaaaattaggaattatttgaatttgttatgaagacaatgtgccaaaatggcattacattccctgatgtttagtaatgcctattttgcttttataaagagaacaatttgacttaatccacatttttctttcagagcattctggatacttttcactctttagggcattgaatggcactgagtaaaaccagcttgatgttttccctttgtatggtcttgatcctacattaagctatctcattccg

SEQ ID NO: 276949 - DNA, 547 bp, Homo sapiens
aggccaacttttgttgaaccacatttggatacctaaacacatcagcactggataaaatcgaaggtttgtctatagaagccttagatcatgagtggaggagagagcagaaggatctttatcctagggccaacagcttctggtcttaagcacatatccaattgctgtgagggaagcataatgccctatatcaatatctgtcaggatatccttctacactgaaaaatttgtcataaaaatggcacgtttcatttcctgtctttacatgacaaacaccaataccttgtttatcaaatatgtcttactatgaaaattaggaattatttgaatttgttaygaagacaatgtgccaaaatggcattacattccctgatgtttagtaatgcctattttgcttttataaagagaacaatttgacttaatccacatttttctttcagagcattctggatacttttcactctttagggcattgaatggcactgagtaaaaccagcttgatgttttccctttgtatggtcttgatcctacattaagctatctcattccg

SEQ ID NO: 276950 - DNA, 595 bp, Homo sapiens
gttggttgttaaaaatagctcgactctttcttcctctctaaccatatgatctccacacacaccagctcccctttgctttctgccatgagtgaaaacagattgaggtctgcatcagatggaggtgctgatgccatgctttttgcagtctgcacaaccatgagccaacaaacccttttattctttatcaattacccaacctcagatattcctttrtagtggcacaaagtagactaagacagggcgactggcaataggaataaagaaacaattagattatattcaggtaaatttaaaaaatatttcaaaaataaaaattgaataacttatcacagtttggatttaagaaatgaaggaaagggatgaatcaaattgaagtctataagattatcaagggagcaaaggtgctgataatggtcaagaaaaataaatgttaatattttgtgtacctaacttataatatgccagcttaaatttttctttatcaagaagtataatgaatgtatagaagaatgcacaaatcataagcgtacagtttgagtgatcagagaaaacacatctgtgtaaccaccaccttggccaagtaacattgccaaac

SEQ ID NO: 276951 - DNA, 595 bp, Homo sapiens
gttggttgttaaaaatagctcgactctttcttcctctctaaccatatgatctccacacacaccagctcccctttgctttctgccatgagtgaaaacagattgaggtctgcatcagatggaggtgctgatgccatgctttttgcagtctgcacaaccatgagccaacaaacccttttattctttatcaattacccaacctcagatattcctttgtagtggcacaaagtagactaagacagggcgactggcaataggaataaagaaacaattagattatattcaggtaaatttaaaaaatatttcaaaaataaaaattgaataacttatcacagtttggatttaagaaatgaaggaaagggatgaatcaaattgaagtctrtaagattatcaagggagcaaaggtgctgataatggtcaagaaaaataaatgttaatattttgtgtacctaacttataatatgccagcttaaatttttctttatcaagaagtataatgaatgtatagaagaatgcacaaatcataagcgtacagtttgagtgatcagagaaaacacatctgtgtaaccaccaccttggccaagtaacattgccaaac

SEQ ID NO: 276952 - DNA, 627 bp, Homo sapiens
ttacagagggcctactcaagaactcaggacaatagagaatgtcaraaaggtgagagggcattgcagacatggtgtgtatgtttagaacactttatcaagaactttaacaactacaaccaaatgtcatgaaaaaacagcattaattgaaatagattgacccagcattatttttctcacttgatagatttagaccttacagcacaatggttaactgaattgcatgagatcacacagctagatggtaaaagggtgaaaactaaagttttacaacttctatttctttcttcaaagaaatcatgaggttcacagggcatgggaaatcagaggaaacactgatggaaaattcaaagtataaaaacttaagaataattatagagctaagcaataacttggtgtatttgtttgctaggtctgccaggattgccataacaaaatactgtaaccataagcggttcactatctgatccgcactgcaagtcaatataccaacagaccagcttgcagcagagaaagaggtttaatcataggatcactgaacaaggagatgggaggaaaccttaaatccatctccctgaggaatctggggctaaatcttttaagcattttggagtgggcctaaatgtgaag

SEQ ID NO: 276953 - DNA, 562 bp, Homo sapiens
actgattggtgtcagctgttttgctggaatttgatgtctgaaaaacatcttaggcaatccttaaacaaaagctttatgattctattgtcaaagagccagtctataagaacaacggggatgaaaatcaatttttaaaccgtcttatagccctaacatcaaaaatcctatctataggaataatggagatacaaatggtcagtatctagtgcttttacatgacttttacaacaaggaagtgggccaaagtacagcctgaataatacttaattataactatatttctgtgcagaacctggcatgcaattcttgtcagcgctgtgggaatagttttagtacttcagactaggtgatgtaagtaaaagaaagaaattttctcacagttcagamggttggaaatccaagatcagggtgccagcagagttgattttattctgactcctctcaacttggaggccttctctttcttctcctgaatttttctctatgctcaaaaatctttagtgtctctttgtgtgtgctactttattatttctgtcttccaaaatgaatgtgttaaagctct

SEQ ID NO: 276954 - DNA, 569 bp, Homo sapiens
cttcttggaattgggggaggggtgatgcatgcaattccatagctaccacagctggtgttatgctggcctgtaccccgtgtccacatgtccaagtcttgcccaaggactgcagtccctatggcctgattaccgttcacatttatttagggcccaggacactttagttaggtggtagtgaaatgggccaagactcaggtttcttctgccagagaagacaattctcctctggtgcagggccagtctaaatgctccttccatgagcaccagcagaattctgtccagtactgtattctactgtgacaaggcaacacttagttttaatgcaatattccacaatcactttgctgtccctctcctaaaggcacagattctctgctgtggctgcactgcctggggatgagagaggggtggtgtaggcactgttgaaattgtccttcctrtaatcttcattgtgtctttccttgttacaatgctaaaaccaggtactgtgatcccttagcttaatttttgttttttatgaagatgttttctttttacatgataggtgtttattaatttggtgtttctgt

SEQ ID NO: 276955 - DNA, 546 bp, Homo sapiens
aatgagaaagcagcaaaagttaattaatttatatataaaaacatttgtttggaatctatgtttcagccattattctaggtaatggttagttagaaattagcaaaacagagaaatcctctttcatcatggagctttcatttttgtaggcaatcatagagaataaacagatacaaattattatatgtaacaatatagtataagtaataggtcctacgaagaaaaactgggctatataaaaatggatgggggattytttttaagatggagtagtcaggaaaaaaaaaaaacccatgcaatagggtaatatttgagcagatatgtggataactacaggtagcaaaaccatgaggctatctgggggaatatcgatttgggcagaggcacagcagatacaatagctctaaagtacaagtagacaccagtttgatgtgatggaagagaatgagtgaaaagaaaaatgatggggatatacccagaggacaggtaatgccagatcatgtaacttttattaaagatttgaaatttatttcaatgcgatgagaaata

SEQ ID NO: 276956 - DNA, 561 bp, Homo sapiens
taataaaatttgttccatgagtacatgcctaatttgtgtttaaacctgcataaacaatttatgattatgtcagtcattatacaagagtcaatcacataatttcattgcagtttttcagtctaaacagctttggtagagaccgtttgaattgcatctctacgctctttctacccaggacccctccatgagcaaagctgccccttgcccagtttttcccatatcactcaaaattcactgcatcagtctcttacttgcarcttttttagggggaggacaattccagtaggctcctaaatcgtttgcctgtttctacaccccacatggcagccggagtatacgtttataaatataaatgttcactcctttgcttaagacttgccataggatttccaataaaacaggaataaaattcaactgttttcttcacttcggtctcaattgtctcaattctccaagcttatttcctgttactctcatcctcatgctgtgttctagccacctgcactcgctagctatttctccatcttgcccaacttgctccctctcttgcggctcttgtag

SEQ ID NO: 276957 - DNA, 546 bp, Homo sapiens
aatgagaaagcagcaaaagttaattaatttatatataaaaacatttgtttggaatctatgtttcagccattattctaggtaatggttagttagaaattagcaaaacagagaaatcctctttcatcatggagctttcatttttgtaggcaatcatagagaataaacagatacaaattattatatgtaacaatatagtataagtaataggtcctacgaagaaaaactgggctatataaaaatggatgggggattctttttaagatggagtagtcaggaaaaaaaaaaaacccatgcaatagggtaatatttgagcagatatgtggataactacaggtagcaaaaccatgaggctatctgggggaatatcgatttgggcagaggcacagcagatacaatagctytaaagtacaagtagacaccagtttgatgtgatggaagagaatgagtgaaaagaaaaatgatggggatatacccagaggacaggtaatgccagatcatgtaacttttattaaagatttgaaatttatttcaatgcgatgagaaata

SEQ ID NO: 276958 - DNA, 597 bp, Homo sapiens
tttatgaccagcaggcaaaagaatataatgctgagtatggatggggaaaatacattaccctgacctgtatttctggcatcttatcttcactctggcttcctgactgttggagctaatgtatttggctgtgagcacatgagattttcctcctctcctaccaggaccaagaaacagtttggaatatttgcattgccaattcaaacctgctgtcrggagccctgtatcaaagtttcatcccttttctttttttttttttttctggaggaggtgggatttgaagtaagcagagagagttaacaagtccatttggaagcatactttaatcatatcttccaatctaaaatataccaataatacaatgtttccaaacaataattatcattccattgatttcattccctatataactctcaactagttttgaatttgtgtaagaggagcaatactatagatcaacaatataaagccccaacagtctcctctagctatcatctcattttccagttttccatcatatccaaacagctggagaatgttacctacatttgctatcttgactttctcatttctctacctcatatttcaatttgactttta

SEQ ID NO: 276959 - DNA, 545 bp, Homo sapiens
agttattacccctttggctggttctcttttggcatagtagatcacttctttgaaataaccctctggatgaactgcttcatgaggcgaatagcactgtaatttaaaaaatagactcatggtggccatgtgtatctgtcctcttccytgaattctgattatgtaaaattaagttttccctgattcataaaatcaacagatatttgtaaagaacctgttgtatacaacctgtacttgaaattagacattgagtgagttttagctacataaatagacagggtgaattgctatttgtgaaatcaggaaaaaaaaaaaagaataatgagttcaatacaattttcattataatgcagaaatatttctagctttagctttactatcttaaatcttgcaaggtaagaaaacaatgaatcctatgggattataatgcccttttggggatttctagtgaaacttgttgaagtagaaaacttttgatgagcttccagtaagttatttacagatttagatgcttcagcttctatttctgtcttcctttggtttcccta

SEQ ID NO: 276960 - DNA, 551 bp, Homo sapiens
ttgtatacaacctgtacttgaaattagacattgagtgagttttagctacataaatagacagggtgaattgctatttgtgaaatcaggaaaaaaaaaaaagaataatgasttcaatacaattttcattataatgcagaaatatttctagctttagctttactatcttaaatcttgcaaggtaagaaaacaatgaatcctatgggattataatgcccttttggggatttctagtgaaacttgttgaagtagaaaacttttgatgagcttccagtaagttatttacagatttagatgcttcagcttctatttctgtcttcctttggtttccctagagacaaattcttatttcattttttttctcttctttgagtcacttttggttgagtttctttactttgactgcaataagaaaaaaatgttcgcctagaattgggtgctcctaagtatcatcatatataagtttgtgacatgctcaccaaacttgtctttctacctctcaccaaagtccagacaattcccattattcatagaagttatgttctgtaaagtca

SEQ ID NO: 276961 - DNA, 322 bp, Homo sapiens
tcattttttcctacctagtttttttcaagtttacctcataacaagatgaaatggaaattgatgcttctttttacttgacttctgtcatacacagtttgacttaagaygcaacactcatgaggcagtattcagaaagagaataaaatatattcttgaattgccttacaaaatgctcagtttctgctttaatgatgcaaatctgttgcaaaataaatttcagtagttataatttcagactattataagtaatatatttttaaagtctagattctatgctgtgtaaaaaataactactttgtcacatggttaagtactctttgca

SEQ ID NO: 276962 - DNA, 591 bp, Homo sapiens
acaaacaagctagaaatcaatttttaaaatactaagaaaacctccaaataatcagaaaattagaaatatatttttaaaataacatatgggtcaaagaaagagttacaataaaaattagaaaatattttgacagactgtcaacaaaacactacatatcaaaaattggagtccagctcaatatacaattagaaaaatcatatagctttatgtcagaaaaggtaaatggctaaaaattaatgagctaagcattgatctaaataactccaaaaattgcagcaaatgatacctgaagaaaatagaaggaaataagttatgagtataagaacaaaaggggtattaagacagaaaacaaacaaatgttattaatacctcasaaaactaaaagccaactctttgaaaagaataaaacattgtgaagcacacagataactaaagaataataaaagacagagagaacaactaataataggatgaaatgaaaaaggaaccatcattaacaatcttactgacattagaaagatatcacttacaatcatctcaaaaatatttaaaaagtaaaacatagggataaatttcactaaaatatgcagc

SEQ ID NO: 276963 - DNA, 591 bp, Homo sapiens
acaaacaagctagaaatcaatttttaaaatactaagaaaacctccaaataatcagaaaattagaaatatatttttaaaataacatatgggtcaaagaaagagttacaataaaaattagaaaatattttgacagactgtcaacaaaacactacatatcaaaaattggagtccagctcaatatacaattagaaaaatcatatagctttatgtcagaaaaggtaaatggctaaaaattaatgagctaagcattgatctaaataactccaaaaattgcagcaaatgatacctgaagaaaatagaaggaaataagttatgagtataagaacaaaaggggtattaagacagaaaacaaacaaatgttattaatacctcacaaaactaaaagccaactctttgaaaagrataaaacattgtgaagcacacagataactaaagaataataaaagacagagagaacaactaataataggatgaaatgaaaaaggaaccatcattaacaatcttactgacattagaaagatatcacttacaatcatctcaaaaatatttaaaaagtaaaacatagggataaatttcactaaaatatgcagc

SEQ ID NO: 276964 - DNA, 582 bp, Homo sapiens
ttggggggttaagaaagtatttatttcacagaacacaaaaaaaaagtataaaggaaaatattaataagtatagtatacagtatagtaaaaktatacaattctgtttattcaaagacataaataaaatagtgaaaaggcaagccccaacacagaagatatttgtaatgcatataacaaaaagtgcttgttttttgaaattacgaagaattcccgtaaatcagtaaggaaagtagtccaaaggaaaacatccataagaaataaacaggcacttcaaaagagagtttttacaaatgcccaataaacatttaatgtttgctaacctcattggtaacctaacctcattggttaggtcttttaaccaatgaggtttgtaacctaatgacacttaggaaaatttaagttaatacagaaggagatatgaacatgacaccaccagaatagttaaatataaaaatactaaatgtgccatatgttgacaaacacgtggagcgctggaactccatacactgttggtatgtttgtaatttatggctacttttgaaaactgtgtggtatcacttaaattgaacagacacacactct

SEQ ID NO: 276965 - DNA, 1128 bp, Homo sapiens
ttggggggttaagaaagtatttatttcacagaacacaaaaaaaaagtataaaggaaaatattaataagtatagtatacagtatagtaaaattatacaattctgtttattcaaagacataaataaaatagtgaaaaggcaagccccaacacagaagatatttgtaatgcatataacaaaaagtgcttgttttttgaaattacgaagaattcccgtaaatcagtaaggaaagtagtccaaaggaaaacatccataagaaataaacaggcacttcaaaagagagtttttayaaatgcccaataaacatttaatgtttgctaacctcattggtaacctaacctcattggttaggtcttttaaccaatgaggtttgtaacctaatgacacttaggaaaatttaagttaatacagaaggagatatgaacatgacaccaccagaatagttaaatataaaaatactaaatgtgccatatgttgacaaacacgtggagcgctggaactccatacactgttggtatgtttgtaatttatggctacttttgaaaactgtgtggtatcacttaaattgaacagacacacactctwttggtatgtttgtaatttatggctacttttgaaaactgtgtggtatcacttaaattgaacagacacacactctatgacccatcaattcactatctaggtatatacccaatgtatccatgcacctagatatagtattagaagaaggcacaatggataagtatgatgttctgtgggctgtcaagttgattaagttcccacagactacgtgatgattgaaaagtagaggaaagtcaacatacccttaaggtaatacagtaaagttatagggttgaccttactacgtgwagtcaaactgctactgagttttatttctgggaggtattgcagagtgaggagtattttctgggtcaaaagctccataccacatgtctggggctgtgttgcttttcttcaattaaaataccagtgtagaaaatgtagcagcttagcattgtctgtctctggaagttagggtcaagtcatttctcagaaagcctgggtatttgcctttgctcagtatacaatatctttggtaaataccacacatacttttcaggaaaacttgg

SEQ ID NO: 276966 - DNA, 317 bp, Homo sapiens
agtcaacatacccttaaggtaatacagtaaagttatagggttgaccttactacgtgtagtcaaactgctactgagttttatttctgggaggtattgcagagtgaggagtattttctgggtcaaaagctccataccacatgtctggggctgtgttgcttttcttcaattaaaataccagtgtagaaaatgtagcagcttagcattgtctgtctctggaagttagggtcaagtcatttctcagaaagcctgggtatttgcctttgctcagtatacaatakctttggtaaataccacacatacttttcaggaaaacttgg

SEQ ID NO: 276967 - DNA, 614 bp, Homo sapiens
aaataataatattttatatctatttcagtatacagaatatctgtttccagaggagaacttctccatcaaatttgtgtgggatctatttcactataggcttgtagaaaataagtagttatggggtgggtcctgggtatcagaagatgcacctcttaggaaactgtctcagctacagtcactggaattgccacctccactgatgaaggagttccagagatattatgggggaccaaagtgttcaaattcccctgtgtcaacccaaaggcactcaactaacatctcagcataccaccacttcttcactactgctaccgtcataggagacttgcttgatttkctgctgcaactctgcaaccttcataatcaattctagacttgttgctcagagccatttatgctctgtaactgcagtagagcagaggctcattcaaaattaccagtcagtctttctgattgtcagcttttcaggtagacattcaggagtgttttgagatggacattcaggagtcaacttgcctttttctctgttgatgttctctagggttggcagatgaagtcagctgaccccagtaaatttttagtgccgattatagtagctgagtgccacaatcagt

SEQ ID NO: 276968 - DNA, 409 bp, Homo sapiens
gaccttcactgggaaatagccagttcacagtgattttgcagggctgtacctgggtaaattagtgtactaagatgactttcccttttyctgatgatctccagtccagtagcagaaccccacagagaagctacagggcaagggagcccagatgacgatttcaatcaagtcagtctcctagggtactgagcaggatgaagaaaggtggagggtggatatgaggtagtaattccatatgtccttacaaggtcaaggggaggtctttcacatgacctaagaaaggaagtggatgaaactgtggtattcttataattgggatacctgtaaaaggagttccatcaccagacaagaattggaaccgaaggagaaatttccttatcttgtttagaggatggaagacatttataagcaa

SEQ ID NO: 276969 - DNA, 602 bp, Homo sapiens
ttcaatcaagtcagtctcctagggtactgagcaggatgaagaaaggtggagggtggatatgaggtagtaattccatatgtccttacaaggtcaaggggaggtctttcacatgacctaagaaaggaagtggatgaaactgtggtattcttataattgggatacctgtaaaaggagttccatcaccagacaagaattggaaccgaaggagaaatttccttatcttgtttagaggatggaagacatttataagcaatgaattgctggtattaaagattcatgcatagtatagcactataattaaggcaccaagtatcaatgtgacattaaattcctgctgattttcaacagaggctgcaaagcttcagcaacatgagacttaattgatgaaagrtgaaactgttagtttagacaaataggaaatgctaacaaaactttcctgtgctattgctattttctgacaaagccacagccaatatcatactgaatgggcaaaaactgaaagcattccctttgaaaaccagcacaagacaaggatgtcctctcaccactcctattcaacatattgttggaagttctggccagggcaatcaggcaagagaaag

SEQ ID NO: 276970 - DNA, 602 bp, Homo sapiens
ttcaatcaagtcagtctcctagggtactgagcaggatgaagaaaggtggagggtggatatgaggtagtaattccatatgtccttacaaggtcaaggggaggtctttcacatgacctaagaaaggaagtggatgaaactgtggtattcttataattgggatacctgtaaaaggagttccatcaccagacaagaattggaaccgaaggagaaatttccttatcttgtttagaggatggaagacatttataagcaatgaattgctggtattaaagattcatgcatagtatagcactataattaaggcaccaagtatcaatgtgacattaaattcctgctgattttcaacagaggctgcaaagcttcagcaacatgagacttaattgatgaaaggtgaaactgttagtttagacaaataggaaatgctaacaaaactttcctgtgctattgctattttctgacaaagccacagccaatatcatactraatgggcaaaaactgaaagcattccctttgaaaaccagcacaagacaaggatgtcctctcaccactcctattcaacatattgttggaagttctggccagggcaatcaggcaagagaaag

SEQ ID NO: 276971 - DNA, 612 bp, Homo sapiens
ggtggagaagccaagtagggcaattgcttagtaagaaaaaggaaacaaaaccaaaccaaagactgagaaattattagaagccactggaagttttttacagtgaatcaattttacctggatcaaaagatagaatcatgggagggaactgcacacatgtagcagcccaatacgtcaagtccaaacatgcagatgaacccatttattttccacagacaccacctaatattaactcctttgaagccagaaattgagaacagaggggtggtggtcgtagcagtgatttatgaaatcttccattttaactcatattacatgaactgctcagggatatttcatgtggccaaagcaatcgactcaggctcctaaagtgtttaaatgtcactatgtatatgtgagaaatatgrccatacatttctgtaaaaattccatatatgtataagtgaaatgcgaagaacacatgttcagtcataaatatgttcatgtaaaacagtctagtcctcctatgagtacatgccaagatatttgggggaaattcaaataaagtgcttagaagtgttcttggcaccttgtaagtactcaataaatgttaactataataaaaatattattgtt

SEQ ID NO: 276972 - DNA, 544 bp, Homo sapiens
catcatacttactggtggaaaactcaatgatttccccctaagattaggaaccgaggcaagaatacatattttcattactgattttcaacatcgtactgaatgtcctagctaatgcaataagagaagaaaagaaaataataggtatactgatagtaaaagaataaataaaactgtctttgcttgtagatgtcatgatcctgtaagtaaaaaatctaaaacaataaataactgtctgaaactaataagcaaatatagcaaggtttatggatacaaggttaatattagaaaaatccatcactttcctatataytagcaataaacatgtggaatttgaaattaaaaacataatatcatttacattagcaacctctaaaataaaatatttaggtattagcctacacacacacacacacacacacacacacacacacacacacacaagatctatgtgaggaaaactaaacgtttgatgaaaaattttttttacaactaatcaatagaaagatattccatggtcatggataggaagactcaatattgtcac

SEQ ID NO: 276973 - DNA, 544 bp, Homo sapiens
catcatacttactggtggaaaactcaatgatttccccctaagattaggaaccgaggcaagaatacatattttcattactgattttcaacatcgtactgaatgtcctagctaatgcaataagagaagaaaagaaaataataggtatactgatagtaaaagaataaataaaactgtctttgcttgtagatgtcatgatcctgtaagtaaaaaatctaaaacaataaataactgtctgaaactaataagcaaatatagcaaggtttatggatacaaggttaatattagaaaaatccatcactttcctatatattagcaataaacatgtggaatttgaaattaaaaacataatatcatttacattagcaacctctaraataaaatatttaggtattagcctacacacacacacacacacacacacacacacacacacacacacaagatctatgtgaggaaaactaaacgtttgatgaaaaattttttttacaactaatcaatagaaagatattccatggtcatggataggaagactcaatattgtcac

SEQ ID NO: 276974 - DNA, 593 bp, Homo sapiens
attggtcggttagaagacaatgttatagtgttgagtatatcatgatttctcctctccactttattttgttgaacaaagtgttccctcttgaattttaaagaagaggtttaagaaaatatttcatcaatattttagccagatctttaaaaaaaaaatattgccaaagaattggaaattaagataaggcacatcttgttgctacagaccaagtgaacaacagaggmctgctgaattcattcattgcattttctctcctgttattttcaagtagatactcatttatcctctagacttgtctaaaccatcttgacagatgcaaggttataaaactctgaacccagtggtatcatccccttcctgggaatatgtggaaatatttgagaatatttttgattatcacagggctggggatgactactgccatttattggatattagacaggaggtgctaaatggccttcaatccatgagacaccctaacacaatgaagactagtctcatacaatattccaatagtgttttttagagaaatagctcattacataagaggagcacttggccttccctgattgccagccaggtcatattgggtg

SEQ ID NO: 276975 - DNA, 560 bp, Homo sapiens
acccatagcaaaaccagaaataacaatcatgtttattgccatttgtccagctatgtatttgttacagtaactgttctgagcatttgatacacgttatcttaaagagttgttatatctctgacatagccatgcttatcttcattctatttatgagaaaattgttagtgggaagatgtgagttaactgacctggaatttcygaactgccattaggaaagcaaagaattgaacattctcatttagtttattcaaaatttctgtttttaatcattgcattataaagaatggtagagcataggctgggcgtggtggctcattcttgtaatcccagcactttgggaggctgaggcgggcggatcatgaggtcaggagatcgagaccatcctggctaacactgtgaaactccgtctctactaaaaatacaaaaaaaaaaattagccaggtgtggtggtgggcacctgtagtcccagcttctcaggaggctgaggcaagagaatggtgtgaacccgggaaggcggagcttgcagtgagccaagatcacgccactgtactccagcctgg

SEQ ID NO: 276976 - DNA, 560 bp, Homo sapiens
acccatagcaaaaccagaaataacaatcatgtttattgccatttgtccagctatgtatttgttacagtaactgttctgagcatttgatacacgttatcttaaagagttgttatatctctgacatagccatgcttatcttcattctatttatgagaaaattgttagtgggaagatgtgagttaactgacctggaatttctgaactgccattaggaaagcaaagaattgaacattctcatttagtttattcaaaatttctgtttttaatcattgcattataaagaatggtagagcataggctgggcrtggtggctcattcttgtaatcccagcactttgggaggctgaggcgggcggatcatgaggtcaggagatcgagaccatcctggctaacactgtgaaactccgtctctactaaaaatacaaaaaaaaaaattagccaggtgtggtggtgggcacctgtagtcccagcttctcaggaggctgaggcaagagaatggtgtgaacccgggaaggcggagcttgcagtgagccaagatcacgccactgtactccagcctgg

SEQ ID NO: 276977 - DNA, 573 bp, Homo sapiens
gctgtgctctagccagtttggttgactgcagagaccatggtcttaaaggccatattatctgggttcatatggcgcacagtacctactccttttcttttcccctcatctgtatcctccatttaaaattatcacgcttcttyttctctactcgtcaacatccaacactttttttttaaaagatcaagctaaatttcctcttcaaaatatttcttaggatagaccacattagccagcattgtctggatagggcagatatcaaaagacacgtgcaatatgtctgaaaatcgtgttagagacagggttatactgaaggtgcttaacatttataagatccttcatgccctagaaatgagaggagagttgataattttcaaagtcattatcagtggaattattatcttccatattaaatacaagtttcctttgttggggctcagaaaacggtacctgagcatgtgacactttagcatgctgagcactttaaactaaaggaaattaaaagggtttagaaacagcttcagaaccaagaacttttctgacctcttcctgtttcttcccctaagtgccaggtgg

SEQ ID NO: 276978 - DNA, 423 bp, Homo sapiens
gtgcaatatgtctgaaaatcgtgttagagacagggttatactgaaggtgcttaacatttataagatccttcatgccctagaaatgagaggagagttgataattttcaaagtcattatcagtggaattattatcttccatattaaatacargtttcctttgttggggctcagaaaacggtacctgagcatgtgacactttagcatgctgagcactttaaactaaaggaaattaaaagggtttagaaacagcttcagaaccaagaacttttctgacctcttcctgtttcttcccctaagtgccaggtggaactctttctgaagttctcctatctgaagctcctccataaggaacacagttgccttcaactgcctccctgaaattttattaaccggagatgattaagtttatatagcaggaagaaa

SEQ ID NO: 276979 - DNA, 498 bp, Homo sapiens
tgcagaatctccacccttacaagtccccaaaaaggaaaaccaaatatgtaaaccgggcagggttggagggrtgggagttccttccagttctgtaatctcaccagcagtgaaaatggagatttttacttcaccaatgtaatcttgtgtttatatatttacataaaaaactagaaggcaaagtttaaggccttgaattttacatgtttttgtggagtcttttcctgagacccctttgtccctatagagataacatccccattctgttactgaaatgaaagcaggagaaaactaaatgacttgacagtgttctcagagccagtgcaactggaattgaaatctgtctttagcctagattgatgagtttcaaaaagtgcttctagagccctggaagctattactgcaagaagccacaagcattccactgacttagaattagcagtggcagaaatgctactttttatcataatgcttccttcttgctttcctacttaaaacaag

SEQ ID NO: 276980 - DNA, 607 bp, Homo sapiens
ctgcattatagggtacagttttttaaaaaaccctatataggtattaaggaccattttcctaactccttctaaagaaactgaaaattacctttaggtaaatagcagtgtttctgaaacatctttttgtataactgaatcctttaatcataggaaaaaataaagtcaatgatataggtagaagtctcaatgtaaaaataaaactaaaaatccaaatgtgaaggcataccaaatatttaagactccagacaagccaaaattcaaatatatatatatatacaaaatgctaacataagttaggaaaaaggaaataacctgaaatattcraattttattggagaaatcagtgatacacaaatcctaacatgtctgtaggaataaaaccttgaaacaatctcagcatttgtacaacggaactggtatgagagctcccaagttaaaggaaaaaaagaatttcattggcatcatgtaccagtcttcttacacatgcaacagttgttaaaagtacactgtttctctgtaatgatctagatttgagaaaaacagcaccctctcaaaaatcagactacttctttgcattacttccagtatgaggcaaaagatttggatt

SEQ ID NO: 276981 - DNA, 1150 bp, Homo sapiens
cagctattttaatagtgtcatctttaagaaagaaaaagttaagcggcaaaaatatgcttctgtatttagaaccatggacctttaattataactctaagactctatggattatttacaaaggaactaagaaaggcctaaacctgctgaagattatgaaggtagtcaatgacagaagacttgctagagctaagcattcttgtctctggtatagtgctatacgtcctcaactatgcctctgcagcaatagccttcctcttcatcttaggattaatggtactgagaaaatttaacatacagaatacaaaagtcactatcctattttcctaagaagaaaactttagaaatccatccaaccaaaacttaattttgccttttccttcagtgttcaagaagaaaaaaatgtatctagtagctctaagtggacagaaggacaagtgaaaactctagaatgcttaaacaagctataacaacaggtttgggcaccatctggtatcaccttactgaaactttccttagtaactcccctacaccccacaacaaaggacgagaargaaggagctgaattcctactgttttggaggctgaaatgatgwaaaaaaaaaccaagaaagaagaaaacttccttttgattatgcaattttagttcccattacatgttcttggctgctgattagaaatttaaattctagaattaaaaaattctagaagtaggagtttccagagctgattaatttaacwgctcaagagtatctggggaagcttctctgtaagtctcttagcctttccctcatgactgcaagatggctgccacagctctgcctatcacatccgcacatgcaacatccaaaggcaggaaggaagcacactcacatatcttcctctcatcagagaaaacaatctttcccagcagccctctgtcaggcttccccttgtgtttcattggcttagaaatgggtctcatactcctcccaaaaatcaacactcagaggagactggtgttagcatgatcgcttgagaatagggtcagcaaagttcttctgaagaggaccagccagtaaatatttcaggctttgcagggcatggggtccatgtcacatctagtcagctctgctcttgtagagccaaagcagctagagacactggaaacaaa

SEQ ID NO: 276982 - DNA, 557 bp, Homo sapiens
aaaaaaaaaccaagaaagaagaaaacttccttttgattatgcaattttagttcccattacatgttcttggctgctgattagaaatttaaattctagaattaaaaaattctagaagtaggagtttccagagctgattaatttaacagctcaagagtatctggggmagcttctctgtaagtctcttagcctttccctcatgactgcaagatggctgccacagctctgcctatcacatccgcacatgcaacatccaaaggcaggaaggaagcacactcacatatcttcctctcatcagagaaaacaatctttcccagcagccctctgtcaggcttccccttgtgtttcattggcttagaaatgggtctcatactcctcccaaaaatcaacactcagaggagactggtgttagcatgatcgcttgagaatagggtcagcaaagttcttctgaagaggaccagccagtaaatatttcaggctttgcagggcatggggtccatgtcacatctagtcagctctgctcttgtagagccaaagcagctagagacactggaaacaaa

SEQ ID NO: 276983 - DNA, 557 bp, Homo sapiens
aaaaaaaaaccaagaaagaagaaaacttccttttgattatgcaattttagttcccattacatgttcttggctgctgattagaaatttaaattctagaattaaaaaattctagaagtaggagtttccagagctgattaatttaacagctcaagagtatctggggaagcttctctgtaagtctcttagcctttccctcatgactgcaagatggctgccacagctctgcctatcacatccgcacatgcaacatccaaaggcaggaaggaagcacrctcacatatcttcctctcatcagagaaaacaatctttcccagcagccctctgtcaggcttccccttgtgtttcattggcttagaaatgggtctcatactcctcccaaaaatcaacactcagaggagactggtgttagcatgatcgcttgagaatagggtcagcaaagttcttctgaagaggaccagccagtaaatatttcaggctttgcagggcatggggtccatgtcacatctagtcagctctgctcttgtagagccaaagcagctagagacactggaaacaaa

SEQ ID NO: 276984 - DNA, 557 bp, Homo sapiens
aaaaaaaaaccaagaaagaagaaaacttccttttgattatgcaattttagttcccattacatgttcttggctgctgattagaaatttaaattctagaattaaaaaattctagaagtaggagtttccagagctgattaatttaacagctcaagagtatctggggaagcttctctgtaagtctcttagcctttccctcatgactgcaagatggctgccacagctctgcctatcacatccgcacatgcaacatccaaaggcaggaaggaagcacactcacatatcttcctctcatcagagaaaacaatctttcccagcagccctctgtcaggcttccccttgtgtttcattggcttagaaatgggtctcatactcctcccaaaaatcaacactcagaggagactggtgttagcatgatcgcttgagaatagggtcagcaaagttcttctgaagaggaccagccagtaaatatttcaggctttgcagggcrtggggtccatgtcacatctagtcagctctgctcttgtagagccaaagcagctagagacactggaaacaaa

SEQ ID NO: 276985 - DNA, 604 bp, Homo sapiens
tagtacactgcctttggaaagatgtccataatcctttaatacttttgctagtagagccacaagtgaatagaagtaggtagctgaaactgctggacaactgggtttattctgcmggcttatttcacaaagcgcaaacctcagaaaactgaggccattgctggcctggctagttggatttccaaatattgaccattccgggactcctcattacaggttttcatacacctgctgagacacatgactgcccttgttggataatcctgatgtcattgaggaaattaaatgagatgagggtgtaaattgttcagtgtgcagtgggcagtcagtggtgttattgtctcattaacacattgcagctatttatgctgccccctgattttgttggaaacagtcttatgtactttttttacacagaggcattgaaagttaattcatagttgattttaggggaaaggattactttgaacataaaagacacagatttacagacatttattgggaaatgaagtcacgtatatgggcaattctagtgactaaaaagcaattaataaattacatttgattgcttgtcaagtacatagacaagtatgatggaaaatggtat

SEQ ID NO: 276986 - DNA, 604 bp, Homo sapiens
tagtacactgcctttggaaagatgtccataatcctttaatacttttgctagtagagccacaagtgaatagaagtaggtagctgaaactgctggacaactgggtttattctgcagkcttatttcacaaagcgcaaacctcagaaaactgaggccattgctggcctggctagttggatttccaaatattgaccattccgggactcctcattacaggttttcatacacctgctgagacacatgactgcccttgttggataatcctgatgtcattgaggaaattaaatgagatgagggtgtaaattgttcagtgtgcagtgggcagtcagtggtgttattgtctcattaacacattgcagctatttatgctgccccctgattttgttggaaacagtcttatgtactttttttacacagaggcattgaaagttaattcatagttgattttaggggaaaggattactttgaacataaaagacacagatttacagacatttattgggaaatgaagtcacgtatatgggcaattctagtgactaaaaagcaattaataaattacatttgattgcttgtcaagtacatagacaagtatgatggaaaatggtat

SEQ ID NO: 276987 - DNA, 598 bp, Homo sapiens
tgcatattccttgtaagaaatgatggtaacttaaactaaggtagaaacatgaagacaaatgacaaattaaaagcttttgaggaggtaaattacctgggctgcatgattgattggacgtggatatcagatgtgactgagccatggaagtaaatgagattgtcaaagaagcatgtgcagtgggaagagagccaagaaaggaatcttaagaaataccaggacataaggcagagctccccaactaasgtactataaatggttatgggtgtgcccaaaatactgatccctttagtctaaatggacggtgagagccactggctggtcacccgcagcagtaagcaacttcactggttaaccccagtgtgtctctggagggcagacattatattctgtcaactttgtactaagagttccatgactatgtgaagacatccttgataccttacccaatacatgtcggttgaatgaataaatgtagagcaacattgagggacaaacttaaaatgacaggttggggccagatcagttattcttaaacttccaagtgtacattaagattacctagtacttttctaacttgaatgtctatattattctgatt

SEQ ID NO: 276988 - DNA, 628 bp, Homo sapiens
tgtctacattcaataaagcacctactgtatgattctgtttatgagtcaagaacaaacaaaactaactgatggtgatggaggtcaaagcaggagtcagcaggacagtaagaagaattactggctgagaaggcgcattaaggagcattatgaatggagatactctgtatcttaatctggtggtgtaaacatgtgaaaactcatcaaactatagacttaaaatctgtgttatttacataaatcatatatgcctccataaaaatttttaaagtaaaagaagatggaaagtgacaataaaattcattatgttaatactgtttaaaagcaacttttatataaactggattcccaaaggaagcactaggtctaacacgacaataacaaatgtmaattaaaagtcatagctgtctagctaatacaagaaattatggagaaaaattctcagtgcttcctgtaacattatccccaaactcatcccagaagccttactcccagtatctaaaggtctatatatttaggtgtaaaaaacacacctggaccctaaaaggccttataggacctggctcctagtttcctgtccaacctctcttaatcaaatgggccctctaataaaaagggcctttttgttgct

SEQ ID NO: 276989 - DNA, 618 bp, Homo sapiens
gtgtttccactattgaataaaaacagtgataatggacttccttgtcttggtcataacatcaggaggaaagcattgaatatcaactgctttttctgcctttattgaaatgttcatttgtattttttaatgttactgtgaattaccttggttagttttcaaatgttatctaaatggccaattgtccttctggaccccactgactccagttgggatggcactgtaagaagagaggcagagtcagtgaaggagacaaggtttattcaggatttacatacaagggtggtccggtggtggagggctgacctggagaactgctaccatttgtaaaaagcacgtagtctatatagcattttcacttagcactctccttctagcaacctccatttaaccccaaagggccttgatctgtacagcgtaagatacgggccagggatgtggatgtccttcatagataaggagtgaatctctgggttggctrctcctggattccttagcccaggactccaaacgtaagttcttcttagaccatagggttagtctcaggtatgctccggttatggctcagccatacactaatgtgtgtacaccagcctctgccatgcaccaatacacatatat

SEQ ID NO: 276990 - DNA, 557 bp, Homo sapiens
aagtctctggttttcagtctagggctctgtatcagtggctttcaaacttttcattttttaagttgcaatccacattaataaacctcggagaagtacacacacacacacaccaatacttaaaccttttcagattttctattctgctctattccattttatttagttttagctttagtttttttttgttttttttttttgagacggagtttcactcttactgcccaggctggagtgctatggcccggtctcagctcaccacaacctccacctcctgggttcaagcgattcttctgcctcagcctctcaagtagctgggattacaggcatgcaccacaatgcccagctaattttgtatttttagtagagacagggtttctccatgttggtcaggctggtctcaaactcctgacctcrggtgatccatccgcctcagcctcctgaagtgctgggattacaggcatcagccaccgcacctggccgattccattttatttttaagagatgttagtcacaacccagtaactttattttacaactcactgatacatcatgatcca

SEQ ID NO: 276991 - DNA, 557 bp, Homo sapiens
aagtctctggttttcagtctagggctctgtatcagtggctttcaaacttttcattttttaagttgcaatccacattaataaacctcggagaagtacacacacacacacaccaatacttaaaccttttcagattttctattctgctctattccattttatttagttttagctttagtttttttttgttttttttttttgagacggagtttcactcttactgcccaggctggagtgctatggcccggtctcagctcaccacaacctccacctcctgggttcaagcgattcttctgcctcagcctctcaagtagctgggattacaggcatgcaccacaatgcccagctaattttgtatttttagtagagacagggtttctccatgttggtcaggctggtctcaaactcctgacctcaggtgatccatccgcctcrgcctcctgaagtgctgggattacaggcatcagccaccgcacctggccgattccattttatttttaagagatgttagtcacaacccagtaactttattttacaactcactgatacatcatgatcca

SEQ ID NO: 276992 - DNA, 557 bp, Homo sapiens
aagtctctggttttcagtctagggctctgtatcagtggctttcaaacttttcattttttaagttgcaatccacattaataaacctcggagaagtacacacacacacacaccaatacttaaaccttttcagattttctattctgctctattccattttatttagttttagctttagtttttttttgttttttttttttgagacggagtttcactcttactgcccaggctggagtgctatggcccggtctcagctcaccacaacctccacctcctgggttcaagcgattcttctgcctcagcctctcaagtagctgggattacaggcatgcaccacaatgcccagctaattttgtatttttagtagagacagggtttctccatgttggtcaggctggtctcaaactcctgacctcaggtgatccatccgcctcagcctccygaagtgctgggattacaggcatcagccaccgcacctggccgattccattttatttttaagagatgttagtcacaacccagtaactttattttacaactcactgatacatcatgatcca

SEQ ID NO: 276993 - DNA, 514 bp, Homo sapiens
aatccaggaacaccaagaactgaaagaaagactctctggtttatttgcacctttctcacctacatctaccatcactgccatcacacggtaggagtgcagtaaatgcacattagctgaactcaaccacactgcaagtcagagctggaagaaaagacactattcattagacaatgactyatctcatgcttggatcttgtaatcattcttcacagggaaaaagaaagaccatgaaaaacattttaagaatgaaataagttccctttagctaagacgagcaaacagaaaattcatcacaatttattttattattaggggatttgtgagaagaaatggggagtggtacattgaaggaagggcacattacagagagagagagagagagacagagggagagggtgtgtgtacacaaaacaaaatgctcgtgcttcatatctatgtcagaacatttactgggattaacagaaatgcgttgggtgcccttaatctatacattcacaaagtatgtcactaacat

SEQ ID NO: 276994 - DNA, 514 bp, Homo sapiens
aatccaggaacaccaagaactgaaagaaagactctctggtttatttgcacctttctcacctacatctaccatcactgccatcacacggtaggagtgcagtaaatgcacattagctgaactcaaccacactgcaagtcagagctggaagaaaagacactattcattagacaatgacttatctcatgcttggatcttgtaatcattcttcacagggaaaaagaaagaccatgaaaaacattttaagaatgaaataagttccctttagctaagacgagcaaacagaaaattcatcacaatttattttattattaggggatttgtragaagaaatggggagtggtacattgaaggaagggcacattacagagagagagagagagagacagagggagagggtgtgtgtacacaaaacaaaatgctcgtgcttcatatctatgtcagaacatttactgggattaacagaaatgcgttgggtgcccttaatctatacattcacaaagtatgtcactaacat

SEQ ID NO: 276995 - DNA, 667 bp, Homo sapiens
accacagggatggattcagtgaagtcaagacaggaggaagctgcaggagaaagcaagcccaatttcaacgaagaaactgaaacacatgcacaggggtcaggcaggaggaacaacctatagactaaaagaatccgaagagatatatcaatcaaatgtamggtgtggatttcgtgtggattctaaaccagccaaatataaagcaacatttacaaaacattcagatattttaataacactattacatatagcttaagtatttttgttattaaacagtactatttttaacgtttcatgtttttaaaatgtatactaaaatgttttcagaagaagtgacatgaggtctgaaatatgtttcaaaataatcctgtttggatgagttcgtaggagtatagatgcagcaagactagccataaattaataattgttagagctgatagttgagctgtatgtttaaaattttctgtaataaaaaatgaaataatgtgatccagcaatgcagaagactagtgaaaaatatccaatgtagtaacactaaataccactggtcttcctatctgttggttccacattcatggattcaaactgaatccacggactgaatctcaacagattgaaaatacttgaaaaagaaaataaaaataacaaataatgcaaaaattaaaaataa

SEQ ID NO: 276996 - DNA, 560 bp, Homo sapiens
ggataatcacttacgtgtgaacatagaaaaataaaggtaatgaatcactgcaacacatacacacactcctaccttttttagacacttagaatagcactgaagtaatagccctgactcttgcataagaaagtataacacacatatcaccattttsattaccaatagatggtgaaacatcatttactgtagatgagtccagaggaagacatacagcagccaagttcctgagaataaaagtatgcccccaatggttactcaatttgtttagctcaagatttttttctctaagtacatgttcttttttttttaagttgataaggaataatataactacaaaattatagccaaatcatcctcttaagcaataaagctttgttcttagattttaacaaaatgcagcagtctagaatactttgacaataaaaagagtatgtgaagatggatgataaattaaaaaccaaatagttattgtttcagatgtgctttcagtagctatgttttctaatcaagggtatctccattttctacgatgatagactattgctctggacactcagcaa

SEQ ID NO: 276997 - DNA, 532 bp, Homo sapiens
aaatccaaataatttaacttgaactattgtccttatttacagttagcgagtcacggaaagtctactagtcgaaagtaaagaaagcctaatctattacaatgtaaagaactgcctacttctcttgcaaagaacatttgcctgggtcctaaacttaatttttgaataaaacagataattaattccatttacagggtcatggatgaataacaaaagttggtattcctgtaaattaagatgaaatggaagagaagaaagagctttcacttacttgctcgaaggactgaaggtgtgacctcaatttcacttgttgcttggtaaggctgaaaggctgagacattgttggtgccaagstcactaccaaatatctctgggctctgggtacccgtggaactggcactggtgccatcacctccgtgatgtggatcctgctcatcaaacactgctaccagctagaaatgaaaggtaaatgtgcacttataaataaaggcacttaattaactaccaaaattttgtactattttgacataattct

SEQ ID NO: 276998 - DNA, 1179 bp, Homo sapiens
agggcatgaaaagctgccaatgtgaatgcacaacccagaaacatagcaggacagtcacgaccaggcaggagcatgccctgctctcctgctcctctgaatgtctgcatccactggtgagtccacaaaaacagagctgagatccttagtgggaaggcccttcctttctagtctttcagagctgagatctttagttaggaaggccctttctttctagtctttttacctcttcagctagctggatatagtaaaccagggcttggttccacgggtggggagcccttgtctccatacccacacaccaccctcaaaccctcctcctgctgtgccaccagcaagttacgaatgtttagatgcagggaaagtaggagtcccacttaagctacaactgcctcctcctaccarcttgtaccgttgagctccctgctacagttcatatccagtgtcgtcagaaacaagggtaattccgtctctaccatcaagtaataccatctcacagaaccgagacattccctcgttgggcttccttaacgcatcactcattccattgttgaacttgwaactatacaacagaagaacaaactacaaagtcttaagttagaggttttgtcaaaaatatttttttwaatcacagtctaaatgttagccattatatttaaaagaaccctaattacattccaaagaaaagtgggtatgtgcactgtcactaatgagatctcagggcatgtgaataatttcagaagcagcagccagtatcctaggatgccttttgtcatcatttgcattaagctgaaattttatcagaaggccaattaatagtcaatgtaatagctttgtggaaagagcactaaattaagtatgtcaacaccatatattcggtacctgctcctgtctggcactcatcaagaaaattacattagtgaagcttaattctcacagatgatggcagatcactggcaactcacaacaagacttggttgacaattctagttatcttcaacatgtggtaaaaatcatgacgttaaaaggagctcagtttctgcagatctttcacagggagctataaaataaatttaaaaggatcctagcctaacttttctttttgaattctgcatctattaacacttaaaatttttggaaaaaaatgtttaagtgaataaaattcactagaaacataagtag

SEQ ID NO: 276999 - DNA, 646 bp, Homo sapiens
tttttttaaagaattatgagaaatcatagcatattttgaaatacaaaatactcaatgcatatacatttcattcagaacctctatgcatcatatggtttcaaatattcccgtgtgatgttaagattttacatttcccacatttttcagctctgcaattatggtaaaagagaattcaatgttctgcttaattatttctccaggaaatgatacacaaaaaacaaagggaactattttcaggatatctaatctgaaattaggagactgaagtaaaattaataatgatggcttagaatgattttttttgagacagtctcgctctgttgccgaggctggagcctcggcaacaatttatttattcatcttctaaaaaataaataaaaacagaaaaaagagacagataagggtgaaataaaatgactcacacacacaaaacgcaggcttaatcaccaacttgtaaatgaaggcagaaaattttggcagttcctattggaataataaactaaatgyctattaagacttttttttaaataaggaaacccagaattttattccaaacacagtattcattatcatttaccctaggtgcatgtctattcctaagtataatgaaccaactaaaaagcaatatttgaaatccatgcaaacc

SEQ ID NO: 277000 - DNA, 646 bp, Homo sapiens
tttttttaaagaattatgagaaatcatagcatattttgaaatacaaaatactcaatgcatatacatttcattcagaacctctatgcatcatatggtttcaaatattcccgtgtgatgttaagattttacatttcccacatttttcagctctgcaattatggtaaaagagaattcaatgttctgcttaattatttctccaggaaatgatacacaaaaaacaaagggaactattttcaggatatctaatctgaaattaggagactgaagtaaaattaataatgatggcttagaatgattttttttgagacagtctcgctctgttgccgaggctggagcctcggcaacaatttatttattcatcttctaaaaaataaataaaaacagaaaaaagagacagataagggtgaaataaaatgactcacacacacaaaacgcaggcttaatcaccaacttgtaaatgaaggcagaaaattttggcagttcctattggaataataaactaaatgcctattaagacttttttttaaataaggaaacccagaattttattccaaacacagtattcattatcatttaccytaggtgcatgtctattcctaagtataatgaaccaactaaaaagcaatatttgaaatccatgcaaacc

SEQ ID NO: 277001 - DNA, 579 bp, Homo sapiens
aaatcctctgtgttctgtgcattcatccctccatccccttgaatttctgtacctaaaagactatatctgcttacccttgattaagtaatagattctgaaatgctagactctgtcatctcagtattttastattcgatgtctagatatttcttcatgaatgaatgcctttggctgtttgtctcattgtgaaaagttgatttgattttaatgtaaatatatccattcctcatcttaataattttttttccaattttaaagcttgataattttttaaaaaatgagcaccaatactgtgagatttcgattcctaacgaaaggccgctgagttgtcattggccttaattgtaactagtattaagtttctttgtatttctattacttatttgtaactgctagatttattttccatagagtttaaagtctttgagttatgagaaatctatatcctcccttttaaattacttaagaataaagcttgtattaaaaccatgtgctagacattttaacttttcctgttgtttaaaaaaggccttcattaaaagttggtacaaagaaagatcttaagctaccctcattcag

SEQ ID NO: 277002 - DNA, 562 bp, Homo sapiens
ggggtgaggcgccgctccggcagggcaccaatgatccaagtaggagatcatgctgagtttcttctccttctcattgtgagaaagcaaacacacagtttcttctagacctggaacaccaaccgtgacttgcaaacacaatgacacagattcatgatgccttgtccacaattccaaaatcaaatgactctcaaaatgaaaaatttttcataagtttgttagaagtacmtttggtggcaaaagcaactctgaaccaatccaagattatttgtagtatttatttacttggtgaatattcacattttgctacagaaataccaaaattttgactacagggtcctgcctcagacatcacaggaggtgttacatcttatgacacatattccatattacctgcctaaaatctgaacaactcagtattctaacatccagccataatgattttaggtaaagtattgtggtgctcccagatgctggagccagtgaagactagctcatgaggactcttaagttttcaggaattttgcaagccagttattaccaccttcatcatttaaaaattaag

SEQ ID NO: 277003 - DNA, 555 bp, Homo sapiens
ctcagggtgcatcacggaacctgccgacatgtgatgtctcccccggacacctagctttaaaatttmtctcttttgtactcttttcctttatttctcagaccagccaacacttagggaaaacagaaaaggacccatgtgaaatatcgggggctgaatttcccccaatacatgataggtgtaatgattaacccagagtgtcaacttgattggattaaaggatgcaaagtattgatcctgggtgtgtctgtgagggtgttgcccaaggagattaacgtttgagtcagtgggctgggaaatgcagacacacccttaatcttgttaggcaccatctaatcagctgacagcactgctagaataaaaccaggcagaaaaatgtgaaaagagagactgacctagcttcccagcctacatttttctcccgtgttggatgcttcctgcccttgaacatcagactccaagttctccagttttgagactcagactggctctccttgctccttagctgcagacggcctattgtgggaccttgtgatcatgtgagttaatacctaataa

SEQ ID NO: 277004 - DNA, 1211 bp, Homo sapiens
tctccttttgttaaatctgtttggcatttaaaggtgctgtatatcctttattttgcctgaaccctgacttactacctgcactaagcatgaaacagagcataattcttggaaccttagcaagtccctccaaaaaacactggaccaattgccctacccagtgattttcggctagagaggacctaagcaggagcatggtagaagtgtgactgagagagatgtcaaaataccatgaccctttggatgcacaactttgataagaaaaggaataaatgataagcagagcatcccctattacaatctctcaaacctctgctcatcaatctgggctatatatcagaatcatctggtgaacttttaaaaatttcttatttttggggccatacctcagaataattaaatcaaattccttagaggtgaggccaggtattgacagtttctaaaattccccaaggagttcaaatgtgtagctacatttgagaaccagttgttcagagtacagtaagcagccatgtaatagaacaatatcaagcctttccagaggaaagctgtgcccactggtarttcatccagactttttcacaaggaagatggtatttcacwaccctcctatactttgtaatttcaaccagaaaccaaagaaagattctgacaccttattctcagacacattctacaaggtgagtgcaaaaattgcgttttttgcattgttggaatttgctgtttgatcatggaatacattcttaaataaatgtggttatcttatatatcattttaatgggcatttcttgcattattatatatatatwttttttgctaatgacattacttgctgtttattttgtgcttattttagactatggaaattaggttagacaaaaggcaaattccagcagttttcttattcgagttaaaaatgggtagtaaggctgtggagatagcttgcaacatcaacagtgcatttggcccaggaactgcagtggtggttcgagaagttttgcaaaggagacgagagccttgaagatgaggagcatagtcgccggccatcagaagttgacagtgaccaattgagagcaatcatcaaagctgatcttccttttttttttttaaattatactttaagttttagggtacatgtgcacaacgtgcaggtttgttacatatgtatacatgtgccatgttggtgtgctgtacctattaacccgtcatttaac

SEQ ID NO: 277005 - DNA, 546 bp, Homo sapiens
tataagtaatacatttttgtgttaacattagagacagccatagagatgatttaaaaattactttaaaaaagggaatagaaaggagctgctgaataacatttaagcctactagacatattcttaataagttatgtgcagattgaatttttatttatggaaaatactgaaaattcactggacaaatttgttatttaaaggtcatctattccacaaatatttattgtggaacctactgtgtggcaggcactctgtgaktatatggaataattgtattctaatgtgaatcatttgtgtttaaatgttcatatttgagtttaataagctagactatttctacaagtaatttaaacaaatattgttacaatattatatttttgagaacaacattttgtagtcagagatcgtgagattgaatgcaatgatcttaataaatacattttaaattttagatgtataattcttcaatttgaataaatatctctcaatcagattcttagattaaatgaaccattcctattgctatcccttgaatcacagattttatat

SEQ ID NO: 277006 - DNA, 590 bp, Homo sapiens
ggccagacatgtgagtaaataatcttggagatgattctaatcctcacctttgaggcaccccagttaatgttaaatagagcagagatgagctttccctgccaagtcctgcccaagtggcaaatgtatgagcacaactaatatcactgtagcgaaccactgttttgggacagtttgttactgaaacagatgggataagagttctgtaagatccactcgaagtggtctctggtcataactcaaattttttaaactgatttttaacagcagtggacagtgcctttggggactgtctgagtttaaagctagtatttcataatccctgagatttctgtctacatcttcttccccagtgcacagttagcctggttactggctgcaagtccctttggatatgctatacagtaagatttacagtaggcacttttgattttttcctaaggaaatccccaattatacatgatttcaccttatgaaaggtayactaagtctgtgaactgattcaagtgagttgaacatctacttagattctaaggacctagtaatcggacacctacctcaaaagatacctacaggacagataatgctgataa

SEQ ID NO: 277007 - DNA, 567 bp, Homo sapiens
ctatcaacatcagatgcaayggtaccagctgctcttgtctcagacaaaaattctctagctttagagtacagatgctgaccatcctataatttctgtactacttattaagctgtcaatttgattagtaatgagaatttccagctggacttaaataacaataccttttaattttatgaatatgaactagtatagcagctccacaatttcctcagatgccctcccttatccttgccaggtttctctcccatatcccttaggtaaacccttatccttttagtccaagatggctgccataactctaagtaccatgttgttattccaggtctcaaatggcttgcctctttcctttaagtagactttcccaaaagtcacacatagtatattaatttataactcataggccaaaattttgtcccatggatgggcattggttgcaatggataaggggatgtgtagacttttacatcgacaatatgcccagctaaagctacaagttattattaaggagaaaaagaagaatgaatagtagtagacagctagcacatgtgacagatatttgtatgaatc

SEQ ID NO: 277008 - DNA, 567 bp, Homo sapiens
ctatcaacatcagatgcaatggtaccagctgctcttgtctcagacaaaaattctctagctttagagtacagatgctgaccatcctataatttctgtactacttattaagctgtcaatttgattagtaatgagaatttccagctggacttaaataacaataccttttaattttatgaatatgaactagtatagcagctccacaatttcctcagatgccctcccttatccttgccaggtttctctcccatatcccttaggtaaacccttatccttttagtccaagatggctgccataactctaagtaccatgttgttattccaggtctcaaatggcttgcctctttcctttaagtagaytttcccaaaagtcacacatagtatattaatttataactcataggccaaaattttgtcccatggatgggcattggttgcaatggataaggggatgtgtagacttttacatcgacaatatgcccagctaaagctacaagttattattaaggagaaaaagaagaatgaatagtagtagacagctagcacatgtgacagatatttgtatgaatc

SEQ ID NO: 277009 - DNA, 558 bp, Homo sapiens
cacatgtgacagatatttgtatgaatctttacacttataaaaataatacattaattatcacatgtgaagaagaaaaagtacatattaccttcactttattgatagaattttaatttggtcaaagaaaaagttgtgcratggggacctgattggaaaccaatattatctatatgttttggactgaatgtttgtatccttccccaaatccatatgttgaaacgctaaccctcaatgtgatagtatcaggaagtggggcctttggggggtgattatctcatgagggtgaatctatcataaatgggttttgcaccccttaagagatatctcagagagcgctatgttccactgtgtgaggacacactagaacttggcagtctgcaaccaaaagcaggcccttactagaacccaaatattctagcaccctgagctcagacttctagtttctagaactgtgagaaataaattgttgttgtttatatgccattcagtctatggtgctttgccacactggtccaaacttgtgaagactccatgcatagagaaagctgtccaaagtca

SEQ ID NO: 277010 - DNA, 558 bp, Homo sapiens
cacatgtgacagatatttgtatgaatctttacacttataaaaataatacattaattatcacatgtgaagaagaaaaagtacatattaccttcactttattgatagaattttaatttggtcaaagaaaaagttgtgcaatggggacctgattggaaaccaatattatctatatgttttggactgaatgtttgtatccttccccaaatccatatgttgaaacgctaaccctcaatgtgatagtatcaggaagtggggcctttggggggtgattatctcatgagggtgaatctatcataaatgggttttgcaccccttaagagatatctcagagagcgctrtgttccactgtgtgaggacacactagaacttggcagtctgcaaccaaaagcaggcccttactagaacccaaatattctagcaccctgagctcagacttctagtttctagaactgtgagaaataaattgttgttgtttatatgccattcagtctatggtgctttgccacactggtccaaacttgtgaagactccatgcatagagaaagctgtccaaagtca

SEQ ID NO: 277011 - DNA, 561 bp, Homo sapiens
agatacttgactaacacagtttctctgattcaattcacaggaggggcacacttcccttcctcactattccaaagccattgccattcctagggaaattcacacacacacacacacacacccctctcaagagcttgatatttaaaaatgcacttccatctttagggttttttgggttttttttacattttacaattcatcatttaatcccacaacaatcttgtaggattattgttattgcaaacttcgaaaaaaataacttgcctaaattccagcagctggtaatgaaagaaggtaagattaaatgccacacgtgaccccaaatcctttctttttttcaccttacttcatttcctccattgggtarcatacttgttctgcttctaactaaattacaattgtgaagagaaaaagcaggaaaagttaaataacttttaaagcagcaaataagtgccagatgagtgttacagaaaataaattaccttaggaactcagaggaagaataaatgtcaaaaggaagattgttccaatacttaacaattaccaataagatgagtcataatt

SEQ ID NO: 277012 - DNA, 1099 bp, Homo sapiens
agatacttgactaacacagtttctctgattcaattcacaggaggggcacacttcccttcctcactattccaaagccattgccattcctagggaaattcacacacacacacacacacacccctctcaagagcttgatatttaaaaatgcacttccatctttagggttttttgggttttttttacattttacaattcatcatttaatcccacaacaatcttgtaggattattgttattgcaaacttcgaaaaaaataacttgcctaaattccagcagctggtaatgaaagaaggtaagattaaatgccacacgtgaccccaaatcctttctttttttcaccttacttcatttcctccattgggtagcatacttgttctgcttctaactaaattacaattgtgaagagaaaaagcaggaaaagttaaataacttttaaagcagcaaataagtgccagatgagtgttacagamaataaattaccttaggaactcagaggaagaataaatgtcaaaaggaagattgttccaatacttaacaattaccaataagatgagtcataattwatgtcagagacttttgcatcagcccctcccatcacaggcatggagacctaggaggaaaaattggtttaatgggctgagctcagggtccctgtgctgtgtctagggacttggtgccctgtgtcccagctgctccagctgtgactaaaaggggtcaaggtacagcttaggctgtgtcatcagagggtgtaagcaccaagccttggcagctttcatgtggtgtggagcctgtgggtgcacagaagtcaagaattgaggtttggaaaccactgtctaagtttcagaggatgtacagaaatacctagatatctaggaagaagatwgctgcagaggcagggcactcatggagaacctctgctagaacagtgaagaagggaaatgtggggtgggggcccacacacagagtccccactggggcactgcctagtggagctgtgagaagagggccaccatcctccacaacacagaatggtagatccactgacagcttgcaccgtgcacctggaaaagctgcagacactcaacaccagcccgcgaaag

SEQ ID NO: 277013 - DNA, 481 bp, Homo sapiens
acccagatttaccctttagttctctccattttaatttcattataaaaattgtgcttatagaaggtacaattactttactttcgctcactgaggtctttatattgaacctgcatatattatgttttaatatttttactcctaacacttaagagtaccgtataattttgaattaaattaataaatatccttctttcaggtagagagaatttcacctataagagcatggataaataacaaaacatggtcactgggttttggcactaatcactctgttttaaaaacactagcttcttggcttaacacattgtattacagcttattttgtgtctgtttctgctactgttctcttaatccctggcaagcagaaagtatattttcaaaaaaaaaaaargtgttctcaatgctttccttaatagttactgaaatacttcagtaaaacagaaaaaaaagtgataataaataaatattttactagatatga

SEQ ID NO: 277014 - DNA, 613 bp, Homo sapiens
caactacaaataacttattttacctcttggagccccaatttcctcatctgtaataagatatctttccttcaaggttatttggtaaaaatcaatgtgatatacatggaagttgcctagccctgatgttccataagtgctcagtcagcaggtataatttctaaaattattrttaaaggcttctaaacttgttcctagctagataaataaaaaatgacatcagtgcaaagggggtggggggaaaaaactttcacatttgacaacagcctaagtaagaacttgtatctgttacttgaaggaaagtggcaaaactgatatccctggatcagtttctttaaaatgttatcaaatggcctctggtctcccagaaagtttccttgaacatgcttcgttcagaaatcttcgcccacaaaaaatctcttaaatttcacgaccataaagaactttctagtttgctgaaataaaaataagacaggaattatgaagataagacttagcacagcaaactacatcctatttactacaataaataaatactcaggccatcagcttttaaaaatatctaaagctaagaaaaagaacatacatatacatgactatttatatcctctatatt

SEQ ID NO: 277015 - DNA, 470 bp, Homo sapiens
gcaatacccaggcacctctgtagcaaaataaaccaggtgttacactatatttttcattttcaaaaatacatttaattatagatttctggagtccatgccattttatccgactagtataatctgaccaagttgtgtttctcatttaaatcctgcgctccctgaatgctgtaattgtttacrgacactaacatctaatgcaataaagatctttaaaagggattctttccatattctctcatgtccctgttcagtcagtacctacccaatattatctatcaccttcgttactcaagtaccccgtcaggagagtaacataatagggcttgccaaatatgtgtggacttaagagaagatccagttcttacatgccaggaaatatgacagctgtgccaagacattaggccaaactacagcacacaagcacacacattcttccactggtccctgcctagatggtacctactcctcca

SEQ ID NO: 277016 - DNA, 637 bp, Homo sapiens
gattaagaacccacagacctctcccagatctttgggggacatcttagttcactacattataatgctcttagaggcctggtcaatgtcattaccacccatgccccccagaatatattctctattctcatacaatttgatttccaaaagctgttaaatagtgccaacagtacatttgtattaaaagtaacataattcatatagtgactccagatcttgataaacatggtcaatttcttatttcctttctggcagtgatattccaattgatacagtatctgttctatcttggcaaatgcttccaccagagttgactgatgaaggaggcatgaactactccagatgcaccctgctcaagccaacacccacaaagggccaaatcagatacttccttctcctttttgttaaaacaaaggtgaaktcctcagtagtaataaagaatatatgcccggaagggttcaggaggctgtgttttggtccctattttactcatttattatcttaacaggagtgattactaatacttttatcttagtagatctttttatgacataagcatttttatattcttcatatctaataaatgtgggtgggcaaaagaaaattttaaaagcaagaaagatgttttaaatgtaagcag

SEQ ID NO: 277017 - DNA, 549 bp, Homo sapiens
tatttatttatatacccttctcccttgcttggtagacacaaagggagaggtcttttcttatgtttctttatacccagggcctagctcagagtctccttgtgaagagcaaaagtttagtcaatgtctgctggataaatacacacagaaagcccaagaggttgagatttcccaggactagagaccggagactgtaaattgggtgtgttctctcccctcacacatactgagtattyagtacacagcagacaactgtgagtggtatgacacagacacaaaagagaggcactaacaactaagagttagcagatgaccttggagattaactggttccatctaccagcacacatgcaccgaggagggaagagtcctgtccatacatctccctgttctgttaaagaaacagaaaaatataagatgcagaatacttatggctgattctacaaaaggaatactatcccaatgttaacaagttaataaagctagagtgtaaagacagatatctacatcatcgtaccagataagtcaagtccccagaaagagattatagat

SEQ ID NO: 277018 - DNA, 588 bp, Homo sapiens
gattctcttacttcagcctcccaactagctgggattacaggcgcccaccatcatgcgcagctaatttttgtattttttgtagagatggggtttcaccatgttggacaggctggtctcgaactcctaacctcagatgatccccacgcctcggcctcccaaagtgctgggattaccctgccataaactttctaagcctatttcctaatctgtaaaagtggggatgagggaggtgggcagagacagtttctaccccaccaggttgttcagagaaacatatgaagaatgtaatgtaagtaacacrttgtttaaagaggaacaggcctaaaaaagtatttcactgaagtataaacatatgtaactaagttttcataaatacaaagctttctgtaatatctttgttaaatttgagctcaactccagtcctctggtaccaatatccagaaaggctatcagtaacatttagtcggcctgcaggtaataataatttttaaaggcattggaaatggaagtgtgagataaggcagtgaaaatgacttgaaagactaagacttgccatacaacacttcattgggcataaacacaaaacat

SEQ ID NO: 277019 - DNA, 585 bp, Homo sapiens
tttctgtaatatctttgttaaatttgagctcaactccagtcctctggtaccaatatccagaaaggctatcagtaacatttagtcggcctgcaggtaataataatttttaaaggcattggaaatggaagtgtgagataaggcagtgaaaatgacttgaaagactaagacttgccatacaacacttcattgggcataaacacaaaacatatcttcatggagaaataatatgacttgcaaaaaatttaaactcagttgttcaggaccaagcttgtcacattatttgaccttgtgacacagagataacaaaggaacaaaagttataagcacctaagtcacattattttatttctcataaaaacagtaataataagaaataagatgtatataaggttaaacattttatatcatattttccatgtgcactaccttaaaattggattagaaaaaaataggagttgccaacttatgggtcagctgtatgtcttgaaacatcattctayacaaaactgtacattaatacaacattaaaagtagacatctcaaatttcaccttcacctgaactgccatgcacatgacatagttac

SEQ ID NO: 277020 - DNA, 535 bp, Homo sapiens
aagcaaccaatatttattgagtgtctactatgtattagaccatagatacagaagcaagagaaagatagacattgttctttacttcacttatggagcctaaaccctactgaacaaagtttaaattctccartctagcatttgaggatccttatgatctaatattgatccaacttcttagctgcctcttccatcatttgctccatatgcaagtccctcttcagtgctcctggtcatttctacgcttggggtttcttcatattgagcttcctctcctggaaagctcttcctccatatctccatatattcaaatcctcttcctgcttaaatacccagctgaaatgtttcttccataaaccattccacaagcctttattttttcaaacgaatggatgagtgagtgatttaacctctgtaagtcttgctgcatatcatcttttatccccccataaggtcactctcaaaaagataaaaacaaactctctcatggaacccagaatttattaatttgagcagtaggaaaagttgcctataatgg

SEQ ID NO: 277021 - DNA, 566 bp, Homo sapiens
aatttgtgttcttaaaagatgagatgagtcctatctgccttccacagtgactatatcaatctcagtggatgccccaactcaaagagctccctgtaaaatagcaggaatccaatttgacaatggttccaagagtttcttcatttttggaatcagtgaagctttttaagtttcccctgagagaatatctattcagctgaagtcttccagctccaggtggctggcttcagagaaccttggaaacaagttgcttacttactctaactccatcagagcatcmatttgctcatcaagccagacagatgccttaatgccagttctaaccatgattagccaattaacatgcattaactaaatgaggataacagcactgaaccccacttggagacacaaaaaagaataaaaatctaaattcatctttccagtatttcctccgtagcttatgctcccctttgcccccttctttttaaataaagacaccaaaaattaaaaaaataagaataccaacaggtagtaacgtctatagaagaaattggggaaagaaatagataaatcaattaagtgatgtg

SEQ ID NO: 277022 - DNA, 607 bp, Homo sapiens
tgatgagcccaaagccacaaagtaagtggaagagccattcacttatacaaattcaaagtctgtgtgctcatgcactcgctgcggtgcctcagacaaaccaaacctaaaagaagctgcaatggtggcttgaaatattaaaatatgacaaatcacacaggctgagaatttctgttaacataatcaaacaaggcaaagagcagaatgttaaaaggtcctcaactctgggctggctgtggaactgaatcttccttgggattgcagggtgactggttgatgggagagcagccctggcagaggtgtgttttactgggggatcggggtagaatgtctgcctttgccttcctggttagggtgggccttcagctgcattcttcatcaatagagayagaaagtaccaagaatacagagtccaaacacctatggcacttcacaaaaggtgtcaaatccatgctctgtctacttggattcacagctgtcagtcagaaattccccagtctttcatgtagcaacattctatcttgccttactaagaaaaatgccaacatctgctgagtgccaactatgtacaagtcacaattttaggcctctcacatgcatataccaactt

SEQ ID NO: 277023 - DNA, 539 bp, Homo sapiens
catgggggctctgccttcatgatctaattatttcccaaaggcaatgatattaatatatattaatattaatatataataatattaatgatattaatatatctaatcatattcctcctaatatgatcacattggtgattagtttccaacacataaatttgggacagagaaggcaaacattcagaccattgcatcaataaaatttaaaaataagatttattataaataatgaacaaattatcttattcattttgccttccccctatgccaaatacatgtgtgttacagttacatggggttgaaattccaaaagatgattatcatggaacccctatttgactaaaccctayccatgtagctcttgaattctcaattctctctaaaaccttttatgcacttgagaaattttagcttcccccaatgggactgtaggttactggaggatttatatttctctctcacgtctagcacagttgctggaaggtggggcattccataaattcttactggttgactgagtaacgagaaagggcagagagtta

SEQ ID NO: 277024 - DNA, 625 bp, Homo sapiens
tcagctccaaaacaaattcagaagaaacaactccaggatgttaatgctgtcagttaaagatctaccataagactgaaaaaagggtcagaattggacaaaagttttagaccttctggttgatataaggcaaattagtgtcaaccaacaatgatttatgacatgtagcttatttttatatggctaccaatgtgggcatacactttactttcatgtacagactaacccttacaacaatcgtcaagagtaggtcttattatttgaataacctcacatgtggcacctaaaacagcaccagatatacagtagacattaaataattgtctgtagagtgaagagaaatagtgatgtatagagtttacactagaataaacttctaggaagtgtatacagaccccttgctacactgttgcctaggccttggccatctttgggcctgaggtcaacttaggacatctagggcatctgatctagtttagctggagctagaagtcttataggaaactgaatatcrtaataatcacaggaaatatgcattggatatttatgatggaatcctggatattatcacccctccatttacaggtgaggaatccaggtctggagaaaataaaacaatatagacaaa

SEQ ID NO: 277025 - DNA, 572 bp, Homo sapiens
gcaggtttggtttctctcttctcatacaaaggctcctgctaagaggcccctttcctttctggactgaaacaattcacataggtcagccaccaaaaggccccttatctgagcatttaaaactgtgccatcaaaatttgtccaagtctgtgatagccactcttcttgccaggtttttgtttgccaacattgaaaaaaagggggttgggggcagccacaaaggagaaatgcctcccatcaaagcagccttttgctaatgtgcagtgcaggaaggtttgtgagaagaggtttaatgaggtctctattcacagttttaaagctggaacaaattagaaggagtttaagaaagcaaatcagcctcaagagaattctctcctttactgacatccytaaaacactagattttcctgtgaaatgttagatgccagctgaatcacaaaagcctgggcacaaattaagaaacgcaggcaaagtaccaaaaaaactcaaaatctggccaaatttacactagttgttctcaagcccaaagtcctgcagtaattactaaagtaccactatattttcatgagtcgata

SEQ ID NO: 277026 - DNA, 625 bp, Homo sapiens
tgttcgtagctgcccttacaccggaacttgtgtgctgggaaaacagtgaaaattccttcttctgaactgaaatattgccacttaattccagggttggatttcaggttgtctgcaagaactagaggtgtaaggaaaatgaaatataaccaccaaatccacaggtgcatgcaggcactgctcctcaggcatctgttttgcataaactgcttctagtatgaagaaatcccactagatacaagattgtaaattttctatgaaacatttgctttctgccccttaaaaaacaccccaagaacagaaaatacaatgtttcagctaagtgaagttattactcttaataktgtaccatgacattatatgtcttggattgtttttccagtacaaatgattcatttgcattaatctctccctgcactgagctggtccctgttgggctagcacacactagttggcttggggtacagtctgtaactgtagaaaacagtgatgttaataggctgatgttaataggcctcatcaccagagggactagacctgtgaccttaaccttgcctttactttgcaatgaaggaaacagcatacatggtacttaaaaagacaggccataatcattcagtaaagctgt

SEQ ID NO: 277027 - DNA, 1196 bp, Homo sapiens
ccatgcccagccctgagattttatctgagacagacaggccttgcttccagtctctgctgtctctagttcactgtatttatatccactattattctgatgtctgcttggctttgatcaacttttcatgatttgttcttggcctaccayaggcagggaatggctttttggaatggaggtaaggagaaaaaaaaaatactaaatccttacctacaagagaaagactaattgagggagattggaaatacacactaaactttcaattaattatcacagtatctgattaagagcttgcgtgaggtacagagaagggctatggaaatccaaagatagcaaagatctacctgttgtcattgagatggtgttgggaacaagtgctgagtgaatgcctgtgaccctctaggcattatgctaggcgccttctacaaagtatggtggacttttgccatttgggtatgtaccttgaaaacatacccacctcccaagatgaccaatgtgcaagaggaggggagtgagagctttacagcagggtaactacagagagtgctcaattagcaagacaggaagccagaggccaagttcctctcaatgacttattaaaggacagtgtacataagtgcwgtcactggaacaatttcaaagcatgaggcaaagataaagacattggtcaataaacctcattttaggctaattgttaacaataacttacatagaagaaaatactggaacaacatgtgactattccataaaagtgccccatggtgatgcctctgtcaacctgcccactcccagaaacttatgcccagagccaaacagggttatgcctatgtggggactgatgaaacataatggagactcgactctagcaaacatctcgacttagcaaacatctacctggcatctgcatgtgacagctttgtgctaatgctcccacatatagcatttaattctcacctcaacaaaccagtcttttaacatgcactaaggtttcaggtgtttaaatcagaatagagcaaaatccatagacatttaggaacactttaaaaaawttttttttatttttatagatgtagggggtacaaatgcagttttgttatgtggatatattgtgtagtgatgaagtctgagcttttagggtaatcatcacatgaatagcgtacattatacccattaggtaatttctttttcttttttttttt

SEQ ID NO: 277028 - DNA, 609 bp, Homo sapiens
tagtctcaccacaaaagatcattctggttcattataatcattccaacactatagcacagtttcaggcaaggtttctccaattctcctgctgaggactcctttggcatctgattaaattacatccattatttggtactagcagaagatgatggatatgatggtaatgaggccccgtgggcccagaagtaatctatcaatgtgctgtgcatcccaggyggcccctctctgacctagatgtggaggtgaatgagagccttattatccacacaggcaacccagagggggcttcccccattcctatgagtcagttaggtgtctagccaccggataacttgggctggtgtctagccacagggtccttcacactcactctttcctcagaaatgttggaagtggtccaggaaaaaagctgggcagatgcccaacccattaagcggtgatgcacagcattaggatttaagtgattaatgggcagggtctgtatctgtctgaattgctctatacacctacacctacctcagacagacacatgtgcaggaggcaataaatggttttttcctcagtgaagtgcatccccaagctagaagttactgcaccctcttaaatcct

SEQ ID NO: 277029 - DNA, 231 bp, Homo sapiens
ttaatagtttctgttccataaatgcattggtagtctggagaagacagaatctttgtaaagcatacaaataaaacatttaagattacaaaagaaacctattataaaaatagtttccaaaatattacaaatgtaagtttatgataatatatgtgmttcctattaatgcattgagaaagattaatgcattaagaaagaaagagtatggtaggtctcataccttccatgatttgg

SEQ ID NO: 277030 - DNA, 546 bp, Homo sapiens
tacatcccaaagtccacatacttgagcagttatttgtaatatgagaggagtgggacatggtgaaaggtgacctcagagttcccccttttcctcctgtacagctcatgccccttttcagagcagaattaatgtactttgtaggttatcacatgtctgatatttacatctgcaagatgtccagccttaggctctttcatactgtatataattcatcaatgggcccctaattgataacacagtttcagattgcctctcagactagctggaagcagactcacataaattataaaccattcttaacttcatttgtccaaaactgggtcgtgtgtccattcatccaacacayatgtgtattctttttcttaaaaccaccccagccagatccctactttctaaattgactccttgtccctgagtctattcaaataactaaagtttgacagtgcatgtgttatattatggttctggtaatgttttgctcaggttctttcctgcttttatccctactttctcactctctctcttttttttcttttaaattcctgc

SEQ ID NO: 277031 - DNA, 600 bp, Homo sapiens
agcttccaagcagtcctggggttggcagaggcctttgctgacactgtgtagaagccctgctctctcccattctcaattctcctttcctccctttcttcataggctgccaaggtccatctcagagtctgcttactcagaaagccaamctgttacaacaaacaagaaattcttatctagaagggtgaggggaggtgacaaggaagctggatccttaggaataagcaatgttttacatgtcagaggcggctggcagcgtgctgtaggatgaaacaataatgtgatcaaaagtacggagcggtgatggaggtgggtgattctgaagaaatgaaagggatttcctgaggctagagcctggaggactcaaggaaaaggagcagaagatgggggtgcagggtctccaacgtgagcttagatgtaaagggagccatcagaggcttttgagaaatgcagttacagaggagattttttcaaaatactcagtgtgtgtttaggatgtgtggaaaaagagggaagagaagcagggaaaccttttggggggtctctacgttaattattcttctagaagagaaatgaggatctaaatttaccacagtagcaggg

SEQ ID NO: 277032 - DNA, 1182 bp, Homo sapiens
atttaaattcagcctcttgcacaaagtagtagggtttgtattatttcttgtctgtttttgtcataacctgaacataacttccatagctccccaattgtgttttccaaaggacactccaaagcaattattttttgtaagtatctggttcaattaaaattagtagaaattgttaaatagttagtattaatggggattcgggatttgctggaaggaaaatctaagaattaataccatttggattaatctagatccaaaattttcacttttctatgccataagcatatacatttatttctctgtattttcctcctaaataatccaatacygtatgcagtatgaccaaaatcacatggatggcagcataccaatgaagagatttagagattacacatagtcaagatgtctccattatgaccaagggggcaaatatgagctccggaacctaggaaccagtcaactttgcttctttctcagcatattatagaataggttatttaattgtaattactaaaaacaaatttggattctgtaagaacaaatcaggccaaattatgccacttaatttaatatacaggtagaaattataagaattaatwggcttccattgaacagcaactgtttcttttaggtggctcctaccatctccagctgtgtcacaggcattcaaggcctactttactcatttccattttctgactgccagcccattaaaaaactagaaagtaagcactctttcctttgagtccttttcatggctaccattcctggcaagatgcaactcaaatgtcaaatgccttgtgtttgaaatatctcctgaatcttacagatttatcaaattctacctgtatcacttccacccaccatagctgctgggaagcaaggatgcccttatacatgattacttcctccttttctccawggcattcgcacagtgctttacataaagcagatatttaataaaatatctagtagttatcttatagctctatggcttacagcagcctttcaacataaaacagtgtttcaccttagaacagtatttctcaattggggaagatttagccccccaggggacacttgacatttttgattgtcacagcttggaggaagttactgctggtgtctaatgggtagaggccagagaggttgttaaacatcctaaaatgcacaggacagccccct

SEQ ID NO: 277033 - DNA, 642 bp, Homo sapiens
ggctggtcttgaactcctgggctcaagcgatcctcccatctcagcttctcaaagtgctgggattacgagtgtgagctactgcatgtagccaagaaacattttctgtatacaagaaataataaaaaactaagaggatttgtcactagggtatcttcactacaagaaatattaaaggaacttcagattcaatatcagctgttatctttagaaagaaacaaagagcataagaaatatagtaattatgtgagaatatacaatattttttcttttaacttcattaaatatggcaatttagagcaaaagctataacattttcttgtgcagtttgtaatataygcagatgtaatagatatgataactagcataaagaatagcgttagagaaatgaacctgtaagttgcaagggttttagattttgtgtgaagttgatagaatattaacagataaaattcaaaagtgggttgggaaggaggagctaatgaaaaaaaaaacagaaaaaaaacccaaaatattaatttattaaacatttcccctaaatattcctaataataaaatcagaaattttcagaatagatttaaaaaaaaacaagtctcatctatatgctatctataattgaaagtaaatgcttctgaaaaggcaca

SEQ ID NO: 277034 - DNA, 1761 bp, Homo sapiens
ataatgttctaattcacaactcatcaggaagacataatcttaaatgtgtatataaagacatatcaggcaaaaatgaacagaattaaatggaaacaatactatttcaccattacagttgaagattttaacatccctttcaacaaatgatagaaaataaaaatcaaacaaaataaaaatcagcccatacacaaatgatgtgaacaacattatcaaccaccttaatayataaagaacacctaaaaactgcagaacacatgttctttacaagttcacttggtatatccaccaagactgatcatatgtagagccataaaacccaggtctcaattaattaaaaaggattgaaatcaaacagtatgttctctgaccataatggaattaaattagaaatcaataacaataagatatctaaagaccacaacgttttgaaaattgaacaaaatacttaaaaatccatgggtcaaaatttaaaaatcacaagagaaatcagaaaatatgtaaaactgaatgatgatagaaatacatcatgtcaaactttgaggtwataatgttctaattcacaactcatcaggaagacataatcttaaatgtgtatataaagacatatcaggcaaaaatgaacagaattaaatggaaacaatactatttcaccattacagttgaagattttaacatccctttcaacaaatgatagaaaataaaaatcaaacaaaataaaaatcagcccatacacaaatgatgtgaacaacattatcaaccaccttaatacataaagaacacctaaaaactgcagaacacatgttctttacaagttcacttggtatatccaccaagactgatcatatgtagagccataaaacccaggtctcaattaattaaaaaggattgaaatcaaacagtatgttctctgaccataatggaattaaattagaaatcaataacaataagatatctaaagaccacaacgttttgaaaattgaacaaaatacttaaaaatccatgggtcawaatttaaaaatcacaagagaaatcagaaaatatgtaaaactgaatgatgatagaaatacatcatgtcaaactttgaggtwctattttctaaatttggatttgtatttaaaaaaatggaggctcctcttttgcaaatgccttaatacagtgcccagcccacagggatgaccatttataactgtawgttaaaaaaacagatagacggaaacgaacgaggaatggggtttcaggctggaatggaaacaatatttgagatgggttgccatccaagtatagagaatggatgtttatgaaatagawttgggactgaaacttggcagataacatctcaagccagccgttaattctctaacatgttttcaagggcaaacatcttttagctgcttattttccgatcccaaagtgcaaataaacagaaggccatacagtgaaattatccatagwatgtccccgaccaggcaggccctacctaattggattctgagaaggctgactgtagaacaatgctacttttaaaattgagcattctttgtagaaaaacattctacaaacagagaagggaggtggagggaagagcagagctgttgttatgaaaattcttcatagtttgttttgggaatattaagaataaacctgaaaggaagggagaaaaccaatgtcttcttcatttcttctcccctaaaagctgtatgagggttactgtattcatgtatagagctgtctgttttttaagagcacagaattgatgtcacg

SEQ ID NO: 277035 - DNA, 558 bp, Homo sapiens
aggcagtccccaggacaaggaagattaaatgaaccaccacaaatgaagtgcttagaagaaaacatggcacatggtaggtactcaatcattatcattatcttatgattgttgcattattagatgacatttcctccactaaatgggtgttttctgaacaaaaccttctttctatgaattattcactcactcactcattttctttctccctcaccttctattaatttgttctaggatctagggaatcaaagaagattaaagctgtaatcccttatcatcragaaactctcatcttcatgatacataaacagatgattactttcccccacagcttgcaaagttgagtcttcaagtaagacaagtgcaaagaaagaaatttggaacagcagactgtttctgttggtacgattcttaggagaaaatatgtgtcatacattatatgcactgagatcttatgtgtttcgaatccactaatttggggctaatgggagtgggatttaattttagttaaattgaatagcagcatcactttcaattgttcttaaaaataggatttattaa

SEQ ID NO: 277036 - DNA, 612 bp, Homo sapiens
taccatcacacctggctaattttttttgtagaaacggagtttagccttgttgtcctggctggtttggctcctgtcttggcttcctaaggagctgggattacagatgtgagccactgcacctgtccttaaaaaatgtttgattccatgagattagatgttgaggccatttgcatttttttatgagttaggcaaccaattttcaatcttcattgactcaatggcaagcagtctgctacagattgaatacatcctcagagtcttactaacttgagtattccctggaaccatcatgagttgagaggataggagatggagtgctgaattcatgcttattctaggacttgcttgaagtctttttaataggattcaggtacatgtttgcttgcttttcctgagcattcyccaccctctccacccacctaacccccaaaataggtctcattgtctgatgttgtcttgtaaagaaaatatattcttctttaatccacagattactgtttttacatttgaacaaaagtgaaggactgtgccacttcttcctcagacccttaacaatgcagaatggccaatttccaagtgtccttgtttaaagtttattgcagcaggaaaata

SEQ ID NO: 277037 - DNA, 612 bp, Homo sapiens
taccatcacacctggctaattttttttgtagaaacggagtttagccttgttgtcctggctggtttggctcctgtcttggcttcctaaggagctgggattacagatgtgagccactgcacctgtccttaaaaaatgtttgattccatgagattagatgttgaggccatttgcatttttttatgagttaggcaaccaattttcaatcttcattgactcaatggcaagcagtctgctacagattgaatacatcctcagagtcttactaacttgagtattccctggaaccatcatgagttgagaggataggagatggagtgctgaattcatgcttattctaggacttgcttgaagtctttttaataggattcaggtacatgtttgcttgcttttcctgagcattctccaccctctccacccacctaacccccaraataggtctcattgtctgatgttgtcttgtaaagaaaatatattcttctttaatccacagattactgtttttacatttgaacaaaagtgaaggactgtgccacttcttcctcagacccttaacaatgcagaatggccaatttccaagtgtccttgtttaaagtttattgcagcaggaaaata

SEQ ID NO: 277038 - DNA, 334 bp, Homo sapiens
tgaaaatctatgaagaaggaaggagtagatcaacctaatgaggtcctgagaaggcaagaagacaggaggcactagcttcaggtttctgatcctttcatttttaccagtgagcaacctgaagcccaaagggctatactaagtataggaaatgtcrttagctacatgattagttgttaagtcatttatgtcattaattgcaaaaggaaatcagagaaagaaaagatcatcaccaatgctgtggctgggaggttaaggggaaagcagtgacagtagggaaaaaataacagcacaggagaggtactgccatatgcagagaaaatacacctagacctta

SEQ ID NO: 277039 - DNA, 445 bp, Homo sapiens
agtatttagtattttgtatttagatttcaccatgttgctccaggtggtctcgaactcctgagctcaggcgatctgcctgcctttggcctcccaaagcgtactgggattacaggcataagccaccatgtccagcytatttattactaatatgtatcttttcatatttgtagtagtagccattaatatctgcaaaattgtttactaggctttgatagggcccattaatatctgcaaaattgtttatgtagctttggtcaatctcaacctaattgttgatttatttaaagcctacttccctttgtagggtcattaataaacagaaatatttaaatagtttttaattaggcctaggaaaaagaaaaatacatataagctctaataattacattgtcagattcagcaagaatctttttgtacctgtttacctgttgccatgaaggtccat

SEQ ID NO: 277040 - DNA, 445 bp, Homo sapiens
agtatttagtattttgtatttagatttcaccatgttgctccaggtggtctcgaactcctgagctcaggcgatctgcctgcctttggcctcccaaagcgtactgggattacaggcataagccaccatgtccagcctatttattactaatatgtatcttttcatatttgtagtagtagccattaatatctgcaaaattgtttaytaggctttgatagggcccattaatatctgcaaaattgtttatgtagctttggtcaatctcaacctaattgttgatttatttaaagcctacttccctttgtagggtcattaataaacagaaatatttaaatagtttttaattaggcctaggaaaaagaaaaatacatataagctctaataattacattgtcagattcagcaagaatctttttgtacctgtttacctgttgccatgaaggtccat

SEQ ID NO: 277041 - DNA, 551 bp, Homo sapiens
ctgctgttttgaattcatcacatggctttaaataagcttttcaacctttttgttgatttttcactactttatttactargcttcttctgttcatccgttactaagaaaatgatcaaatagttaacagcaaatttgatagaaaggttgacatatgcacaaagcatgctgaataagaggcatttgataaataattattgaatgcaaaaatggatacatatattaatacatacttaggtatttgaaacttttttggcaacacaaatttttaatcacggtaaaaatttagaaaaagaatacatataaagaggtgaaaatagaaatcggcttttaccgcaggtaataacatataactgttaatatttagtagttctatcaagaatttttttgaatgtccatatgtgtgtctgctacaaacatgagatcataatgtaatgctacttttataatctgttctctcactagaataaatacacatgtactgtctcatttttgatgactgcacagtatactagcacacacaagccacaatttactgcagtcatccgctattg

SEQ ID NO: 277042 - DNA, 551 bp, Homo sapiens
ctgctgttttgaattcatcacatggctttaaataagcttttcaacctttttgttgatttttcactactttatttactaggcttcttctgttcatccgttactaagaaaatgatcaaatagttaacagcaaatttgatagaaaggttgacatatgcacaaagcatgctgaataagaggcatttgataaataattattgaatgcaaaaatggatacatatattaatacatacttargtatttgaaacttttttggcaacacaaatttttaatcacggtaaaaatttagaaaaagaatacatataaagaggtgaaaatagaaatcggcttttaccgcaggtaataacatataactgttaatatttagtagttctatcaagaatttttttgaatgtccatatgtgtgtctgctacaaacatgagatcataatgtaatgctacttttataatctgttctctcactagaataaatacacatgtactgtctcatttttgatgactgcacagtatactagcacacacaagccacaatttactgcagtcatccgctattg

SEQ ID NO: 277043 - DNA, 546 bp, Homo sapiens
tcatcaccttgcaatgtgcttacataaacctagatgacatagcctactccacacctaggctagatggtgtagcctattgttcctgggctgcaaacctgcacagcatgttactctattgaatagtgtagggaactataactcaatggtaagtatttgtgtatctaaacagatcaaaacacagaaaaggtatagtaaaaacactgcatggtaatcttatgggaccaccatcctatatgttgtctgttgttgaccaaaacattatgtagcacatgaccacatggcagcaacttggctaacatcctttaattcaacattgttttcttataagtttgatgagaaaattaaaaaaaaaaaaacaatccctagcaagggccactctctgcatggaattttcacattttccccatgtttttgtgggttttctctgggtactccagtttcctcycacatcccaaaggttttccccttacatgaattgagttgtctacgtgaccccagagtgagtgagtgcaggtgtgtatgagtatgccctgtgatggtatggtg

SEQ ID NO: 277044 - DNA, 589 bp, Homo sapiens
tggcaagactggtttcttctgaaggctatgaggaggaatctgtttcatccctctctccttgttttggttgtttgctggcgatatttggcatttcttgattgtatatgaatcatcccaatctctgccatcatcttcacataatgttttccctgtgtgcttatctgtgtacaaatttctcctttttataaggacactagtcatattggatttgggcccaccttgttgagctcatctgagctaattacaactgcagttctagaggctaggacttcaacatatgaattttggggagaacacaattcaacstgtaactctagtgctgtgcatttgatgctgtgattaataacattctaaaactttcctgaaatacctaaaacatattagagaatttaaggtgtgtgttcacaatcagttttaagatggatatggcccatgacagtaatgaaaatatttagaaaaggtgataatcaattccatctggaatgctcccagccttactttttgcatcttcacaatcacatctcttacttccctggcttgctttctttgattctttataggagtgattagtttcctagtgctgcttaat

SEQ ID NO: 277045 - DNA, 553 bp, Homo sapiens
taataataagcttaaaatttaaaacargtcgttaagcaatcttgactaatttattcattcaccaattattcattatgcacctaccatgtgtcaggtttagtctaggtgctgaagatagaaatgtgagtaagaaacagttcctactctataggatcttataaccagtgattgtgacagattaaacaggcaatttcagtataatgtaactgttctctgggatacagaaaggccctatctcagcctctgttggcaaaacatgactttctgatagaccaatttctaggtttgaggctaaaaaatgagtaggatttggccagattaaacgggtaaaggggattttccaggtcatatttgatagcaaatatttgatgaagtaaaaaagagcattttattttgcccaactcttttcttattatgttttaaaagtatgcaaaagaagcatagctaaggatattatcatcacaaatcttgcatcacccagcattgaaagatactaggaattcaacatcaccataagagagatctaatattgaaatcaaggaaatggcaataa

SEQ ID NO: 277046 - DNA, 584 bp, Homo sapiens
ttgcttcctctttggtgaaggactgactcccaaattctagatttctgaatacataaagtggaggattgcatcaggcccagagagtgtgggcctgcagtgcattatggtaatgacacagataagcatccacagagcaaagatgaagataagcctcagttaatggtttactcagtttgactgcaccactataaaacaatattttagtttctttctatttgtataatattaacccttttactgacaggtatattcacatagcgcatattccgttagcagtaggaccttgctatttttaattgaatcttgatatatgtataaataacaaattattagaccatacattcctaaaaacataaacaatgaattaaatttgccctattttatgaatatgatataaattactgtaaatcacaaactrtttaatcagtataaataccctaaaataaacacgcttattaaatattgtatatatcctgtagaaaaggtattactatataacttaaaacctccattatggcactgattactctttaatttctaaatttgagtaaaggatattatattctaaggtttagagccatcac

SEQ ID NO: 277047 - DNA, 573 bp, Homo sapiens
cacttttcactgcataaactgggctttcagtgggctggaaaatgcagcctcgttggttcagcctcaaaaatcaagcttgaaaatgtgaaagtgataagtgtgtcctatcgcaggcgaccattcctgtctggttggccctccaatctgaccctatttgtgagtataagtggatggtgcaagaccttttaagcttctgagttctggaaccgcaactccccactgcctgcttcgcccccacccaagcactgtgatttgaagttgagttgccctcctccaccctctgtggcttggtctgagccattgggctttaactgggggtctcacttagctctttgcaaaatgaggttgccaataccaatattccaggcacaacctacatcaaaatcacttggggttacctcataaacattcatatatctgaattctacrccaggcctactggatgagcatcagagcatagggtgctgggatcactagctttgactagctttggactataacatgtttactctattagtgaaataagtgtaaagctaaggtttaaaacagatgtctccttataggctacaaaat

SEQ ID NO: 277048 - DNA, 484 bp, Homo sapiens
ggtctggatgagaatgatatcatgttttgctgttgaattctacctgtttcatttgctacagtcacacagtaaggtgttcctgtgttagttacctatcgatgtgtcatggtatcaccacgaacttagcaacatacatttagaatctcatagtttctgtgagtcaggagtctggcacrgctaactgggtcctgtgctcagggtctcaaaagactgcagtcaaggtgttggccaggactgaaatcccatctgaaggttccaatgaggaaggatctctcgcaagctcaggtggttgttgatagttttcaatttgttgtaggctgtcgagactgagggtctcaattttttctggctattgactcaaggctgctctcagttaccagttttgtgttgcctggcgttcaccctcatttcttcccatatgggcctccccagtgtgaccacttgctgtatcaaaaagagggagtcttctagcaagacaggttac

SEQ ID NO: 277049 - DNA, 593 bp, Homo sapiens
taattttcttttctggattatgcccaattcaaagttaatggtaccaggctcacatggcaatatatgctacctaatggttgctttctaatttctgaatatgctgctgaagagaaatacaattggagaataagatagacttcattcttgtgtaactaaataaaccctttcaaaagattttaaatggtatttctcaaacttatctgattcttagaacaatcttgggagcaccaattgaataagtagattctaggctccaccacagacctcctaaataatcagaatcttccactgcctcggttatcatcaaaatrcccctgggtatttactacattttccaactgagacctctcacaaaatcctccccctggatttttgttacatcttaaacccagcatatccaagttgatttctcctcatggtctccatctctctgcttgctctttctcctgtattccctctctcatggatttgcaccacccagccctgccagccagtatactgggcagcagtcttcaccttaaaccttgctcacccctgactgctgtcaccacacaacccctcgactgcacttctctagtgaaggccattaatat

SEQ ID NO: 277050 - DNA, 612 bp, Homo sapiens
tagacatgtgtttagtctgaaacaggtattacttgcctggttttgcacactcaggtttcaaaatcttgactctgttaatcagttatgtacctaaaggtatgtttgttcactagggatttataaacatgaacaaagacttgttgagaaaaattaaactcaatttctataatgagaactaggtatatttttatgcttgcctatatatgacaaaatatgaaaggtataaaaagttctaatataaatgtccagtccttgccaatcaaacaattggtagcctttggccagcgtggcttaggaaacattctstccttgtcataactgattctgacttaaatgatcatctcctactcgtgaaagtctgatggtaatccttaaccaatgctttaagaaaagatcctctccccttgttatttcagttctcttccttgtctcccagcctggtcctgctccacagtgtctgtgctggaaagcttgctagttggttcagtacatacttcatgagccctgagaatttttcctaatttggtgtcttttgttcagcagtgtaccagcagctccaagaatagtgcctgagacataataattgctcagttaaaaaattgttgattacca

SEQ ID NO: 277051 - DNA, 565 bp, Homo sapiens
cacctgactcctttaatgtctcctggactgagcctgaatatccgaatggtaagtgaactcttttagcctcaagttaaaaagatgattagcaaaggtaaattaatattctaaatggcagcttatatgtggtgcttaatttttaatgatcattttagcacataaaatacctaagatagtatcattgtctctagttggggagattgtggtttttaggctaacacacaattttggtggctcaaaagtgctcccttttgatagtttttgtgtactgcatctcattgtttaatatgctccaggagaggtgaagagagcaaacggggaggattcccaaagaatgccgtagtgagagtgacattgtattttcaatgactttctgtttttaaaagccattagttcttccttggmgaaggagagaggtggaaagttcatgtacatattgtgtcaaaacgcttttgatttaataagtttatcttaaaagaggccacttggaactctgtattttttaatatactatttataaatatttcaacatgctgtttttaaacaatgcatagattaaacatac

SEQ ID NO: 277052 - DNA, 502 bp, Homo sapiens
aggattagggtaggaataaggcaatagagaagagagaaaaatggaaaagatacagccaggggaagagaaactaagaccccttccatgcgcctaaacgaaagctgcatcagtccacagggaagtggtgcagctaatggcaggtctcaaactgtgggccttgactctttccaaaatgtacagaactccatatgaggttacactggacaaaaccggaaaaagggcagtgtrgggagaggaggaagaattcacatcaatttctaataccacctgcaaaatgacactgaattctgtattttgtttgtttgaattatcaagaacgccatgtgactataggccctgaagaaagattgtggtaaatggcaccatagtgtattattacaatagaagccccaaatataaagaaagtgaaatatttttaaagtgcctacatccatggtaatagattgattcttcaatggttttctatctttatgtaatattttaaagaatatatctccaatac

SEQ ID NO: 277053 - DNA, 544 bp, Homo sapiens
ttttgcttccagtttaagtttgggtttgcctaggactttccttctaacagtccattgtctctgcctggtctcgttttaggtatttataaaactttggtcrtttcactgggattcttacaaggtggtagttcaaaactatagctgtatactgagtcaactggggagctttaaaaaatatactgatggctgtgtgccccacatgcaaaatgtctgattaaattggcctggaatgtggcctggacatttgtacttttaaattatctcaggtaattctgctgtacagccagcacagggaaactctatttaaaggaggagtttgtcaccagtgatcacatttaaattttatccagatattcttataactttcatttccccactgaaactcaaaaatgttaggaaataaaaaactaaatgtatataaaaaataataagctattaaaagtaaatagaaaatactagcaaaggaatatcataagatgacaaaaattaagtgtaatagttattgggaagtgggattttatgttcagacttacaaaaagcagaa

SEQ ID NO: 277054 - DNA, 557 bp, Homo sapiens
taccatagcctggccaagttgtcacacaaaagtaaccatcacagatgtattattttatttaaaatcatcagtattatatgaattaattcagaaataaaaaaggtgttgtcatagtgtgaacacttataagtgtctttcccacagaaatgtcaacagactgtgatttgaaaattgctgttttaaaagagaaaagctcatcattctacrgaaatgattcaaagatagacaatccattaaatatcttataatgggccaaatactactagttgttaatttacacttgcaacatcaaacactttaccagctttttaacatgcaactgttgcatatgatgcattgtgttttttgcaagtaggtatacagcataattctaataggatatttatttacaacctaaccttacaatttaaagtctgctactccattgtgctcatcctacccgctgtcttcttatattcaaagctattaaggagtacttgctcagcatatcactccaaattaaactgcaagacattttatgatgaattaaatgggtgacgctctcccagcctttgtaa

SEQ ID NO: 277055 - DNA, 557 bp, Homo sapiens
taccatagcctggccaagttgtcacacaaaagtaaccatcacagatgtattattttatttaaaatcatcagtattatatgaattaattcagaaataaaaaaggtgttgtcatagtgtgaacacttataagtgtctttcccacagaaatgtcaacagactgtgatttgaaaattgctgttttaaaagagaaaagctcatcattctacagaaatgattcaaagatagacaatccattaaatatcttataatgggccaaatactactagttgttaatttacacttgcaacatcaaacactttaccagctttttaacatgcaactgttgcatatgatgcattgtgttttttgcaagtaggtatacagcataattctaataggatatttatttacaacctaaccttacaatttaaagtctgctactccattgtgctcatcctacccgctgtcttcttatattcaaagctattaaggastacttgctcagcatatcactccaaattaaactgcaagacattttatgatgaattaaatgggtgacgctctcccagcctttgtaa

SEQ ID NO: 277056 - DNA, 574 bp, Homo sapiens
tttgatttgtgtcttaagggtagcatgagactatgccaaaaaagaaatgtgtatgtcttgccacccaaaagagatatcttggccattgaggatagagattcattactttcttatgctatataaggcgtagtatagggctaggttgaaatagtattaaaataatatttaaggattgattataggttttcattgagaaccattctcaggtgatactttactaagctgacaatagacttagcactgcctggcaaacagcaagtagcagtcagtgatatagccatgattattactgaattaacagcatcttaatcttcactacgatatttgaaagggaacactgattcataaacctactcttttcctgccacaggtagtcaggaacttattattcttattatgtctcattattaacttctgttgcctaacaagatattatatattgtrtgtcacatgaatattttcttacaaagtattaattgattcctaatcttgttaaagaatatgatagtagcaaatatccaactaattctgagagaaaaacctccagttttgcaagaaagatttagccaagtta

SEQ ID NO: 277057 - DNA, 584 bp, Homo sapiens
ccttggttttgctcctgcaacgggacttagagtcaaatccccagcttctctttttcagggaggacaaggaattcagacagatgagaacaatgagagagagaaaggtcaccagagagcgaagatgaagagaacagaggaatggcagatacaatatgttagcatataaacacattataattttggccaagattggccctgtyggtaggagtttttctttgcataaagttttctctcagtaaataatagtctactctctcggtagcatctgaggccactgctgtaatgattttttaacttcataagtttcctagaacgttggtccaaatgaaggcaccccagttatgtctcagtcgtgtacctatagtgcgactgttgctgccatctctcagcagtccctggcaatgccacactgcttcaccatcagcttcaaagtgtccttgaagtatatattctgactacattgaatgggagtgccccatctcaacttgcaaccattggattcctgtaggatagaatttgtaaagaaaacaaggtttaatcaaaagcattaagagtctcttcttgttgacaactttttgttctaa

SEQ ID NO: 277058 - DNA, 659 bp, Homo sapiens
tctcattgttccatgtctaaattctcctgttggcttcattgtgcccctaagccaagccacgttacttagccaaaaagatttcccacgactcaggtgtttctcagcttaacaatttcctgtctgttctatgacttgcccttctcatttccactgctaagttgtaaccctcatctgaaatgccctctgttcttccttctacctatccaaatccaatccatctgttaagaataaaatcttatgtatctaagtagtgtgtcacttcattcaagaagtcctgcctgattttttcagcccttccagtcatcaatttcactgttttctctaattacatattaaccctgtgttggattcctggattttccaggacaattatattattccctcttttccccatatctaagttctcagaagttctgcttctgaagtttttgttctacagcttaaattcaaaataaatactcgcttatacatttttgtattgttagctaattaaaattacaggtaaccagatggcaggagccatatcacatttyctttttgcccctcagaataggcattggataactacttcagtgttttattttaaatgaatcaattttgagatttatgttttttaaaaaagtgtcacaaatccaagttcaaatgtgtcctttgaaaat

SEQ ID NO: 277059 - DNA, 569 bp, Homo sapiens
tacagtaataaaaatttaatattactcactaataaaatatcttccagtatcacagacttagtcatagtgtgtaggtaaaattattccctttgggtctatggtgatgttttaaacttctgttattatcttacaattttggttttagccacgtctttaggaccatcaatagtaatgggtttaggggtaattcaaagaacaaggctgtacatgcagggtttttgtttcttgtttttattttttttttcccagaagcaaacaggattaagtaatctcactcatacgaagggttttcaagttctttctaacctcagaaacctgaaaacctggagaagctcttatatgaatgtaatatttttagctgctgttacatcttaagtgccttgaaaatgtcattactgtcttayaccccagttattcattaactccttactactacccttctaaaagtctcctaagagcttgccatatattttctattcaaaggcatttaaatctttatgtacttaccaaataggcaaagattgcctcatgaaaattttaaccattcagggtatgtagattttgaaata

SEQ ID NO: 277060 - DNA, 557 bp, Homo sapiens
ataaaatgttgcatgtgtgagatgaaaactatatgtatttacaaatgggggaaatatgtgtttgtttaygtatacacacacacacacacacctataagacaaatatttctagaaggatataagaagctgagcacactacttttcctctgagactgcagaacaggcttggtactttacttcctttttttctatcttttaaattttgattcatgagaacataatacgtggtcaaaagtgaacaatttttaagaaaaatcacactttgatacgtgccacttcacttgttgttacgaaacctaatgtttttgtaaagtttttagttcaggatacgagttgacatgaagaatagggttcccatgagggtgtcttacagacacagcccaatttctcctgcaaaatagtgacccagctgcaggcacttttatgttgaaactacacttgctttgaactagctgaatttccctatcttataaattctaaccaccccctctttagcagccatcacaggaaaggatgaaatacagttgttcattatgtcaaggaaataaccaattagc

SEQ ID NO: 277061 - DNA, 557 bp, Homo sapiens
ataaaatgttgcatgtgtgagatgaaaactatatgtatttacaaatgggggaaatatgtgtttgtttatgtatacacacacacacacacacctataagacaaatatttctagaaggatataagaagctgagcacactacttttcctctgagactgcagaacaggcttggtactttacttcctttttttctatcttttaaattttgattcatgagaacataatacgtggtcaaaagtgaacaatttttaagaaaaatcacactttgatacktgccacttcacttgttgttacgaaacctaatgtttttgtaaagtttttagttcaggatacgagttgacatgaagaatagggttcccatgagggtgtcttacagacacagcccaatttctcctgcaaaatagtgacccagctgcaggcacttttatgttgaaactacacttgctttgaactagctgaatttccctatcttataaattctaaccaccccctctttagcagccatcacaggaaaggatgaaatacagttgttcattatgtcaaggaaataaccaattagc

SEQ ID NO: 277062 - DNA, 647 bp, Homo sapiens
aagcattccaaataaaatgagacttgaaaagttgaagaattaagggcaattccagataattatattataatcctcaaatatttggttaattcaaaataaatatgttttgtaacatttccttaaatatttggataaacacttcagtttttactatacattgaatttggcaattgtactattttgctctgacctggtctttctttttcattttacttttttgtttatctaccttgctgtaaaaggaatatgtggaaaaggcacttgggaaaggtaaaagttggcttggctttggcctgggaacctctcttgacacagaaaaaatatttgagagcaaatgtgcaataaaacatacaaacactttaatacattgtaattcttttgtttgtttttaaatggagtctcactctgtctccaaggctggagtgcagtggcacaatctcgggtcactggaayccccacttcccaggttcaagctattttcctgcctcagcctccggagtagctgagactgcaggcgcccgccaccacatccagctaacttttgtatttttagtagagatggggtttcatcatattggccaggctggtctcgaactcctgaccttgtgatccacccactttgacctcccaacatgctgggattacag

SEQ ID NO: 277063 - DNA, 647 bp, Homo sapiens
aagcattccaaataaaatgagacttgaaaagttgaagaattaagggcaattccagataattatattataatcctcaaatatttggttaattcaaaataaatatgttttgtaacatttccttaaatatttggataaacacttcagtttttactatacattgaatttggcaattgtactattttgctctgacctggtctttctttttcattttacttttttgtttatctaccttgctgtaaaaggaatatgtggaaaaggcacttgggaaaggtaaaagttggcttggctttggcctgggaacctctcttgacacagaaaaaatatttgagagcaaatgtgcaataaaacatacaaacactttaatacattgtaattcttttgtttgtttttaaatggagtctcactctgtctccaaggctggagtgcagtggcacaatctcgggtcactggaatccccacttcccaggttcaagctattttcctgcctcagcctccggagtagctgagactgcaggcgcccrccaccacatccagctaacttttgtatttttagtagagatggggtttcatcatattggccaggctggtctcgaactcctgaccttgtgatccacccactttgacctcccaacatgctgggattacag

SEQ ID NO: 277064 - DNA, 559 bp, Homo sapiens
gaaaatgatccttaagcattagcaaagggaaatggcattttagaaaaacaaaagaaaagcaaagcagaatgatcagtttttaatgttgaaactgaatcatttcatggatctcagataaytctttctgaatgtggagaggtacaacaaacaggttttaggtgacttttcccagagtaaatatgtctaatccaaaataagtcctcaaaagtaagggtggaaggtaaggaccgggaaagaaaggaaatggaagatagaaagaacaatttttaaattgttaaatgctcatgaaatgagcataatcagatgctttttatttgcttataagacctgatggtcctgaaaaaaagaaacccaattagtatttaagaatgtttttaaaaaggcaaatgaaaatttgggaaatatatctgttatctctaggtggttatattatgaatggtttgtcttcccatttttccttttatatgtactcaacttaaaaaaaattctataatatatacatattatttttgcaaaacattataaaaaatagctcacaagagcagatgattcaagagca

SEQ ID NO: 277065 - DNA, 537 bp, Homo sapiens
tcaacacactgagaggggtaggaagartcaacggatgaatcagaataatgggctgctgcagtctgagcagaactgccctctgctcagccacatggatgtgctggccacttcccttcttctgctgcagcccctgcaaggagtctgcagagctgacagccctgagcaatggcctggatgctgtaaacacacatcattcatttgcctaccttaagggcagcttgtaagtctttctttgtgtgtgttttcatcaagaagtaatccttacagccacgaaaaatgtccaataacatttctctcccttggcaaacatccccggtatatcaaaggctcaaatacacaatgcagcggctcacagggacaggtgttggcgactgctttatagcagcctgaagaactgtctgttggtcacatgggctcgcacaaatctcacatggttccagaaactgataacccagcagcatacagaggagattcctcccactgcgtgctcattctgcctttcttctggaaatgctcctctgagccaggcatggggcc

SEQ ID NO: 277066 - DNA, 537 bp, Homo sapiens
tcaacacactgagaggggtaggaagagtcaacggatgaatcagaataatgggctgctgcagtctgagcagaactgccctctgctcagccacatggatgtgctggccacttcccttcttctgctgcagcccctgcaaggagtctgcagagctgacagccctgagcaatggcctggatgctgtaaacacacatcattcatttgcctaccttaagggcagcttgtaagtctttctttgtgtgtgttttcatcaagaagtaatccttacagccacgaaaaatgtccaataacatttctctcccttggcaaacatccccggtatatcaaaggctcaaatacacaatgcagcggctcacagggacaggtgttggmgactgctttatagcagcctgaagaactgtctgttggtcacatgggctcgcacaaatctcacatggttccagaaactgataacccagcagcatacagaggagattcctcccactgcgtgctcattctgcctttcttctggaaatgctcctctgagccaggcatggggcc

SEQ ID NO: 277067 - DNA, 569 bp, Homo sapiens
agtaaggaaacagaaaacctgaacaagactatagaccaattggaccaaatagacatatctagaataccctacccaacaacagaatatacattcttctcaagtgcgtatgaaacattcttcaagacagatcacatgctaggccataaaataagtcttaacaaattcaagaagattaaaatcataccagttacattttccaactataaaggaatagaactaaaaagcagcagcaaaaggaaaactggaaattcataaatatatgaaaattaaacaccatactcttgaagaaccaatgggtcaaagaaaaaatcacaggggaattagaaaatatcttgagacgaatgaaaataaagataaagcatgccaaaaacttacaggatgcagcaagtgttactaagacagaagtttacagcagcacattgcacatgcrttaaaaaaaagaatgatctcaaatcaataacctaactttacatgtaaaagaactagagaaagaacaaactaaacctagagttatcaaaaggaacaaaatcataaagattagagcaaaaacaaaggaaataaataatttt

SEQ ID NO: 277068 - DNA, 622 bp, Homo sapiens
gaaaggaactggtggctttacaagaaaattaagagagacctcagctagcacattagaatgctcaggtctcttgctctgtgctggatggtgccctgcatctcctctggactctgcagagtccccaccagcaaaaaagccctcatcagatgtggcccctagtccttggatttctcagcctccataactcagcctccattcctttttaaataaatttcccagtttcaggtactctgttataaacaacagaaaacagactaagatctccagctcacgtacatgcaaaatgaccagtctgtagtaggaccagttgtggctataggcccagaggacagtcaccttgtccaggtgtccttctgtctgcccagcttcgttaactttgctgcttttctcacgcaacgctgctcagactgcagcctgcagatctgtagactcctagcctrgcagccctcagatccagttctctgcttctccctgtggcagcctcagctggcacaggtgaaagagcctggtgttgtgtctggtacatggaggaccagctacgtaatcagcatctagtacacaatgaaaaggcagggcccctggttaaaatatgattattaatttcaagaggtcaacagaagag

SEQ ID NO: 277069 - DNA, 590 bp, Homo sapiens
ttctcattggcatctagccagcttgctagagcatttggagccacagctttacctagtaatcaaggttttttttgtttgtttgtttttgttttttgccagcgccattctttgtacatatactatattttcttgattcaagcacgccatcaataataacatgtgtcgtcaatttaattagggctttttgggaaaaagagagaaagaaaaacacagcataaactgcatttgttgatagtaagatttgttttgatttccaaaaggttaaactattggttagggtgtaggaggggagggagtacatcttgcaattgaggatatatgaaatctccctagggggctttttagaacgagatggcctgaggtagggtccaagtattcctatggcctggtcaaatagcatcttaattccacctaatctattatttccaactctctcctacatgtaggagcttgaygttgttctgagagtgttccccatctggctctggacttgccaatcctcactcgctctccttcttcctcagcaattacctcttctcaatcctttctgggctgggctgagccctgacctgtgggtcattcgacaatta

SEQ ID NO: 277070 - DNA, 574 bp, Homo sapiens
tgtggatgggcagaagcttctgtgagtcaatacaaagaactgctaggtctgagtactaataaaaagatgtaggttaagtcagtagacttgcgcccatctgaaggtggtctctagttttctgcctcagggctctatcatgatgctgttctgttcaacagaactaaggagaacaataggttcacgttcaaaaactctttctcacctaaacacacagatgggcagcttctaataaagttggagctttgtaggaatataagtgaagtcttacgatattmatttattcattaatagctttgtatttatctgtgtggttgcttgtttaacatctcttcccctactaggctgtaagttccatgaggacagggtgtgtgttgttcatgactatattcccagtgcctctcaagtgctttgcatacagtgggtgcaccataactatttgctgaatgaatgaatgaatgttgatttgacatcttcacaacccttctcacctcagcctgttatggaagaaattgaggatattttggtgtgagctccccagctttctttgcctaccccatccactttgcctacccca

SEQ ID NO: 277071 - DNA, 1152 bp, Homo sapiens
gtagggagtgagccctgggcttggtctccccttgtcctggcaccatcctcagtgctggtgaaggttcagaaacattctatgctcgacagtggtccctgctttgcctcctgtgactggtttccttccccgcagtctgcccctgctctccccaatgtctmtaaagcataaatctcacggagccacttccctgcctaagacccttcagcgatggtccccttcttgtgagtaaggcccgaactccttcctgtggcctcctaggtcctacatgagctattccctgtccctcaagccagttcagctccggccacacccctgccctcatactccacaactgcccttcttgcagttgctcaaatgcctttgctctttcttctggtctttgattccattcattcaccaaatatttactgagtacctaacatgtgacaggacctgtcctaggagctgaggaatcagcacagaacaatagtaatgcaaaacaacacaaagctcctgaccccaggaagctcacattcttgcagawgacttgccacaacactcagtgttawatggactctatcacagttgattagcatgcatcctaaggttttacaaacaacatattcattacatataagtaaatattatatacatgaatattatacataataaatattatatataatgaattaatgtctattccatcttgggaactgctttttcaagtgagtttgtattcacgtgtctaaagacattttaatcacattccactatatttatatgtcatagcttgtcaacttattctttaagtatttaatcctgaagttgtttcctattattcattagtataaataaggcttctgtaagcatagagtctttcttggattacttcccttttctaaaagtagtactaaaggtgaggcatagtggttgtacacctgcaatcctagtgctttgggaggctgaggcaggaaggtggcttgagaccaggtgttcaaaactagcctgggcaacatagtgagacaacatctcaaaaaaaaaaaaatagtgctacataggtaaaaagaaaatgaatcattgtatagctccttatatagcaaaatgttaaacaatgcacttctagtagtggtactagcaacaaaccacaaatagattatattgatctcatcttgt

SEQ ID NO: 277072 - DNA, 1075 bp, Homo sapiens
gttcatcctgctggcagtagtgttacaggtgtgcaattacttgtagaatttgtagtaaatacaaggtttaatgttctcctttgtctagatcctcaattaaggcctaataaaacaaatcaactctcttactcatttagcctttgtttgtttcaccartattaatttaaaaggaagcaagcttactgctgctcgcaacttgctaatttccaagttacagtgtttttggaaaaccttcagaatgtcattccccaacccccagaatcaaattgctatgtatttgaaaagcattttcaaattgaacaaacatttttgcccctctgatttcagtgcctgtgaatgcgagaagaaatttaattttaaaaggaacaaaaacctaacatctgtttctattaaatctgagtatatgctatgcaaacaatgaatttatatgtgtgtctatgtttgtacacacacacatacacacacacacatccccctaagctgagagtaaggcttgcatgtttgatgttcttcatacctttatgcctggactaggggagccctgaactcacatggaattccataccctttgggcttgtatttgtaaggccacwattgcattcaggtctcctgggaagtttgttaaaatgcaggttctaattcagtaggtctgggaggggtctgagagtccgcatttctgacaaactcccaggtgacactgaggttcctggtcagaggattcacctcactaaatcacagaggccaatgtgagctcttcatgctaaaggggacacatcagagcttctggcatgtwcttttttttttttttttttgcaacatgtgtaaaagaataaaaacgtctgaattatattagtgcttttgtcgtctttgaaagtcctagagtgatattccaatatagtaatacataagcgcaaataggcacaagagaaaaatctggaaattctttgtagacctggagacatgggtgctctcatgcagaggaaagtaaatctatcccagccctttgtcactgaccttgggaaatgttgcttgagctgttgagtcctggctcctgtgcaaaagcaaaactccctgg

SEQ ID NO: 277073 - DNA, 482 bp, Homo sapiens
attgcattcaggtctcctgggaagtttgttaaaatgcaggttctaattcagtaggtctgggaggggtctgagagtccgcatttctgacaaactcccaggtgacactgaggttcctggtcagaggattcacctcactaaatcacagaggccaatgtgagctcttcatgctaaaggggacacatcagagcttctggcatgttcttttttttttttttttttgcaacatgtgtaaaagaataaaaacgtctgaattatattagtgcttttgtcrtctttgaaagtcctagagtgatattccaatatagtaatacataagcgcaaataggcacaagagaaaaatctggaaattctttgtagacctggagacatgggtgctctcatgcagaggaaagtaaatctatcccagccctttgtcactgaccttgggaaatgttgcttgagctgttgagtcctggctcctgtgcaaaagcaaaactccctgg

SEQ ID NO: 277074 - DNA, 582 bp, Homo sapiens
ttcatctctcattagcactttaacattttctacaaataatatttcttgtgtttattmctaagtatgttatcatttatgttttgtgctattataacatgggtcttttcttcccttagagcttgaaattagacatattgtatctataaaagctattgatttctgaaaattaatttattaaatttttattttgtaaaaaaaaaaatcatctaaacctgtaacaaaactcatttttaaaaagaagtacctaagtatagagaggaagactgaaagtcagcagtcatcatttaactttataacacttgtggcccttcaatacattctggaggaccgctgctctaacacaaacatagaacgaatgctggcctcattttgctttccaaattaaaaagagaaaaaacaaactaatatctgagggaataaactgaaaacagaaagctgcttcatgttagcatacattgagcaaaacttcttccacggatttactcccataggtaaaagctactagcaatagttgacataaaatacagaatgccttttatcttctagatatccaagtaaaacatgaatattttaagacactgt

SEQ ID NO: 277075 - DNA, 584 bp, Homo sapiens
aaccttgaaaacatgccacacgaaagaagccagacacaaaaggtcatatagtgtatgattctctttacatgaaatgtccagagtaggtaaatttacagagatggaaagcagattagcagtttttaagtactgggggaaatagggactggggaataggaaatgactgcttagtgagtatgagrtttgggaactaggccaggtgcagtggctcacatctgtaatcccagcactttgggaggtagaggcaggtggatcacttgaggttaggagtttgagtccagcttggccaacatggtgaaaccccatctctactaaaaatacaaaaattagctgggtgtggtggcaggcacctgtaatcccagttactcgggatgctgaggcaggagaattgcttgaactcgggaggtggaagttgcagtgagctgagattgtgccactgcactccagcctgggcgacagagcgagactctgtctcgaaaaataaataaataaaaaataatactttttttaaaaaaaggtttgggaactagataaaagtgtttgttgcatagcattgcaaatgcactaaataccacttaactgtt

SEQ ID NO: 277076 - DNA, 584 bp, Homo sapiens
aaccttgaaaacatgccacacgaaagaagccagacacaaaaggtcatatagtgtatgattctctttacatgaaatgtccagagtaggtaaatttacagagatggaaagcagattagcagtttttaagtactgggggaaatagggactggggaataggaaatgactgcttagtgagtatgaggtttgggaactaggccaggtgcagtggctcacatctgtaatcccagcactttgggaggtagaggcaggtggatcacttgaggttaggagtttgagtccagcttggccaacatggtgraaccccatctctactaaaaatacaaaaattagctgggtgtggtggcaggcacctgtaatcccagttactcgggatgctgaggcaggagaattgcttgaactcgggaggtggaagttgcagtgagctgagattgtgccactgcactccagcctgggcgacagagcgagactctgtctcgaaaaataaataaataaaaaataatactttttttaaaaaaaggtttgggaactagataaaagtgtttgttgcatagcattgcaaatgcactaaataccacttaactgtt

SEQ ID NO: 277077 - DNA, 584 bp, Homo sapiens
aaccttgaaaacatgccacacgaaagaagccagacacaaaaggtcatatagtgtatgattctctttacatgaaatgtccagagtaggtaaatttacagagatggaaagcagattagcagtttttaagtactgggggaaatagggactggggaataggaaatgactgcttagtgagtatgaggtttgggaactaggccaggtgcagtggctcacatctgtaatcccagcactttgggaggtagaggcaggtggatcacttgaggttaggagtttgagtccagcttggccaacatggtgaaaccccatctctactaaaaatacaaaaattagctgggtgtggtggcaggcacctgtaatcccagttactcgggrtgctgaggcaggagaattgcttgaactcgggaggtggaagttgcagtgagctgagattgtgccactgcactccagcctgggcgacagagcgagactctgtctcgaaaaataaataaataaaaaataatactttttttaaaaaaaggtttgggaactagataaaagtgtttgttgcatagcattgcaaatgcactaaataccacttaactgtt

SEQ ID NO: 277078 - DNA, 516 bp, Homo sapiens
ggcttaggaatcaagcccatgttggccggaggctagaggttaacggtgcaggctgcagggaaattgttcaggcaaccctgggttgggagggagacagagctcttggctttgtatctctttttttagtctgccaatatgtgctgattatggaataacacttgaaggcagtcctaaaccttgagtatattctagtagaaggcaaggagtcagacctaaatgggtttcacrcttcccagcagggctgattctccaaggcaccctctcatgttttctgtgtcttcccgcaaggttgtttccatctgtttaagagaaattgcactgggcacttgtttaaaacggtaagacagattttactggagttctgcagtggaggagggagccttcagcgcaggactaagctcagctctgaatacagcaagggtagatggaggtttacggccgaaaggcagagtgaggaactcagctgatggaaaattaaaaagaggagcttagtatctaaggtgggggaaggtgaac

SEQ ID NO: 277079 - DNA, 926 bp, Homo sapiens
aaagttaaagatgttcctggatagatagtgctgtcattcataaggtagggaactcaggatccaggaggcttatggggttagcggggtgctggtgggaggatcctgagtttgtggtgtttggaaactctacgtgtgagaggtcaatgtgacctcatctgctccagatgctcgcgaagcagctggcagtgtggcatakagatcaagagacaggtcagggttgtaaatcttgatatcatcatggtgtacacgagggtggtatgagaaaccatgagaatggctgagattacagcgggagagaagatatgagttgggaagaggatggagctgcaaaaccaggaggagccacatgtgtggggtgggaagaggagcactgtcctgaaaaccacagagcagacatcagggttttgtattttttttttgagatggagtctcgctctgtcgcccaggctggagtgcagtggcgcgawgacatcaataggactttgagacgacacagagtgcatgtccccttgtgtctgctttctactcaccacgctgaatcaatctgccctcctcctggcatcagcctcctcttcttcctctgactccatcagtctgtctcctcctggtgttgcctggccccagaacaagaacgctaacctctgcagaagtccaagttgggcttatgcatwatttttggtgtgactttcggctcctttaaagaaagaagtttatttgtttcgacttccttattaattgttagttgtatatcaagagcgccccccaagagaaaaataatacttacaaataatcactggaagtcacacactccttccaagggctgtatgttatcaggaaaacactgcacagagagggcatgttcccaaactcttgtggtccccgctgtgcagaatgctgcttgttttggtgaaatattgttaataagg

SEQ ID NO: 277080 - DNA, 613 bp, Homo sapiens
atggaaagggatgtcatatccacctggaatacaaaacattcatggccatattatttataagcctattttctacaaatggctactcatcccttgtgagcttcaggtttcctggttagtttaactaaaattttaagtatatggaatttaaagctactttgaaaactttccccctttcaagtcattgcataaagaatagatcccttcagatgtctgcatctgtcaggcagctggtagctcygtctcctgctcttgcttttaacacctgtcatttgtctctgcacagacctttcttgataattgagatgtgctgtgcatcagggaggaggcttatctgagggtgccgaagagatggtctctggccagatgtttctccttcattagaatgtatccatcagacattgctcatgagaactctttgctagagagtgtctgcctctttcatcctattagctaggataagctgggcttctagttctctcgccaaaaagatggaattagcatctaagaagctgtcgtcataaaagtttttacccttcacaattaatgcaggaagaggtcagtgatggtaaatgaatgccgttgaaatcagccttcatcgttcgtgagcagttag

SEQ ID NO: 277081 - DNA, 646 bp, Homo sapiens
cacatttgcagaaccagtttattccacacctagaacagataaaagactcacactctcggaattaagagatcctactccaacaagaagtgctggggtcttgggtggtggggggcctgtgtatctctggtcaatggtccagcagaaatgatgcgcatttgtgcctcaaggcagttctcagctccacttctagccattgcaggggacacgcacatggttaatagtacaagccactcacaaatcccctagaccttggacaccagtgaaggtgrtggtggcctgatgggaaggctccagtaagtggccaaattggaaatagatggaaactgtttggggagcccatgaagctactacagtgagggatcataggatatatacacagcctgatcttgagcccgtttggacttttctgtgtctctctactcccataatgcctttccccatctcttatggtgagtatgaccatgatctgagcataggtgttatccctcctagtcaggtagagatggcatctcttactcatttttggtccctacaatgccttacatgtcgtaactactgaaaaaaagatgtttgctgaataactgaaagaaagcttaggggggtaaaacataaccatttgattagagaataaaatataagaaaatta

SEQ ID NO: 277082 - DNA, 646 bp, Homo sapiens
cacatttgcagaaccagtttattccacacctagaacagataaaagactcacactctcggaattaagagatcctactccaacaagaagtgctggggtcttgggtggtggggggcctgtgtatctctggtcaatggtccagcagaaatgatgcgcatttgtgcctcaaggcagttctcagctccacttctagccattgcaggggacacgcacatggttaatagtacaagccactcacaaatcccctagaccttggacaccagtgaaggtggtggtggcctgatgggaaggctccagtaagtggccaaattggaaatagatggaaactgtttggggagcccatgaagctactacagtgagggatcataggatatatacacagcctgatcttgagcccgtttggacttttctgtgtctctctactcccataatgcctttccccatctcttatggtgagtatgaccatgatctgagcataggtgttatccctcctagtcaggtagagatggcatctcttactcatttttggtccctacaatgccttacaygtcgtaactactgaaaaaaagatgtttgctgaataactgaaagaaagcttaggggggtaaaacataaccatttgattagagaataaaatataagaaaatta

SEQ ID NO: 277083 - DNA, 467 bp, Homo sapiens
gctcctgtctgagccctttgcagtcctgctggaggtggacaggggaggccaggttatagacggtagagggtcaggaggagttgcctgtaggaattggactgagccagcccataaagggcccaccaggcagagccaggggattaaacaccccaactgcccttcatcctatattctactgtggtccccttgggtgaaccccctagaagccagaggccagggagccctgtggacatggtccatgcaggtcagcctgtgaaggatgaagtggatctagagagatggagaggggtccaccagagaacaggggtccaagggcacagggayacacagctaacccagacactcatgatcctgagggcccctggaggagctgacagaggggtgatgtgttctgcctggaggctcctgggaaggctccaggtacaggtccaatgtgagcggccttaataggtctacccaggcaagaa

SEQ ID NO: 277084 - DNA, 351 bp, Homo sapiens
gaggagataaaagatgagtttgtcaggaggggtggcagtcgtccaaaggctctgcaagcacattctgcatctcagtggaaaagcccaacctatcagtcaatgtggagcagaggtcagcttcatggatatcaattagaatttcttttccccactttctgaaatgtgrcctgacatcctcatgatctgcttgggtttccaaagactctggattcttgcaaactagctaataactgttaagtgcaagtggttgcacagtgagagttggaatccagagtttgagaacaaggctaaagagttctgggaatccttagtactggctctgagatgggagagtgctatggtgccactgtt

SEQ ID NO: 277085 - DNA, 467 bp, Homo sapiens
attaggtaactatgtgattatcaggggacacatgggcctttttcactcctgtggctctagaacttcatgagcagttccctccctgggctgatcctgcttttaggtgttcattttttctttcccttgtggaggctcctttacmatgtggccatcttcagtctttcctgcccctccatgcaggattatggcagacgatatcctgcctggaagacctaggatactgtttgtggagcataaatatgatacaccctcagcccctgactcctcaccaagcacaatgtttggaaacaacaacaacaacaaaaactttttaaaactacagggtagcagagaacacaatgtatggtaggaaataaacaattttctttttcttttcctcattttttttcctgcaactttgagttctggggcacatgtgcaggtttgttacgtagataaacatgtgccatggtggtttgctgcacaga

SEQ ID NO: 277086 - DNA, 550 bp, Homo sapiens
gggaataattgtatgagtgaggatgcccttcaatgcaagacttcaaacacagaagtcatgaaaaactgaaatcattgactacataaaaaattggaatgttgtgcatagtcacaaaaatataccatgaacaaaatcaaaagataaatttgaaattggcagaaatatattgagcactcgtatgtgagacaaaagataaattttcttaatgyataaagagtttctaaaatagataaggaaaaacaaaggaaaaacggtcaaaggatacaaatgggaagttcacagaagaaaaaaatttagaatttccttaaacatgaaaatatgtttgacctcactataaagaagaaaatacaaagtattgcaacctgaaaataatttcataagatggaaaaattagagatcagtctccaaacataatgcaaaaattttaaacaaaatatcagcaaatcaaagcaagtaatatgtaaaaataataatatatattaaaatcaagtgggatttattgcagggatgcaagggtggcttaacaataaatcaatcaatgcaatataca

SEQ ID NO: 277087 - DNA, 556 bp, Homo sapiens
ttggcaccagttccttttaaagaagctgcaattggaaacgtaaacgcagtgagaagatgcagccagtgagagcaatgcacccagctcctgacccacgaggtccttctggggacactgagacttcttttagaagtgagtgtaatgcagtcacttttcaaagacaagaatcattcattcttgacccggcagggggctcccacaamcttgtccaggccaaagggcaggtgagactcaccagggcaacgatttgtctcaggaggactggccctgagcccggtggcccaagtcacccaggagcagcgcagttgggaacctgcagggctgctcctgcagcagagactcctagcagccagggcagtcagggacaggctgattacctgttgctctgccactgggaagcctccaggcatacctgcaccctggaaggatgcagagggaggaggcggcacatgaataatgaatatactctcaccttccatcattagcattccattcaaaggacgcaaatgaggcattcatttctcctcctggcttgaaaggagaagtgtctccggaa

SEQ ID NO: 277088 - DNA, 556 bp, Homo sapiens
ttggcaccagttccttttaaagaagctgcaattggaaacgtaaacgcagtgagaagatgcagccagtgagagcaatgcacccagctcctgacccacgaggtccttctggggacactgagacttcttttagaagtgagtgtaatgcagtcacttttcaaagacaagaatcattcattcttgacccggcagggggctcccacaaacttgtccaggccaaagggcaggtgagactcaccagggcaacgatttgtctcaggaggactggccctgagcccggtggcccaagtcacccaggagcagcgcagtygggaacctgcagggctgctcctgcagcagagactcctagcagccagggcagtcagggacaggctgattacctgttgctctgccactgggaagcctccaggcatacctgcaccctggaaggatgcagagggaggaggcggcacatgaataatgaatatactctcaccttccatcattagcattccattcaaaggacgcaaatgaggcattcatttctcctcctggcttgaaaggagaagtgtctccggaa

SEQ ID NO: 277089 - DNA, 456 bp, Homo sapiens
cacccatcaggatggctaaaaagaaacagttggaaaaygccaagtgttagcaaggatatggagcaactaaaattctcaagtagtgctgctggtggtgaatattagtgaaatcactctgtaaaattatttggcatgtcctatgatccagcagatccctcctgcatatatacacaatagaaatgcttacgtatgtttacccaaagacacgtataagaatgtacatcacagctgtgttcattatagccccaaactagaaattattcaaatgcccagaatgggtaactaaattgaatgtttgcacaaagaaatttctctcaacaatgagaataaatgaacacaatacaacaattacacaaatataatgttgtgtgaaagaggtcaaacacaaaaaaacacatattgcatgattccattgacacaaaatgcaaaaataggccaacgatctggccactatgc

SEQ ID NO: 277090 - DNA, 456 bp, Homo sapiens
cacccatcaggatggctaaaaagaaacagttggaaaatgccaagtgttagcaaggatatggagcaactaraattctcaagtagtgctgctggtggtgaatattagtgaaatcactctgtaaaattatttggcatgtcctatgatccagcagatccctcctgcatatatacacaatagaaatgcttacgtatgtttacccaaagacacgtataagaatgtacatcacagctgtgttcattatagccccaaactagaaattattcaaatgcccagaatgggtaactaaattgaatgtttgcacaaagaaatttctctcaacaatgagaataaatgaacacaatacaacaattacacaaatataatgttgtgtgaaagaggtcaaacacaaaaaaacacatattgcatgattccattgacacaaaatgcaaaaataggccaacgatctggccactatgc

SEQ ID NO: 277091 - DNA, 614 bp, Homo sapiens
ggcctttcctttgtctctgctatgtagagagagacggggaaggagaggtgcctgagaagccataggccgcgggtcaaccaggcctcaggaacaggaaaaagaaggagcgaacaccagatttagcatttccagatatctagacaaagagagagataatacttaccaataaatacacttactaatcttggggagttttagaagcatcaaaataattatttaagtataaaaaaaaggagaagcgtgtgtgggaagaaagagcaaggaatgaacctcttgatgcttgaaaaacaggtccaacagggctgagtggggctgaacatgagactgatttacaggaaaactgctagcctaggctaaagaatgcttctgaagcgtggtggygaaactcatttgagtaaatgaagttctgagatcatgagaaacacggttctatttagaggtcagcaattctgcagtggcaatacccagctggaccgtgatcaaggccagctccaccacggcccagcactgggagccaagcgagtcacttacctcctcttggtttcctcatctgcgaaatgggctcaataaccctgaccccatctggacctgaggctggactctcaggtccttct

SEQ ID NO: 277092 - DNA, 614 bp, Homo sapiens
ggcctttcctttgtctctgctatgtagagagagacggggaaggagaggtgcctgagaagccataggccgcgggtcaaccaggcctcaggaacaggaaaaagaaggagcgaacaccagatttagcatttccagatatctagacaaagagagagataatacttaccaataaatacacttactaatcttggggagttttagaagcatcaaaataattatttaagtataaaaaaaaggagaagcgtgtgtgggaagaaagagcaaggaatgaacctcttgatgcttgaaaaacaggtccaacagggctgagtggggctgaacatgagactgatttacaggaaaactgctagcctaggctaaagaatgcttctgaagcgtggtggcgaaactcatttgagtaaatgaagttctgagatcatgagaaacacggttctatttagaggtcagcaattctgcagtggcaatacccagctggaccgtgmtcaaggccagctccaccacggcccagcactgggagccaagcgagtcacttacctcctcttggtttcctcatctgcgaaatgggctcaataaccctgaccccatctggacctgaggctggactctcaggtccttct

SEQ ID NO: 277093 - DNA, 542 bp, Homo sapiens
taaatgttgcagtcatgtggttcataggctttttctttcttttgataaacatagcattgtaagcactttctcatgttgctatgtagactttatattcmttattttaaaggccctacattacatccaacacatctacctccatctccccaactagtctgtggtgggcagaataatgtcccctccacccccaaagatgttcatgtcttaatccctggaacttataaatatgttactttggccaaagggacttggcaaatgagatatagttaataaccttgagatggggaatgtagcctgcattttccaggtgggcccaatctaatccaagggtccttacaagagggaggaagaagggtcagagtcagataaggagatgtgatattggaagcagaagtttgagtgatgcggggctgtgagcctctacaagctgaaaaaggcaaggaagagaattcttccctagtgttttcagaaaggaacccagccctgccaccaccttgattttagccgagtgaggccaggttggacttctgaactctagaact

SEQ ID NO: 277094 - DNA, 542 bp, Homo sapiens
taaatgttgcagtcatgtggttcataggctttttctttcttttgataaacatagcattgtaagcactttctcatgttgctatgtagactttatattccttattttaaaggccctacattacatccaacacatctacctccatctccccaactagtctgtggtgggcagaataatgtcccctccacccccaaagatgttcatgtcttaatccctggaacttataaatatgttrctttggccaaagggacttggcaaatgagatatagttaataaccttgagatggggaatgtagcctgcattttccaggtgggcccaatctaatccaagggtccttacaagagggaggaagaagggtcagagtcagataaggagatgtgatattggaagcagaagtttgagtgatgcggggctgtgagcctctacaagctgaaaaaggcaaggaagagaattcttccctagtgttttcagaaaggaacccagccctgccaccaccttgattttagccgagtgaggccaggttggacttctgaactctagaact

SEQ ID NO: 277095 - DNA, 542 bp, Homo sapiens
taaatgttgcagtcatgtggttcataggctttttctttcttttgataaacatagcattgtaagcactttctcatgttgctatgtagactttatattccttattttaaaggccctacattacatccaacacatctacctccatctccccaactagtctgtggtgggcagaataatgtcccctccacccccaaagatgttcatgtcttaatccctggaacttataaatatgttacyttggccaaagggacttggcaaatgagatatagttaataaccttgagatggggaatgtagcctgcattttccaggtgggcccaatctaatccaagggtccttacaagagggaggaagaagggtcagagtcagataaggagatgtgatattggaagcagaagtttgagtgatgcggggctgtgagcctctacaagctgaaaaaggcaaggaagagaattcttccctagtgttttcagaaaggaacccagccctgccaccaccttgattttagccgagtgaggccaggttggacttctgaactctagaact

SEQ ID NO: 277096 - DNA, 544 bp, Homo sapiens
tgttattgcatgcattttataaaagaagaaactcagaaagggtacacagcccatccactgtaggtcggcctggggccaagcaggatgcaggcctagacctgtctagcctcagcctgtgttgactccaaagttcttaaccacatgcgatgccacatgaccagagcaggtgatttctgtcttcatcagctttattgtcagttcatcatgatgcatcatctctgcgcaggaatccaaaagacctttcagcccttatatttgtgcttcacgaaaagtaatctgtgcacgtcatcttggataactgtctctgtcactcaatagcagtcatagatggaggcagggccccacatctgaattagagctgatggcgctcactgtcacccaaggacaagatgagacatagccaggctctggacaggtcaatggtggcccttgaaattccctcragccatgtcctgacccttttgcaaatcttccaaacttgaaaatattagagcacattattttcctcataaaatgctttcagttacagtcaagcagtgcttca

SEQ ID NO: 277097 - DNA, 554 bp, Homo sapiens
aaattatgcaattgtgactgagtctaagggacacaaacgatcatatggaagaagaaatcttgcagctgaataaactaataacgaacccagagaggttaaatggagggcatgaaataagagaagtgtacaaggttttgtcatggttagactatcctggatttactgttggctgatagaatatgtgagtaggtgacattaaattttacagtagagttatatattccattttatccttttatatactaaaaagtagcaatattatcttcttttgcctaggattacgggacagctaccacagtagaagagatcaaattgcccttaaaaatctccagtctgatgtcacagaggcraaatctgacttcaccaaggtaacatacatttctaacttctagaatagtcagcaaaatgcacccatctataaaatataatcactgacctacttgtgatgtgattgcattttattttatttagtcaaaattgaattaatgtagcaaacaatctaaccgtgctatagatttaattattcttttatcatcttcagcaacaatttgtaa

SEQ ID NO: 277098 - DNA, 586 bp, Homo sapiens
atgtaaaaaccagctcaaattgtttcagaactttttgtccctggacaaaacaaaccagtcctgttttcagggcacattgtattgtagcaattgggtgattgggtggtcattcccctggatggactctaaccctcttggggacgggagcccccacatttgagtcctcattgcctaattctggacatggggaaataacaaggagatatgagctcagacagtaaaggacccaaggccaggtttgacttcagtcaagttaacccctcagagcctgtgtcctgcctgcgaaatgagaatacacatcacgctcactttagggaattgtttaaggcatcaaatgctcttagcacaagtgcctggcacattgcagaagctaacaagtggcagctgccaataggtatgagagctaattaaatgtttgctgaactgggctgaattacaaatgctggatcttcgggagtggacccaatccagagtgtttgggtggcaccttgccactgagaccaggaaccccgtgcaagctggagccgcattagaccaaagcctccaaaattrctgtacacatagagaagagggaggaggagatgtg

SEQ ID NO: 277099 - DNA, 601 bp, Homo sapiens
ctcctgcagtgtttgggtgacctgctctctccttttatgggagtatcattgttgtcattgagcaagatccaaaaagcacatcctccatttccatgatgtctacagaaaaagctctcccatatccttcttccacttccaaaggaagagaagatgatatcaccattgggtccgggccaccttcatttttctactccgtatgtcagaattctagaaatggactctgggtttgygtgtttcttctgctttccctacaccctcagcaaattgaaggaatggggagcaagcggtggctttggaatctcttgtttccgcgtagtgggaagatggtgctgcctttcaacagacctgcgagctctgcactcgcatttgtttcccgtgatggcctccatggaggtcacactcactccattagcacccgcctcctggcagcagtgggccacttcccacctcactccttcaggagctgagacctaggtggtttgctcagagcatctgagaccacattcatgaaagagccacatattatcaccccaggaaattttaaaacagatctttgaatatattgtgagattgtgagagaagtattcacaatgtaaacccc

SEQ ID NO: 277100 - DNA, 601 bp, Homo sapiens
ctcctgcagtgtttgggtgacctgctctctccttttatgggagtatcattgttgtcattgagcaagatccaaaaagcacatcctccatttccatgatgtctacagaaaaagctctcccatatccttcttccacttccaaaggaagagaagatgatatcaccattgggtccgggccaccttcatttttctactccgtatgtcagaattctagaaatggactctgggtttgtgtgtttcttctgctttccctacaccctcagcaaattgaagraatggggagcaagcggtggctttggaatctcttgtttccgcgtagtgggaagatggtgctgcctttcaacagacctgcgagctctgcactcgcatttgtttcccgtgatggcctccatggaggtcacactcactccattagcacccgcctcctggcagcagtgggccacttcccacctcactccttcaggagctgagacctaggtggtttgctcagagcatctgagaccacattcatgaaagagccacatattatcaccccaggaaattttaaaacagatctttgaatatattgtgagattgtgagagaagtattcacaatgtaaacccc

SEQ ID NO: 277101 - DNA, 585 bp, Homo sapiens
actgtgcatcaataaatgcctgttgcttaagctgccaagtgcatggtgctttgctacggcagtcctatgaaactaacacaaaggtttaccacttgccacgtgttgttaataggtgtatcctttccccttctcctataactcctccagcaaatccatgtttgattaaccatatttaacgcagagggaatatgtgactcagaggagtgagtaacttgttcgacatcccacagctccaaagtgaaggaactagaattcaaacccaagttggatgccttggaagcccatgcttaaccctgtrccattctacctctgcttattctagatatggctcccatcacctgatcatgaagggtttcctccaaaagtagctaaaagcacagctaattgctaaccaggccagggaaaccccaatgccaaggcacgatgaaatatttaatatgttgaagtgaggcatgccagctgagctggagccaggaactggtccttggctgatgggcaagagatttctgctgcataaagctgggcctggagcaaaattagctttgaagttgattaaacatccccagctgcagggccatggggaga

SEQ ID NO: 277102 - DNA, 585 bp, Homo sapiens
actgtgcatcaataaatgcctgttgcttaagctgccaagtgcatggtgctttgctacggcagtcctatgaaactaacacaaaggtttaccacttgccacgtgttgttaataggtgtatcctttccccttctcctataactcctccagcaaatccatgtttgattaaccatatttaacgcagagggaatatgtgactcagaggagtgagtaacttgttcgacatcccacagctccaaagtgaaggaactagaattcaaacccaagttggatgccttggaagcccatgcttaaccctgtaccattctacctctgcttattctagatatggctcccatcacctgatcatgaagggtttcctccaaaagtagctaaaagcacagctaattgctaaccaggccagggaaaccccaatgccaaggcacgatgaaatatttaatatgttgaagtgaggcatgccagctgagctggagccaggaactggtccttggckgatgggcaagagatttctgctgcataaagctgggcctggagcaaaattagctttgaagttgattaaacatccccagctgcagggccatggggaga

SEQ ID NO: 277103 - DNA, 606 bp, Homo sapiens
atatcaggagaaaaaattaacaatggcaacaaaattataagacctgcaggaagacatctaacatcaaatatgcaagacctgtatcaaaagtatcataaaattatagtggaggaaataaaaggagaacttaatgaatgagaagacttaacatctttctagatgaaaaagtaaaaactgtaaagtcatacctgcccaagttaatttatgaaattccagatttaatcaaaaacttgacaattagatttataaattgaagtggaagacagaatccataagaataaccaaaggctgggtgcagtggctcatacctgtaatcccaacactttgagaggccaagacaggaggatcacttgagcccaggagtttgagaccagcctgggcaacacagtgagatcccatytctacaaaaagttaaaaagttggtcaagcgtggtgccacgtgcctaccgtcccagctactcaggaggctaaggtagaagaatcacttgagcctgggagccagacggtgcagtgagctgagatcatgtcactacactccaacctgggagacagggtgacaaagtgagaccttgtctaaaaaaaaaaaaaaaaaaagaaccaagatag

SEQ ID NO: 277104 - DNA, 606 bp, Homo sapiens
atatcaggagaaaaaattaacaatggcaacaaaattataagacctgcaggaagacatctaacatcaaatatgcaagacctgtatcaaaagtatcataaaattatagtggaggaaataaaaggagaacttaatgaatgagaagacttaacatctttctagatgaaaaagtaaaaactgtaaagtcatacctgcccaagttaatttatgaaattccagatttaatcaaaaacttgacaattagatttataaattgaagtggaagacagaatccataagaataaccaaaggctgggtgcagtggctcatacctgtaatcccaacactttgagaggccaagacaggaggatcacttgagcccaggagtttgagaccagcctgggcaacacagtgagatcccatctctacaaaaagttaaaaagttggtcaagcgtggtgccacgtgcctaccgtcccagctactcaggaggctaaggtagaagaatcacttgagcctgggagccagayggtgcagtgagctgagatcatgtcactacactccaacctgggagacagggtgacaaagtgagaccttgtctaaaaaaaaaaaaaaaaaaagaaccaagatag

SEQ ID NO: 277105 - DNA, 600 bp, Homo sapiens
ctttaatccttaccaaaaaataaaaaataatgacctgaagaaacctgatcttaaccaatcagttatttttctgttgttctatttccctgttcccaccttacaaggaaaataaccgaaatgaccaatctgctttttcttgtgtttctgctttctttagctcttttctgtttgtaaaaccaacctcctctgtttacctcactggaacacaggctattttatggaatgaagtgttgcccaattctagaattgcaaataaagccaaagaaaatcttttaaattaaattgcagtcattttatcttttgacaagtattttaaattattttgtggaaaagttgtgttctgcatcctggattcaaccaaacctgaggtcaaaaatattcaaaaaataaaaaacagcaatacaacaataaaacataatgcaaatgaataatattgtataacaattatttacagagcatttacattgtgttaggtattagaggtaatctagggggatttaaagtagatgsgaggatgcatgtaggttatatgcaaatactagaccattttattacatacaagggacttgagaatccttggattctggcatccacaaaggg

SEQ ID NO: 277106 - DNA, 608 bp, Homo sapiens
aaagaaaattaggtggagacatcaagatgccattttataacctattaagttattaacaattaggaaaaaaaacactggcagtgagtgtatcatgacttggcagtttcatacatgtaggaggatgaactggcagaatctttgttagacagtttgataatatgagtggtagacaaaagccatttgggtgcatctttacttataaaaaaatcagaaataygaactgtccttcaaaaatgatgaagcatctatgcaatttagtgattgctaacaacactgaggttttaaaaaaaagtttccaagataatacattttgcaattccattataccatgttgatactttttaagcttctgaaacccaaggaggaaatataaattctcctagttaggtacattaaggaccctttgtcttttagttacttcgtaagttttaaaacatggttaacataattcacgtgtcatggagctaagagtcggtatgaaaaataatggtaatttctaaattttactggttgatgcaaacgcgtttcataaagataacatattcaaaacctatacaaaatctacccatcttgatggtattaagaaaaataacccatgtcatcactgt

SEQ ID NO: 277107 - DNA, 608 bp, Homo sapiens
aaagaaaattaggtggagacatcaagatgccattttataacctattaagttattaacaattaggaaaaaaaacactggcagtgagtgtatcatgacttggcagtttcatacatgtaggaggatgaactggcagaatctttgttagacagtttgataatatgagtggtagacaaaagccatttgggtgcatctttacttataaaaaaatcagaaatacgaactgtccttcaaaaatgatgaagcatctatgcaatttagtgattgctaacaacactgaggttttaaaraaaagtttccaagataatacattttgcaattccattataccatgttgatactttttaagcttctgaaacccaaggaggaaatataaattctcctagttaggtacattaaggaccctttgtcttttagttacttcgtaagttttaaaacatggttaacataattcacgtgtcatggagctaagagtcggtatgaaaaataatggtaatttctaaattttactggttgatgcaaacgcgtttcataaagataacatattcaaaacctatacaaaatctacccatcttgatggtattaagaaaaataacccatgtcatcactgt

SEQ ID NO: 277108 - DNA, 467 bp, Homo sapiens
caagttggaataaatcacaatagaaaataatggaattcttcgcgtacagtaagcttcatgaaactttgtccgttatatrtacacatgcttttgtggtttgccatgtgaaaatgtacttcttattgtgagtgatagttaacagcacgtgaaagccaccggcccctgttatacagagtccttcactcacggccctgtgccaaccaggccattagcatggtgatatggtttggctctatgtccccacccaaatctcacctcgaattgtaatctccacgtgtggaaggagggacctggtgggatgtgactcgatcacgggagtggtttccctcatgcggttctgatgctggtgaaggagttcttacaagatctgatggttttaaaagtggcagtttttcttgtgctctctctcctgtcaccatacaaagaaggtcctagcttccccttctgccatgagtgtaagtttcctg

SEQ ID NO: 277109 - DNA, 467 bp, Homo sapiens
caagttggaataaatcacaatagaaaataatggaattcttcgcgtacagtaagcttcatgaaactttgtccgttatatatacacatgcttttgtggtttgccatgtgaaaatgtacttcttattgtgagtgatagttaacagcaygtgaaagccaccggcccctgttatacagagtccttcactcacggccctgtgccaaccaggccattagcatggtgatatggtttggctctatgtccccacccaaatctcacctcgaattgtaatctccacgtgtggaaggagggacctggtgggatgtgactcgatcacgggagtggtttccctcatgcggttctgatgctggtgaaggagttcttacaagatctgatggttttaaaagtggcagtttttcttgtgctctctctcctgtcaccatacaaagaaggtcctagcttccccttctgccatgagtgtaagtttcctg

SEQ ID NO: 277110 - DNA, 467 bp, Homo sapiens
caagttggaataaatcacaatagaaaataatggaattcttcgcgtacagtaagcttcatgaaactttgtccgttatatatacacatgcttttgtggtttgccatgtgaaaatgtacttcttattgtgagtgatagttaacagcacgtgaaagccaccggcccctgttatacagagtccttcactcacggccctgtgccaaccaggccattagcatggtgatatggtttggctctatgtccccacccaaatctcacctcgaattgtaatctccacgtrtggaaggagggacctggtgggatgtgactcgatcacgggagtggtttccctcatgcggttctgatgctggtgaaggagttcttacaagatctgatggttttaaaagtggcagtttttcttgtgctctctctcctgtcaccatacaaagaaggtcctagcttccccttctgccatgagtgtaagtttcctg

SEQ ID NO: 277111 - DNA, 527 bp, Homo sapiens
taagtttccaacacatgagacttgggggacacatttaaaccacagcaggcggccagaacaaaataccacagatggaatggcttacacaacagagatttattttcctacagttctggaggcagaaagtccaagatcaaggtgccggcaaggttggtatctcctgaggcctctctgttttgcaaacagtcaccttctcacagtgttttcatatagtcattcctctgtgcatgtgcagcctggagttcttttcctctccttataaggacatcagtcctattgggtcaggccctcacccttaygacctcatttaaccttaatcatctaaaaggccctatctccaatacagtcacattgtaggttttaacttcaatctgtgaatttttgggggaacacacaccatgttaaagtgagatttattctaagaagagaaatgttattcaatattaagaaatatattactatcattattcatattaataagttaaacctactcatacattttattttaccgagtatacatacaatgg

SEQ ID NO: 277112 - DNA, 498 bp, Homo sapiens
catgtaaagccacataggtggaacaaaagtcccaagtcgcaattcctgccatatagagcttataatctcagcagggggtcaaggggtaaacgtacaacaaagccacggagagctcaagccccagaggagtggtacccagaagggagggtgcctgggctcctcctggccttgtctctggccatcccggaggtgtccatcaattgcacccacttttcttagcagtaacactaagggtgaggccagacctctacgtatccttcaggtgctaagattttatrtctatgaattcaaaactagactgttcacaggatatagtaacgtttttactggacctttatagataaataagattgataagtggagaggcagaatggattgatctgattgggtgagaatgtgaagagcttttgactaaggccacagatttgtgaagacaccatttatttattcaaatacaagtttatttcctttttctttacattagagtagtttgcatgt

SEQ ID NO: 277113 - DNA, 590 bp, Homo sapiens
atttttaaatgaccaatgttaattaccctagtaattagctaggaatgggtgggagctggaattaactagaattaacattcctagtaattaactaggaacgggtgggagctggaattaactacaattaacattcccagtaattaactaggaatgggtgggagctagaatttgggacagaatttgacatttggcaagccccatagttgtgaagatttaaatmaaaaaacctctcttggttcttgtgcttagaaccttaaatggaaatacttcaaattaaaatagtaagaattttgataacaaacagatgtcttcctgggggtcatcttgggtatttagaatgacatctacatgtggtaagaataggctgagggggaatggggctttgcatgagaaaaaaaggatgaggaggggatattgagctgaggagaaacacggcagcaaattgaagtgagtctgtaacttgccagccattgagtgcttcatcttggaagcgagtcttccagcctcagtcaaaccttcagatgactgcagccccagctggtgtcttgactacacttgactacatgggagatcccgagtcagaacccaac

SEQ ID NO: 277114 - DNA, 545 bp, Homo sapiens
gagactgaagtcacaaaaagaccaatgccccagcttgaagacagtcaggcagaggtgggaactctcctttattccacctttttgttctactgaggcccttaacagtctggatgaggcccagtcacattgaggaaggtgacctgcttcatgtatctacaaatttaaatgttaatttcatcagaaaacatcttcacagacacgtccagaataatgcctaacctgatatgtgggcatcctgtggcccagtcaggtcaacacatgaaattaaacatctcatataatcatcctcattgttcttcatggcatggcttttctaatattgttaaataatattttccarttaaacatcatcagcttgtctagctccaggtacaatactggtggcatttttattgggattgtattaaatgcctcaatgcctaaatcaaactgtaaacttttggatagtcttatccaagaatcagggctgtcttttattagattttaatactctcattctttatcactccctaagccagcttatcttgtctcagctgcctatgaaa

SEQ ID NO: 277115 - DNA, 553 bp, Homo sapiens
ccaggcacagaaaaacaaatgctacacaatgttatttacatgtggaatctaaaaaagttgaactcatagaagcagagtagaatggtggttcctgggggctgggaggcaggggtagaagggtgttgagagcatgggaatatattagtcaaaggatacaagtttcagttaggaaaaataagttccagagacctacgggacagcatggtgattacagtaaataataatgttttatatacctgraaattactgagagtagattttaaatgttcttatcacaaaaaaataagtatgtgaggtgacagatagatagcttgattcaataattttacagcgtatacattttccaacatcacattgtacatcataaaatatacaactttatttttacttaaatataaataaaaataacataaaacagagacatataaattgaatatttagccaaaaaaaaaaaaaaacccagaaatttagagaaggcaatcatttagaattaaccattggctggatcacatgatattacagctagtagaaaaattagaaattattgaatcca

SEQ ID NO: 277116 - DNA, 588 bp, Homo sapiens
taggacattcatgagtttactgtcaccatgtcagctcagtcatatttatccttcttcacaatagaaagtcacaggggaaatcctgatgtttaacatcctctccatgggcagagttctcagggctctgccaacatcgtctctgagctttcatgcccttcactttcatagctggccaatgtgttctctcttcagacatctttgcaccttcactcacgttgcagtttagtgtcactgacacaggagccaatctctttaagatgattttccagacatatgcattaatctacaacatgcatattttaaagttcaaagaggacagttctatttttctttttttctgtctttctatgaaaacttmcctgccaccttcactggcctcattgcgctagtatatatttatcaaactattgtagtggcttctgtatatattttcagagcaagcatatgccctcaattttagtataaatatcatatttttgcataacagatactagttctgttcaagcaaatttgtcaatgataggtgagatatcttaaaaataactacttccaccaagttgccacaaaatctgtcattatcatcgtgac

SEQ ID NO: 277117 - DNA, 885 bp, Homo sapiens
tagatattttatattagttttatctctactatgcaaaactaccaaaaggtaaaaagaaaattattatcccctaggtaactagagataagaaagaataaatagttccagttgcatagctggtaggtgttataacaagttttttaagccaatatttttcacaaagtttcagaacccrgagtctcaggagaaaaggagggaagtaaggcatatttaaggagcatggggataaaataggactgggcctacacaactttatataaaggtattgacatctgtagggagaacaaagaagcaaaaagaaagcctctttcatggagctaccagaaaagtgaagaccaaatttgcctataatgaatataattgagatgcaacctgatagaaacggggagctattagccagtcagctcatggtttcagaaagagtttttatgaagaaagagggwtagatattttatattagttttatctctactatgcaaaactaccaaaaggtaaaaagaaaattattatcccctaggtaactagagataagaaagaataaatagttccagttgcatagctggtaggtgttataacaagttttttaagccaatatttttcacaaagtttcagaacccagagtctcaggagaaawggagggaagtaaggcatatttaaggagcatggggataaaataggactgggcctacacaactttatataaaggtattgacatctgtagggagaacaaagaagcaaaaagaaagcctctttcatggagctaccagaaaagtgaagaccaaatttgcctataatgaatataattgagatgcaacctgatagaaacggggagctattagccagtcagctcatggtttcagaaagagtttttatgaagaaagaggg

SEQ ID NO: 277118 - DNA, 442 bp, Homo sapiens
tagatattttatattagttttatctctactatgcaaaactaccaaaaggtaaaaagaaaattattatcccctaggtaactagagataagaaagaataaatagttccagttgcatagctggtaggtgttataacaagttttttaagccaatatttttcacaaagtttcagaacccagagtctcaggagaaaaggagggaagtaaggcatatttaaggagcatggggataaartaggactgggcctacacaactttatataaaggtattgacatctgtagggagaacaaagaagcaaaaagaaagcctctttcatggagctaccagaaaagtgaagaccaaatttgcctataatgaatataattgagatgcaacctgatagaaacggggagctattagccagtcagctcatggtttcagaaagagtttttatgaagaaagaggg

SEQ ID NO: 277119 - DNA, 442 bp, Homo sapiens
tagatattttatattagttttatctctactatgcaaaactaccaaaaggtaaaaagaaaattattatcccctaggtaactagagataagaaagaataaatagttccagttgcatagctggtaggtgttataacaagttttttaagccaatatttttcacaaagtttcagaacccagagtctcaggagaaaaggagggaagtaaggcatatttaaggagcatggggataaaataggactgggcctacacaactttatataaaggtattgacatctgtagggagaacaaagaagcaaaaagaaagcctctttcatggagctaccagaaaagtgaagaccaaatttgcctataatgaatataattgagatgcaacctgatagaaackgggagctattagccagtcagctcatggtttcagaaagagtttttatgaagaaagaggg

SEQ ID NO: 277120 - DNA, 617 bp, Homo sapiens
acaactttatataaaggtattgacatctgtagggagaacaaagaagcaaaaagaaagcctctttcatggagctaccagaaaagtgaagaccaaatttgcctataatgaatataattgagatgcaacctgatagaaacggggagctattagccagtcagctcatggtttcagaaagagtttttatgaagaaagagggtagagggctaagatttcaaaaagaaatatttcttggaaatggtttttctcttttttctcttttcataagaatggagaaactttctactaatattcttctgagaaacttcctatagttgtttattttcaggaatgatactgagctcatttttcaaagcacctgaatgggaaygtcctcaattttgtagagagcatctacaataaacctagagccaataaaaataaaaagaactgtacataaacactgaactctaattgaaaccattgtttttagtagggatataagttaacaactctaatgttttctggaattgaacagttaagtaaatagatggaggattattggggccaggtttcttcctattagagtgtgaggttaccaataagcaagtggaggaggctacagtaatccatgtagtaat

SEQ ID NO: 277121 - DNA, 552 bp, Homo sapiens
gatattaataaatacttgaagaaataaatgggaataaaacagatcaatgtgcaacacagaagacttccaaataatttatgtagttactctgccctcaaagagaaggagaataacttcccactccttaagcatgggttgcacatagtgacttccttccaaagactgtagtatrggacgaaagaaaaaataagtagatttgccatggagaaatctgacaaatactacctcatccaggtagttgagattaacgtcaacactgataaattatgttgatgataggtactctttacctgcccccaaatcttttaactatactctcaatatgagaaacatatcaagtaaataccaataagagagaatcttacaaagtacctgagaagtactcctcaaaaatatcaagttcatcaaaaccaaagaaagtctgagaaactgtcacaggcaagaggatcctaagaagacaagacaaataaatgtaatgtgttatcctgagtgggaaacttggaatggaaaaaggacctctggtaaaaactaaagacagctgaataaactatg

SEQ ID NO: 277122 - DNA, 552 bp, Homo sapiens
gatattaataaatacttgaagaaataaatgggaataaaacagatcaatgtgcaacacagaagacttccaaataatttatgtagttactctgccctcaaagagaaggagaataacttcccactccttaagcatgggttgcacatagtgacttccttccaaagactgtagtatgggacgaaagaaaaaataagtagatttgccatggagaaatctgacaaatactacctcatccaggtagttgagattaacgtcaacastgataaattatgttgatgataggtactctttacctgcccccaaatcttttaactatactctcaatatgagaaacatatcaagtaaataccaataagagagaatcttacaaagtacctgagaagtactcctcaaaaatatcaagttcatcaaaaccaaagaaagtctgagaaactgtcacaggcaagaggatcctaagaagacaagacaaataaatgtaatgtgttatcctgagtgggaaacttggaatggaaaaaggacctctggtaaaaactaaagacagctgaataaactatg

SEQ ID NO: 277123 - DNA, 552 bp, Homo sapiens
gatattaataaatacttgaagaaataaatgggaataaaacagatcaatgtgcaacacagaagacttccaaataatttatgtagttactctgccctcaaagagaaggagaataacttcccactccttaagcatgggttgcacatagtgacttccttccaaagactgtagtatgggacgaaagaaaaaataagtagatttgccatggagaaatctgacaaatactacctcatccaggtagttgagattaacgtcaacactgataaattatgttgatgataggtactctttacctgcccccaaatcttttaactatactctcaatatgagaaacatatcaagtaaataccaataagagagaatcttacaaagtacctgagaagtactcctcaaaaatatcaagttcatcaaaaccaaagaaagtctgagaaactgtcacaggcaagaggatcctaagaagacaagacaaataaatgtaatgtgttatcctgagtgggaaasttggaatggaaaaaggacctctggtaaaaactaaagacagctgaataaactatg

SEQ ID NO: 277124 - DNA, 578 bp, Homo sapiens
aaaaacacaaaaaaaccacaaagtgaaacagaacttcttttacaaagttctttatatcaatttgctaactttgtttgagacagttattctgaggtaagtgtataatggaagtggtagtgtttatttaagaacgaccaagggaaaaatcatctctgagctcttaattaaatgataagataatattttcctccttcaagatgtaatgactgcttcaaaatatgtcctgtttctgcattttaaaaataacagatctcttgtcctttataatgtgtcctaaaataccttcagtttgggaaggagatttagttcagggtcagttagatttcaattatttgaggaactgtatttaactatgactcaaagccaggtgtataatagatgccaagggaagaaataattcacccagctagttcagactcgcagtgaatttctttagcccagtaagctattaccttcgatgtgtataaatgcaggcccccattttatccrcagccaaacattttaagacacagtgtgacttggagcatttcataaattcattcattccaacagtaattttgttctccaagtatgttttc

SEQ ID NO: 277125 - DNA, 460 bp, Homo sapiens
ctccttccccctcaagactactgtgaattccttctctgttcattttcttgaactatatatctttattctttgctcctttgtcaatttatttacacattcaaaaacatttttcatttatcaggaccaactttgttctaaatactaagaataaagacatgaaaacagattacgtattagaaagcgtgacatacatataaacatatcataattctgtttgaaaagtttatcatatggggctctttaggagtgctgaaatggcataggttgtggattataaatcatggggcgaggtatggaaatgctttcaaaaggaattatgaaaattttccataacatagctctttgttgtttttactgggctgtgatgttcttgaggattatattttcctcaccttcctttacaaggactaacrctaatggtgaatgaaaaaataaataagtgaatgaatgtgctttcttt

SEQ ID NO: 277126 - DNA, 594 bp, Homo sapiens
agctatgataaagctacatgagcaatgagcttgaaaacataagataaaatgtttgactttatctggtagctattgtagktcactaaggaataataacaaatgacttgggcttggaggaacactgattcgatcaaatgatttagaggagaatgtgacagcagcttgagatccagttagaaggctaatacacacgtatagataagtgataaaagttcttgacccaaaatagtaccatcattaatggaaaaggaaaaactccacaacactttaaaagtgacttagtgcaaatggcaaatccatcaatctacactttgtgcttcccacattgaccaccatatttatattcaatatttccatctattaaaatggaagccaatattttgagcgactgagagaaaccttttcaggccaagaaacatgatcacatgttttggagaatttatttctatgatggaaagaatttaaaataatggaaatatgttttggaaaatgttagtatgaactgaacttgtgtttggtgaatttagtagaaattcacattgttctagcaccctgaactgtcccacacttactgtgcatagattatggtgtggt

SEQ ID NO: 277127 - DNA, 580 bp, Homo sapiens
agggtactctaagatacaggtgaatagctatgataaagctacatgagcaatgagcttgaaaacataagataaaatgtttgactttatctggtagctattgtagttcactaaggaataataacaaatgacttgggcttggaggaacactgattcgatcaaatgatttagaggagaatgtgacagcagcttgagatccagttagaaggctaatacacacgtatagataagtgataaaagttcttgacccaaaatagtaccatcattaatggaaaaggaaaaactccacaacactttaaaagtgacttrgtgcaaatggcaaatccatcaatctacactttgtgcttcccacattgaccaccatatttatattcaatatttccatctattaaaatggaagccaatattttgagcgactgagagaaaccttttcaggccaagaaacatgatcacatgttttggagaatttatttctatgatggaaagaatttaaaataatggaaatatgttttggaaaatgttagtatgaactgaacttgtgtttggtgaatttagtagaaattcacattgttctagcaccctg

SEQ ID NO: 277128 - DNA, 580 bp, Homo sapiens
agggtactctaagatacaggtgaatagctatgataaagctacatgagcaatgagcttgaaaacataagataaaatgtttgactttatctggtagctattgtagttcactaaggaataataacaaatgacttgggcttggaggaacactgattcgatcaaatgatttagaggagaatgtgacagcagcttgagatccagttagaaggctaatacacacgtatagataagtgataaaagttcttgacccaaaatagtaccatcattaatggaaaaggaaaaactccacaacactttaaaagtgacttagtgcaaatggcaaatccatcaatctacactttgtgcttcccacattgaccaccatatttatattcaatatttccatctattaaaatggaagccaatattttgagcractgagagaaaccttttcaggccaagaaacatgatcacatgttttggagaatttatttctatgatggaaagaatttaaaataatggaaatatgttttggaaaatgttagtatgaactgaacttgtgtttggtgaatttagtagaaattcacattgttctagcaccctg

SEQ ID NO: 277129 - DNA, 594 bp, Homo sapiens
agctatgataaagctacatgagcaatgagcttgaaaacataagataaaatgtttgactttatctggtagctattgtagttcactaaggaataataacaaatgacttgggcttggaggaacactgattcgatcaaatgatttagaggagaatgtgacagcagcttgagatccagttagaaggctaatacacacgtatagataagtgataaaagttcttgacccaaaatagtaccatcattaatggaaaaggaaaaactccacaacactttaaaagtgacttagtgcaaatggcaaatccatcaatctacactttgtgcttcccacattgaccaccatatttatattcaatatttccatctattaaaatggaagccaatattttgagcgactgagagaaaccttttcaggccaagaaacatgatcacatgttttggagaatttatttctatgayggaaagaatttaaaataatggaaatatgttttggaaaatgttagtatgaactgaacttgtgtttggtgaatttagtagaaattcacattgttctagcaccctgaactgtcccacacttactgtgcatagattatggtgtggt

SEQ ID NO: 277130 - DNA, 634 bp, Homo sapiens
attttttgtttcttcatatttcccttggtaggttgtgtatttctaggaatttatccatttcttctagttatataatttgttaatgcataattgttcatagtagtctcttacaatcctttttatttctgtggcatcagatgtaatgtctcctttttcatttctaattttagttatttgggttgtcctttttgtttttttctcagttaatctaagggtttgtaaattttgttgctcctttttaaaaaagaactcttagttttttaaatttgttctgttttttactttctatttcatttatttctgttctaaccttttattatttccttccttttgctaattgttggtttcrttttctcttgttgtagttcctcgtggtataaaattgagttgctgatttgcaacctttcttctatttgaaggtaagatttgctaccataaacttcctttttggtacaggttgagtatcccttatctaaaatgcttaggaccagaagagtttcaaattttggatttttttcagattttggaatattcgtattatgcttgctggttgagcatctctaatctgacattctgaaatatgaaatattccaaagagcatttcttttgagtgtcatgccagcattcaaaacgt

SEQ ID NO: 277131 - DNA, 572 bp, Homo sapiens
acctttcaccataactgtacatacatacactcggcaatgaacattaaggaaaaaataactcaatttgtcatctttgattaataaattgaggatgtttttattaaggcataattcatcaggtgatgtggaaccagagtcacttctaaattattgagatagtctgtaaagtagaagaaatacaaacaggatagggtaaggattaacaagagataatgtatcatgcatacacagaaataatcatttttttaaaaaaatattaagataaacctcttgggttatggcttatcaatgctaaccacattattcagttagttagatatctaactagcaataattcaygtgtatttaaagccaaagcttttctgcaaggttgagggtgcagcatgtatgggtgctagtaaggagaaacaggctgctccagcatggacattcttagaggacactgtatttttttatggctatttaaaccattttacagtaatagcaacagatgtgaataaataaacctgaaatcattgtgtggagtttcatttggtacttttgcttcaagctagttgttttggtttttttct

SEQ ID NO: 277132 - DNA, 567 bp, Homo sapiens
gaagtgaagcaaaataatacaaagttggtgcacatacgaaaaagcctgtaaagattgtaacaaaacattggttttattttttgacttagcatcacagaaaactaataagcagcagaataatacttaaccttagcttgttttattctcattttttttaaagaatagtttttaaaagacaggttatttgcctaaatgtatcattgattttctcttttgttccctagtcactagaactattaaatagctgctttatgataaatgtgattatgacgatgatactcatcattagtagtagtaatactttacattctacaaattatgtagaagttataatatcatgtattgtgagtatctttcaggaagactttgaagaattttgagggacagcatattgctatacagccttaagtatattagaatatactatatctttgrtttagataagaagctttaaccacagttagattgtagttaattattcagtggctgcttatctcttttatggataatccaagtcctttgcttttcctgtcattaatgtaaagctcattagttccttttcataga

SEQ ID NO: 277133 - DNA, 619 bp, Homo sapiens
tattatgttgtgtttttttcatttttcttgagatggtttctaatttctcttgtgatttttctttgaccaattgtttgtttaagatcatgttgtttaatttccacatatatgtggattttttgttcgtttgttttactcctgttataactttttagtttcattccattgtggtcagagtagataccttgtatgattttaatcttctaaaatttcagatttgttttgtgacctaatataatctatcctgaagaaagtttaatctgtgcttcagaagaatgtgtttactgcttttgttggttgcagtattctgtgtgtgtgtgtgtctgtgtatgtgtgtgtatgtatgttccaatttgtatatagtgttatccaagtctgctgtttcctcataggttttctatctasttgttctatctattattaaaagtcagatattgaagtctcctactgttattgtgttgctgtctatttctaccttctgttttgtcaatgtttgtttcatatatttgggagctcttatgttaggtacatcatatgcatttataattattacgtcttcctaatgaattgaccattttatgattatataatgtctttatttgtctcttgtgacaatttt

SEQ ID NO: 277134 - DNA, 1212 bp, Homo sapiens
aataagtaaaaaatcatgccatggcctataggtgtttctaggctgatgtctaaaagatttcctgtatatcaagccctcactgcagaatccaattacctgttctcagtaaaattgaaaagcactcttcatttgcttagctatttctgcttttctccttttctgccagtcatgtggtctccttacattcagcaatctacttaagaaattgtaytggaaggctgtgcaacaaatctaacctatcctctcgcctctccccacaacctactttaaggcagtttctctccctcttcatgttccaacagtttatcgttgcaaacaacagcatacccaaatggctccttgctgccctttagcttcataaataagcaatgggtataacaaacagattttgcattccatctgcaagctcttctctgagaacccatagcgttttaaaacttcattctgaacccaggaaataaatgtaatgagaaagacacaaaattaagagttacccaggtaaaaataaattgtaaataaagttcatttatattagctatgatctcaggagagctgtttatagagtatgaaacagaacaactccatcaatgcagtwcactatccaggattctaatggcagagattagttttgagaataagttccattaaaawttttttcagctttctagtcatttaagacctttattcaacaaatatttatttggtcacttttaatgttccaggaatgatactggatatactctagtgaataagataacatagtctcttccctcatggaacttatgatctagtaagttagaaaatggcgaagtaaaaaaataaaaataaaaaagcaattctcgcccaataatatgcctttatggagtcaaaaatctagatgtatttagatacctataaatttacttattgatacctataaattactagtgatttggcattctccagatcagcagttgattatctttttcacaacagacttaacactaaggcattatctctgtaaattctatttagaatccacagtaaatttaaaaacttttatgagcaaacaagcaggtattttagtaaaattataaactgattaagaaaaagcagggaaatgtaggaccatgatattttctgtagctcatcatattcagttatgttctatgcagtacaagctgcatcataagttgataatgttcttcaataaatatttgaaagtcacataag

SEQ ID NO: 277135 - DNA, 509 bp, Homo sapiens
atttgcaaataatgacagtcttgcttcttcctttccaagtattcaagttgtgtatttctttttcttttcttattgtacaggctagtaccttccataaaatgttggatgaaaatagctatagtrgtggcttgccgattttgtcgtttttttgacaaggtcacattctgtgatccaggctagagtgcagtggtgccattatagctcactgaacctcctgggctcaagcagtcctttcgcctcagccgtctgagtagcttggactacaattggactacaagaacataccactgctgctgttttttattttttatttttttgtatagatgagatctcactaaattgtccaggctgatctggaactcctgagctcaagtaatcctccccccttggcctccaaaagcgctagaattataggcatgagccaccataaccatcgttgtttattattttaatggaaaatttttagttttcaacactgcatgtattatctttttgtagattgtcgttaa

SEQ ID NO: 277136 - DNA, 509 bp, Homo sapiens
atttgcaaataatgacagtcttgcttcttcctttccaagtattcaagttgtgtatttctttttcttttcttattgtacaggctagtaccttccataaaatgttggatgaaaatagctatagtggtggyttgccgattttgtcgtttttttgacaaggtcacattctgtgatccaggctagagtgcagtggtgccattatagctcactgaacctcctgggctcaagcagtcctttcgcctcagccgtctgagtagcttggactacaattggactacaagaacataccactgctgctgttttttattttttatttttttgtatagatgagatctcactaaattgtccaggctgatctggaactcctgagctcaagtaatcctccccccttggcctccaaaagcgctagaattataggcatgagccaccataaccatcgttgtttattattttaatggaaaatttttagttttcaacactgcatgtattatctttttgtagattgtcgttaa

SEQ ID NO: 277137 - DNA, 607 bp, Homo sapiens
tgttttgcatgtggataggcagttttttcaataccttttattaaggagattgtcttttccttattgtgtattcttcatgcttctgttgaagattagttgatcatatatgtgtaggtttatttttggattttctattctgttccattaatctatgtgtctgcatttaatgccaataccattctgttttggttatcatagctttaaagtatattttgaagtcagatagtgtgatggtttcagctttgttctttttgttcaaaattagcttggctatgtggggtcttttgtggatccacatgcatttaggtttttttctatttctgtgaaaaatgatattggaattttgataatgattgcactgaaattgtagatcactttgtgtagtatggacattttgacaatatttattcttccaatccatgaacacaagatatcttccaatttcttttactgatgttttatacttttcagtgtatagagttttcacctacktaaatttatttctaagtagtatattctttttgatgttattgtaaataggattgttttattaatttcttttttagatagttcgttgtttgttagtgtatagaaatgaaactgattt

SEQ ID NO: 277138 - DNA, 591 bp, Homo sapiens
aactcaaacaaatttacaagaaaaaaacaaacaaccccatcaaaaagagggcgaaggacatgaacagacacttctcaaaagaagacatttatgcagccaaaatctataaattaaaagattaactataaaatatattaaaaagaacttaaaaatacaagtaactagtaaatgattatgtcatggatraattttaaagatgaaatgaataaagaatttatctgtagaataatttaaagatatgtacaaaagtaaaaaatcgagtttagaaaaaaatattttagaatatacactgttaaaaacatattgtgttaaatcagtatcatgaaaacaataatatgcaaaggtttagaaagtcagttaaaggagaaaagaatataaatgactaacaaaaaacttatttccacttgtagacagagaaatggaaaaacataggaaatacaatgagatctcatttttcagctatcaaattgacacaggttagaaacagtaatgataatcaaagctcactaggcccagttaagaatagccaacgatgagagtgtaaattgctagaggcgacctagagggcatttcagcaatatatatcaagag

SEQ ID NO: 277139 - DNA, 664 bp, Homo sapiens
acctggggccagccaaagaaaagtttacaaccacmccaaacaccccaactctattaacatctacctaactgactgaatcataaatctcctagctctgggagcagaaaggactggcatactcctgtgtctctctaaaccacaggtgaaaaaaaaaaaaaaaagcagttaccatcgctttgtacaagtgtgtgtgctctttaaggtactacatcccctaggattggtgcaaagaagaggcctaaaaacaacaacaaataaacaactccctgcttctccctagaagagatccagaacacactctgaaggcccagttgttaaagttgcctcctaaacgacttccattctaaacctagttgctctgggcacagagggactaggcatatgtgaatctcccttgatcccagaaaaaagaggtggtcttaaatggacatctcctaactctgggagcagaaagggctggcatatacatgtgtctctctaaaccacaggttaaaaaaaaaagcagtgaccatgtggccatggcttttgtacaagcatgtaggctctttaaggtattacatcccctaggattagggcaaagaagaggcctaaaaaacagcaacaacaaataactccctgtttctccctagaagagatccagaacacacatgagaagccccagttg

SEQ ID NO: 277140 - DNA, 1156 bp, Homo sapiens
aatttgtcttgtgctgattttcaaggggaatgcttccagcttttaaattctataccataacttaaataatttctaaatcaccactataagactataggactgtgtatttgtctatatatttacctttaccagagaggtatacatttttctatgtttttatgttgtcgtatagcatcttttcatttaaacatgaaggactctcttaaacatttttagggaaagcccagtggtgatgaactccctcagcttttctttagaaaagttttatttttattttttaacgacagttttaataaatatagtatttttgattggcagctttttctttcagcacttcccgatrtaaatatatcatcccactgtcttctaatctgtgaagttcttgctgagaatcctctgacagtcttataggagctcccatgtataatgagcctcttttctcttactgttttaaagattctatctttgcctatgactgttgacaatttgattattatgtgttgcagtgtaggtttctttgcatctcttagttggagtttattgagtttctttaatttgtatatcwagaggtaacgagtcttactgcaaagcattcaagagctggtggcaatgctccagcttttctctctctctgccacagaagggcatatgttccagatggtgcagttacaagttggcagagcctccatcagcctgggtccctgtggcacaatgtgaagtggcccctgcccacctgcattagaaatatagcttgggtaagaaatccactatggttgtgttgtcactgaaattctggagttaatttgttacagtctgatagtctagactatcctgaaacatacaatgctggtaactggttttgagatgtggagttgatattgaggttttggatttattaatccctgcaatgactttacagcctttgtaaaatatactgttgtgtaaagtcgtagctttgtgcaccacawctaactgtttcaaaaatttcctaatagaaaacccacaggtctttcccagaagcaacttgttctcttctgttatttcttaaatatttcactgcaatgccttcaatggtggatcttaataatagaatcaattcacaaggtggggtccacaggattaaaaaggaaaacatcataaagcaaatattactgat

SEQ ID NO: 277141 - DNA, 576 bp, Homo sapiens
ataggctcagagcagaggtaacgagtcttactgcaaagcattcaagagctggtggcaatgctccagcttttctctctctctgccacagaagggcatatgttccagatggtgcagttacaagttggcagagcctccatcagcctgggtccctgtggcacaatgtgaagtggcccctgcccacctgcattagaaatatagcttgggtaagaaatccactatggttgtgttgtcactgaaattctggagttaatttgttacagtctgatagtctagactatcctgaaacatacaatgctggtaactggttttgagatgtggagttgatattgaggttttggatttattaatccctgcaatgactttacagcctttgtaaaatatactgttgtgtaaagtcgtagctttgtgcaccacaactaactgtttcaaaaatttcctaatagaaaacccacaggtctttcccagaagcaacttgttctcttctgttatttcttaaatatttcacygcaatgccttcaatggtggatcttaataatagaatcaattcacaaggtggggtccacaggattaaaaagg

SEQ ID NO: 277142 - DNA, 523 bp, Homo sapiens
tctggccattcaaagccatctaaccttgaagatatttgaaagattattagcggggtgaaaggcagatttagtgggttttttttttttgaaatctcagacagctttaaaattaatatcagccttttgggtaaatatttattttataattcaataacaaggtctaattgaacagggtcataatgagataaatttatagataggaaaaaaattagaaatcagaaaattatcccccccatcccacagtagtaacaaaaattcacagtttaaaatatgggtaaaacttagtaaatatmatagtcctctttcaaattcacataaagccttagtttctaccaactatccttatcaatacaccagtattgtcatgagcccaacagaatccttcaaaaagatagtcattataatctccaaaccaaagctcaatgagattaagtgatttaagcaagtttacctggctactaaattatgctcctaaaatttggcttcagaattttgtactccaagcccagttagtgttccttcc

SEQ ID NO: 277143 - DNA, 584 bp, Homo sapiens
ctttttctttttgaaatacattccctttttttattttactcacttctttgtgttggtttctatatattagataagaaaacaatttatctcaatcttgttaaactagcattatttagaagaaggttttttaccaatctttccttccagagattttaaggtgcctctttaatcttttttctttttcatttctttctttttttttttttggcctggactgttatctttgtttttggtgcctacctggggcttaraatatgtcccatcttgttcataccctaaaatgatataagaggagtcacatattttagatgtacctggaaagattgggaatgttggatgtgagttccagtaacttctattttcatagtgaggatgaatgagggcattttttccctactttatctggactaagccagggaagaggacctgtggctaatgcttgtattcatattcaggctacaccttctgattctgaaaggatagatgctggaagtgagcttgttatatgttcttctgtttgttttctgtggtcttgggtcactcaggattgcaatattcccttgaagtctagaaatacttcatta

SEQ ID NO: 277144 - DNA, 584 bp, Homo sapiens
atactttgtaatctctctaatcaatggtatagcttatttggaaataatgtccccactgtagaatttcatgagaaggatgagggaaaaaaatacacatgaagtgacttagcacatgataaatgatttyaatcctccttcaatttctggatctatataaaatatacatacatactccatttaccctgccttcatgtaatgctgatttgttataattctattcattttttcaagctttactttaaatataaataaattctttttcaacacagtgcattttcttcatgtactctgagtgatatattttttctcaatcagtgaaaagaaattctaccattctgttgtaaattaaattgtttctgcaacatatgtcactctactgcagcccctctttattttgtgttctatcaaactgttttgaacccttaatgtatgacaaaaacatgtgtcttagtctgttttgtgttgctgtaacagaatatctgaggctgggtaatttataaagaaaagtagcttatttagatcatggttctgcaggctgggaaattcaagaatggtgccagtgcctatgcaacttctgatgaggg

SEQ ID NO: 277145 - DNA, 584 bp, Homo sapiens
atactttgtaatctctctaatcaatggtatagcttatttggaaataatgtccccactgtagaatttcatgagaaggatgagggaaaaaaatacacatgaagtgacttagcacatgataaatgatttcaatcctccttcaatttctggatctatrtaaaatatacatacatactccatttaccctgccttcatgtaatgctgatttgttataattctattcattttttcaagctttactttaaatataaataaattctttttcaacacagtgcattttcttcatgtactctgagtgatatattttttctcaatcagtgaaaagaaattctaccattctgttgtaaattaaattgtttctgcaacatatgtcactctactgcagcccctctttattttgtgttctatcaaactgttttgaacccttaatgtatgacaaaaacatgtgtcttagtctgttttgtgttgctgtaacagaatatctgaggctgggtaatttataaagaaaagtagcttatttagatcatggttctgcaggctgggaaattcaagaatggtgccagtgcctatgcaacttctgatgaggg

SEQ ID NO: 277146 - DNA, 584 bp, Homo sapiens
atactttgtaatctctctaatcaatggtatagcttatttggaaataatgtccccactgtagaatttcatgagaaggatgagggaaaaaaatacacatgaagtgacttagcacatgataaatgatttcaatcctccttcaatttctggatctatataaaatatacatacatactccatttaccctgccttcatgtaatgctgatttgttataattctattcattttttcaagctttactttaaatataaataaattctttttcaacacagtgcattttcttcatgtactctgagtgatatattttttctcaatcagtgaaaagaaattctaccattctgttgtaaattaaattgtttctgcaacatatgtcactctactgcagcccctctttattttgtgttctatcaaactgttttgaacccttaatgtatgacaaaaacatgtgtcttagtctgttttgtgttgctrtaacagaatatctgaggctgggtaatttataaagaaaagtagcttatttagatcatggttctgcaggctgggaaattcaagaatggtgccagtgcctatgcaacttctgatgaggg

SEQ ID NO: 277147 - DNA, 615 bp, Homo sapiens
ctatacatgataaattctaaatatttatttaatattgtatagccttgctcaaccagttccaatttttttattcaaattgatatcctacactgtctacctttgtgagaatatgatttggtacatgtcatcatgcaaatttctcaacaatcctctgattcctacctatccccccaaaatcaaatctagacttatgactccatgaagcttttcctgacctctacagacttcaaatatcttcctctccacttatctcctagaagtcttttatttatatatatttggcattcattatataatctctcaaattccagtattctactgaatcatctcaagtttaagctcctgaagagaagaagccatacctcatatcatgtttttcctgtctatacatttattaatgtctcagtccagtggttctctatttggattgattatatgcagcccaccttaacaaaaatataataagyatcttctatgttaaacaatggagcttcagagatgtgtaaaataagatccctgcccttataaagataagtaactagtggagaaagaaacaagatcttggtttccaacagccaagatcatttccaacaaagcacattggattggagggcc

SEQ ID NO: 277148 - DNA, 620 bp, Homo sapiens
taactataaccacctcctaactcatctccctgcttccacrttcacatcctttttgttttgttttgtttcacataaagcttatttctgcttcagggtctttggctttcctgttttcattttctaaaattctctcttcttgaagagaaattttatctaatttatcactaaagtcccaacacatagtagactgcgtggtacaaagcaataattcaatatttatcgaaagagtgagcacaattttagttgtttaaatatatgtagaaatgaatcataagtgacttgagtttgtgtacctagaagctaacatagtttagatctcaagaaggttatggcttaaatatatttgattctatgggctatctgtataaatgaatgagtaatcctccactaagtattagatgagtgactagaatgtcctgagtgagctcacaaaaccaatggctggcaaccacgatagttaagccaatagttaagcagtgattttcatctttaatacatgttttcatgttaataaaagcttactcttagccagacaggacctcttttagcctttaaggactggaaaagttcccaagtgaacaagcatcaatttcatgatttatcttaactggctaaataca

SEQ ID NO: 277149 - DNA, 620 bp, Homo sapiens
taactataaccacctcctaactcatctccctgcttccacgttcacatcctttttgttttgttttgtttcacataaagcttatttctgcttcagggtctttggctttcctgttttcattttctaaaattctctcttcttgaagagaaattttatctaatttatcactaaagtcccaacacatagtagactgcgtggtacaaagcaataattcaatatttatcgaaagagtgagcacaattttagttgtttaaatatatgtagaaatgaatcataartgacttgagtttgtgtacctagaagctaacatagtttagatctcaagaaggttatggcttaaatatatttgattctatgggctatctgtataaatgaatgagtaatcctccactaagtattagatgagtgactagaatgtcctgagtgagctcacaaaaccaatggctggcaaccacgatagttaagccaatagttaagcagtgattttcatctttaatacatgttttcatgttaataaaagcttactcttagccagacaggacctcttttagcctttaaggactggaaaagttcccaagtgaacaagcatcaatttcatgatttatcttaactggctaaataca

SEQ ID NO: 277150 - DNA, 527 bp, Homo sapiens
aaaatgcaaactgaaaactctctttgaggccctgtttgcatccagctttctgagtaaaaatgctggttcttgtgctatggtttgaatgcttgtgtccccgcaaatgcctatgctgaaacctaattcrcaaggtaatgttattaagaggttgggcatttggggagttgattaggtcatgagagctcagccctcatgaatgggactagtgccattataaaagaggtccaaaggagctcctttgcccttttcaccatgtgatgacacagctagaagtcccatatatgaatcaggaaactgatgcttaccaaacaccaaatctactagcaccttgatcttggatttctcagcctacggaaactatgagaaataaatttctattgtttttaagctgcctattttatggtattatttttatagcagccagaatgaactaagacatcctgggagggacatctcaattccagggaagtgtcaaacaatgctgtgcaatgtagccaggcttctacggcagagacatggagccctga

SEQ ID NO: 277151 - DNA, 519 bp, Homo sapiens
  misc_feature (1)...(519): n = A,T,C or G
gatcagtaaaactataaagaattaattagaattgactaaagacataatagacatttcataaaaaacaaaacgccaaatgctactaaacatgggagatgttcaaatttctcaaactcattaataatgaaagaaatgcaaatcaagcctgcattgaatgtggtttacagttatcaaaatgaccccaagggaatcacgcctccagggagtaatgctcctctgaagtcccctccactttgactctgggctgggtcctgtgatttgccctgccactgggaaatcagaaaatgtgatgcaaggctacatgctggggtttgcctcctggaattctgctgctaccctgtgagaatgcccagygtggccttgaagatggaagactgcctgaagagacacgaccagctttcccagttatcccaccaacctcatgtcgccaaatgagtaaatctagggaaaaccagcagaacagctcgaccaacacacagaatggtatggtgaactacaacagtcnnnnnnnnnnnnnnn

SEQ ID NO: 277152 - DNA, 557 bp, Homo sapiens
ggaaaaggatgtctgtgttgtctgaatacaaacaggaagcattttctaagtcagaagtagtcagtcctatcaaattctgttcagaagtcattgaagatcagtcctaatatgtgctcagtgggcttgaaatgtataatgagcccaactgtgaaaagttttatacgtcacgctgaagggtttgactcttgttctatgacccagtgattgtctgcctgagttctgcacatcagaatcctctggatgagttttggataggcagatgtgtgtatcctcaacccagacccaatgacctagaaactcttgggatggagaggagcatatacacactttaacagctctgcagaaggttttgacgctcatccaacattcataatcagcacttttagttgctagggtgtcactgatcacatccggcagcaacactgtcacagccatgtttaagaccaatgtctctgatggttgtataccagcatgagggggaaatagaggcmaaaaaacagctaaaagattaagagagttcaatattgaatacctaaatttggactgagagttatacc

SEQ ID NO: 277153 - DNA, 591 bp, Homo sapiens
acatatataagcttcacattcctgcttaaataattgaaaatacgttaccttcctcactacatcgccagtagaactggactgcagaacaccaagtaaaacatgtccaaaagacagacccaatattctcactatttctgtgtgtttgtcagtgagtttaaaactggagatgtctgatcttctgtttctttattaccactttaaatgaagagctcctccatttccaggttggaagaatcattgaattttccttcatcttctccatgctgctgcccacttcttctcgtagaagctggaagaccagcccttagattggcttaactgttgactgctctgtgagaggcctcctggagggctggtcacagacgcaaataggaatccatctactgccatgtgcaagaaaagaaaactaccttttaatatgctcaaatgctaatgcagaggaatagagagggaaaatggaagaaagtttgttttaaaattactatgaatagatataaamctgactggctggtgtgaaccagccacattcaagcagtgttctaaataaggagggaaatggtacaacatctaatattctggaaggccatgttt

SEQ ID NO: 277154 - DNA, 1766 bp, Homo sapiens
acatatataagcttcacattcctgcttaaataattgaaaatacgttaccttcctcactacatcgccagtagaactggactgcagaacaccaagtaaaacatgtccaaaagacagacccaatattctcactatttctgtgtgtttgtcagtgagtttaaaactggagatgtctgatcttctgtttctttattaccactttaaatgaagagctcctccatttccaggttggaagaatcattgaattttccttcatcttctccatgctgctgcccacttcttctcgtagaagctggaagaccagcccttagattggcttaactgttgactgctctgtgagaggcctcctggagggctggtcacagacgcaaataggaatccatctactgccatgtgcaagaaaagaaaactaccttttaatatgctcaaatgctaatgcagaggaatagagagggaaaatggaagaaagtttgttttaaaattactatgaatagatataaacctgactggctggtgtgaaccagcyacattcaagcagtgttctaaataaggagggaaatggtacaacatctaatattctggaaggccatgtttwacatatataagcttcacattcctgcttaaataattgaaaatacgttaccttcctcactacatcgccagtagaactggactgcagaacaccaagtaaaacatgtccaaaagacagacccaatattctcactatttctgtgtgtttgtcagtgagtttaaaactggagatgtctgatcttctgtttctttattaccactttaaatgaagagctcctccatttccaggttggaagaatcattgaattttccttcatcttctccatgctgctgcccacttcttctcgtagaagctggaagaccagcccttagattggcttaactgttgactgctctgtgagaggcctcctggagggctggtcacagacgcaaataggaatccatctactgccatgtgcaagaaaagaaaactaccttttaatatgctcaaatgctaatgcagaggaatagagagggaaaatggaagaaagtttgttttaaaattactatgaatagatataaacctgactggctggtgtgaaccagccacattcwagcagtgttctaaataaggagggaaatggtacaacatctaatattctggaaggccatgtttwctatctaatactgacagtggggtgttgatatccctcactatagttgtagtagatctatctctctttttatatctagtaatatttgtgtwatgaatctgagtgttccaatgttgggtacatatatatttagaattgctatatcatgttgctagattgatcaatttttacatcatatagtgaccgtctttgtctttttttaaactgtttttgatttataatctattttacctgataaaattatagctaattctgttagcttttggtttccacttgcatggaatatctttttctatccctttatttggaatctatatgtgtattttcaagttaaatatgtttgttctaggatagttggatcatttttctttattcatttttctctgtctttcaagtgaagaatttaatccattcatattcaaggttaatattgatataagaggttttttaagtatcatattgttaattgttttctggttgttttgtatattcttttttcctttctttttctctcattgtttgccattgtaggttggtgttttactttagtagtaccatttaagtcctttatgtccctcatttgtg

SEQ ID NO: 277155 - DNA, 595 bp, Homo sapiens
accagtggttcacactaactcttcaggattggtccctaaccaaaatgaaggctcagaaatgtcaaacaaagaattcaaagcatggattgamagaaagttcaacaagatcaaagacaagatttaaaatcaacacaaagaaacttctaaagcaatctaggatataaagaaagagaaaacatcttaaaaagaaaccaatcagagcttttggaattaagaaactcctttaggaatatgaaaatacaattgaaatatttttcaatagactcaaccaagctgaagaaagaatttcagagtatgaagaccagtctttcaaagtaaccttgtcatacaaaaataaagaaaaaaaagaatttaagaaaataaacagtctttgaaaaatatgagattagataaagtgaccaaacctacaaattattggcattcctaagaaagaaggagaaaaagtgaacaatctggaacatatatttgagagaataattcaaaaaaatttccctaatcttgccagagagataaacatccaggtatgagaaatctagaccacatctgtgaaaaactatacaaaataaacaacaccagggaatatagtcaccagatt

SEQ ID NO: 277156 - DNA, 595 bp, Homo sapiens
accagtggttcacactaactcttcaggattggtccctaaccaaaatgaaggctcagaaatgtcaaacaaagaattcaaagcatggattgacagaaagttcaacaagatcaaagacaagatttaaaatcaacacaaagaaacttctaaagcaatctaggatataaagaaagagaaaacatcttaaaaagaaaccaatcagagcttttggaattaagaaactcctttaggaatatgaaaatacaattgaaatatttttcaatagactcaaccaagctgaagaaagaatttcagagtatgaagaccagtctttcaaagtaaccttgtcatacaaaaataaagaaaaaaaagaatttaagaaaataaacagtctttgaaaaatatgagattagataaagtgaccaaacctacaaattaytggcattcctaagaaagaaggagaaaaagtgaacaatctggaacatatatttgagagaataattcaaaaaaatttccctaatcttgccagagagataaacatccaggtatgagaaatctagaccacatctgtgaaaaactatacaaaataaacaacaccagggaatatagtcaccagatt

SEQ ID NO: 277157 - DNA, 577 bp, Homo sapiens
atatagaaataaattttaaaggcagctagagaaaaagtttatatcatatacaaagggaatcccatcaggctgaaaatggacttctcaacagaaacctaasaagtcaggagaaatcgggggcctattttcatcattgtttaagaaaagaaattccaaccaagaatttcatgtcttgccaaactaagcttcttaagcaaagaagaaataaaatagtttccagacaaacaagcaataagggaatttgttaccattgaatcagccttacaagaaatccttaagaaagtactaaacttgggaataaaagaacaattcatgctaccacaaaaacacacttaagtacatagcccataaaccctataaagcaagcacacaatagaaactacaaaacaaccagctaacttcaaaataggatcaaaactttacatgtcaatattaaccttgaatgtaaatagtctaaatgcccccacttaaaaggcatagctgaattaaaacaaaaaaaaaaaacaaggctcatctgtttgctgttttcaagagacctatctcacatgtaacaacatccatgggctccaaccccata

SEQ ID NO: 277158 - DNA, 586 bp, Homo sapiens
aatagactttcagcccacaagagtaaacaaagacaaaaaagggtattataatgagtttaattgaataagaagatttaactatgctaaaaatatatgaacccaacactggcgcaccaagattcataaaacaagtacttttagagctacaaaaaaagacttagaaatccacacaataatagtggaggacttcaacacttcactgacagcattggacagatcatcaaggctgtcttgggacccaagtccaagatgtctattgcatccaatagaccagacagaataccccactcatcacccacagcatatacattcttctcaccygcacatgaaacatactctaagaccaaccacatgctcaatcataaagcaagtcccattaaactcaaaaaaattgaaatcatacccaccatactctcagatcctaatgaaataaaaataaaaatcaataccaagagcatctctaaaaatcacacaattacatggaaattaaacatcttgctcctgaagacatttgggtaaatgattatattaagacagaaatttaaaaaatatttaaaacaaatgaagagatataacatatcaaaat

SEQ ID NO: 277159 - DNA, 603 bp, Homo sapiens
gatgcattgacagacaaattaaaccagacacgcaaaagaggagccagtgccaattctgctgaaactattccaaaacattgaaggggacagattccttcctaactcagcctataaagccagtacctctctgataactgaaacctggaaaagacaaaatgaaaaataaaactacaggccaatacttctgaggaacataggtgcaaaaatcctcaacaaaatactagcaaaccttgagagaaaaaaatggaaaacaggaggcaggactaacttgaaacttccactcagatggacagaacagcatgtggaggccasattgtgaacttctgctccaagaaccacctcagaaacattctaggaaaaccaaaaaaaattcacagaccctttgaaagcagcagcttgccgctgcatactccatgagaaaggtgaaaactgtgagtgcccaaagtgtgagagggagaaatatctcctccaaacacacatcctcactggggaacctgaaaatccagatcatgggagaagtatttaaccttacctagagctgaaaaaaatttagagagctgagcaaaatataaaagtaaaagaagcagcaggaagagccctgta

SEQ ID NO: 277160 - DNA, 484 bp, Homo sapiens
ataaacttaattaaaaatgaaatgggaattattacaactgataccatagaaatatgaaagatcattcaaggctactatgaacaactttatgcacaaactgaaaaagctgaggagatagataaattactggatatatacaactatgcacatagattaaaccggagagaaatagaaactctgaacagatcaataacaagcagcaagattgaaagggtaataaaaaaaattgccaacaaaattcatgtccagtaccagatagattcacatctgaattctatcagacatttaaagaagaattggtaccaatcctactgaaaatagtcaaaaatacagagaaagaggraatcctcccaaaatcattctatgaagccagtatcaccccattaccaaaaccaagaaggacataacaacaacaacaaaaaactacagaccaatattcctcatgaagatacatgcaaaaatcctcaacaaaatattagctaac

SEQ ID NO: 277161 - DNA, 594 bp, Homo sapiens
gcagggatgcagggatagtttaacataagcaagtcaataaatgtgatacatcacataaaattaaaaacaaaaatcatatgatcatatcaatagatgcagaaaaagcatttgacagaatctagcatcgctttatgattaaaaccctcagcaaaattggcataaaaaagacatatcataaggtaataaaagccatctatgtcaaacctacagccaacattatactgaatggggaaaagttgaaagcattccctctaagaactggaacaagagaaggatgccctctttcaccactcctattcaacataatactggaagtcctagccagagccatcagataagagaaagaaatgaagggtatccaaatcagtaaagacgaagtcaaactgtctctgttccccaatgatataatcatgtatctagaaaactctaaagactcatcataaaagyttctagatctgataaatgaattcggtaatgttttagaatacaaaattaatgtatacaagtcagtaacactgctatacaccaacagtgaccaaggtgagaatcaaatcaagaactccataccttttataatagctgcacaaaataaaa

SEQ ID NO: 277162 - DNA, 524 bp, Homo sapiens
taacatttatatatgtaacatttatatatagacacatttatgtatatacacctatgcatacacacacacacacacacacacacacacacacacattcctgagtgaagcaactcaggaatgaaaaaccaaacatcttatgttctcatttattagtgggagctaaactatgaggatgcaaaggcataagaatgatccaatggattttggggacttgggggaaagggtgggagtgaggtgagggataaaagaatacacattgggtacagtgtacccttcttgggtgatgggtgcaccaaaatctcagaaatcaccaycaaagaaattatccatgtaaccaaacaccactggttccccaaaaattattggaaaaaaaaacctagcaatatgaatccagcaacacatcaaaaaggtaattcaccatgatcaagtaggcttcattcttggaatgaaaacttggttaacatacacaaataaataaatgtgattctccacataaacaaaattaaaaacaaaaagcatatgat

SEQ ID NO: 277163 - DNA, 539 bp, Homo sapiens
caatgtgttgccaaataagcttaatttggtaggcaagcagtaaaaataacccaacagccaacatttagagaatgcgtactctcttaaatgctttatgtatattatttaatcyttaaaacactgtgggatcagtactttaattatccctattttcagatgagaaaacagtttgaaaggttaactaaatttacccaaagtcatgcaactgctaagtagtgagcaagccgcctgtcccagagtatagaatgaatacctatgatggaaagctacagagagacagacttttatttgatttaaggaagcgccttctaaccaagattttgggagctgaaatgggcaccttgggatccttgaggtgtcagtctaaggtggacaggcatttggttggaatgtagcaaaatggattcaaacactgtagagttatccttcagaatctatcggggattggtgccaggatcttcacagataccaaaatccacagatgctcgaatcgcttacataaactggtgaaatatttgcatataacccatgcccatcct

SEQ ID NO: 277164 - DNA, 539 bp, Homo sapiens
caatgtgttgccaaataagcttaatttggtaggcaagcagtaaaaataacccaacagccaacatttagagaatgcgtactctcttaaatgctttatgtatattatttaatccttaaaacactgtgggatcartactttaattatccctattttcagatgagaaaacagtttgaaaggttaactaaatttacccaaagtcatgcaactgctaagtagtgagcaagccgcctgtcccagagtatagaatgaatacctatgatggaaagctacagagagacagacttttatttgatttaaggaagcgccttctaaccaagattttgggagctgaaatgggcaccttgggatccttgaggtgtcagtctaaggtggacaggcatttggttggaatgtagcaaaatggattcaaacactgtagagttatccttcagaatctatcggggattggtgccaggatcttcacagataccaaaatccacagatgctcgaatcgcttacataaactggtgaaatatttgcatataacccatgcccatcct

SEQ ID NO: 277165 - DNA, 575 bp, Homo sapiens
aactgtagacttaagtatctttttggtggaaataaaatatgaaatctctttaattttgttaatgttaggtctggtattcgttccattaagttccactttaaagtatggaaaaatgttataaacatctgctttaaacaatgaatggtactgcaatagtcctgtaaagaaaaatgaatggagtaaagtccttcaagttttcatttaaagaatggcatagctttataatacattaagtttttaatatgcggaatgtatttaatatcctaaagcgatgaattgtcttggcattatgctatcttatgaaacactttcttactctcacattgtgtctttatagttttcaatatcagcaaaacctttaaatagtcttagttgggtgttgtgtatcattgtacagcaactrttagtacatgtggtatttctgatccatgtaataaagtacatttgtcatgtatcttgtgatctgcatacctttcagctgttacttcataaatctgttccatcagagaactgctttgtacagcagtggttgaagctgcttttaagaaagtaatattttgtgtcttttatatgta

SEQ ID NO: 277166 - DNA, 1070 bp, Homo sapiens
atcatacagaatagtttcactgccttcctctgtgctctgcctgttcatccctcccttcctgctgatcttytattgtctccatagttttgtcttttcccaaatgctgtatagttggaattatcatgtaacctttcaaattggcctttttcacttataatatgcgtttaaggttttctacatgtctttgcatggcttgatagctcatttttctttagtgctgaatactattccattgtttggatgcattacagtttattcattcacctactgaaggaaatcttgcctgcttccaagttttgtcaataaagctgctttgtaaacatccatgtgcaggtttttgtgtggacataagttttcaactcatttgggtaaataccaagcagcacaattgccgtgttgtatagtaagagaatgtttagtttcataagacatcaccaagctgtcttacaaagtggctgtactattttgcacttccaccagcaatgaatgagagttcttgttggttccacatactcgtcagcatttgatgatatcagtgttttagattttgaccatttaataggtgtgtagtggwcatatactttctgtacagttttaagatgtttatgccaaaccttaattgaattatttaaagcctagtatgctagtaaaacatttccctgattttacccagatattagcttttaattgctcaaaagtgttcaatgggaagacagggggaacaaaacaccatttctcaaaccttcaacagctgaatctaactgtattacgaatgaataataaccacactgaaggggtgaggaagaaaagaattaatctaagtactttggaacacagcatcttaactggatgcgcttatgctaaggacagaaataattattgtgttctgattttgctaatgtgtgtctcacaggggtatgggttggcaattctgaaagcactttatgtgcattgtagaattaaacaawtgagtaaatatattatcaataatattactgttcaagaataaagttacaaatgaggaaggactgaaatataccctgtgatgttggattagaatcagaagcatc

SEQ ID NO: 277167 - DNA, 395 bp, Homo sapiens
ctctcttgccttcaggtcttttacaggtacaaatttctctaaggacccttccctaatccctctagaggaaaagtttttcattctgtagagacacttatcctaatgataagaatgatgataaaaattatagtgcccactgcaagccaggtactactctgagctcttcatatgtaataacagataaatgctcctataacatagttttcctatcaaagttctcataacatttcatttaaattgctttcttgattatctaatcccattattataatgtagagaagacagggattctctgtcttgcccacctttgtagcaacaacacytagcacagatgagtattatttaagctctccttaaaaatgaataaaactttatttatttatttatttatttat

SEQ ID NO: 277168 - DNA, 561 bp, Homo sapiens
aggaatggaggtgtggtgcctgccatcagggaaggaagcctaaacaactgtgatggttaattttatatgtcagcttgacttgggtagtaggtaaaccatcatttctgggtgtttccatgagggcgcccctggaagagattagcatttgaattggtgcactgagtaaagaagccctcgtcatgcaggtggccatcaacccagctcttgagggcccagatagaacaaaaaggcagaggaagggagaattcactttctctccttgagctggaacatccatcttctcctgcccttggacatcagagctcttgatctcaggcctctggactctgaaaccagtgccccaatacccccttcccaggcctttggaccaggacagaattaccccactggctttcctggctcttcagtgtgcagacggcagattgtgaaacttcttagcctctataattgtgggagccaattcccataataagtctcctcttamccatctatatatatgctattgactgtttctttggagaacactgatggatcagataataggatctttatgaggtcata

SEQ ID NO: 277169 - DNA, 551 bp, Homo sapiens
atcacagagatgatacataataactgtagaaagttttgaaaacacaaaaagcycaagtaagaaaatgaagtaccgaatactcttttcctccatcaatcctaagaggataattgttaaaattttagtatatatcatgttgtgacataatcgatttttagaaaaatgtttttcatgtattaaatgggaaaagattgagttataagagaacacaaaccgaatgctattttaaaatattatatattatctgtgtatataatatgtaaatacgtatatacacacacatgcatatagaactggaggaataatgagcacatgttattttcttttctttctttctttttttttttttaaacaaggtctctctctgttacccaagctggagtgcagtggcatgatcacggctcactgcagcctcaacctcctgggctcaagcaatcctcgccccttaacctctgaagtagctgggactacaggcacacaccatcatgctcagccaatttttgtatttttttttttgtagaggcggggtttctccacattgcccaggctgg

SEQ ID NO: 277170 - DNA, 604 bp, Homo sapiens
aggcagcatactgggcaggaagcaggctagcttgtttccagcagaaacctgcacaaaaaaaatcaggcgaaataagctggaaagacatattttctctcttcatcagcccatttacttacctgatactaaatgtatcttatttcacagacatgtttctaattgttggaaatattaataaccaagatagggatagcctctgcctttttacagagcttactctctgacagttccaagaatttcagaatttttttttttaactgaagaagtttgtaagtcatgtatgtaaaaatgtttactgaaatattaagtttatattgaagccacctttattaaactttgggtctatataatgttagtaaatytggagggagcatgtgttctttctgaaactgtgctttgcttttgagttttacaattcatactttctaaagctcagggtttctcaacactgtgctcttaggacagttttcccatgacctacccatttacatctttctgagctctagtgctctttccatcacaattttagaaatactgtttaattaaggacattttcactaaggtcaagaaaaggatacttaccatcaaaacttttatataactt

SEQ ID NO: 277171 - DNA, 486 bp, Homo sapiens
taaacacaaaatataacgacaccatagaaattmtttgttgcaagacaatgtttcttgttgccactgtcttcagtgctgcatattttaacatcatcagaagcaaaataaatgtttgacaagttcaaaatacctgaaagacattaactgatgagccaaaaatcaaagaagacaaaaagaaaagttgtaaactctagtcaaacaaaaaataaacaaatggctgggtgtggtggctcacacctgtaagtaatcccagcactttgggaggccgagtcaggcagatcacctgaggtcaggagttcaagaccagcctggataacatggtgaaaccccatctctactaaaaatacaaaaattagccgaccgtggtggtgcatgcctgtaatcccagctactcgggaggctgagacaggagaatcacttaaacctgggaggcggaggttgcagtgagccaagattgcgccactgcacttcagcccaggtaacaga

SEQ ID NO: 277172 - DNA, 557 bp, Homo sapiens
gtggggggcatctgctaggtagatgttttacatatatcatctcactcacgtagggaacttctctgataaactactaatgatgcttatgactcccctgagcaaaatatccctcaagaaagagggacatttcttggccaccagtacatttatactttccctcactgtctcttcatgcctttcttttccacatatcttttctagagtaggcttagaataggagctgccattttcactgctttctgtggtttctactttttaatttttgttattatcatagtttacccaaaagacttagagaatattagaatgttagaacttaaaagaactcaggagctcttgttctgttaataagagaacaaggytaatagaggcagagtgagttgtgcgaattgtggatgagaaccccagtttcctgggtctgggtctagcacccaacacatgaccttttcctcttgccgcagtgattctaatggcccccagatcaccacctgtccaggccccatctgattctgagtcagggcggggcttcccaaagctgatgtcattctgtggtaggg

SEQ ID NO: 277173 - DNA, 621 bp, Homo sapiens
atcatatttcaattctccataggggtgatgtatctttaaccaaccaataaaaatgtgtgctctcaaaatacttattacagtcaagtttgcacaaccagctcartggtgcagcttaaacagaattcgttcatctttctgtatatttcaactttgttccatccttcttttttctctagtttttttctagaggtgaagatgggagcatagagaggtgaagatagtgagagtgagggctttctgcatttgataagcagtcaggcttcaccccaggaggagagaaacagaataaactatactttgtatctgcctcatgctaattactgctctaggaaaaccacttttcaaaccacaaatagctgagatcagttagctcccagctactggataacaccgccactgttgccaatggcagggatgccagcaaatttgggcagagggaaatatgtgatctgcgggtacactgcttcccttcctcctttttttgattgaagatgaccttaaatagccaaactcctgtacagaatgcttcaggacggcttattccatctgctgagccaccataatacaacgttccaaatgccaaaagaaaattaaaattataactgtccttgacatttttca

SEQ ID NO: 277174 - DNA, 1202 bp, Homo sapiens
acataaaaaggttgcagtgactaaaacactggtgttattagagaacacagcagaaaaaatataattaacctgagttctcacaggttgtatcttgccatcccacaaaaatgtaattactacccatcagtgagtacagaagagagtttgattacggagctcacggatgtctgcaaactttctcagtaagagctagacacggcaacgacagaatttagcttcctttggggtagaaaacacctaacgctgttcaatgaacatggctaacaacttgcacagcagagcacttacttcagttgcagctcgcattaatgaatcatatttaaaacaggctaaatgagcataaagcaatgaaatcaacagcaaatagagtaaggggagcctatgtgtacctctctctctttcagccacattcttttgaatctgtctacagtggaactatagaatcccattcaaatccacttgtaataaaattggggttctaattcagagaaaacaagcaaaaattcataaacatgagttgcagctaaaycatacaaaaatagaagatagacccattgaaaatatatagtgttctctgtatcatcagaataagctgctgtggttgacagagaaaaawtcgtcctgtgagtcaccctatattacctggaggtggggacacgtctgctagagacctagatggaatcatgagatgacagcacacttcccctcccacccactccacccccattccaacagtgctctggcaacaaccgtgaatcaggaagagttctcagggaaacccaaagacaacaggagagatgaaaatgagaacatctgaagcctcccaaatatgwtctcttagctttagacatgttgcccctaagcaatttgaacatcctttcttctcgtctatctggccagctcttcattattattcagggcacatttgatttcaagacacacatgtgaatataagcctttctgaactgtgccacacaactgtatgaatctctgatctccaagagggtccaagggcctccctgtgtgctccctcagcatctagtacctacccccgatctgcattttcatgctctcaattgccattacttggccttttttgtctctaaccataagctgactaaaacaagggaatctcatgggttctattgtattgttagttcttcccactcacagttcctggcacataatagggcttcagtaaa

SEQ ID NO: 277175 - DNA, 641 bp, Homo sapiens
cttattagtacaaaatgatataaaaaacttatgactgatgattagaaaagaagtctgatccaccatacaaattttaaaaatacattaggaattaaaaggttagcatttgtgatttttattattcatgagtcattttgaaagtcatgacatgcactgatttacaatttctagaggacgattttatatgagcctagttgtgaaagcacatcctttgactaatgagtgcccctagcccctggctgtcacatgcatggaaggacaaatgtatacatcatattgcatttgtgaatttgaagattatgatgtttcaggaactagcccttggaactgttactgtatatgtctattctacatatagtaaatgcattgcaatttaattttgcctgagtagaagattggttattgctcatattcccagtgcctgtattggttcacacatcacatcaaccccagaaaagtaattacccttccttagaccaacaaaacctgataaattgtaaaagccttccagtggaaktcttctcatcacctagttgcagtaataaatcaacgaggcaattccatctaagagtcacttcattatagagtatgtactgagaaaatgactttctatattagcattgcttacttaggaggtaatg

SEQ ID NO: 277176 - DNA, 567 bp, Homo sapiens
cttagaccaacaaaacctgataaattgtaaaagccttccagtggaattcttctcatcacctagttgcagtaataaatcaacgaggcaattccatctaagagtcacttcattatagagtatgtactgagaaaatgactttctatattagcattgcttacttaggaggtaatggatattacagtcatatgaaaaacgtgatcttaaagtaatattgcctccattgatatgtaattggcatttaaaaaataataattttgtacaacatatttagatcttttttacttcactgtgcatttgtttctagcctctgtgattacaaaacttggcatctgtacgggtgcatgagamctttcctgcatgaggaagattgtgtgacaccatccctgctgcctctgctcagtcctagcctgctgctggtccctgccccgaacaccgagctttctgccctctctctttgcttcctgtgctcctgcaaacatctcagttggtttctcctgaatgcctctctgttgattttcaaacaaaaccagcaatcattactgtgtttcaaagcccctgcatgatcaa

SEQ ID NO: 277177 - DNA, 567 bp, Homo sapiens
cttagaccaacaaaacctgataaattgtaaaagccttccagtggaattcttctcatcacctagttgcagtaataaatcaacgaggcaattccatctaagagtcacttcattatagagtatgtactgagaaaatgactttctatattagcattgcttacttaggaggtaatggatattacagtcatatgaaaaacgtgatcttaaagtaatattgcctccattgatatgtaattggcatttaaaaaataataattttgtacaacatatttagatcttttttacttcactgtgcatttgtttctagcctctgtgattacaaaacttggcatctgtacgggtgcatgagaactttcctgcatgaggaagattgtgtgacaccatccctgctgcctctgctcagtcctagcctgctgctggtccctgccccgaacaccgagctttctgccctctctctttgcttcctgtgctcctgcaaacatctcagttggtttctcctgaatgyctctctgttgattttcaaacaaaaccagcaatcattactgtgtttcaaagcccctgcatgatcaa

SEQ ID NO: 277178 - DNA, 1163 bp, Homo sapiens
ccagcaatcattactgtgtttcaaagcccctgcatgatcaaactctaccttgatctctaaggtaactctctcagtagagtaccatagaggtgaaatgcccatctcattgcgtcatttcagaggataactaatattgacgtgacttatcactagtgagtaaactttcatcacttggttaatatggttccacactgctaatttccttttgcattatctcttctttggagtgagtcactatgtgcaatccacactcaagggaagcgaaatcaagctcaacctcctggaggggagaatattatttgtaattcttctgtgagaaatatttgttccttctcactaatttttatttaataatttattgatatcagtatgggctcatagatatttattttgttctttgggtaaaaccaggtctttctaaaaacttttgttgcacaaattctatctgttttgcygagtggaagctctttgaaactgttttttcccattttgtttgggctatatgtcttttcttgtaagtctttgtcagctacatgcattgtaaatatatgacccctgccaatggcttwtggtgttgagtgtctgcagcttttccaggagcatgatgcaagctattggtggatctaccattctggggtctggaggatggtggccttcttctcacagctccactaggcagtgctccaattgggactctggatgggggctcgaaccccacatttcccttccaccctaccctaacagaggctctccatgagggccccaccaccccagcaaacttatacatgtagaaagttaaaagaatctatgagcaatttaataaaaatgatatgaatagaaggttgttgaataaaaggtcaattatacaaaaatgtatatatttctatatagtaaccataaacatgtggaaagtaaaattttaaataccatttacaatcgcatcaaaaattaaataatttgaataaaaatgtccatgacatcaacactaaatcctcaaaaacacagctaagagaaagaaawgattatctaaataagagaaaaagacataccacattcatggattgaataaatcaatgttgtttaaagaatacaaagattcagttaggtgggaagaataaattctggagatctaatatacagcatggtgactatagttaataata

SEQ ID NO: 277179 - DNA, 553 bp, Homo sapiens
aagttctagttcaaaaggaaagcttggcytctggggctgccagtgcccttaatacattcatagactcaacaggcttgccttaaacttcacacacatcatgggtccaagggaattcttatgacacaacacaaatgctgtatgcacatgggcagccaggcatggaggaccacacattgcttacacctcctctgcccatgcacaaaatgcaagttcaaagctaaaattattaagaatttcagcaacaactgagcattaaaccaagtgtggcccccatctgagaagtggggggaagtagggagtttgtgctgtgacacatattggacactcatgaagctgccccaatctacctccagaatgttcagttaagctgtatctaaagttctaaacaccagcttagaaatgcttgtcttcaatggagaattaaactccttatgtacaaacaaaaaaaaaaaagaagtctatgccctgtggaatcaacatatagacaccaagctattagagcattccccagcatagatgcatagaggcctaatatttcccatgacatcaaacg

SEQ ID NO: 277180 - DNA, 613 bp, Homo sapiens
ttgcctgtgtttttggggtcatatccaaaagagtattgcccagactaatgtcagggagtgtctccccatgttttcttctggtagcttcatagttttaggtcttacatttaaggttttcayacattttgagttgatttttgcatatggtatgtgataagggtctcatttcattcttctattatggatatccatttttctcaacaccatttattgaagagactatccttttctcattgcatgttcttggctcctttgtgctttgtagtatatttttaaagatggtggtgcagtgcctacagctttgttcttatttttcaggatggctttggctattcagggtcttttgtagtttcatacaaattttaggagtgttttttctacttccgtgaagcctatttgcttagaatatttcttctcatcaaacagcatcattaagtgcttagtggatactgttagaaaaatccttcaattatgaaaatcaccatgtatacatggctgtttaaaaagcataatttatgtgcatttatagaacaaaatccaaaaagaaataattgaaagaacagttgtttttaccttctcccacacataaactcaatcccttaggaaatattag

SEQ ID NO: 277181 - DNA, 613 bp, Homo sapiens
ttgcctgtgtttttggggtcatatccaaaagagtattgcccagactaatgtcagggagtgtctccccatgttttcttctggtagcttcatagttttaggtcttacatttaaggttttcatacattttgagttgatttttgcatatggtatgtgataagggtctcatttcattcttctattatggatatccatttttctcaacaccatttattgaagagactatccttttctcattgcatgttcttggctcctttgtgctttgtagtatatttttaaagatggtggtgcagtgcctacagctttgttcttatttttcaggatggctttggctattcagggtcttttgtagtttcatacaaattttaggagtgttttttctacttcygtgaagcctatttgcttagaatatttcttctcatcaaacagcatcattaagtgcttagtggatactgttagaaaaatccttcaattatgaaaatcaccatgtatacatggctgtttaaaaagcataatttatgtgcatttatagaacaaaatccaaaaagaaataattgaaagaacagttgtttttaccttctcccacacataaactcaatcccttaggaaatattag

SEQ ID NO: 277182 - DNA, 935 bp, Homo sapiens
gcttgaaaacatatgtgaagaatgaaataatcaacayttaagcatgactgttttcatgctactatcatgaacagaatagtttttgacccaaaatatgaaatttttgagacagaaacctgaatatgttttgttgggggagagtcttaggagtgtttctgctgtagggacagtaaatgaggtcacactgacaaatatgcttctgcttactgcatggataaagagtaagtcacttgtcttccccttatgagtggctctctgggcatatactcagaattgctattccacacgtactccaactgatgtattcatttgtactcatttacaagcaacactgagcatctacctgggatcctgggtactgggatggagagaggaaccccagcagtccctaccttcaaggggctcccatccaggggaagaggagagacaacacagaaatggttaagctacaaggctcctcttgagccwgcttgaaaacatatgtgaagaatgaaataatcaacatttaagcatgactgttttcatgctactatcatgaacagaatagtttttgacccaaaatatgaawtttttgagacagaaacctgaatatgttttgttgggggagagtcttaggagtgtttctgctgtagggacagtaaatgaggtcacactgacaaatatgcttctgcttactgcatggataaagagtaagtcacttgtcttccccttatgagtggctctctgggcatatactcagaattgctattccacacgtactccaactgatgtattcatttgtactcatttacaagcaacactgagcatctacctgggatcctgggtactgggatggagagaggaaccccagcagtccctaccttcaaggggctcccatccaggggaagaggagagacaacacagaaatggttaagctacaaggctcctcttgagcc

SEQ ID NO: 277183 - DNA, 467 bp, Homo sapiens
gcttgaaaacatatgtgaagaatgaaataatcaacatttaagcatgactgttttcatgctactatcatgaacagaatagtttttgacccaaaatatgaaatttttgagacagaaacctgaatatgttttgttgggggagagtcttaggagtgtttctgctgtagggacagtaaatgaggtcacactgacaaatatgcttctgcttactgcatggataaagagtaagtcacttgtcttccccttatgagtggctctctgggcatatactcagaattgctattccacacgtactccaactgrtgtattcatttgtactcatttacaagcaacactgagcatctacctgggatcctgggtactgggatggagagaggaaccccagcagtccctaccttcaaggggctcccatccaggggaagaggagagacaacacagaaatggttaagctacaaggctcctcttgagcc

SEQ ID NO: 277184 - DNA, 467 bp, Homo sapiens
gcttgaaaacatatgtgaagaatgaaataatcaacatttaagcatgactgttttcatgctactatcatgaacagaatagtttttgacccaaaatatgaaatttttgagacagaaacctgaatatgttttgttgggggagagtcttaggagtgtttctgctgtagggacagtaaatgaggtcacactgacaaatatgcttctgcttactgcatggataaagagtaagtcacttgtcttccccttatgagtggctctctgggcatatactcagaattgctattccacacgtactccaactgatgtattcatttgtactcatttacaagcaacaytgagcatctacctgggatcctgggtactgggatggagagaggaaccccagcagtccctaccttcaaggggctcccatccaggggaagaggagagacaacacagaaatggttaagctacaaggctcctcttgagcc

SEQ ID NO: 277185 - DNA, 520 bp, Homo sapiens
gatgtattcatttgtactcatttacaagcaacactgagcatctacctgggatcctgggtactgggatggagagaggaaccccagcagtccctaccttcaaggggctcccatccaggggaagaggagagacaacacagaaatggttaagctacaaggctcctcttgagccatgtgggctgggtcaggagtccaggctgtgctgtgckgctgagaaaagctctttcagccctgtggggaatctgtccatcaccttgcctcattagcttgtgcttccaccaaaagacttaacctgttccacaagggtgctgaacctaatgacatgtagtgtgcagatgtcttgaatatcataacagtttctacatagtatggattttagtggatgagtgaaagcatagctcctaaggtataaatctcatgcagtgtttccaaagacagactttcctcccaaagttcagggtaccagtagatgaggggtgattggtaactttcagcctggaatagaactcaagaaaatatactg

SEQ ID NO: 277186 - DNA, 520 bp, Homo sapiens
gatgtattcatttgtactcatttacaagcaacactgagcatctacctgggatcctgggtactgggatggagagaggaaccccagcagtccctaccttcaaggggctcccatccaggggaagaggagagacaacacagaaatggttaagctacaaggctcctcttgagccatgtgggctgggtcaggagtccaggctgtgctgtgctgctgagaaaagctctttcagccctgtggggaatctgtccatcaccttgcctcattagcttgtgcttccaccaaaagacttaacctgttccacaagggtgctgaacctaatgacatgtagtgtgcagaygtcttgaatatcataacagtttctacatagtatggattttagtggatgagtgaaagcatagctcctaaggtataaatctcatgcagtgtttccaaagacagactttcctcccaaagttcagggtaccagtagatgaggggtgattggtaactttcagcctggaatagaactcaagaaaatatactg

SEQ ID NO: 277187 - DNA, 572 bp, Homo sapiens
cttcactcaagcatggtgcccgtctgcatgtgggctcctgggcaggtgctcaggtcacacatcctcgaagcctgcctagctggcagatccatccactgtcttggtgacagtgatgatttcctgggagtatrcataagtcaaaacttctcaaagcagaaacttgacgtggatatagtttattgtttatcaataaactcaatacctcaataccgctgtttaaataggagcaacaaaaagcctgtctttggaaaagagaggtgcctatatgagtaaggcaggctttattcacactgctgttttttgtggatgtgagttcatccctcttctgctaattgttcactcatcaataaattaggactctttgttttgattgaaaagaaaagattttgggaaggaaccacagttaaaaacgtgggcttggtgtgagaagattgctccacgaatttcgaactctgtgaccttgaacaggtccaagattctcaccttctaaatcagcttgacttcaccgggcagctgggaagatttaatgaggtagaaatgcctaacgtgcccaacatggtgcctgccatttg

SEQ ID NO: 277188 - DNA, 522 bp, Homo sapiens
tcttccaccccgtgagggccctgagccctacagagtaggcctggctgcccccaagttgatggggccagctccctgctgtcttcctgcctggcccactacctggggcctaggcttgctcctgctcttgctagtcttgtgtggacctttcagctgatctggrtcagggccaggtgtccccttatctctgccttatgaccagcgttagagtggggccctgaccttggatgattcgctctcctggactcctgatgtgtgacgtacatagggaggaatctaccctgtgcctgtttgccctgttctgtcagcctatttgtccattctcttgtgtggtgctcaccatggtcatgcctcacatgaaacaagcgtgttacacattggaccctgacttccatcttcttaggagtgaattggacaaaacctgttcattacttacaatcatcaccagcattgtctttctgagtctgtagatagagagtagattgggagcagaaggaggaaaagttacctttccattaccatgag

SEQ ID NO: 277189 - DNA, 546 bp, Homo sapiens
atttgttgttagtatatagagatgcaactgatttttgtgggctgatcttgcattgtgcaaccctactgaactcactgataatttctaatttctgacaattggtagattcatttgaattttctatataaacaatttttatctgcaaatagggacaacttagttttyttcctttaaatgtgtatgctttttatttcttttcctttaattattatattggctagaacttcaaatcctaagttgaataagtgtcgtgagggcaaaggtcttgctcttctcttgatcacagggtgaagttgttgagtcatttgccattaagtatgatctcaaatatagatttttttgtaaatgctctttatccaattaagaaagtttccctctattagttttatgagatttttttttcattttgtgaatgggtgttagattttgtcagatgcttttttctgtgtctatataattatgagagttttcttctttatccttttgatatgattacatatatttcttgatttttgaatgttgaaccagccttgtatacctggaatt

SEQ ID NO: 277190 - DNA, 546 bp, Homo sapiens
atttgttgttagtatatagagatgcaactgatttttgtgggctgatcttgcattgtgcaaccctactgaactcactgataatttctaatttctgacaattggtagattcatttgaattttctatataaacaatttttatctgcaaatagggacaacttagttttcttcctttaaatgtgtatgctttttatttcttttcctttaattattatattggctagaacttcaaatcctaagttgaataagtgtcgtgagggcaaaggtcttgctcttctcttgatcacagggtgaagttgttsagtcatttgccattaagtatgatctcaaatatagatttttttgtaaatgctctttatccaattaagaaagtttccctctattagttttatgagatttttttttcattttgtgaatgggtgttagattttgtcagatgcttttttctgtgtctatataattatgagagttttcttctttatccttttgatatgattacatatatttcttgatttttgaatgttgaaccagccttgtatacctggaatt

SEQ ID NO: 277191 - DNA, 582 bp, Homo sapiens
tgtgaaaactacaacagccatgaggtttaatgtgtttcttgatccaaattgaggcttctcttcagaagtctctatatgatctcagaaaactttttgcgactgacctcaaggcatccaaattattttcaatggaaagggcatccaagatttaaaaatacgctctaggcctggaaggaccctggagcccagattggaagggtggggtggttgagtgctgctgctggaagctctcgtaaaaggggtgaatgaagtaaacatcattagaattgctgggtgccagaggcgcctgtgtgacatgtctggatggcttcaccgagacacacaactgattagatattcaaagtcaggtgctaagaaaccaaggtcatgccatactgcatttctctcaaacaactgggcccagataagttaagcagtgggtgatacccccagacagataaggtggcaatttttaacaatcttaaaatattgttacagcaaggaaggtmgtgataagatcaaagcatttggaattatgttaacgggtgctgggatttcttttgccctcccctctccctgagcctcccccttcctgccacgtct

SEQ ID NO: 277192 - DNA, 559 bp, Homo sapiens
ctcacactataaagacacattttaaataaattgaatatttaaatgtaaaatttgaagctaggaaatattagaaaattattggtaagctaactgatttggttatgcacaggatcatttaaactatatagttatagtcatttgaaaaagtcttaaaattttatatatgtaattgtctacattaaaaattgttttctatgcatttaaaaaattataaattgaatggcaaaaaagactagaaaaatgttttyaaaaattatagaacagtgctattattcttatatgtcaggaactcataaatcagtaaaataaatatttaacattctttagataatatggtaaagaacaagaaaaaaacaatttactacagaaaaaagaaaacagaacatatgggaaatagttgaccacatattaaatcgaagatatgcaaccctaagtaaaaaagatgacatttttagtatgtcaagttggctaaaacttgcctttacattgctcttttccccctgccacaagaccaaaataggagcttttccttcagcctgaccccaaaatgcagaacatg

SEQ ID NO: 277193 - DNA, 608 bp, Homo sapiens
tactacctcggttccaatttaccagaaattacattgtatttaataaaaatataacaaatgacatgtagaaaactttcatataacaagtttaccgttttaggttttaggttttaatcaggytttaggaatttcttcatgcctcagaggattacactgaatattcagaacatcaaacaccctttttaagaacagagctattatatcttaggattgttaataaaatagatgctataggaattaacagctcaccagtttgcatccctgtgaaataaagaagaaacattgtggctggtagttagaaatgtccttcacagaaaagtaatgcagaatttattttaaaatattttgttataaaacataaccacaagaagcataatttaataaaatatctctcaaaagtaacaaatatgctactgaaaaatgacacacgacatctcaatgcagataaaggaaaacatttttgttagaaaacctgctgacctcatcacctgactttaatattaaaatgtgatagacttgaagaataatgaaaaacaaaaactgtgtcactgttaaataacagaaagtgagaaataatgcaaggtgtaaaattttcttctgtttatggc

SEQ ID NO: 277194 - DNA, 550 bp, Homo sapiens
gtgtatctgtctggtcctggtcttttttgttgttgttgggakattttttattactgatttgatttcattactaagtattccaataaacatataaaataaatcctgaacatcactaaccatcagagaaatgcaaattaaaaccacaatgagatattatatcagtcagggtggctattattgcaaagttaaaaaacaacatatgttactgtggatacagagtaaagagcaggcttatacactgttggagggaatgtaaattagttcaacctctatggaaaacagtatggcgatatcccaaagaagtaaaaatagaactaccatttgattcagcaatcccactactgggtatctacctaaagaaaaataatccattatatacaaaataacctgcactcatatgttcatcgcagcactattcacaatagcaaagtcatggaaccaacctaagtgattaccaagggttggtggacacttatcacattttctctatacacatacctaccacgttttctttatattatatatatacacacacacacatacacacaca

SEQ ID NO: 277195 - DNA, 550 bp, Homo sapiens
gtgtatctgtctggtcctggtcttttttgttgttgttgggagattttttattactgatttgatttcattactaagtattccaataaacatataaaataaatcctgaacatcactaaycatcagagaaatgcaaattaaaaccacaatgagatattatatcagtcagggtggctattattgcaaagttaaaaaacaacatatgttactgtggatacagagtaaagagcaggcttatacactgttggagggaatgtaaattagttcaacctctatggaaaacagtatggcgatatcccaaagaagtaaaaatagaactaccatttgattcagcaatcccactactgggtatctacctaaagaaaaataatccattatatacaaaataacctgcactcatatgttcatcgcagcactattcacaatagcaaagtcatggaaccaacctaagtgattaccaagggttggtggacacttatcacattttctctatacacatacctaccacgttttctttatattatatatatacacacacacacatacacacaca

SEQ ID NO: 277196 - DNA, 554 bp, Homo sapiens
taaaggtggagataatagacactggggactacaaaagaagggagcatgggagaagggtgagggttgaaaaatgttcaatattttgatgatgagtacactagaagcccaatctcaaccattatgcacatagtacccatgtaacaaacaagcacatgtatcctctgaatctaaaataaaaatgtaaaaaacagttttatttacaacagtatcaaaaagaaaaaattttgcagtaaatttatcaaaggagaagacttatactctgaaaactataaaacattgttgaaataaattaaagaaaatctaaacaaatggaaaaatatcycgtgttcacagatctaaagacttaacattgtaatgatgggagtactttccaaattgatctataatccctctcagaattgcagctgacttctttgcagaaattcacaagatgattctaaaagtcacacttattacaaaggacttttatgttgttttagttgcaatcctgatacagaaaaatatagtaggagaaattacactgctgtatttcaaaatttactgcaaaacaacaa

SEQ ID NO: 277197 - DNA, 623 bp, Homo sapiens
agaaatctaaaagtttggaaaacatattgaagggaataatcaagaaaacttccctggccttgctggagatctaaacattcaaatccaagaagctcaaagaacacctgggaaattcatcataaaaagatcatcacctagacacatagtcatcaggttacctaaagtaaagatgaaggaaaggactttaagaactgtaaggcaaaagcatcaggtaacttataaagggaaacctatcagattaacagcagatttctcagcagaaaccctacaagctagaagggattcgggttctatctttagcctccttaaacaaaacaattatcagccaagaattttgaatccagtgaaactaagcttcataaatgaaggaaagatacagtcttttccagacaaacaaatgctgggagaattcaccataaccaagctagtactacaagtactgctaaaaaaaagttctaaatctcaaaacaaatctttgaaatacacaaaataaaatctccttaaagcgtacatctcacaggatctatgaaacaataacacartgaaaaaacctagatattcgggtgacaaatagcatggtgaatagaatagtacctcaaatctcaataataacattgaatgta

SEQ ID NO: 277198 - DNA, 546 bp, Homo sapiens
tgtaggatttaggtaggtggagaggtaagaaatggcacaaaagtccaaggagataacaacaacaaaaaacaatacagaaaagtagtttgctatgtgcagaggcccagaagctgctgcataaaactggagcacccaggatggaccatgagtgttcagtcagtagcaaatcatggaaggctttttgtgtcaccctaaggatttgaactttaccttatggctgagagaaacataataagatttacatttcagatccaccattctggtggctgtgtggagaatggatctagttagaaggctactgaaaaaaaaaaaggataatgcatggaagttggacatatactagaaggcaaagattcaagaaataaaaagtaaaattgtcaggtcctaatggatgtggaagctgaaggggaggagggagccacagataattctaagttgagaaatagatgcacartgataacacagaatctacagagatgggagtttgctgagttggtaccatgaagattttaatgtgacatgcactgagactgaacagcccatgaa

SEQ ID NO: 277199 - DNA, 623 bp, Homo sapiens
aataatattttaattttacctgcatattcatatcttcctctattctaatttccctctgtccttattaaaagtgagagaataggcttaataaagtatctagctcaggtaggtcctgaataaatgttaattcactttcattctccaaatttmttttgcttcaacctctgacattcaagttcatagttataaagagagcttagtaataattgaacatatgacacagggccaagtgccgctgtgtctaaaacaagtaataaaaattttacccacaccctctctgaaatttatattctattattataaaggcttttattccattcacagacaatgttttacacatgagtgaaaaagtagtaaaaatgccgactcaggcataaatatagcacttgctgtaaataatggaggaaataatatgtagaccaaaactccgccttctgaaataaagtacaatcaaatgtcatattagagatagccctagatatcaaaggaaggataccagaaaactgtaggtacaaaaaagacttccctcttgttctttttgacacatcatttgagtgatcttgggaaatctgtttaaccctctgaggctcagagtctacttgtataaaatgagaataataatg

SEQ ID NO: 277200 - DNA, 580 bp, Homo sapiens
caggtaggtcctgaataaatgttaattcactttcattctccaaatttattttgcttcaacctctgacattcaagttcatagttataaagagagcttagtaataattgaacatatgacacagggccaagtgccgctgtgtctaaaacaagtaataaaaattttacccacaccctctctgaaatttatattctattattataaaggcttttattccattcacagacaatgttttacacatgagtgaaaaagtagtaaaaatgccgactcaggcataaatatagcacttgctgtaaataatggaggaaataatatgtagaccaaaactccgccttctgaaataaagtacaatcaaatgycatattagagatagccctagatatcaaaggaaggataccagaaaactgtaggtacaaaaaagacttccctcttgttctttttgacacatcatttgagtgatcttgggaaatctgtttaaccctctgaggctcagagtctacttgtataaaatgagaataataatgtgcattgatcagggttgtgacaaagactaaataactcatgaatgagaaatcactttatt

SEQ ID NO: 277201 - DNA, 580 bp, Homo sapiens
caggtaggtcctgaataaatgttaattcactttcattctccaaatttattttgcttcaacctctgacattcaagttcatagttataaagagagcttagtaataattgaacatatgacacagggccaagtgccgctgtgtctaaaacaagtaataaaaattttacccacaccctctctgaaatttatattctattattataaaggcttttattccattcacagacaatgttttacacatgagtgaaaaagtagtaaaaatgccgactcaggcataaatatagcacttgctgtaaataatggaggaaataatatgtagaccaaaactccgccttctgaaataaagtacaatcaaatgtcatattagagatarccctagatatcaaaggaaggataccagaaaactgtaggtacaaaaaagacttccctcttgttctttttgacacatcatttgagtgatcttgggaaatctgtttaaccctctgaggctcagagtctacttgtataaaatgagaataataatgtgcattgatcagggttgtgacaaagactaaataactcatgaatgagaaatcactttatt

SEQ ID NO: 277202 - DNA, 636 bp, Homo sapiens
tgcttttccaaaaatatatatctagtcatttttatcatggtgaatccatatgtgaggaaataataatagttcaattataaaaacataaaatatgtgtggatttttatcatttaataaatgtaagaactaatacattgaatttatmtgattttatacaatttttttaaatcaattttaaaattatatacacacacatgtagaatttactcattgatttcacttataaatttggagatacagacctattaaacagtagaaaattcttcaaaggatcaggttgaaaaccctttagccagtgtcagagcctgctgggcactatggtcacttagtgcttatatatcacctggaagatgaagacctgtctagctggcattttgttgtgctagagtttccaaattctagattccctcctctttcaacagtctcaatttctttcaatgaatatgattttctcttgtccttaatgatctctatgttttgctcttttttaataaaatagattttattttttagagcagttttaggtttacagaaaaatcaagtaggaagcacagagttcccccataccctatactcccacacatgcacagcctcccctgctatcaacatcctgcaccagagtggtatatttgttat

SEQ ID NO: 277203 - DNA, 636 bp, Homo sapiens
tgcttttccaaaaatatatatctagtcatttttatcatggtgaatccatatgtgaggaaataataatagttcaattataaaaacataaaatatgtgtggatttttatcatttaataaatgtaagaactaatacattgaatttatatgattttatacaatttttttaaatcaattttaaaattatatacacacacatgtagaatttactcattgatttcacttataaatttggagatacagacctattaaacagtagaaaattcttcaaaggatcaggttgaaaaccctttagccagtgtcagagcctgctgggcactatggtcacttagtgcttatatatcacctggaagatgaagacctgtctagctggcattttgttgtgctagagtttccaaattctagattccctcctctttcaacagtctcaatttctttcaatkaatatgattttctcttgtccttaatgatctctatgttttgctcttttttaataaaatagattttattttttagagcagttttaggtttacagaaaaatcaagtaggaagcacagagttcccccataccctatactcccacacatgcacagcctcccctgctatcaacatcctgcaccagagtggtatatttgttat

SEQ ID NO: 277204 - DNA, 1231 bp, Homo sapiens
aatttgcatttctctgatgattagttttctgagtatgcctgttggctatttctttgtcttctttttaaaaatgtctattcatgtcatttctccatttttaatgggattatttggtttttgttgctgttcttgagttccttttaaagtctggatattagtcccttgtcagatgcatagtttgcaaatattttattttattcgcagattctgtttactctgttgattatttcttttgttgtgcagacrctttgtcatttaattaactcccatttgtctatttttgttcttttgcctgtgcttttgaggtcttagtaataaattatttgcttagaccaatgtttactagagttttttcttagtgtcctagtattttcatagttccatgtcttacaattaaatatgtaatccaccttgagtcgattcttgtatatatggtgagaaatgtgggtctagtttcattcttttgcatatggtgattcaatttttctttcccagcactttattgaaaaacgtgtcctttccccagtgtatgtttttgttggctttgtgaaagatcagttggctgtaaatgtgtggctttattgctggattctctattctattccattgatctatwaatttgcatttctctgatgattagttttctgagtatgcctgttggctatttctttgtcttctttttaaaaatgtctattcatgtcatttctccatttttaatgggattatttggtttttgttgctgttcttgagttccttttaaagtctggatattagtcccttgtcagatgcatagtttgcaaatattttattttattcgcagattctgtttactctgttgattatttcttttgttgtgcagacgctttgtcatttaattaactcccatttgtctatttttgttcttttgcctgtgcttttgaggtcttagtaataaattatttgcttagaccaatgtttactagagtttwttcttagtgtcctagtattttcatagttccatgtcttacaattaaatatgtaatccaccttgagtcgattcttgtatatatggtgagaaatgtgggtctagtttcattcttttgcatatggtgattcaatttttctttcccagcactttattgaaaaacgtgtcctttccccagtgtatgtttttgttggctttgtgaaagatcagttggctgtaaatgtgtggctttattgctggattctctattctattccattgatctat

SEQ ID NO: 277205 - DNA, 553 bp, Homo sapiens
cagatgcatagtttgcaaatattttattttattcgcagattctgtttactctgttgattatttcttttgttgtgcagacgctttgtcatttaattaactcccatttgtctatttttgttcttttgcctgtgcttttgaggtcttagtaataaattatttgcttagaccaatgtttactagagttttttcttagtgtcctagtattttcatagttccatgtcttacaattaaatatgtaatccaccttgagtcgattcttgtatatatggtgagaaatgtgggtctagtttcattcttttgcatatggtgattcaatttttctttcccagcactttattgaaaaacgtgtcctttccccagtgtatgtttttgttggctttgtgaaagatcagttggctgtaaatgtgtggctttattgctggattctctattctattccattgatctatgagtctgttgttatrgtatcatgctgttttgatcactatagccttattgtataatttgaacttaggcagtgtgaggtctccagctttttttttttctgattccg

SEQ ID NO: 277206 - DNA, 553 bp, Homo sapiens
cagatgcatagtttgcaaatattttattttattcgcagattctgtttactctgttgattatttcttttgttgtgcagacgctttgtcatttaattaactcccatttgtctatttttgttcttttgcctgtgcttttgaggtcttagtaataaattatttgcttagaccaatgtttactagagttttttcttagtgtcctagtattttcatagttccatgtcttacaattaaatatgtaatccaccttgagtcgattcttgtatatatggtgagaaatgtgggtctagtttcattcttttgcatatggtgattcaatttttctttcccagcactttattgaaaaacgtgtcctttccccagtgtatgtttttgttggctttgtgaaagatcagttggctgtaaatgtgtggctttattgctggattctctattctattccattgatctatgagtctgttgttatggtatcatgctgttttgatcactatagccttatkgtataatttgaacttaggcagtgtgaggtctccagctttttttttttctgattccg

SEQ ID NO: 277207 - DNA, 492 bp, Homo sapiens
ccaccatgagagtccaatccactgtagtctctttcaagcatttcaccaaccctggatgttgaattagcacctgtttactatgacacagatatttaaatattttagttmtttatagattgtcttgtgtgtgtttgtgttaataaagcatttctttaacagaaaaaaataaaaacaattaagttggtggggatgtggtggtgtgcacctgtagtcccaactacttgggaggctgaagcaggagaatcgcttgaacccaggaggcggaggttgcagtgagcagatattgtgccactgcactccagcctgggtgacagatcaaaactgtctcagaaaaaaaaaaagtgaaaggaagggatttggggagggtcagggaagggagggaactggggaagtgtacacacaggaccacacagacacatgcacccacacaggcacagaaggaaagggttgggatagggatagggtgcacagaaggacagaataggaccccca

SEQ ID NO: 277208 - DNA, 492 bp, Homo sapiens
ccaccatgagagtccaatccactgtagtctctttcaagcatttcaccaaccctggatgttgaattagcacctgtttactatgacacagatatttaaatattttagttatttatagattgtcttgtgtgtgtttgtgttaataaagcatttctttaacagaaaaaaataaaaacaattaagttggtggggatgtggtggtgtgcacctgtagtcccaactacttgggaggctgaagcaggagaatcgcttgaacccaggaggcggaggttgcagtgagcagatattgtgccactgcactccagcctgggtgacagatcaaaactgtctcagaaaaaaaaaaagtgaaaggaagggatttggggagggtcagggaagggagggaactggggaagtgtacacacaggaccacacagacacatgcacccacacaggcacagaaggaaagggttgggatagggatagggtrcacagaaggacagaataggaccccca

SEQ ID NO: 277209 - DNA, 538 bp, Homo sapiens
caacatatataacccataacagactcactttatatttaagaacatgcatagactgaaagtgaaaagatgaataaagatagtraatcaaatagaaaccaaaagagagcaggggtgactatacttatataagacaaaatagactttaagtgaaaactgtcatgaggaacaaagaaagtcattaaataatgataaagcaatttatcaagaaggcataacaattgtaaataaataggcagccaatattggagtacctagatatgtaaagtaaatattaaccaaactgaagggaaagatagacagcaatacaataatagtaggggacttaaataccccactttcaacaataggtagatcatccagacagaaaatcaataagaaagcagtaaacatgagcagcactatagaggaaatggacccaaagaacatacacagaacagtccatccaacagaagagtacacattcttctcaagaacacatggaatattctctggaatagatcatacggcaggccacaaaatcagtcctaacaaatttaag

SEQ ID NO: 277210 - DNA, 571 bp, Homo sapiens
caataatagtaggggacttaaataccccactttcaamaataggtagatcatccagacagaaaatcaataagaaagcagtaaacatgagcagcactatagaggaaatggacccaaagaacatacacagaacagtccatccaacagaagagtacacattcttctcaagaacacatggaatattctctggaatagatcatacggcaggccacaaaatcagtcctaacaaatttaaggtcaaaattataccaagtatcttttctgaccacagtgttatgaaactagaaatcaataacaggagacaaactggaaaatttcacaaatatgtagaaattaagcaacactctactaaacaaacagtgaaagaaaaaatcaaaaaatatcttgagacaaataaaaatggcaacacatataccaaaacttatgggatacagcaaaagcagttctaagaagtttatagcaataacaacatacattaagaaaaaagaatgatcacaaataaacaacctgttataccttatggaagaagataaagaagaacaaactaagctcacaattagcaaaaagaagaaaa

SEQ ID NO: 277211 - DNA, 1083 bp, Homo sapiens
caataatagtaggggacttaaataccccactttcaacaataggtagatcatccagacagaaaatcaataagaaagcagtaaacatgagcagcactatagaggaaatggacccaaagaacatacacagaacagtccatccaacagaagagtacacattcttctcaagaacacatggaatattctctggaatagatcatacggcaggccacaaaatcagtcctaacaaatttaaggtcaaaattataccaagtatcttttctgaccacagtgttatgaaactagaaatcaataacagragacaaactggaaaatttcacaaatatgtagaaattaagcaacactctactaaacaaacagtgaaagaaaaaatcaaaaaatatcttgagacaaataaaaatggcaacacatataccaaaacttatgggatacagcaaaagcagttctaagaagtttatagcaataacaacatacattaagaaaaaagaatgatcacaaataaacaacctgttataccttatggaagaagataaagaagaacaaactaagctcacaattagcaaaaagaagaaaawacttccaaatttctatatatgaaagttgagaaggtgacaaaatagaagatggattcagaatcactgtaatatatcaagatttctcawtctcggcactactgacatttgagacagataattctttgttacatggactgtcctgtgcattgtaggatgcttagcagcatccctggcctctacccactagatgccagtagcatttcctttagttttgacaaccaaaaatgtctccagacactgccaaatgtcctatttttgtggcggggctgggagaaaattgccactttattatattaaataattatttcttctcctagaaaataaaggtcaagaagttaaagtttaaagaaaaggtaataaaaaatatatacaacacttttcaccttttattctatatcaggcaaactgtatgaaatgcataaggagcaatccactaaatataaatctgtcatttgattcaaataactggtcacaacctgtgtgcatgagaaatgtgggttttgtggttttt

SEQ ID NO: 277212 - DNA, 511 bp, Homo sapiens
acttccaaatttctatatatgaaagttgagaaggtgacaaaatagaagatggattcagaatcactgtaatatatcaagatttctcattctcggcactactgacatttgagacagataattctttgttasatggactgtcctgtgcattgtaggatgcttagcagcatccctggcctctacccactagatgccagtagcatttcctttagttttgacaaccaaaaatgtctccagacactgccaaatgtcctatttttgtggcggggctgggagaaaattgccactttattatattaaataattatttcttctcctagaaaataaaggtcaagaagttaaagtttaaagaaaaggtaataaaaaatatatacaacacttttcaccttttattctatatcaggcaaactgtatgaaatgcataaggagcaatccactaaatataaatctgtcatttgattcaaataactggtcacaacctgtgtgcatgagaaatgtgggttttgtggttttt

SEQ ID NO: 277213 - DNA, 511 bp, Homo sapiens
acttccaaatttctatatatgaaagttgagaaggtgacaaaatagaagatggattcagaatcactgtaatatatcaagatttctcattctcggcactactgacatttgagacagataattctttgttacatggactgtcctgtgcrttgtaggatgcttagcagcatccctggcctctacccactagatgccagtagcatttcctttagttttgacaaccaaaaatgtctccagacactgccaaatgtcctatttttgtggcggggctgggagaaaattgccactttattatattaaataattatttcttctcctagaaaataaaggtcaagaagttaaagtttaaagaaaaggtaataaaaaatatatacaacacttttcaccttttattctatatcaggcaaactgtatgaaatgcataaggagcaatccactaaatataaatctgtcatttgattcaaataactggtcacaacctgtgtgcatgagaaatgtgggttttgtggttttt

SEQ ID NO: 277214 - DNA, 539 bp, Homo sapiens
tctcttcttttctctcatccgtttctttttccctatttgaaagaaaataatactaaaatcatgagtgtattagtcagggttcttgagaaacaataggagaattggcttacagattatggaagccaagaaattatccgatcagttaagccagaaagggagaratagcaacactggtgtaagttctgaagtcagaaggcccaagaaccaagaggtccaatgtccaaaggcaggagaagatgaatatcctatcttgaaaacagggacaatttgcccttcctctgcttttcattctttttaggtcctcaatggattggatgatgtccagctgtttaggtgagggcatcttctttacccagtctactatctcaaatgctaatctcttccagatataccctcagaggcacacccagaaataatgtttaactggctatctgggcatctcttagtccagtcaagttgacacactaattgacaatcacaatggatataacccatgtgtattatataatactttaaggatcatataaagaactattaaa

SEQ ID NO: 277215 - DNA, 539 bp, Homo sapiens
tctcttcttttctctcatccgtttctttttccctatttgaaagaaaataatactaaaatcatgagtgtattagtcagggttcttgagaaacaataggagaattggcttacagattatggaagccaagaaattatccgatcagttaagccagaaagggagaaatagcaacactggtgtaagttctgaagtcagaaggccyaagaaccaagaggtccaatgtccaaaggcaggagaagatgaatatcctatcttgaaaacagggacaatttgcccttcctctgcttttcattctttttaggtcctcaatggattggatgatgtccagctgtttaggtgagggcatcttctttacccagtctactatctcaaatgctaatctcttccagatataccctcagaggcacacccagaaataatgtttaactggctatctgggcatctcttagtccagtcaagttgacacactaattgacaatcacaatggatataacccatgtgtattatataatactttaaggatcatataaagaactattaaa

SEQ ID NO: 277216 - DNA, 539 bp, Homo sapiens
tctcttcttttctctcatccgtttctttttccctatttgaaagaaaataatactaaaatcatgagtgtattagtcagggttcttgagaaacaataggagaattggcttacagattatggaagccaagaaattatccgatcagttaagccagaaagggagaaatagcaacactggtgtaagttctgaagtcagaaggcccaagaaccaagaggtccaatgtccaaaggcaggagaagatgaatatcctatcttgaaaacagggacaatttgcccttcctctgcttttcattctttttaggtcctcaatggattggatgatgtccagctgtttaggtgagggcatcttctttacccagtctactatctcaaatgctaatctcttccagatataccctcagaggcacacccagaaataatgtttaactggctatctgggcatctcttagtccagtcaagttgacacaytaattgacaatcacaatggatataacccatgtgtattatataatactttaaggatcatataaagaactattaaa

SEQ ID NO: 277217 - DNA, 615 bp, Homo sapiens
cagaatgaaaattagaaactaaaatctataggaaagaatgaaaaatgctgcaaatagtaaacatgtggataaatgtaaagtcttttaaaattatttttctcatttgccaatttctttaaaatataattgttcaagcaaaaataatagcaatgtatcttggggtttataacacgtacaagtaaaatgtatgactataatagcaaaaaggttggaatggggaaaatgaaaatacactactataatattcttacactatatataaagtgttatagtattattgttggaagatagactagagtaagttgaatatgggtactccaaaccttaaaacagccattaaaaaacaaaaaacaaatccaagaattagckctaataaaccttaaaagtgaaagaacaaagtaaaatataccatttaggcctaagcagaagaaagctaaaacagctatattaatttcagatgaaggtcatttttagaatgaatgaaaaatgttaccaggaataaagatggacattttataatcataaaggtatttattcatctagagaatgtaatcctaaatgtttgcatatctaataaatatacaaatacattagaattctaaagtatatgaagca

SEQ ID NO: 277218 - DNA, 562 bp, Homo sapiens
atgttgcaatatcttttgaggctgaaagaaggaaactcaatgaaagaattctayatgaggtgtcaatgtatcactaatgtgaataaatcaaattaaatatttcaagaatgggggtcttatggttaaaaatagtattaaaaataaacattaacgcatgaaacataaacttagatttttaaagttttgaatatttataaaattggatgcaaatagccaaattaattatgtaatgaaattatataatatcaaatgatgtagttgcattaatctgggttatattaccaaaaactaggaagcaattataagaatgagaaatgggttagggaaagaataaaaatatgcagtattctttaaaacactcctttcagtcttgacatcagaaagaactttagagacctttaacttaaaagcgtgctttgaagtttaaaggcatcacaagaacagtttcaaatgcaataagaattctggctcaagaggactctgggtagtaattccaaaatcatcctctcaacttctcactaaatagcttctgaaaacaaaaataaataaaaattcttgataa

SEQ ID NO: 277219 - DNA, 562 bp, Homo sapiens
atgttgcaatatcttttgaggctgaaagaaggaaactcaatgaaagaattctacatgaggtgtcaatgtatcactaatgtgaataaatcaaattaaatatttcaagaatgggggtcttatggttaaaaatagtattaaaaataaacattaacrcatgaaacataaacttagatttttaaagttttgaatatttataaaattggatgcaaatagccaaattaattatgtaatgaaattatataatatcaaatgatgtagttgcattaatctgggttatattaccaaaaactaggaagcaattataagaatgagaaatgggttagggaaagaataaaaatatgcagtattctttaaaacactcctttcagtcttgacatcagaaagaactttagagacctttaacttaaaagcgtgctttgaagtttaaaggcatcacaagaacagtttcaaatgcaataagaattctggctcaagaggactctgggtagtaattccaaaatcatcctctcaacttctcactaaatagcttctgaaaacaaaaataaataaaaattcttgataa

SEQ ID NO: 277220 - DNA, 566 bp, Homo sapiens
cctgtgatgggagaggctgccacaaagaactctggcatgctctggagacatttttctcatgatcttggctactaacttattgctccttattacttaggcaaatttctgcagcagccttcaatttctcccaagaaaatgggtttttcttttctacctcatggtcacgctgcagattttctaaacatttatgttctgttttcctttaaaataaatttccagtttcaggtattctctttgtgaatgcatatgaccaaacactttyggaatcagccaggtcacttcttgaatgctttgctctttagaaatttcttccaccagataccctaatcatctctctcaagttcaaatttccccagatctctagggcaggagcaaaatgccaccagtctctttgctaaagcatggtaagagtaacatttgctccatttcccaataagttccatctgagaccatctcaagcttgacttcattggccatccatgtcattatcagggttttgatcaaaaccattcaacaagtctttaggaagttccaatctttccctcatctttctgtctttttctgag

SEQ ID NO: 277221 - DNA, 600 bp, Homo sapiens
tttaaaacttgattctggctatttgtttgacccaggaggtgaaattaggttactgcagactgatttattatgcatttcttctctccaagaataagtgaagccttcctttgatctgcagaaattgtgcagaaaaaattaagatgactggcaaaatagtccttccttcaacactcctggcttttctacaagagtttgccccattcagtttttcaacaagcctttctaaggcttcattgaactcaacctataactgggttctgtgatagacacaaaagagaatagttccctgcttttaatgaaggtagtagcttatataggaagacagttaacttacgtgaaatctatgtctatatacaagcttcagctaatgcactccaaaatacacaagtgctgagaatagcagaaaaaggagaaaaattgcccatatttccagatatacaaaccctttgtttctcatcttaagacgcagacgaaaggggaaacatttgtctttgatttcctggccactggcacttttgagtctttgcaatttgtgaggtttctatacactrggaagccataagagggccacaaataggatgagtatgttagcaacaagta

SEQ ID NO: 277222 - DNA, 603 bp, Homo sapiens
ctaatatataatttttagaaagatattcccacatcctaatgtttacacaatcattttttcttaacccttgaaagaaactcaaaggttaagggattataatatattttggtaaagaacctgttatgggctgaattgtgtatccttcccctcctcctaatctcaraatgtgactgttttgatggtagggtctttaaataagcaattaagttacaatggagtcattagggtaggccccagtacagtatgactggtgtccttataaaaggagaagattagggcacatacaacacagatgaccacgtgagaacacaacaagaaggcagccatctgcaaaccaaagacagaggcctcaggagaaaccaaaactgccaacactttgagcttagacttccagcctccagaactgtgggaaagtaaattaaatttctgttgtttaagccacccagtccatggattttttcctggaagtcctaatgcagaaccacagtctgatgttgagcaatccattcaattttacttaatttatcatcatttcttaaatgcaaagaacaaataaaattaaatagcatatagaatatgatcaaaattttaaaggtatttcta

SEQ ID NO: 277223 - DNA, 1199 bp, Homo sapiens
acaacacagatgaccacgtgagaacacaacaagaaggcagccatctgcaaaccaaagacagaggcctcaggagaaaccaaaactgccaacactttgagcttagacttccagcctccagaactgtgggaaagtaaattaaatttctgttgtttaagccacccagtccatggattttttcctggaagtcctaatgcagaaccacagtctgatgttgagcaatccattcaattttacttaatttatcatcatttcttaaatgcaaagaacaaataaaattaaatagcatatagaatatgatcaaaattttaaaggtatttctactctcttactctattcctgatactattacagaacacttcagactgagtgatttataaacaaattcattgctccacagttgtggaggctgggaagtccaagatcaagccaccagcaaattcagtatctggtgaaggttcaggctctgcttccaaggcagcaccttgaacaaggggccaaaagctttgtmttcacatggtaaaagggatggaaggtgataggtggctccctcaagcctcttttataagggcattaattccatccatgaggctccacataatcacctccwatgaccattgttaaatatgcctattaaattaaaaatagttataacattattgaagtttttacctaaaaacataacaggaagtcattctagaactttctaacatagataccattgtaaagttcagacataagatcgctgctttaaattttcactgaaaactcaatacgtgaaagctggttgcaatcactttaatgttttccaggattaaaaaataattactagtacaaaaaaaaactacatgtgcttataaagtgtcaacatttaatatttcttaattatttaagacatcagtagcaagtaggattatgcaatgccaggatataaatggctcagctactctttggtgtattttaaacctatctcccattgtttgattaaaagacatgttattatctaaaagtcacatgtagaggtcttaaatcattgtatctacaacwtcaaagaataagatgtttattactgaagaagtcatttaattgtatacatcccaagacatgaagtttccagctagagttgtctagtccatcacactgcttcaaagagcacagaagctcaatatctaattgggaatggaggaggatgaacagcaatg

SEQ ID NO: 277224 - DNA, 609 bp, Homo sapiens
tccactgcttataaatggtagcttcaatcaaaactcaggccgtttgactccagtgctcacattttcatactgtggctatacaatggagagaaacacacacacacacacacacacacacacacacacacrcacgcattgtcaaccatttctattctgtggtatttttattattccaggattttaaaaaataacagatgaaactgccttttcattggcacatgcaatttttttgacagaagataccacaaatatgtggaacagataaataaaatataaagtactatataattaatatacatggtaaatagtatagactaagaacaacatagagataagaaaatggggcagtgatgtggactgaaatagttagaaaaagattttccagaggtagtagacttgaaatggattttgacatttgagtgataattggacagttgtatttgagaatggatactattctcatctgaaagaaaaccacacaattagctgtacaataaataaaagttagagaggatcaccttagttgtataaaatgtaaagagcccataaagttacacagcatcatgataagattattaataccaattacacctaaaggttatctacttt

SEQ ID NO: 277225 - DNA, 609 bp, Homo sapiens
tccactgcttataaatggtagcttcaatcaaaactcaggccgtttgactccagtgctcacattttcatactgtggctatacaatggagagaaacacacacacacacacacacacacacacacacacacgcacgcattgtcaaccatttctattctgtggtatttttattattccaggattttaaaaaataacagatgaaactgccttttcattggcacatgcaatttttttgacagaagataccacaaatatgtggaacagataaataaaatataaagtactatataattaatatacatggtaaatagtatagactaagaacaacayagagataagaaaatggggcagtgatgtggactgaaatagttagaaaaagattttccagaggtagtagacttgaaatggattttgacatttgagtgataattggacagttgtatttgagaatggatactattctcatctgaaagaaaaccacacaattagctgtacaataaataaaagttagagaggatcaccttagttgtataaaatgtaaagagcccataaagttacacagcatcatgataagattattaataccaattacacctaaaggttatctacttt

SEQ ID NO: 277226 - DNA, 609 bp, Homo sapiens
tccactgcttataaatggtagcttcaatcaaaactcaggccgtttgactccagtgctcacattttcatactgtggctatacaatggagagaaacacacacacacacacacacacacacacacacacacgcacgcattgtcaaccatttctattctgtggtatttttattattccaggattttaaaaaataacagatgaaactgccttttcattggcacatgcaatttttttgacagaagataccacaaatatgtggaacagataaataaaatataaagtactatataattaatatacatggtaaatagtatagactaagaacaacatagagataagaaaatggggcagtgatgtggactgaaatagttagaaaaagattttccagaggtagtagacttgaaatggattttgacatttgagtgataattggacagtygtatttgagaatggatactattctcatctgaaagaaaaccacacaattagctgtacaataaataaaagttagagaggatcaccttagttgtataaaatgtaaagagcccataaagttacacagcatcatgataagattattaataccaattacacctaaaggttatctacttt

SEQ ID NO: 277227 - DNA, 586 bp, Homo sapiens
gttgaactagtttaaactcccaccaacagtatatgtgttcccttttctgcacaacctcaccagcatctattattttttgactttttactaatagccattctgactagagtgatatggattctcattgtggttttgatttgcatttttctaatgatcagtgatgttgagcatttttatatgattttttggtggtatgtatgtcttatcttaaaaagtgtctgttcatatctgttgcccactttgtaatggggtggttttttcrgtgttttttgtaaatttaagtttttcatagatgctggctattagacctttgtcagatgcatagtacgcaaaaattttctcccattctataggttgtctgtttacgcttcttttgctgagtagaagctcttcagtttgataagatcccatttgtgaattttgggttttgtcgcaattgcttttcacatcttcataatgaaatttttgcccattcctgtgttcagaatcttattgcttatgttgtcttccagggtttttattgttttaggttttatttttaagtctttaatctatcttgagtttatttttatttatggtataagga

SEQ ID NO: 277228 - DNA, 523 bp, Homo sapiens
gaggtattgggtaaatacatccattttaaatgggagaaagtggccagccctgtggctttgcagggaacagcacccctcctggctgctttcttgggctggcattgagtgtctgtggcttttccaggcacaaagtgcaagctgtcagtggatctaccattctagggatgatggccctcttctcacagctccactmgtcaataccccagtggggactctgtgtgggagctccaaccacacatttcccatctgcactgccctggtagtggttctccatgagggctctgcctctacagcaaacttctgcctggacatccaggcatttccatacatcctctgaaatctaggaggaggttctcaaacctcagtttttgacttctttgcacccacgtgtaaaccaccaaggcttgaggtttgtactctctgaagcaatggcctgagctgtatgctggccccttttatccagagctggagctgaagcagctggaatgcagggcaccacgttctaaggctgcacacagcagga

SEQ ID NO: 277229 - DNA, 553 bp, Homo sapiens
tgttccaagctctgttatccagttccaaacttgcttccacatttttgggtatctttacagcagcaccccacacstggtgccaatttactgtattaggccattctcaccctgctatgaagaaatatttaagactgggtaatttatgatgaaaagtggtttaattgattcacagttccacatggctgggagggcctcagaaaacttacaatcatggcaaaagtggaaacaaacacgtcctccttcacaaggcagcaggagagatatgccaaacaaacagggaaaagctccttataaaaccatcagatcacctgagaactcactatcacaagaacagcagcatagggtaaccaacgccataattcaattacctcccactgggtccctctcatgacacatggggattatgggaactacaatacaagatgagattttggtgggaatacacccaaaccatatcaggcagggattagactactcccttactgaggaaatacactggcccaaaagcagacctgtagctactgacagctggaaatcctcctagtaaaaatgg

SEQ ID NO: 277230 - DNA, 553 bp, Homo sapiens
tgttccaagctctgttatccagttccaaacttgcttccacatttttgggtatctttacagcagcaccccacacctggtgccaatttactgtattaggccattctcaccctgctatgaagaaatatttaagactgggtaatttatgatgaaaagtggtttaattgattcacagttccacatggctgggagggcctcagaaaacttacaatcatggcaaaagtggaaacaaacacgtcctccttcacaaggcagcaggagagatatgccaaacaaacagggaaaagctccttataaaaccatcagatcacytgagaactcactatcacaagaacagcagcatagggtaaccaacgccataattcaattacctcccactgggtccctctcatgacacatggggattatgggaactacaatacaagatgagattttggtgggaatacacccaaaccatatcaggcagggattagactactcccttactgaggaaatacactggcccaaaagcagacctgtagctactgacagctggaaatcctcctagtaaaaatgg

SEQ ID NO: 277231 - DNA, 481 bp, Homo sapiens
gattatatttaaagatatgaattttggagggacacattcatatcatagtagaggtcaccaaagaaaagtgaaactaatatattgaggagaattaatcttccgtgggagaatttgggtatgaattagtgatagytatatcaaaataaatcaaataataaataggcaattcatggctacagagaaagcaaaacagttctgtttctgaaagactacatagctcatgagggaactctagctagttataataatgtaaatattaaataccgattgatgaaaaaattatgaaaaaactctttcagggtattgggggagacatgtattagagagtcaatattagagagaaaatcttcatattccaaagcataataataaatcaaaattataaaatcaagaaattgcatgttatttaagccggcataagtatgttatttagactaagtaggtaattagccaaaaaaaaaaaaaaaaaaaagttaaaaag

SEQ ID NO: 277232 - DNA, 605 bp, Homo sapiens
gtaattagccaaaaaaaaaaaaaaaaaaaagttaaaaaggtttgcctttggagagtgggaattagaatgacccaggttaagctatgatgaagcagaggactcctattctttgttataggctgtcactttaactagactattaaatataatttaatttaaaaatgtaattatataagaaaatacagttttggtgacagaaaaagtatatctctgaaaatgatttgctatagcatcaaaaaaattacaagaaaatcaatttataaaaggcaacatgaaattaaaatrgactgaaacagctaacaacataatagaaaaataaaaataaacattaagaacaataaggagcatacaaactcttgcagaaaatagaaacaatattattgaggacaaatttaaaccataataaactaggaaaggtacaatgggatgaaaataataagagaaaaaataataaaaattgatgtcagagaagaggaccatatctacatgcggtgttaataaaggaaagttcaaaataaataaaaaaaaaatacagccctaatagaacaaaatattctgagctgaagaaaacaatctctgtatgttatttaaaaatgcttgcccag

SEQ ID NO: 277233 - DNA, 534 bp, Homo sapiens
gtctaaggctcaacaaagtcacaccattgggtctcattttccttttctgtaaatgtgatctagtcaaatgtttctcagaatttctacccatgtactcgaaaagtagaggtcgagraaatatatgtgtgctttgtgaggatctggcctgaaatgaccagtagcaaacaaaaaaaaatttttaatcccctctttatctgttgtatgcatgtgaaatttgcattctactccataaaatatgttttaatattgaaaaaaaattgttccctaaacccaaatttaagagcgaaatctgtggtgtagaggatgctctatgtttttttttttttctaggagtgtgtaccctacggcacattgccttgtacctagggagtgcccaacaacattaggtaaattccaagtccttccaggtctcactattctgttatgtgatcttgtgttttgcccaatattttagtttgtctttctttgttctctctctttttgtccaattcattatcttactttactccaagatgatttgaggggactctcaca

SEQ ID NO: 277234 - DNA, 534 bp, Homo sapiens
gtctaaggctcaacaaagtcacaccattgggtctcattttccttttctgtaaatgtgatctagtcaaatgtttctcagaatttctacccatgtactcgaaaagtagaggtcgaggaaatatatgtgtgctttgtgaggatctggcctgaaatgaccagtagcaaacaaaaaaaaatttttaatcccctctttatctgttgtatgcatgtgaaatttgcattctactccataaaatatgttttaatattgaaaaaaaattgttccctaaacccaaatttaagagcgaaatctrtggtgtagaggatgctctatgtttttttttttttctaggagtgtgtaccctacggcacattgccttgtacctagggagtgcccaacaacattaggtaaattccaagtccttccaggtctcactattctgttatgtgatcttgtgttttgcccaatattttagtttgtctttctttgttctctctctttttgtccaattcattatcttactttactccaagatgatttgaggggactctcaca

SEQ ID NO: 277235 - DNA, 653 bp, Homo sapiens
cacagtcatgttaaggaaataaaactatcagcagcacattgattttagtttattatatttatatagagtttgatagttcttctctttcattttagataaatgaaatggaatggagggggatatataagggaaaggtagagagctcgctagttcaaackaagaaaaagtctgaaatgtcaagtttaagaaagtatgttttgttaatcactagtacatactgtgcatatcctcaaattgtttctaggtagagatctttcagaaacttctttaacagcgctgagcacagtggctcatgcctgtaatcccagcactttgtgaggccaaggtggccagattgcctgaggtcagaaatttgagaccaggctggccaatatggtgaaaccctgtatttactaaatatacaaaaattagcagggcgtagtggcatgtgcctgtagtcccaggtactcaggaggctgaggcaagacaatcacttgaacctgggaggcggaggttggaggttgcagtgtgctgagattgctccactgcactcaagcctgggtgacaaagtgagaccctgtttcaaaaaaagaaaagaagaagaataaatttatttaacaggtatattagtattttgtaattaattttcctttaataaatagtttttggagtct

SEQ ID NO: 277236 - DNA, 653 bp, Homo sapiens
cacagtcatgttaaggaaataaaactatcagcagcacattgattttagtttattatatttatatagagtttgatagttcttctctttcattttagataaatgaaatggaatggagggggatatataagggaaaggtagagagctcgctagttcaaactaagraaaagtctgaaatgtcaagtttaagaaagtatgttttgttaatcactagtacatactgtgcatatcctcaaattgtttctaggtagagatctttcagaaacttctttaacagcgctgagcacagtggctcatgcctgtaatcccagcactttgtgaggccaaggtggccagattgcctgaggtcagaaatttgagaccaggctggccaatatggtgaaaccctgtatttactaaatatacaaaaattagcagggcgtagtggcatgtgcctgtagtcccaggtactcaggaggctgaggcaagacaatcacttgaacctgggaggcggaggttggaggttgcagtgtgctgagattgctccactgcactcaagcctgggtgacaaagtgagaccctgtttcaaaaaaagaaaagaagaagaataaatttatttaacaggtatattagtattttgtaattaattttcctttaataaatagtttttggagtct

SEQ ID NO: 277237 - DNA, 653 bp, Homo sapiens
cacagtcatgttaaggaaataaaactatcagcagcacattgattttagtttattatatttatatagagtttgatagttcttctctttcattttagataaatgaaatggaatggagggggatatataagggaaaggtagagagctcgctagttcaaactaagaaaaagtctgaaatgtcaagtttaagaaagtatgttttgttaatcactagtacatactgtgcatatcctcaaattgtttctaggtagagatctttcagaaacttctttaacagcgctgagcacagtggctcatgcctgtaatcccagcactttgtgaggccaaggtggccagattgcctgaggtcagaaatttgagaccaggctggccaatatggtgaaaccctgtatttactaaatatacaaaaattagcagggcgtagtggcatgtgcctgtagtcccaggtactyaggaggctgaggcaagacaatcacttgaacctgggaggcggaggttggaggttgcagtgtgctgagattgctccactgcactcaagcctgggtgacaaagtgagaccctgtttcaaaaaaagaaaagaagaagaataaatttatttaacaggtatattagtattttgtaattaattttcctttaataaatagtttttggagtct

SEQ ID NO: 277238 - DNA, 554 bp, Homo sapiens
actaggtcaaaattcttgcccccmcttaacagaccaaacaatacacacactcttgcatccacacaccagatataattttgctcaattctctaagtgcttcagggagtgttcccattactgcttgattctgggagctttccagtgtcagcagcctgaacaccaacatgagtgggcgatatcttcctccatgcttctggggaagcagtaagcatcctgaatcaaacctgaatatttagggttttttatttgtctttggcaaagctctaaaattccagatttgcaagttgtcggcccaggagccctggcacattatttgagataactcatcttctttgactcttctctgtagctcctgaccatgaaagtctgtagttaagtgcaacaaacacttatttatgggatatccatgccttattgtttaaatcttttataatgaggttataaaagctcctgattctgtaggataaaatcactaatttggatttcttaagcagctttggatagcatatagagacgacaaaactgttgaatttacaaaagcgagggatgaagga

SEQ ID NO: 277239 - DNA, 554 bp, Homo sapiens
actaggtcaaaattcttgcccccacttaacagaccaaacaatacacacactcttgcatccacacaccagatataattttgctcaattctctaagtgcttcagggagtgttcccattactgcttgattctgggagctttccagtgtcagcagcctgaacaccaacatgagtgggcgatatcttcctccatgcttctggggaagcagtaagcatcctgaatcaaacctgaatatttagggttttttatttgtctttggcaaagctctaaaattccagatttgcaagttgtcggcccaggagccctggcacattatttgagataactcatcttctttgactcttctctgtagctcctgaccatgaaagtctgtagttaagtgcaacaaacacttatttatgggatatccatgccttattgtttaaatcttttataatgaggttataaaagctcctgattctgtaggrtaaaatcactaatttggatttcttaagcagctttggatagcatatagagacgacaaaactgttgaatttacaaaagcgagggatgaagga

SEQ ID NO: 277240 - DNA, 633 bp, Homo sapiens
attctcagcatttttctgtctaatatagtagcccacttgaacttgactctggtgaaaagctatggggttgtagctgtttgaattagaatctgggatgggaggaagggagaaatttgaatttgaaataaagaaggtgatgattctttcatgtgccattgtctcttcccctcagattcaagagaattcacacctcagttatgaaaggcatcttccatcacaaatttaacattcttgcttgaaaacatcacaaatttaacattcttgcttgaaaatttcagctgggcaccgtggctcatgcctgtaatcccagcactttgagagtgctgaggtgggcggatcacctgaggtcaggagtttgagaccagtctgaccaacatggagaaaccctgtctctactaaaaatacaaaattagccgggcatggtggtgcatgcctgtaatcccagctactcagaaggctgaggcaggagagttgcttgaaccagggaggmggaggttgcggtgagctgagatagcgccattgcactctagcctgggcaacaaaagcgaaactccgtctcaaaaaaggaaagaaaatttctatagaagggccaatagtccaaaatgtggttcctaaaacatcagtcagtcaatc

SEQ ID NO: 277241 - DNA, 602 bp, Homo sapiens
tcatctgaagcagaatgaatggatacaaataatcttttgtcgacacgttatactccaacatgattcttcccttaagatgagatttctgtggaagtgggcagatcattctgatgaaagataaatgcaagaatgtccctaacatttgctgggctaggacacrtgtccaaatggagacccaggtaccatgaatgtacctggcttataaattgttaaataaaacatgttctattgttctaccttgacaaatgtaccttcatgatcctttttacttaaaatgtggcccacataccagcagtgtcagtatcattttggagcgcattagaaatgcagactttcaggccctacctcagatttactgaatcagatctgcattggaacaagacccccaggtattttgttagtacattgagctttgaatggcagtgttcagaatgaactggaaggccaagctctaatttagaatccacagacttcttagagtagtgcaccagaccatggcaacatgacaagaactgtttctcagccctcagcctctaatctgacccccttcctactcccagctctttccaatatctgagtgccttgtgcacacctgtatggat

SEQ ID NO: 277242 - DNA, 590 bp, Homo sapiens
tttgctgtcatgcaggtaattgagaacatgatatatgttacaacaatgccacctatagttagtagcctttgtttaaagcaaggtaaaattttacatatgctgccgtagaaaacagcctaaaataaaaggttgttaatcaacagtgtatcaagtaccaggtacccttccaagctctaggaagaaatagacaaaaaaaaaaaaaaataagagtaaatttctcaagttgtgactgtktcagggaacgtaggaatatacttaaaaaagaaatccttaagaagaggtagtttatgttctaaatatcttctaatagtttgtggtttcttttattttctttatggtatcctttgataaaaataatttcatatccagatagactttatcatttttttatggttggtaatttttgcactggcaaaataattttctttttgctgactgagaggtcataaagatattctgttatattgtcttcttaaagttgtagaggtttgcttttcacatttagtccagctggaatttgttttgtgtggtataaggtagggtttctttaacgtttaatcagttatctcagcacaatttacagaatagtt

SEQ ID NO: 277243 - DNA, 590 bp, Homo sapiens
tttgctgtcatgcaggtaattgagaacatgatatatgttacaacaatgccacctatagttagtagcctttgtttaaagcaaggtaaaattttacatatgctgccgtagaaaacagcctaaaataaaaggttgttaatcaacagtgtatcaagtaccaggtacccttccaagctctaggaagaaatagacaaaaaaaaaaaaaaataagagtaaatttctcaagttgtgactgtttcagggaaygtaggaatatacttaaaaaagaaatccttaagaagaggtagtttatgttctaaatatcttctaatagtttgtggtttcttttattttctttatggtatcctttgataaaaataatttcatatccagatagactttatcatttttttatggttggtaatttttgcactggcaaaataattttctttttgctgactgagaggtcataaagatattctgttatattgtcttcttaaagttgtagaggtttgcttttcacatttagtccagctggaatttgttttgtgtggtataaggtagggtttctttaacgtttaatcagttatctcagcacaatttacagaatagtt

SEQ ID NO: 277244 - DNA, 586 bp, Homo sapiens
catttaacttgtattgtggttatttacatggttctattaggtcctacgtgactgtgagtgactagcttttatttgcccttcattttatccatacatcctacttgatactgtatgcaccmttgcataccctttctttcatttgtacatttgaccaattcgtgagatagaatacgtatacaaactgtcaatttaagaggtcaaatgaattacatgaaataagttttatatttatgaagagggaaaaattatggatagctagagaattttaaagaacttcacttgcatacgaagacataggtcataattattcctgttttatagatgatgaaatggggaggctgaattactccaggtcatgtagttagtgagggatagagctaggatttatctcagcattccctgcagttattgtcagatgctagaaatcagaagacaaaccagagcaatgaataaatacagtgtaactatggatcacatttgaatatattttaaaaaccaggacagaataaggtgagtgtcttaatacaataagggagaacattttacagacttctttttcactaaaatcagatcagtatatcactgt

SEQ ID NO: 277245 - DNA, 545 bp, Homo sapiens
ctaaggttacatttgtgagatccaaccttattkcatatagcacagtggttgattttcattgccatatagtattcctatatatgaattctatagttatattatatttatttatactcatttattacttcattctcatgttgatgaaaatttgggtttgttccagcgttttattgttataaataatattatgaagatatttcgtatgtatcttttggtgcatattctgttgggtgtatacctacaagtgaaattgctgggtcacaggctatgcatatgtacagcattagtacatactaccagttttccagagtggttttcccaatctacactcccaccggcagatatgagcgttccagttccagaaggaaggtattttttaagacacaaacagccttatttagagggaaatatcatcatctagaatggatatcaggcaaaaatgaaaaactataatgacaatgctccctagacttttcttaaaccttgcccttcaggcttatgaccaatgtaatcactggaagattcccttctaaactgataaagct

SEQ ID NO: 277246 - DNA, 545 bp, Homo sapiens
ctaaggttacatttgtgagatccaaccttattgcatatagcacagtggttgattttcattgccatatagtattcctatatatgaattctatakttatattatatttatttatactcatttattacttcattctcatgttgatgaaaatttgggtttgttccagcgttttattgttataaataatattatgaagatatttcgtatgtatcttttggtgcatattctgttgggtgtatacctacaagtgaaattgctgggtcacaggctatgcatatgtacagcattagtacatactaccagttttccagagtggttttcccaatctacactcccaccggcagatatgagcgttccagttccagaaggaaggtattttttaagacacaaacagccttatttagagggaaatatcatcatctagaatggatatcaggcaaaaatgaaaaactataatgacaatgctccctagacttttcttaaaccttgcccttcaggcttatgaccaatgtaatcactggaagattcccttctaaactgataaagct

SEQ ID NO: 277247 - DNA, 545 bp, Homo sapiens
ctaaggttacatttgtgagatccaaccttattgcatatagcacagtggttgattttcattgccatatagtattcctatatatgaattctatagttatattatatttatttatactcatttattacttcattctcatgttgatgaaaatttgggtttgttccagcgttttattgttataaataatattatgaagatatttcgtatgtatcttttggtgcatatkctgttgggtgtatacctacaagtgaaattgctgggtcacaggctatgcatatgtacagcattagtacatactaccagttttccagagtggttttcccaatctacactcccaccggcagatatgagcgttccagttccagaaggaaggtattttttaagacacaaacagccttatttagagggaaatatcatcatctagaatggatatcaggcaaaaatgaaaaactataatgacaatgctccctagacttttcttaaaccttgcccttcaggcttatgaccaatgtaatcactggaagattcccttctaaactgataaagct

SEQ ID NO: 277248 - DNA, 558 bp, Homo sapiens
tttttgtgaatgtcataaaatgggatactacagtatgtcactttttgagactggtctctcactcagcatgaagatttgtccaaattgttgtgtatattgatcctttttttttttttttttttttttttttgagacagagtttcactcctattgcccaggctggagtggaatggagcgatctgggctcactgcaacctccgcctcccaggttcaagccattctcctgtctcagcctcccaagtagcttggattacaggcatgcgccaccatgcccagttaatttatttgtatttagtagagatggggtttcaccatrttagtcaagctggtcacaaactcctgatctcagttgagccacccacctcggcctcccaaagtgctgggattacgggatcctgtgtgccaccacgccaggcagatagtttgttctttattattgctgagtagtgtttcattggatggatgcaccacagtttatctatccattcacccttgaaggacattcacattgtttacagttttggacagttacaaatagcgctggtataaataattata

SEQ ID NO: 277249 - DNA, 1105 bp, Homo sapiens
ataatgtatttcttgtcttctgttgggttcatgtgacgaattccagttgataagccccagactctggagtcagttgtctggctagttattaagattaagataagtactaagaacgaaagatacagtgcattgtactacctttatgggtttgggccacctaggattctgagtgtaaacaatgaattagttcaccctgactccttttcagacytgaagtgaacaatgtaaatattggtgaagaatgattagagattattttttaatggaaaatatattttaattaccaaaaattctaaaatatgtataattgtggcaataagtttatagaaaagagatttactgtctcatttttctttttatattggtattcagaaataagaagataattatttaatgggtcataggtagttcatatcagaaaggcatttcgtcctcataaaatacgccaggaggaaaaaatacaagatatttaagtgcagttaagggactttcagatgaaggacaatattagtaaaacatatatttctaatgcatatccagcgctagtattacctattaaawcttgtgttttatttctacagtgaaattgtaaactcccggaaggcaagaaaaaaaaaattttgacaaaattgagcwgaggtaagcaagcacttacatgttaagtttcactgaattttgaataaaatattggtttataagatgctcataaagcatagaatttttgctcacgtttggttgctcaacttttggtcacactgagcaatcctctagaagtgctgggtcctctgaaaatgcccgtggaccaacagaaagctcctctctggagagtctgtccggttaggctttaagctctaggggtcaatgtcaggctccattttggaagaatttttcccatatatattttcaccctgaagaggaaagggtaatgctttttttcaaaatcatttaggacctatgggccgctgatatgacacttggattcaatattcccaaacaaaaacatgcaaaagttggcttgaacaataacagggcttaggtacaaagccatgttcctggcaacagcatctaagaaacaataaacagtagctctcgctttagtttaaag

SEQ ID NO: 277250 - DNA, 577 bp, Homo sapiens
atatatgagaataggacagtgtagaataagggccaatttagaaaatagagaaattatagcattttttgaaaagctttattttttccttaagctcacaatgaaayagaattcaagtgaataaaattttattttattctcagaatttctttccttcaaaatttttctatgttcctactgaaaattccacagttttcaagtagatctcatactacctagttgcagaattcactggcatagagacagtcaatatcctcttagagagcaattaaatatcaaaccagtgaataagttaagaatagggcaagggtatagtccaattagtcaaaccttttatttccactttctgccatattttcaattattcttctcctatacccttttgagaaatagttattattgtaggtttaaaataaataaaaatagtttttctttctcaggagtcatgggctttgttctttgctattccctctgcaacactttttgtcctacctgctcactttcatctggctaattctaatttgccttttaagcctgggatagacagtacctatttgcagaactttcctgggcatacttc

SEQ ID NO: 277251 - DNA, 562 bp, Homo sapiens
tataaatgtaacttttaaatgcactggaaaaccaaaaaattcctgtaactcacttgactgtgatattcactttattgcagtggtctggagccaaacccacattttctctgaggtatgcctgtgtaactacttgacaattattttcaccttaaacaattgttatttaaggtgaatttacttggttatagcctggtgagttgaggctaaagtcaggaatttgatccctatctaggccagttgtttttcrtcttcaaaaaaaaatcactgtattcctctaaaattcattgaatgtcttacccatgtgtccccctagtcactacagtatcagaaaagggagtgtcactgtttcaaaggcattatcaaaaccagggaaaaatgacaaatttgtaaatgccaactgtcagtggtgtgatcttcatgtactaaagacaacacttttatagactgaaaaaccaactaaacccagtttctgttgccacactagagcttgtttcatcattatcaacgtgagaaccaatttttacttgatattgagaatgtatgataggagtaaacacataat

SEQ ID NO: 277252 - DNA, 577 bp, Homo sapiens
acagtgagggaaaaaattaatcaaaatgatattaaatgtacaatgattcattgtaaatgagctattgtgtagcgcttgctcataagacaaaatgcactgccttgtttggcattagcatattgccagttgtataacatgagagagcccagagggacctgtgggcaccctgaagtctctgtgtagcaaaataaagcatgaagaatcatttgcagacaggcagctcttggctatctacccaggagaagtgtagcagcatctttggggaaaaaagaacaataaataatagtcttctatttttaaaaaatgtatatatattyacatgtaagtgcccagtgacttgcaaacatctttctcctcattcttgggctttattttcaccccatttctgaccaggccccacatttgaaaaccaaagaaggtcttagtaataaggaatcctggtttttctcacttcattgcctggaaaattttttgtaaaggatcaggaattggctatatccaaatgcatatcatgttgtatttagtaggaattatctaaattttttatctaatattaatagtttaccttaagtaatgt

SEQ ID NO: 277253 - DNA, 577 bp, Homo sapiens
acagtgagggaaaaaattaatcaaaatgatattaaatgtacaatgattcattgtaaatgagctattgtgtagcgcttgctcataagacaaaatgcactgccttgtttggcattagcatattgccagttgtataacatgagagagcccagagggacctgtgggcaccctgaagtctctgtgtagcaaaataaagcatgaagaatcatttgcagacaggcagctcttggctatctacccaggagaagtgtagcagcatctttggggaaaaaagaacaataaataatagtcttctatttttaaaaaatgtatatatatttacatgtaagtgcccartgacttgcaaacatctttctcctcattcttgggctttattttcaccccatttctgaccaggccccacatttgaaaaccaaagaaggtcttagtaataaggaatcctggtttttctcacttcattgcctggaaaattttttgtaaaggatcaggaattggctatatccaaatgcatatcatgttgtatttagtaggaattatctaaattttttatctaatattaatagtttaccttaagtaatgt

SEQ ID NO: 277254 - DNA, 618 bp, Homo sapiens
  misc_feature (1)...(618): n = A,T,C or G
tccctttccaaaaaaaaaaaaaaaaaaaaaaaaaaaaaaaaaaanaaagttttcatgcaccttaaatactttcagaacactcatttaggggattgataacattaatgctaaaaacaaaacccatgcagataattttgtctagcatttatcttacagatgaggaatataaagctttgaaaagcaaaagaacttgataccatcattaaggcagccacccaaagatttctacaaagccagtttttattagcttatatccaaatgtagtttcaacactgcattcataattttctaacacacttattaatgtttcatttgactttaatcaggtaaatgttcctaacatattagtatttacatttataacaccaagatcagttactctctcctttttatttaatttaraagctattggatatattgatttataatctgtaacagtaaaacactaaatatggcaggaaagtatattaaggaatatgaggtatgaatccacaaatgagaaaaattggaattctcaaaatatattcttatttatattaaaagttttcaatgaaagacaaattgtaactattttacaaagataaaaagcattgctgacccactattactgaaaacaca

SEQ ID NO: 277255 - DNA, 555 bp, Homo sapiens
agtgtctttataaatcagcattaccaaacttcttaccttgttgactatgttctcctaaagttttacctttgcttggctccccttttggcttaggagggaacattccagaatcccatcrgcaagtcacttaaggctctgctgcaggaaactaggtttgtcaatttggttttacactgaaacataaatctcctgctttatgaatatatagtaagaacacagcatgctgcatgacagatatatttgcaaaaaagacttagatagcagggcaaatgccatgttcaaaagccaacaaaatcaaattcactctttgttacacacacgattccagagaaaacacatttcaattcatgaaacatttactgagagcctactatgttcaaggcattgtgccagctactgataacattatctttgtttttagatcaatttatttgccttggtctatgtgtgcagtggctgcccgaaacttccttaggcttctcgtgggttcaaggtttagaataatcatatcagcaaagggaaggcttgtcagaggccttcaaaacttctcattag

SEQ ID NO: 277256 - DNA, 515 bp, Homo sapiens
cttgtactgggtccctgaaaggaaggataaatcaatcactacaccacatagtccaactattccaagtaggaggagaaaagtggctagatgacttatggttcagagcagatttaaggaaggyagcaagatacatgacagaaagagagagatgtttgattcatttaaataaaaatagaattatattaaaatctgtgttcatttaacatattcatttaatcatatataaaatatgtatgaacacataaggtatacactatatgagaatatatagtacatagtaaaatacacaaataggatatatgttcactctacagacatatggatatgcctgtgtacagaacaatgagatggagtttcacagattggcttctaaagatgtctggggagaggaggcatgggatgaggggtgctgaggagcaggtggagtatgaggaaccactagtctgagcagtttcattttatccatctataaattaaggctcccggttccaagttagattttgcttgggaaaagt

SEQ ID NO: 277257 - DNA, 527 bp, Homo sapiens
gccatgatagcaccaatgcactccagcctgggtgacagagtgagaccctgtctcaaaaaaataaaaataaaaataaatatatgcttgcaataaactgaacttgattgcttgaaaatttgttgagttggggtgttttataaagcccatatcattttgtccttatgaatgaactttgatagattaatgagcctagtcacttattggaatacagccacaagctatgagctgcggatgcaaaagtgaatacaatacaattccaactttattgttcaggagtttttggtccagaggggaaatcttaaatataactgaccactatgatataataaattatgtgaccctatcactgctcctgttgggctggaaataacaaaatgagggttttacagtgaacatttattgagcaattccaatgtatagaagaataaactcagccaaatacatccccttattgccctcaccctgaaagtgttctccattgcctagatggacacatgratgcatcaacctgggacacatgacctgtg

SEQ ID NO: 277258 - DNA, 621 bp, Homo sapiens
tgaacatagtaccggacagaaagtttttcaacccttgatcccctccctccctcccctcttttggagtccccagtgtctattgttctcatctttgtctgtttctatccaatgtttagctctcaattgtaagtaagaacatgtaatatttggttttctgtttctgtgttaattcacttaggatagtggcctccagctgcatccacgttgctgcaaaggacatgatttcattcttttttatggctgcatggtattccatattctataggtaccacatttccttatccagtcttcaacttatggacacctgggttgattccatgtctttgctattgtgaatagtgctgtggtatacatatgagggcaggtgtctttttggcagaataatttcttttcctttgagtatatatccagtaatgggattgctaggttgaatggtagttctgyttttagttatttgagaaacctccaaactgctttccacagaggctgaactaatttacagtcccacaaatagttataaatgtttccttttctccacaaccccacaaacatctgttattttttcatttttaataatagccactcttactggtgtaggatggtatctcactgaggttttga

SEQ ID NO: 277259 - DNA, 548 bp, Homo sapiens
atactcctgcctcaacctcccaaagcactggcattcgaagtatgagctgccacacccggcttgaatgccttttttaaaatcatgagcctcagcatcatccttactcacatttattaacactgtttgcaaagcattcctgctgatactgccttatttgagccatattcacttgtttactccacaattctttttaatctttacaatgtgactaattagtaagatgactaagagagtgttccctactcccgttgccatcacaggccagtgatggagataaaagtaaacaagtgattccagcatgctagacacaactctacaatggaattygggagcccaaactattatggaagcatataaaagttggactcaaaccagaatgaggtgagaaggacaccttggtcaatttttgtattattataaagaagtaactgagtctgggcaattcaaaaagaaaagaggtctatttggctcacagctctgcaggctgtataaggagtatggcaccagcatctgcttctggtgagggcttcaggaagattccactcatg

SEQ ID NO: 277260 - DNA, 1030 bp, Homo sapiens
agataaaagtaaacaagtgattccagcatgctagacacaactctacaatggaattcgggagcccaaactattatggaagcatataaaagttggactcaaaccagaatgaggtgagaaggacaccttggtcaatttttgtattattataaagaagtaactgagtctgggcaattcaaaaagaaaagaggtctatttggctcacagctctgcaggctgtataaggagyatggcaccagcatctgcttctggtgagggcttcaggaagattccactcatggcggagggggaagcagagctggcatgtgagaggaggaagcaagagagggaggaagagatgccaggtttttttcaacaaccagttctcatgggaactaagtgagaattcagttactcctgcaagaatggcaccaagccattcattagggatccaccccaatgacacaaacacctcccaccaggccccatctccaacactggggatcaaatttcaacatgagatwtctccaaccctcaggataaggatcagtgaaatgctaatttttwaaaaaattaaattttcatcaaagctctagacctattcacttattatgatgtttatgccaagtttcaagaggtaaaacatgcttcaccacaaaaaacgatgatcagaataagttatggaatgaaaggcaaagatcctattttatttgattatctaaattaagtcttaattctttttcaatcttctaaacacaatataagaacagatatactggatgtgaggtttaaactcattaattttagtggctctggccaaacccaattaatttctgtttgtgaagcaatccccattgttggggtttcaagttattttcacagttaaccatggaagaatatgcatagctattcagtacatgatcttgtagctagtcagtcagtctatattgattgtatggactgagcccaacatcctacatatttattatgtacaaatatacagaaaaataacaatgatttaaaagatatagttaaagcctttaaagagctatat

SEQ ID NO: 277261 - DNA, 474 bp, Homo sapiens
gctcaccagaacctctggagtgaataaagtcaccctggagagttttctacctcccactagagatagaaagtcactaggcattccttttattatgcataaattgaaaccaattttatttaagctttatttgacaaagtagcacttgtttttcscagaaaacaaatttccgggaaggagaagaaatgcggacaaatagtgaaaattcagagtaccagtaaggatccagtgaaaactaccttgtccttattatccttaatgttgaaaaaattcttatacacagaagtgttatgttatattctgtggtcgatcatcaaacaaggatggaataaacaagattcttccctgtttcatcactggtatatgccttgctcaaaatgtattaaaaggaatatttttatcattactggataatgcaattaggccagtgttctgtggatgtggaataatgtaatttactatgttgaatgattagcc

SEQ ID NO: 277262 - DNA, 585 bp, Homo sapiens
gcattagcctccagcctcagtggttatcaagaaagggtgaccttgcccacaaggaaatatccaaaatgtctggagacaattttggttgtttcaattcagagtgagtttctggtatctagatgccagcaatgcttccagacgttctataatacatagagcagtcccccactcccaacaaagaattatctggcctaatatgtgaatagtgctgaggttcagaagctgtattagtccattctcatgctgctataaagaactgcctgagactgggtaattcagaaaggaagaggtttaattgactcacagttccgcggctggggaggcctcaggaaacttaaaatcatggcagaagaggaagcaaacacatccttcttcacattacggcaggaaggaaaagtgcmaaggaatgagggaacagccccttacaaaaccatcagatctcatgagaacacactcactatcacgagaacagcagcatgagagtaactgcccccatgattcaattgcctcccactaggtccttcccacgacatgtggggattatgagaactacaattccagacgagatttgggtggggacacagc

SEQ ID NO: 277263 - DNA, 596 bp, Homo sapiens
gaagtaaccaaacccccacagatggcttagaaagatggattacattatactaattgtgtttataatggataatatagatattactggagcattttattttatagctcaggattatactactaataataacactttctctacttagaattttgtttgcagttatatgcyggagaattacttattttaagaaagttgttccacctttctgcatgatcaccaacatttattgattaatagctgtgtgtggatcctaagcactctatagccctgtcagtaacatctgctgttattcccttttaaagatgcaaaggtggaattcacagaatgaaacaacatacctacgtagctagcaagtggtaaagcaaaattggaactcaggaggtcagaattccagacccatgctatgactcattgtgctaagatgtttaaaatactaacaaaaaatactgcatatttttctgatagttgtgggacatgtgtttaaaatacaaaggattattgctgacgatagaggaaatatggcccaaatcaaattttctactgcttttctctgacaagcagcatagagtcaaattaagagattaggcatagtttag

SEQ ID NO: 277264 - DNA, 569 bp, Homo sapiens
aagctaataatacaaacatgaggactggggagatgtgtggacgttatcaattatgaatgtttatattctaagaaatgcaatgaacttactatttatcactagaagaaaaaaatgcatttttcttacagttgagggattgctgagggaagtataacatattagttagaaaataatttaaactggaaaataagattttgagtaggtgacatacatatgcasaaaatggagattctttaaaagcaatttgctcaatccttagaactttccaagtgaccaaatttacaaaggaatcagtacaatcactttactggggaaaagaatactggaaagagaatcttctcagttgaatcataaattcactcaatttttactactctgccgcctgtctcctatttagaatgccattctgggattctaatgtatggcacagaaaagtactgaggaccacaggatccagggtggcagaggcagggagacatagggagagagctaggcttagcaacacactgctttaaattagctcttctgttacgtagtaaacatcgagatgtgtcagtatgcaaagaaac

SEQ ID NO: 277265 - DNA, 569 bp, Homo sapiens
aagctaataatacaaacatgaggactggggagatgtgtggacgttatcaattatgaatgtttatattctaagaaatgcaatgaacttactatttatcactagaagaaaaaaatgcatttttcttacagttgagggattgctgagggaagtataacatattagttagaaaataatttaaactggaaaataagattttgagtaggtgacatacatatgcagaaaatggagattctttaaaagcaatttgctcaatccttagaactttccaagygaccaaatttacaaaggaatcagtacaatcactttactggggaaaagaatactggaaagagaatcttctcagttgaatcataaattcactcaatttttactactctgccgcctgtctcctatttagaatgccattctgggattctaatgtatggcacagaaaagtactgaggaccacaggatccagggtggcagaggcagggagacatagggagagagctaggcttagcaacacactgctttaaattagctcttctgttacgtagtaaacatcgagatgtgtcagtatgcaaagaaac

SEQ ID NO: 277266 - DNA, 620 bp, Homo sapiens
attattattattaattattgatagcaactaatactgatttctaacataatggtattattaattattaatrctaatactagttattaatcaatataaattgctaatgttttatttactatggctcttattgatgttattaacattaatttcattgtaagcactttaattactaatagtaatgattgatattaattagcatcattttattaatattaataattgatattaattattaatattaatattattgttcctgatatctgggggagacgatgctataactcccaatgtcgcggaaagcttacaccacctgtattgttcttaatagccagcgggtagaggatgacattactcaaaatatcacagtgggtgcacatcccttctgtgatattgttcctgatatccgggggggagaggatgatatcactcccaatattgcagggggcgtagacccctcctgtgatattgtctctaatatccaaaggtggagaggatgacatttgccccaaattcgcaggaagtgtacaccacccctgtgatattgttcctaatatccagggggcaagaggatgatactagtctcagtatcacagaaggtgtacactccttagtgatattgt

SEQ ID NO: 277267 - DNA, 573 bp, Homo sapiens
ggaatgttaatggactctctgtaagagtgctagctgtgccttcccatatttattcatctcttaacattcttttgcactccagccagacttccaaccaactacccacacctgtgactctgcctgagtgagtccaccctgcccgcctgtagagcagactggaattgccagaactcgccctgcagaaacctttaaccacagctgataggattgtgtggaataactctggggagatatgctctacatttgttctgagggctcctcagtagaattcagctcctattcccactgtgctaacttgctcaataatccaccctatattctgtgcctttcctttctcagttccctactctcctgccagtgtttcctggaatcaacactaaattaataacttgytctcaacccttgacttaaggtctgattctagggagccacaaatgatgacattgtcctaaaatcacccaattaataggtggaagacctaggcaatctgacgcaaaagctaatgctcttcatactttgaagatctatccagccaccatgctcctgacctcacaacaactttcttctttcttg

SEQ ID NO: 277268 - DNA, 484 bp, Homo sapiens
tattgaaccccttggggagtagccttatctacttatatacattaaggttatgtcagttttccgcttctgatggtcttgtcaaaccagagcactgtttccaatagaaacttctccttgacattcacattatgttaygtcctcagtcctcatattttaagcttgtttggcttcaagcagaaaaaaaataggaattaaatccaaaaatggaaagaactggcaaataaaaccatagtttcaatccttgaatccaagaggaccatagaaattagctttttggatcaacttgaatagcctcacaacagaaacagctggtttgtgttgaagcagtttaaatattttaaagctcatagcttggagaagactgtaattcagtagtttctctctttacccactctcttcaagtgttcactgttcctccctgttacccataattgtgatttcttttcttctgttttctttctttgcctttgcctccacttaattt

SEQ ID NO: 277269 - DNA, 537 bp, Homo sapiens
atatgatgcagctgaaaaaagccaggcatgactaagacagagatttgagacacyagctccagcaatagctgtgttaacttggcacattatttaaattctctgagctcaggttcttaatctgtaaaatgagcttatctgcatctactcttctgtttgatgcagtgattaaaccagcttgctccatgccccctagtctattaactaggcaaacaaaatggagaagaatattcaagagagaggaaataagtcacagagacaggaaatggaaatgattctgcctggctcatagtttctcccagataccctccctcacctgcgagccaggattcctctttcatgttttcctgtgccaaatttttttttgtcctttaatgcaccaagttttttctccatctcattacctcccataagtataactttggttttcttatttgtatctccctaccccaccctgaccacaaggatgctccgtaagatcagggaccaagtctgtcttgctagctataccaccaacgcacagcccagtacctggagcac

SEQ ID NO: 277270 - DNA, 537 bp, Homo sapiens
atatgatgcagctgaaaaaagccaggcatgactaagacagagatttgagacaccagctccagcaatagctgtgttaacttggcacattatttaaattctctgagctcaggttcttaatctgtaaaatgagcttatctgcatctactcttctgtttgaygcagtgattaaaccagcttgctccatgccccctagtctattaactaggcaaacaaaatggagaagaatattcaagagagaggaaataagtcacagagacaggaaatggaaatgattctgcctggctcatagtttctcccagataccctccctcacctgcgagccaggattcctctttcatgttttcctgtgccaaatttttttttgtcctttaatgcaccaagttttttctccatctcattacctcccataagtataactttggttttcttatttgtatctccctaccccaccctgaccacaaggatgctccgtaagatcagggaccaagtctgtcttgctagctataccaccaacgcacagcccagtacctggagcac

SEQ ID NO: 277271 - DNA, 1075 bp, Homo sapiens
atatgatgcagctgaaaaaagccaggcatgactaagacagagatttgagacaccagctccagcaatagctgtgttaacttggcacattatttaaattctctgagctcaggttcttaatctgtaaaatgagcttatctgcatctactcttctgtttgatgcagtgattaaaccagcttgctccatgccccctagtctattaactaggcaaacaaaatggagaagaatattcaagagagaggaaataagtcacagagacaggaaatggaaatgattctgcctggctcatagtttctcccagataycctccctcacctgcgagccaggattcctctttcatgttttcctgtgccaaatttttttttgtcctttaatgcaccaagttttttctccatctcattacctcccataagtataactttggttttcttatttgtatctccctaccccaccctgaccacaaggatgctccgtaagatcagggaccaagtctgtcttgctagctataccaccaacgcacagcccagtacctggagcacwatatgatgcagctgaaaaaagccaggcatgactaagacagagatttgagacaccagctccagcaatagctgtgttaacttggcacattatttaaattctctgagctcaggttcttaatctgtaaaatgagcttatctgcatctactcttctgtttgatgcagtgattaaaccagcttgctccatgccccctagtctattaactaggcaaacaaaatggagaagaatattcaagagagaggaaataagtcacagagacaggaaatggaaatgattctgcctggctcatagtttctcccagataccctccctcacctgcgagccaggattcctctttcatgttttcctgtgccaawtttttttttgtcctttaatgcaccaagttttttctccatctcattacctcccataagtataactttggttttcttatttgtatctccctaccccaccctgaccacaaggatgctccgtaagatcagggaccaagtctgtcttgctagctataccaccaacgcacagcccagtacctggagcac

SEQ ID NO: 277272 - DNA, 544 bp, Homo sapiens
agtttaacttgaccttttggtcaatgttgtttttcttcaacaaggtcataaaacagttgtttagaagaccrctattaaattagaagcacatttacttattcaagaattatttccttaacatcttctatgcgccaggcagtgtgcttagtaccacagagagcaagaaagataagacctctctgcagttatattctagtgcaatggaggtagagtggggtgaaaaagacaacagagaaggaaataaataaaatcatttctcagtgtgattagtgctatgagaaaaataagcagggttctgcaggaaatattttgaaagggagggaaataacctagacagggtgaatagggaaagcctttctacagaggtgactttccaactgagagctgaagaatgaagagccagtcatgctggctgttaagacctgggtaacagtgaaaagtggtcaaagaattgcaaaccaggaaataacactgaactggaaggtgagacaagagtggtcagaaagatggtgggaatagtaaaggctctggtgataaccaagtt

SEQ ID NO: 277273 - DNA, 532 bp, Homo sapiens
aataaagctattttaaaaagctaatggcatagagctgagtgttagtgattggaaggaggctggagggattctggggtgcaagtaactgtttcttgatctgcatgctggttacatgaatgaaaatgtattgggttgttaggattcacttttttataagtatgttatgctccaaaaactattttgctttaaaagttatatgtgtttcacttccaaaaataatctgtagccaatggctttttggtagtgagccttaaaactctccatcaattaattaatggccttagcattttatgtttcatgtcatgcatcattttctctagcatgctgtagtaatttaggtgtttgctgtgtcttccctgcaagactatgtgtgcctcattcctttgtgtctcattcctcakgcaccctgcagaatctgtctcctgtcttgctcattatcactggttgaatattgtgtttaataaatgaacacaaatttgttgaggaaaagaaagttctagtccattgcaatcccatgttccttgccttgtta

SEQ ID NO: 277274 - DNA, 525 bp, Homo sapiens
tgggcagttgttgtgagggaaagtagggttagaagagaatattgaggatgggaggaagaacggcatgtttgtgtggtgaaggaatgatccagcgaaaaaaggaaaaattgatgttgttatctgtcacttatgttcttgttcatatcccaccctgttcctatgtttggggatcccaactttgaggttgagcccacacatcctagattctcactttcccagaatccacaaagatggggcacaggaacaagaagctctactaccagatgcctcagcccctcactctgaattagaagcgagtgacatgaagaacaaatcacaccacatctatgctggaaacagatgctagtgagccttcagacacagaaagtttgagaaaaagaaaagtgttatgttttcctttaaaggaktttataatcactgagggtggggattgactgtctcttatttaccactgaagctcctgagcctagcgcagttcctgataccaagcagaagtttattaaatttgtgatgaataaataaatg

SEQ ID NO: 277275 - DNA, 560 bp, Homo sapiens
gaagaggaggcacaaaagtagcagaataggagtctgagagggcatctgagtcaagataaggtgaagctgggggctatgacgtaagtgacactccttttccaggaagcagcatatacctgcccccaaccctgcccaacatgccaatgcctactagtccaaagccacctgagtcctgggagcagcattgccatgtgcgagagtagtaggggcactggcaggaatgcactccattcgtctcactggattaagyatctactggtcccagatcagattggcctgtgtcagcacctttgagtgaaacacacgcccctctggcttatgtcacttgcatatttgacaactcagctatacttaagacagctccccaaagcctgctctaaccctcactggagagcaggcagctcacactctggtgctaccatgtgttacctgggccctgagttaggaagagagattgcctgtggtatcagatcatgccatggggattctgagtccatgctgagtggggtttcttttcaggatttcattctgagaaagaatgcaaaggaagaatatagaat

SEQ ID NO: 277276 - DNA, 560 bp, Homo sapiens
gaagaggaggcacaaaagtagcagaataggagtctgagagggcatctgagtcaagataaggtgaagctgggggctatgacgtaagtgacactccttttccaggaagcagcatatacctgcccccaaccctgcccaacatgccaatgcctactagtccaaagccacctgagtcctgggagcagcattgccatgtgcgagagtagtaggggcactggcaggaatgcactccattcgtctcactggattaagcatctactggtcccagatcagattggcctgtgtcagcacctttgagtgaaacacacgcccctctgrcttatgtcacttgcatatttgacaactcagctatacttaagacagctccccaaagcctgctctaaccctcactggagagcaggcagctcacactctggtgctaccatgtgttacctgggccctgagttaggaagagagattgcctgtggtatcagatcatgccatggggattctgagtccatgctgagtggggtttcttttcaggatttcattctgagaaagaatgcaaaggaagaatatagaat

SEQ ID NO: 277277 - DNA, 560 bp, Homo sapiens
gaagaggaggcacaaaagtagcagaataggagtctgagagggcatctgagtcaagataaggtgaagctgggggctatgacgtaagtgacactccttttccaggaagcagcatatacctgcccccaaccctgcccaacatgccaatgcctactagtccaaagccacctgagtcctgggagcagcattgccatgtgcgagagtagtaggggcactggcaggaatgcactccattcgtctcactggattaagcatctactggtcccagatcagattggcctgtgtcagcacctttgagtgaaacacacgcccctctggcttatgtcacttgcatatttgacaactcagctatacttaagacagctccccaaagcctgstctaaccctcactggagagcaggcagctcacactctggtgctaccatgtgttacctgggccctgagttaggaagagagattgcctgtggtatcagatcatgccatggggattctgagtccatgctgagtggggtttcttttcaggatttcattctgagaaagaatgcaaaggaagaatatagaat

SEQ ID NO: 277278 - DNA, 560 bp, Homo sapiens
gaagaggaggcacaaaagtagcagaataggagtctgagagggcatctgagtcaagataaggtgaagctgggggctatgacgtaagtgacactccttttccaggaagcagcatatacctgcccccaaccctgcccaacatgccaatgcctactagtccaaagccacctgagtcctgggagcagcattgccatgtgcgagagtagtaggggcactggcaggaatgcactccattcgtctcactggattaagcatctactggtcccagatcagattggcctgtgtcagcacctttgagtgaaacacacgcccctctggcttatgtcacttgcatatttgacaactcagctatacttaagacagctccccaaagcctgctctaaccctcactggagagcaggcagctcacactctggtgctaccatgtgttacctgggccctragttaggaagagagattgcctgtggtatcagatcatgccatggggattctgagtccatgctgagtggggtttcttttcaggatttcattctgagaaagaatgcaaaggaagaatatagaat

SEQ ID NO: 277279 - DNA, 611 bp, Homo sapiens
ggtgattaatcaagcaacttacaatgagaagaattagtgagtctcactgcaaagtttggagaatttgaggcagttgtcctggaattataaatcttagagaaataggtccttccccacccatgttgatgatagtgggttrgggctgtttctacaaattttattcctgaagctcatgaatgcacagaagtgtctcaacaccaccttcatcataagatgagccaacagtgtgcgcaacctgcctctgcagtttattctgctttgttttgtgaagacataatgagattaaaatttaagaaatctgggatgactctccacttaatctgccggtcagacaactttgtcaatttttttattttttccctctttaatcctctaaccaaaagctggagggataagacccaaatatgagacaaaaaagactagttttatcctgaaagttagctttaaaaaaattttgtttcaataatttttgcagaacaggtggttcttgattacatggataagttcttcagtggtgattctgagattttggtgcactcatcgcctaagcagtgtgcacggtaccccatatgttgtcttttctccctcaccctccctcaacccttccctct

SEQ ID NO: 277280 - DNA, 655 bp, Homo sapiens
gaaaaagtcaggcagtgaagttaatgggctttctgaattctgtggctgtgaggagtcagcttagggagaaatcggggttgacttctaggttcctaactcagaagatggagtagatggatggtgttgccaccaaataaggagaaagcaggtttgggggttaggtgatgagttcagctttggtcatgttgagttggaagctccagtgagacatctagatgaagcagtcccacaagaaactgggaatctgaatcaaagttcgtgatagaaacatagsctagaaaaagatttcggaaccatcagcctaatggtggagctaaagcaaggagagtggaagagagtccccaagcagagagggtagagcgagctgaatgtgggatggtcatgcggggcaggcaactcttggagggggcacccatgtggaggtccttaaagaggaataaaggacacttcaggtcgtgtaatagtgtgagcaaaataggggaaaaagcaagaggtgttttcagagaatgtaatggttccatgtggctggataatagtgggtttgatgcagctatcaggtgattaagctgggaatgggttatagtcttgagagattgaggccaggcaatgagaatggaatacaattcagccttgaaaagaaaaaaattctggtacg

SEQ ID NO: 277281 - DNA, 549 bp, Homo sapiens
gtggtgaaacccaatctctactaaaaatacaaaaattagctgggcgtggtgctgtgcacctgtagtcccagctactcgggaggctgagacaggagaatagcttgaacccaggacgtggaggttgcagtgagcagagatggtgccactgcactgcagcctgggcgacaagagtgaaactctgtctcaaaaaaaaaaataggtaagatggggagggataggaaaatattcattaaaaggataccaaaaaatgataaggtgataaaattttatgttatgtggattttgccacaattraaaatatcaaaagaagaaaaatgcaaagagaaaagaagtaatttttaaataaataaataaaaaaggcaggacttctattcagaggctatttccaatagttctgaggagagccaatgtggttagaattgggtaggtagcagcagaactgttagtggacccacatgaaagggctgtgtttatatgtcagagtcagtcaaatgttggcaatgtcatatggttcaacctaatagaaaggcaaaaagagacaaatccttt

SEQ ID NO: 277282 - DNA, 549 bp, Homo sapiens
gtggtgaaacccaatctctactaaaaatacaaaaattagctgggcgtggtgctgtgcacctgtagtcccagctactcgggaggctgagacaggagaatagcttgaacccaggacgtggaggttgcagtgagcagagatggtgccactgcactgcagcctgggcgacaagagtgaaactctgtctcaaaaaaaaaaataggtaagatggggagggataggaaaatattcattaaaaggataccaaaaaatgataaggtgataaaattttatgttatgtggattttgccacaattgaaaatatcaaaagaagaaaaatgcaaagagaaaagaagtaatttttaaataaataaataaaaaaggcaggacttctattcagaggctatttccaatagttctgaggagagccartgtggttagaattgggtaggtagcagcagaactgttagtggacccacatgaaagggctgtgtttatatgtcagagtcagtcaaatgttggcaatgtcatatggttcaacctaatagaaaggcaaaaagagacaaatccttt

SEQ ID NO: 277283 - DNA, 563 bp, Homo sapiens
tatggttcaacctaatagaaaggcaaaaagagacaaatcctttaatgaagttcaagaaaatatacattataaccatttaagttaaattgcaaaatatttcctggggcacttgctctcaaactaataaccaaatagcaaatattttccattttcaatcatcttaggtcaatttgaaaacagctttttagtttttattggagaaactcatattgtcttcacttgttcaatgtgaagttgagttgccaaaattgccttcagtacacatttgtcttttatatttcaaacagaggaaagtttccatttccccatttcattctgaaagctttcaaaaagtttgggcagtgcccagtgctgtccccrtccctcacttcatcatttcagctctagttcttgcacttggcagacttcggacgccaagtttctgcttcagtgctggtcaaaatcccacagaggactttggtaccaatacccactgacaattctctgagctgagagttgttaacttttcaacacagtgacagaatgaaaagagcaggttgtattatcatttataatcaaccagg

SEQ ID NO: 277284 - DNA, 614 bp, Homo sapiens
cctcactacataatacatggagtcaacagtccatattgtatcttttaaaagagaaagtgaaaacagatccatttaaccattttcccagtaaaattgtttgctctctgaagctaaagatggcaaggtggtcactttcagtgagcacctcaatcttgaaatcttgatcgaggtgtgtgtactgtgtacaattcctagtgtgttgtccatctagtagagttagatttcaaaatcaacagcagaagtagaactgaataactgaacatttataaaattagaagataaagagtggactaagcaactaagaaagtattttaggacactttaaaacacctagaaataaattagtttaaacattcagtttgttacctatggcaaaacaytaaaattcttgaaatgttgggagtggacaggcaggtgtttgagatatcattctttctatttctgtatggttgaaatattaaataaataagaaattaaatacatatcgtaaatgctggttgatattattatgctcagtgttcctgcccagctgcttccgcagggtaatgctctctgaagatttatccatgattcaggaatactccccccaacctgggggctctgatgctgctccg

SEQ ID NO: 277285 - DNA, 538 bp, Homo sapiens
ctctaatttatataaactctggcagagagtcaagaaataaagtcaccttctttttcaaatcactatgccaccaaaataatttggctcttgaaaaacatttttgaaaacccactttagataatccatacagtattttttatcaaaaaaaaaaggcaaaatggagcgcygctgagcattaatcttgccgctaaatccttcccattaggcactatggattgtgtaattaaattgaaattgaaaatcgagtcttttctcccccccacatcaggcaggctatgagtttctcaccaacgtgagaaatcaggagtggaggggaagctctagcctgctggccaatatccagcctgtgcttttagcccacggctattttaccacacctgagctctgagaacaaacaactatttgagtcctctggagggaacgctggattctttcctgtgcaattcactggggaaattagtatgctttttaaaagtaacttgttaacgcagcttgtttacgagaacaggacaaaaatgagcagtgaactgcttggcag

SEQ ID NO: 277286 - DNA, 538 bp, Homo sapiens
ctctaatttatataaactctggcagagagtcaagaaataaagtcaccttctttttcaaatcactatgccaccaaaataatttggctcttgaaaaacatttttgaaaacccactttagataatccatacagtattttttatcaaaaaaaaaaggcaaaatggagcgctgctgagcattaatcttgccgctaaatccttcccattaggcactatggattgtgtaattaaattgaaattgaaaatcgagtcttttctcccccccayatcaggcaggctatgagtttctcaccaacgtgagaaatcaggagtggaggggaagctctagcctgctggccaatatccagcctgtgcttttagcccacggctattttaccacacctgagctctgagaacaaacaactatttgagtcctctggagggaacgctggattctttcctgtgcaattcactggggaaattagtatgctttttaaaagtaacttgttaacgcagcttgtttacgagaacaggacaaaaatgagcagtgaactgcttggcag

SEQ ID NO: 277287 - DNA, 535 bp, Homo sapiens
tcagcaagtatttttctccttctcattgaggttcggagtaatctaaagggtcaaggttttcaatctttttctcttgcattaaaatgatctgtcatttccatcatgacaacactcaaaagtcaatttttggggccttgttaaagtgccccatagaataattcagcggtgatggagatggagctcttctcaaagtgtaactactccccttgctggcatagtgtggcaatgacattcatctctgaaattttaatcttgattctggacaaggctttttggttttggtttttgtaattctttatgtttttgaacttcacaataaattgaggcttaakctaaggaaactggatgcattaatgttgtcatcatacttgataaactaagttgataaatttataaaatacaagaattctaaaaatgtttcacatgcctagaaagtagggaaatattccaaacagtgttcagtaatacaattttaaacaaaataatagaatctcttaattttaaaattgatgtataatttgcaataaaatgccca

SEQ ID NO: 277288 - DNA, 563 bp, Homo sapiens
ttcaatactgtaaatcagtatttaaataaagtctttaatatcataygtgcatactatatctgtcatcatagatgtatacatacacacaactatagaaagagagattgatgtaagtatagatatataaaacatcctcatcacctttattaagataatgttctaacacaacctagagcttaggaaagctctaacactatttcctttgattagtgtttattgacccatattgtgctaggcgctggatatacagtggtgagcaaacgtccaggtacctgacctccgggagcttactgtctgaggggagagttaatcaagtaaacaaacgtacagtttttgattttgtgagattttctgcagggaagcaacagagtgctataaagacaggaacaggggcctgcctgtgcaggtggcatctaatcacagacttggatcaagggggatccagccatgtaaccagtggagaagagcactctgtgcaggaaaagcagcaaagatgaaatccttaggcaggtaaaagccacgtgttctaggccaaggtaacaggagaggagagaaacgggtag

SEQ ID NO: 277289 - DNA, 610 bp, Homo sapiens
aagccctcagtgtttcactcacactctccttttgacccatcccccaaaaagcgtatctgtagtgtctgcctgacactgatatgacaagtccccaggccaacccgagatatctaccaactggaacattaggaaatcatgtcaatttccaaaatcttatgaaactctgcaagagctttttttttttttttttttaaagaaagtaataattaagtmttgttttcttatctccagtaatcatcaaaaacttagccagggacaaccagaaatcctaaaataattcatgtgccttaaaataaccaactttccttcacttgttcagttgataacaacttgggatcttctccaccactgccaggggagctaggaagctgaaagaatgactggcaaggctgtgtcatgacagaaaggtctgtggccaatccatctgaaggtccaaccattctaaacagctatgtcacaggtacacatacaagtgcacacatgaacgtgtgtgtagtaagagagagagattccaagccagtatcatcatttcatcaaagacgtttaaatccagaagtactatatgtattatttatattcatgccttgtttcaaaatcatttaaggcaaag

SEQ ID NO: 277290 - DNA, 610 bp, Homo sapiens
aagccctcagtgtttcactcacactctccttttgacccatcccccaaaaagcgtatctgtagtgtctgcctgacactgatatgacaagtccccaggccaacccgagatatctaccaactggaacattaggaaatcatgtcaatttccaaaatcttatgaaactctgcaagagctttttttttttttttttttaaagaaagtaataattaagtattgttttcttatctccagtaatcatcaaaaacttagccagggacaaccagaaatcctaaaataattcatgtgccttaaaatamccaactttccttcacttgttcagttgataacaacttgggatcttctccaccactgccaggggagctaggaagctgaaagaatgactggcaaggctgtgtcatgacagaaaggtctgtggccaatccatctgaaggtccaaccattctaaacagctatgtcacaggtacacatacaagtgcacacatgaacgtgtgtgtagtaagagagagagattccaagccagtatcatcatttcatcaaagacgtttaaatccagaagtactatatgtattatttatattcatgccttgtttcaaaatcatttaaggcaaag

SEQ ID NO: 277291 - DNA, 569 bp, Homo sapiens
actacatataaatgatttgtatttctgtataaaaattgaaaatagtgtactaatttttcaatttaatcctctaaatgagtttaatttcccttcatagtagaattatctgtctgcatgttgccaaatactaaggagataaattagattgatacttagaaagcatctgaatacttcaaattgaaggagtctataaataactaaaataattcactgtctgtctatgtcaaggtgctatttggtaattctttcaaaaacattttaatgatcatctattaaccaccaatatagtcacaggtaccttgaggaatrtgaagctgattaatcacacacccgctaaagggagataagtatagcagccacatgtcctggataacccaaggtacgtctgtcttctgccactcatcctggcataaggattaacagcactgctttcactcccccaaaatatcccagtttaaacaataaatcatattggtaccatataggtaagaaatatacataaatgaataagaaatgtaatacatgccattgaaaaattacagagtggcctgggtgttcacaggagggac

SEQ ID NO: 277292 - DNA, 596 bp, Homo sapiens
atacagcaaactatataagtagtatatataaagtaaactgcctttttacttatacagtaaagattttttgaagaagcatggaaataggaaacaaaaaattcagcatagcagttggggaggaaaattagtatcatgttttcattcttaagctggatggtggctttatagatatacatttattatacttcatgacttacatattgaaatatgtatgttgccttgtataaatacaatattataagatttcttaaagtcctttgaaatggtgtaccctagtcatctaatgtaagaaagaaaagttgatacaggtaaaatagtggacacagtatgttttcttttaactgaacagtccatttttctgctttgaaacccctttttcagcaaggcttgctccttttctgattgggaaaaacaagtatctcaccagatcttttgtaagaacataccatgtacagtcagtaacaggcagaagatagggtgcatgcactrctcctaaccatccaccttcattagatcacactattctgaaggaaggaggagtctatgactgaaccagggcatcagcctcctccatcttactccttcttgacacaggg

SEQ ID NO: 277293 - DNA, 596 bp, Homo sapiens
cttttgtaagaacataccatgtacagtcagtaacaggcagaagatagggtgcatgcactactcctaaccatccaccttcattagatcacactattctgaaggaaggaggagtctatgactgaaccagggcatcagcctcctccatcttactccttcttgacacagggcataagctgcgccctggcatttctaactccactgaatgaaatctgagcagagacaaaatacggaaatcacaagaaagataaactgactctggctctcttaagcaaaaaaggtgtctactgtaagaatatccaaggctcagagatttaacatctgtgacaagatcagacagaaacaaagkgatcaagaaagcagatggcagaccaaacatcccatggctaaaccagcctgatcagcatggcaccccatttcttctgctgctgaagcccctggaatgagtgaactaactaatttacctgttcccttcttgctagagtctctgtccctcaagccaaagtcctgggaaagagcatccaattgaccaatcttagatcttcttcctgcactcttggacaaagccatggggaaatggaggatctgcctcctggaaa

SEQ ID NO: 277294 - DNA, 573 bp, Homo sapiens
ccatacatacaaatgttcatgtatacagacaatccatatacatatatctgtagtcacatggaattggagtctctctgaaaagaaaggcacaaagtggtactaatggctgtcttcagggagagtaayggggtagccagagtatggggtggaaggcagacacttttctctgttgaattgtataccctgtgcatgttttactttttgaaaaacaaataaacttataaaaactctctcttctttcactgaatctgggacactatttctaacaatgccgcaatgattttaaaatatttctgcaaatgttttaacaattccttgcatcaaaagtggattctaattccccaccctgttctgaatataggccaaactcagtgacttgcttcttctcctgaaaagaatgtggcagaagtgacttccaagcctagttaataaaaggatgacttctccctggcttgctgtctgtcacggatggtctcctctgggggaagccagctgccatgttatgaggacactcaacagtatgtgcagtctgtggagaggctcacctgggacaagaagagcaagaggtatgcc

SEQ ID NO: 277295 - DNA, 581 bp, Homo sapiens
gtggaactctcacctgctgagtcccgttctaatttcatccaatctggtgaacaagtatccaaccaaaggtggtacctgcaggcatgcccattgtcacagtaatgcaacactgtaagtccttagcacaatgttaaaattggttggaactgagtttcaaatgttttcctctcgctactgaggtcttctacttctttctttttctctttgtctctaatatctttttctttttgtttttctttttcttcttcttttttttttttttttgagttggagtttcgctctgttgcccaggctggagtgcagtggtactatctcagctcactggagcctctgcctcccaggttcaagcgattctagtgtctcagcctcccgagtagttgagattacaggcgcccgccaccacacccagctaatttcgtatttttagtagagacagggtttcaccatgttggccaggctggtctcgaactcctgacctcaagtgatccgcmctcttcggcctcccaaagtgctgggattacagatgtgagccgccatacctggctaatatatttttcttaactgactagagcacagaacac

SEQ ID NO: 277296 - DNA, 641 bp, Homo sapiens
ctgccatacttaggctgacatacagatttcctccttgcattgaggcatgatgcaggtgaatttaccgtcaagctcatgaagcagaagtgtcagagcccctcactttcatagcctcttccaaggtctaaacacttcttccagaagatgtgtttacaatgctatatatttttgaaaatttttcaatgaaaggtattttggtattctcttacttaaagaggactcctctcccaaattgtgtaagcttcccatccctttagggtttccagatttagcaaataaatattcaagatgccttgttaaatttaaatttcagataaataataattttttattattccaaatattacttgggacatactttacttttaaaaaatattarttagacaacaaagaattcttcattactgcaaatattgcatgggacatacttacacacaaaaatttatttgctgttaatctgaaatttaaatgtaactgagaatcctggagtttgtctatcagcagccctctacccatccaaaccaggattctccctgtttagacactgaatagcaaggtaagccttgctgatcctgagccagataaagatgtctttgaatttcatattacaaactcttctaagactgtaatttgagacttgg

SEQ ID NO: 277297 - DNA, 547 bp, Homo sapiens
actttattacttcaagcccattctttcacttttctccaaggttgtgattaaaattctgttctaaagtcaacttcttaatctaagtagaaacggcttgcaaaccttaagtacttgaaatccctttctctttctttgttggttgttggtagagatgtttcttgataatttacactgcaatccagtattcatagatatagrgaaatggatagatttatgaatagatatatgctcccaattttccccttttcctctccctctcctattaggactaggtaaataagaatgcacaagctttctctttctaaaatggagaatatttagagatgggagcctctgataaaggctggtgaaaaagagctggacttagcagagaggttaaggtgatcgacagagtaaagagctgggtgaagaggagaaaacacctaaagaaaaagccaaaagagagagaaaaaaataggttgatgtgcaagaggctccagaacatccttctgcatgtgagaaatacagagggaaagaatgacttttgagaagttcctgtgaagaaatt

SEQ ID NO: 277298 - DNA, 547 bp, Homo sapiens
actttattacttcaagcccattctttcacttttctccaaggttgtgattaaaattctgttctaaagtcaacttcttaatctaagtagaaacggcttgcaaaccttaagtacttgaaatccctttctctttctttgttggttgttggtagagatgtttcttgataatttacactgcaatccagtattcatagatatagggaaatggatagatttatgaatagatatatgctcccaattttccccttttcctctccctctcctattaggactaggtaaataagaatgcacaagytttctctttctaaaatggagaatatttagagatgggagcctctgataaaggctggtgaaaaagagctggacttagcagagaggttaaggtgatcgacagagtaaagagctgggtgaagaggagaaaacacctaaagaaaaagccaaaagagagagaaaaaaataggttgatgtgcaagaggctccagaacatccttctgcatgtgagaaatacagagggaaagaatgacttttgagaagttcctgtgaagaaatt

SEQ ID NO: 277299 - DNA, 547 bp, Homo sapiens
actttattacttcaagcccattctttcacttttctccaaggttgtgattaaaattctgttctaaagtcaacttcttaatctaagtagaaacggcttgcaaaccttaagtacttgaaatccctttctctttctttgttggttgttggtagagatgtttcttgataatttacactgcaatccagtattcatagatatagggaaatggatagatttatgaatagatatatgctcccaattttccccttttcctctccctctcctattaggactaggtaaataagaatgcacaagctttctctttctaaaatggagaatatttagagatgggagcctctgataaaggctggtgaaaaagarctggacttagcagagaggttaaggtgatcgacagagtaaagagctgggtgaagaggagaaaacacctaaagaaaaagccaaaagagagagaaaaaaataggttgatgtgcaagaggctccagaacatccttctgcatgtgagaaatacagagggaaagaatgacttttgagaagttcctgtgaagaaatt

SEQ ID NO: 277300 - DNA, 547 bp, Homo sapiens
actttattacttcaagcccattctttcacttttctccaaggttgtgattaaaattctgttctaaagtcaacttcttaatctaagtagaaacggcttgcaaaccttaagtacttgaaatccctttctctttctttgttggttgttggtagagatgtttcttgataatttacactgcaatccagtattcatagatatagggaaatggatagatttatgaatagatatatgctcccaattttccccttttcctctccctctcctattaggactaggtaaataagaatgcacaagctttctctttctaaaatggagaatatttagagatgggagcctctgataaaggctggtgaaaaagagctggacttagcagagaggttaaggtgatcgacagagtaaagagctgggtgaagaggagaaaacacctaaagaaaaagccaaaagagagagaaaaaaataggttgatgtgcaagaggctccagaacatccttctgcrtgtgagaaatacagagggaaagaatgacttttgagaagttcctgtgaagaaatt

SEQ ID NO: 277301 - DNA, 560 bp, Homo sapiens
aagttcattatgtgcctttaattatatgctagtgataatatgaagtcatcatgctaactaggtataaaatatatttctttcacccttaaatcatcctgttttgtgtttgattaaaactgagtggaatatagtaatacaggaaaatatgtatatgatttatgaagaaaacataagaatactctgagagcaggcactcacaatttttattgacagggttcatgatcaaaattgtttaaagagtactcatttgtgtcatactactttttatagctccagtctcaaacatgtgtccaggacttcctaggtcctttgcactctgaaaaagaaatggaatgaggagataagacaattaagaggcaaacaaaccctaagcaaagcttccctgattctcctgtttaaaatagtagccctttggtggctsatgcccataatcccagcactttgggacgccgaggtgggtggatcgctcgagcccaggagttagagagcagcctgggcaacatagcgaaacctcatctcacaaaaaatacaaaaatttagccaggtgtggtggcatgctc

SEQ ID NO: 277302 - DNA, 655 bp, Homo sapiens
tcaaataatacctaagtaaaaaatggaaactgtaataattccttcctcccttaatcttcagtactcttcccatggttaagagttttggtttgtttggttagattttttttgaaataggcttcagtagtcaaagatttatgtaaacagtagaacttgaaatcattcactccctaaagactttgaaaaccaatcaatggcaaaatgacttaggaaaagtagggaagagcttttcttcttgggtctgttccagctttcaattcgtaaagaataagatgtggctacmctttaaaatatacacagaaacacacacatttcacatacttttcatctgaaaggaccagttcagtgcaccttcagcagtgtgcttatttctgactttacttggaacccggaagttgtcttcttggaagtacagcatgtggtacacagtgagcattcagtgagtatctgttgaacgaactgtaattattttaagagggaacaacatatttttgtcttcctcataaacatgattcaggcagaaaataatgcaaaagcttacaaacataatctattcatcaactagccctcatagactcagctcaaaatccataaactatgaagtcttgcccaaggaccctcatgagaagggctcgctccctttttccagcccctc

SEQ ID NO: 277303 - DNA, 479 bp, Homo sapiens
gagcacctgtacactgctggtgggaatgtatattagttcagtcactgcagaaagaacttaaaacagaactaccatttgatctaccaatcttattactgggtatatatccaaaagaaaataaatcaytctaccaaaaggacacatgcatgcatatgttcatcacagaactattcacaatagcaaagacatggaatcaaaccagatgtccatcaatgacagatttgataaagaaaatgtggcacatataaatcatggaatactactcatccataaaaaagcatgagataatgtcctttgcagcaacatagatgcagctggagaccaatatcctaagtgaattaacgcaggaacagaaaatcaaatactgcatgttctcaaccacattgtgtactcatagacataggatggcaacaaaagacactgggaactactagaagggagagggagggagagaggagggatcatttgaaaaacaatca

SEQ ID NO: 277304 - DNA, 629 bp, Homo sapiens
tctgctctttctgttatgatagtcttgtatttattctcacttcactcaygttagatacgtacaatagattctttttgaaagaagtttacctttctttcctcataattttttccctcacatcccactctggctttaattattttcttgactgacagctctgtgtaattatttcagtgaaggtctatgagtagaaaaccctttccttctttgtctcaaaaaagaatctttattttaccctccctcttgcatatagttgggtatataggcataggaaaataactgcaaggcagtgcttatatctgagttgagagactactggtagttttccttatttatgtgcatattctaatttttctatgctgaatattatttggataatttcttagaagttaaaagctgcacaacaaaatgtgataagaaatgaatactttgatcactggctcatcaaatcagtgccaaatactcatatattctgattatgtttctgcaaaattttcttcaagagaaccatggaaggtgatgctgttgccatggcaccataaaagtagtccccttagaagttcaaatggaggagtcacatcgttctgggctcaggtttcagctgctctgggttgcatttatttgcacta

SEQ ID NO: 277305 - DNA, 423 bp, Homo sapiens
tatttatgtgcatattctaatttttctatgctgaatattatttggataatttcttagaagttaaaagctgcacaacaaaatgtgataagaaatgaatactttgatcactggctcatcaaatcagtgccaaatactcatatattctgattatgtttctgcaaaattttcttcaagagaaccatggaaggtgatgctgttgccatggcaccataaaagtagtccccttagaagttcaaatggaggagtcacatcgttctgggctcaggtttcagctgctctgggttgcatttatttgcactacttcaatgcaaatgtgcctttaatcctgctttctctccttcccagtggtggaatgtagtatctgccttcatgtaagacttraagctggagtgcgaaagaatcttagctggcacccactgtacc

SEQ ID NO: 277306 - DNA, 1151 bp, Homo sapiens
gcattgtctgtggctgttttgtgctacaagggcagagttgagtaaccgtggcaaagattgcagggtctgcaatgactaaaatatttattatcttgccctttacagaaaaattctgctgacccttcctttaaatgactgcctagctgggcatggtggtgcacaagtatagtcccagctattaaggagtctgaggtggtaggatctcctgaggccaggagttcaaggccagcctgtacaacatagagagactatctctctccaaaaaacaaaaaagactgcctaaattctacatatgaatatgtcatagtttattttaatagttccttaataaaggatatgtaggttatttctaatcttatgttattacaaatactgctgtaattgatgtaataatatatgtgtcattctcaaacatgtgcttatatctgtataartccctgggaatggaattgctgagcaaaaatatcatgggttttttttcatggatatatttgttaatttggtcttcctgatatcagtgatgttaaggaagccagaagacaaaccagctgtaagaagcwctccaccacaatagagaactagatgtttagcctctggagagggcttctggactgggaaaacactggccagagttgatggtgaggagacagtattgtaacagagtgtttaagtgacttttatatacggwctattgaaaccaccagcccatttctccctccgggcttctagaatggtgggatccaaggctgtagcctctaggcaggagactggtaggttcttgcctgcaaaatctaatcagcccaggagaaagataaaaaatattagtatcaggggtgacttaactcaatgacccattgtgatattctacacttgggtttctcaacaaaatctagtgaccttttgggcagcatcactctttgttatgagggctgtcctgtgttttgtaaaatatttagcagcatgcctggcctctacccaccagatgccagtactatctcccagagttgtgacaatcaccagtgtcttgcctgctgtcgagaaccatagctctatattgcccatagttggtaggtccgtcttgtgctctcagatttcctatcaggttcttagtgctttattcattcctaaacatgagttgacaaccaaaagtc

SEQ ID NO: 277307 - DNA, 426 bp, Homo sapiens
gatggttgtttttgttttcgtcatgagacagagccttcctggcctttcagcaaagctggtaactcttctgccatttccagatgagtactaagaagttactaggcttgttaattttaggaaagacagaacagagttaaataaaggaggagagaaagccaacactccctttgtctagattagttgctctcacatgggaagggaaaaggattctgcacagcaggggacatttggtaatcctgagagatatttttggtctttgcaacatggggacacaacataagggtggggagctgctactggcatctgrggagtagaagccatggtaagccatcttaccatgcacagggaactccttaccctccttaccctccttaccctcacgcacaacaaagaattatctggcccaaaatgtcaaggataatgagg

SEQ ID NO: 277308 - DNA, 426 bp, Homo sapiens
gatggttgtttttgttttcgtcatgagacagagccttcctggcctttcagcaaagctggtaactcttctgccatttccagatgagtactaagaagttactaggcttgttaattttaggaaagacagaacagagttaaataaaggaggagagaaagccaacactccctttgtctagattagttgctctcacatgggaagggaaaaggattctgcacagcaggggacatttggtaatcctgagagatatttttggtctttgcaacatggggacacaacataagggtggggagctgctactggcatctgaggagtagaagccatggtaagccatcttaccatgcacagggaactccttaccctccttaccctccttaccctcaygcacaacaaagaattatctggcccaaaatgtcaaggataatgagg

SEQ ID NO: 277309 - DNA, 498 bp, Homo sapiens
ttccttaatcttttttaatgaaattacaagggaaagagaattatatagccctgctccagtatcccagagcttgactttcacccgtacttgaatctgaagaggasagcaatgtttctgctatggatctcacgcatctattgaacctggaagctcctgagcatcctgaaaggcaaaggaaggtttttcaatttactctctctttgtcccttccacccccactccctgtgcccgtagcaaatactagtcaagcagatggttttggtgtgatgccctggaggttaacagatgtgaattctaatggcataagaggacaaacattttccattgctgcattcaaaccaagcacatggtctgtcccccacaaaaacaaatggtgctttaatacgggtgacttttaaaaactccacaccagggttaaaagacttctcagagtaaggggagaaaaagttaataagaaatacctggacatcacaggaaatgaactatttttagtaaacc

SEQ ID NO: 277310 - DNA, 498 bp, Homo sapiens
ttccttaatcttttttaatgaaattacaagggaaagagaattatatagccctgctccagtatcccagagcttgactttcacccgtacttgaatctgaagaggagagcaatgtttctgctatggatctcacgcatctrttgaacctggaagctcctgagcatcctgaaaggcaaaggaaggtttttcaatttactctctctttgtcccttccacccccactccctgtgcccgtagcaaatactagtcaagcagatggttttggtgtgatgccctggaggttaacagatgtgaattctaatggcataagaggacaaacattttccattgctgcattcaaaccaagcacatggtctgtcccccacaaaaacaaatggtgctttaatacgggtgacttttaaaaactccacaccagggttaaaagacttctcagagtaaggggagaaaaagttaataagaaatacctggacatcacaggaaatgaactatttttagtaaacc

SEQ ID NO: 277311 - DNA, 498 bp, Homo sapiens
ttccttaatcttttttaatgaaattacaagggaaagagaattatatagccctgctccagtatcccagagcttgactttcacccgtacttgaatctgaagaggagagcaatgtttctgctatggatctcacgcatctattgaacctggaagctcctgagcatcctgaaaggcaaaggaaggtttttcaatttactctctctttgtcccttccacccccactccctgtgcccgtagcaaatactagtcaagcagatggttttggtgtgatgccctggaggttaacagatgtgaattctaatggcataasaggacaaacattttccattgctgcattcaaaccaagcacatggtctgtcccccacaaaaacaaatggtgctttaatacgggtgacttttaaaaactccacaccagggttaaaagacttctcagagtaaggggagaaaaagttaataagaaatacctggacatcacaggaaatgaactatttttagtaaacc

SEQ ID NO: 277312 - DNA, 583 bp, Homo sapiens
tgggtattaacatgataaaactggggatccaagaaaatgaaaagctcagcactcaaccccaaagagtaggaataatttattgycacttgatgtccaatgcccttcttgaagtcaaagtgtccctataaacctcataaaattaatcagaaaaaagtaaggaagagaaacaaaaataagccaaacttgcagcacattcagcattcatcactaggtcagcttgctctctgactgcttcctcatagttgtttggtgcctactgttctagagtcaggtagacccttgattataattccccttaactgctctataaataactaaaacattataaaatgttgtttcctacttaaaatattcttttaggtcctgcataccagtgaaactactaacatcagctggtctaaagaaccccactgatgtcagctgatctggaggacctcacaaggagctgactcacccaacaatgaggtttccacatcctgatgttttcatccttctgaccctgaccaatcaacaacctcaattttccagtcccttgccttcgatgatccctttaaaaactctagcccagaactcctcagggaaa

SEQ ID NO: 277313 - DNA, 513 bp, Homo sapiens
ggcaacagaactaaaaagacataaacagcatttagcatagtatattactttgaaaaacagatgaattttttatgtaaaatgctactgaagcactcacttaaacacaaccattcaatttcctacctcgagcccagaagctctctttgctggcctaagatatttttctttatctagcatgcctgatgytgcaggtctctttctcactctttattctgcaagacatgctcagattctctttccattcaatttatgacataattcattgaatgctacagcctacttgaggattttttaaaaatattttctagccctgcaatagaaattcatttttccaataagaaatgtggtgatgaccctgtcagctaagtctcctaattcatctgtctgtgtgaaaaagctcttccctccaggccccttcagaattcatatataaattgctctctatgtattagcatctgcagtgaaactagctttcacactttttaaaaaataaaaaatatgtatattttacaa

SEQ ID NO: 277314 - DNA, 500 bp, Homo sapiens
ggcaccatgtgtacaagagcctgagtaagggcctgaagcacctatagagctatgagtgtccttttagttactggatcctggggatgtcactgagttctgtggagcatccagggcagctgggatggcagggggcattgggaaaacttgggacagtggctgtctaccatgttttctattgtcattaatatccaaactttcagtttcatccacagtttatcactgaaatgtttttcctttgaagtatcmactgatcctctaattgcagaaatgacagtcaactcttaaatatgcctgatgattgggctctctgctccatttgtcactttaccgtcgaatgcattctatccctttggaatgttgttctctccgttttcatctacgacatctgctgctctgcttcagtgatttgaaggtctcatcttcagttttctggacttctgattctgaaaacaccccctggatgacccccacccaggtcattttttaccaatcaccatgac

SEQ ID NO: 277315 - DNA, 500 bp, Homo sapiens
ggcaccatgtgtacaagagcctgagtaagggcctgaagcacctatagagctatgagtgtccttttagttactggatcctggggatgtcactgagttctgtggagcatccagggcagctgggatggcagggggcattgggaaaacttgggacagtggctgtctaccatgttttctattgtcattaatatccaaactttcagtttcatccacagtttatcactgaaatgtttttcctttgaagtatccactgatcctctaattgcagaaatgacagtcaactcttaaatatgcctgatgattgggctctctgctccatttgtcactttaccgtcgaatgcattctatccctttggaatgttgttctctccrttttcatctacgacatctgctgctctgcttcagtgatttgaaggtctcatcttcagttttctggacttctgattctgaaaacaccccctggatgacccccacccaggtcattttttaccaatcaccatgac

SEQ ID NO: 277316 - DNA, 566 bp, Homo sapiens
atccttccacctccccaactcacatgtacacacagcagatgtgttgtttccttccttggagctcagaatactttgagcactgactaaggcatagatcccattctgccttctagggttgtcttatttttctcaggttggctgcaggcctggtgagagtagggagggcatcatacctgtctgtatatttcctgtaatacctcayacacagccttgcacaccatcggtgttcaggaaaccactggattgaagaactttctattccttggtatttttggagatttaggccttttaagaaaaggagttgaaagttggggaaatggagatatatttacagatgatagatcctttatgtattaagttagataaacatgttttagaaaacatccctcctctttggagtcaggaagaactggtccatttctcacaacctcattggccacagccaacagacactcagaacactgtccggggtgaacagtggatctgagtcacatcagtaactcatgtgttgacaatcagctccactgtcctctcagaggcctctgcatttattcactgtccttacc

SEQ ID NO: 277317 - DNA, 617 bp, Homo sapiens
ggccaaagcagatgtgtgaaatcacagcaaataaattaacactgcattaagaatcaaatcattcctgctgacacataatctttcacttttatatcaagtcgtgattcccattcacatcaggagcttcccaggggggctcattaaacctgcacaaagagatttctttgaagtcagtgctattcccatgaatagcattcagctacagtgcagaagagcctgcccgcctggtgtctaggcacccttcccttcactctcattgttgctgtccagccagaggcccagcaaggcaggctatagcagggcttcctgctgagtgcctttctagtctgtatgaaagagatgaggaaattgcaggggaaatgcacatyggtaggacctgcccttgacagaattgttaagctgggagaatatatttcttttcccacatgtgcccttcctgctcttcttccacatcagagtgtactgctacaagagctaaaagttggatccatcccggtgccaagattattaagaggaattggtattcatcccaaaagaaccttctctaagatctgaagcttacattcaaggttccttcttgcgctcataattgtacgtggactcccctggttgcctga

SEQ ID NO: 277318 - DNA, 535 bp, Homo sapiens
gttttttaaaaatgttaaagtatgcctatatgttctaacatattttaacatgttgagaatattttgaataaaaagtaggataaagataaaattttgggggcaatatgcatttatatgtatattgatatgtttgaaaatctcaacactgaatggtgggattgtttgtgtgatctcttactctttatgcctttatatattgtctgacttatttttgacaataagcacatataactttacaataaaaaggatcaccagtaaagcttcttaaaattttcattcctattcttatatcactaagaagatgaaaagacaacagatgaaaactgttaagttttattctaaggcacatgacccccagtaagggacttttatttatgttgtttattcttactaataaagtacttgtaagttttgaaagtatgtcaccaaggcaagcaggacagaccacaagatttgtcttcctgtgatagaygaacaagagaagcaggcacaacaccaatttcaagactgtccaccccctgttcttggtgttatc

SEQ ID NO: 277319 - DNA, 580 bp, Homo sapiens
tttaaaaaaaatcaagcaatgaattacccccaatatataaaacaaataccagtcctttgttctgattgataagtatgcatgtgtgcataagggacttttggaggctctgctttccaaatattcactgctatgagtactcatcacacatacatacacatattcggtggcctctgttgcttgccaccaaggaatctcaaggctcctttaaacattgtttaaaaatcactgcaataaatgatttttaaggcatagtcagctcctgttttccatgataccaatgaccaactatagcttcaggtagataagaaggggttctgtgtcttggaatgagaatgggatagagtctataagagaagccgaggctsagagagagagagagagagaaagcctgtggttgaagcagagaaaaagccaagggccaagggaagggctgagtgttagtggaggtggaggccaatcgctaggagcagacaaggcggcgggggactgttaatgagttctcagtcctgaaacacaagccattagcccacccaaggcagtgtttgactgtcatccatttgtggtctggattgatcattaa

SEQ ID NO: 277320 - DNA, 505 bp, Homo sapiens
tataaacatatcaaaacactgtatactgcaaagagatacaatttgtatttgttaattgtaccctaataaagctagggggaaaacataccctaaaaattaatcaagcaagcagactttagatttgttaaattttctggcagaatctctaatataacctgcaaaatgctcttctccgtgacccaaaatatgcttctgtccctggaagggactgatacctccaaaggagtgttgtaatgtcactgagtctgatttttaaagagcaattgcaaaattgggctttctaacccacagtatctaactactgtttttccttctttttcctctcctccctggcatagctagagggtgcaatctgggaatgaatcactgggctgctctgtcccagtccagtgtaagcaggagatcaaacggtcaaaagattaygggagtggggctggccggccaggccataatctccataaggtcacagaagtgctgctttcacatcaaaaaattagacttccgg

SEQ ID NO: 277321 - DNA, 559 bp, Homo sapiens
tattcacaattttcaaataaaaagtatactgtccctgccacacacctaattccccatctccttttccaccttctaacgtcctctgaagtcacagttgagttcatgtgccccttctccacaaaaccttcctggttgtcccagcaataagaaagtgctccatcaaccaaaatctttatcttttatttgagatttgtttgtttgtttgtttgtttgtttcactctgtcacccagcctggagtacagtgctgtgctcacggctcactgcagcctcaatctcttgggctcaagcaattctcctgcctcagcatcccatgtagctaggactccaggcgctcaccaccatgaccagctaatktttgtatttttgtagagatggggttttgccatgttgcccaggctggtctcagactcctgggctcaagtgatcccacccactttggcttctcaaagtgttggaattacagttgtgagttgctatgcctagctaatatttgagctttaaaacataactttcaaaatattatatatttattctgaaaaataaaaattattcatactc

SEQ ID NO: 277322 - DNA, 612 bp, Homo sapiens
taactcacaggttaaagaagacatcaaaagggaaattcaaaagtatttttaattgggtgaaaatgaaaacacagcatataaaaatttgtrggatgtccctaaaaataaaactcaggggaaaacacaactctgaaaagaagaaatgtgttaaatcaatgcccccagtttccaccttaagaaaatagaaaatagagggcaaattacacccgaagtagattgaagtacagatataataaaaaattaaagtagaaattaatggaatataaaataaccaaaaaattaatagcaaaatttaataaaaccaaaagtgattctttgagatatcagaatagataaacctctactcagacttattagggaaataaaggagacaggaaggaagaaagagggtggtggcagggagggagaaaaattttaaaatttttaaaaataagagacattgtgtgtgtgtgtgtgtgtgtgtgtgtgtgtgtgtgtacgagtgtgtgtatgtatgtgtgtgagaatccttggaagacaagttgtatctacctggactgaaccatttatccatccactcgttcatccaattgatcaacaattttattctaagaatatatcatgtaccaatct

SEQ ID NO: 277323 - DNA, 647 bp, Homo sapiens
attggctctctctctctcctgatttctcaggtcaaataacaacttagtttaggtttgktgacttggaactttagtatgggtggctccattttgatttttattctggtttgttggagcctagttcaagagcttagtccaaaacaatgacctcctgtaattttttatttatcaatagtgtgatggttaattttatgtgtccacttggttaggctacagtacccagttgttttgtcaaacaccagtctagatattgctgcgaaggtattttcagatatgattaatactgaaatcagtagaatttaagtaaagaagattacccaccataatgtgggtaggcctcattcgatcatttgaaggggttaagggaagactgaggtgccgaatgaaaagagcaaggaattctgtcaccaaactgccttagaactcaagacagcaacattgattcctgctggattttccagcttgcctgcagatttcagatttgctagcccctacaatcatgtgacccagtcctttaaaataaaaataaatctctctctctctgataaatggaataagctctttgctaaaagggaaaagaaaataatttacagtggtaacatcacctcacaatcatatcacaatttggcattggtcagcttcagatt

SEQ ID NO: 277324 - DNA, 647 bp, Homo sapiens
attggctctctctctctcctgatttctcaggtcaaataacaacttagtttaggtttgttgacttggaactttagtatgggtggctccattttgatttttattctggtttgttggagcctagttcaagagcttagtccaaaacaatgacctcctgtaattttttatttatcaatagtgtgatggttaattttatgtgtccacttggytaggctacagtacccagttgttttgtcaaacaccagtctagatattgctgcgaaggtattttcagatatgattaatactgaaatcagtagaatttaagtaaagaagattacccaccataatgtgggtaggcctcattcgatcatttgaaggggttaagggaagactgaggtgccgaatgaaaagagcaaggaattctgtcaccaaactgccttagaactcaagacagcaacattgattcctgctggattttccagcttgcctgcagatttcagatttgctagcccctacaatcatgtgacccagtcctttaaaataaaaataaatctctctctctctgataaatggaataagctctttgctaaaagggaaaagaaaataatttacagtggtaacatcacctcacaatcatatcacaatttggcattggtcagcttcagatt

SEQ ID NO: 277325 - DNA, 623 bp, Homo sapiens
ttgatttatttgagtaagaacacgatagagcaagcctcatcgtttaatacagtggttctcaaacgttttagtgtcacgatgctttgctctcttaaaaataattaatgactcaaaaattttttttttttttgagatgcagtctctctctgttgccaggctagtgtgcagtggcacaatctcagctcactgcaacctccacctcccaggttcaagtgattctcttgcctcagcctcctgagtagctgggactacagtcgcgcgccaccatgctgaactaacttttgtatttttaktagagacagggtttcaccctgttggcaaggatgatcttgatctcttgacctcatgatccacccaccttggcctcctaaagtgctgggaatacaggtgtgagccatggccaaaataatttttatgtgaatagtatctattgatatttactgtgtaaaaactaaaacaaaatttaaatcatttgttaattcattcaaaaaaagactaattacatattaacatggaatatcttacccaaaacccatattttctaaaataattttttaaaaagtgagaagaatggtactgttttacatttttatatatctctaatatctggtttaacaaaagac

SEQ ID NO: 277326 - DNA, 405 bp, Homo sapiens
ttttattaaatattttaaaccactattttcatttttgcttattgcctttcgggtcacatatagacatacmtttgcatggttacaatcatgtatgtacattttgtatttaaacccagcaaaaattctgctaagcaccaatttcaggtaacccaacagaagctagtgactgagtcttttaattcagctcaaagagtatgttgagatgggaccagttgtactgagctcttccgcattttaggtgtgattattttcattatttagagtcttaaatttataaggctggtgagaatatccatttggtttaaatgtttatgttattcaggagaacttgaaagtagcttcggtaaaattcaaatggtgtctataaattgtggatattgtttttatactcttggtaaaagatga

SEQ ID NO: 277327 - DNA, 542 bp, Homo sapiens
cagtcctgaggcttcacccctggaacaactgcacgcccctcaatcttgaagcgatctcctatgccgaccccactccctcccgatccctcagcagcagccccgggcacctccgagctctggacatcccccgatagcagcagcagcagcaggacgggaaagaagccccacagagcggccgccatgacagcagctctgcactcagaccggcagccccggaagccctcccagtctcccggccgccaccgccgccgctggcggcttgatgttgtcatcactgcgcgcccgtttctgtcataagctgtgggatccaaccagagggaagagatcatggccgatcgactagcgaggcggaagtaaggcggaagtactgcccttaactcccggcactctggattggaagacggcgcacagagcmtgtgtcaagtgcctatgaaggggactgcccatgaagtgaaagtcaagtgtgtgttgctgcggcagccacggaggccaaggacctcacgggagtaaaagatgacgagactggcttcgggagaaacacc

SEQ ID NO: 277328 - DNA, 605 bp, Homo sapiens
ggctcctatataggtttaattcaagacgcattttttttttcagatgagagagcaaaataaaagcaagattacaaagagttaaagagaaaatggaagctaaaaagcactcattgtagaaatttggcaggaaagggaagcagagaaagagtataggagttgatcacggaaatctgatcatgtttgaaagcagaagggaggaataagttcaaagggagaaatcaaagatttttaaaaagggtttgtgggagcaaagtccaaattgaggtgagaaagcaagaactgagaaaattagatgaagctgtcctaattttggaaaagttaaaatagattcttcttatgaaatattacctccatgtattggcatttccaccttttttgcttgtttactataagggagttatacgattaagccatgttttataagatagtgatctcattaagttaaaatatttatttcttcarattataaaaataattcgtgtttgttgtagaaaatagaaaaacatgttaagtgatggtgggggggagcacccataatcccaccaacaataaataatttctgttaatgttttgatagaccttttttgattggatagatcttacct

SEQ ID NO: 277329 - DNA, 516 bp, Homo sapiens
tacttgtgattgcattgtaaagttctcatagtgtgtttttcagcaccattaggtctgttatgttcctctctaaactggctactctggctgtcagctcctgcattgttttytcatgattcatagctcccttgcattgggttacaacatggtcctttagctcagtgaagtttgttattacccactttcagaagcctagttctgtcaattcagccatctcagcttcagcccagttctgtgcctttgctggagaggtgtgcagtcatttggaggcagagacgcactctgtctttttgagttttcagcatttttgtgttgaatctgtctcatctttgtgggcttatctacctttgagctttgaggttgctgaccttgaaataggtttttgtggggtcttttctgttgatgttgttgttttctgtttgtttgtttttcttttaacagtcagacaactcttccacagggctgctgcagtttgccgtgggtccactccagaccctagtcacctcggttgttctc

SEQ ID NO: 277330 - DNA, 516 bp, Homo sapiens
tacttgtgattgcattgtaaagttctcatagtgtgtttttcagcaccattaggtctgttatgttcctctctaaactggctactctggctgtcagctcctgcattgttttctcatgattcatagctcccytgcattgggttacaacatggtcctttagctcagtgaagtttgttattacccactttcagaagcctagttctgtcaattcagccatctcagcttcagcccagttctgtgcctttgctggagaggtgtgcagtcatttggaggcagagacgcactctgtctttttgagttttcagcatttttgtgttgaatctgtctcatctttgtgggcttatctacctttgagctttgaggttgctgaccttgaaataggtttttgtggggtcttttctgttgatgttgttgttttctgtttgtttgtttttcttttaacagtcagacaactcttccacagggctgctgcagtttgccgtgggtccactccagaccctagtcacctcggttgttctc

SEQ ID NO: 277331 - DNA, 516 bp, Homo sapiens
tacttgtgattgcattgtaaagttctcatagtgtgtttttcagcaccattaggtctgttatgttcctctctaaactggctactctggctgtcagctcctgcattgttttctcatgattcatagctcccttgcattgggttacaacatggtcctttagctcagtgaagtttgttattacccactttcagaagcctagttctgtcaattcagccatctcagcttcagcccagttctgtgcctttgctggagaggtgtgcagtcatttggaggcagagacgcactctgtctttttgagttttcagcatttttgtgttgaatctgtctcatctttgtgggcttatctacctttgakctttgaggttgctgaccttgaaataggtttttgtggggtcttttctgttgatgttgttgttttctgtttgtttgtttttcttttaacagtcagacaactcttccacagggctgctgcagtttgccgtgggtccactccagaccctagtcacctcggttgttctc

SEQ ID NO: 277332 - DNA, 1797 bp, Homo sapiens
aacccaggaggagaataaagcttaaagtaacttttgatgttgataaattaggtacacatgttacaacttctaaggtaaccactaaaagaataggaacagtagatgaaatttccaaactagagaaagtgaaatgtaaaaaaaaagtttaacccaaaacaaggtaaaaaagagaaagaaaatgaaatgcaaaacaattgagataaacaaaaagcataaattaaaatctatgtttaaacccaaatataaaaagatggaaaaagatatgtaaacattaaccaaaagaaaaccagtggaaatatattaacattagacaaattaggcttyaaggtaaaaatcattactaaagataaatgggcttatttcagaataataaaatattaaatttaccaggaatatatgaatacttaaaatatgtatgtacctaatagcatagccttagagatttaaaacaaagcatgacagagtgacaaggagaaacaaagcattgatattaatggaacattttaatacacttctttcattacatgatagaataaacaatgtattctcaacatagcagccaaggtgagcaaagcatttttctctactaggcaaagccctcwaatggtgaaaatctggttttagtttcccttttcacttattaattgaaatacttttataaagagatgcttctcatcatctactatttggtttcaaagtggtacacttcagttcatataggaaaggcagacaaaatacttgatgctttccctttatcagtttttagataatgaatttgttttcatcctctgaaagtgactgattggcacttctctttttaaaatatcataaattcataaatttaaacaaatgtgacgggtttaattwattacaactattatcatctttgaatcttaaattgtctcatttaaaggaaatgttttaagtcagctcctgaattattttgatattactgagtagtctgttagtttcctcattatcttatatgacatgaggatctcagcatacctttaaaaaaataacaactttgttgagatataattcacataccatacaattcaccatttacagtgtaaaattcagtgtattttagtatatttgcagagttgtgtaacaatcactacaatcaattttagaacatttcatcattccccaaaaattctttagccgtcatttcccatctgcccctctgttacctcwaatggtgaaaatctggttttagtttcccttttcacttattaattgaaatacttttataaagagatgcttctcatcatctactatttggtttcaaagtggtacacttcagttcatataggaaaggcagacaaaatacttgatgctttccctttatcagtttttagataatgaatttgttttcatcctctgaaagtgactgattggcacttctctttttaaaatatcataaattcataaatttaaacaaatgtgacgggtttaattawttacaactattatcatctttgaatcttaaattgtctcatttaaaggaaatgttttaagtcagctcctgaattattttgatattactgagtagtctgttagtttcctcattatcttatatgacatgaggatctcagcatacctttaaaaaaataacaactttgttgagatataattcacataccatacaattcaccatttacagtgtaaaattcagtgtattttagtatatttgcagagttgtgtaacaatcactacaatcaattttagaacatttcatcattccccaaaaattctttagccgtcatttcccatctgcccctctgttacctc

SEQ ID NO: 277333 - DNA, 562 bp, Homo sapiens
  misc_feature (1)...(562): n = A,T,C or G
aagtcaactgtatatcaaactggtaatgttatcctcacagaaaggggaaaaaaagaattagtcaaagtaattctaaacataatatgttggtgtattcttagcgggatatagtctaagaacaaaaaaaaagctactaggaaatcygaaaatagctatagtatttgttttgtttgtttggagggactgtttctttatttccaaaaagatacctgttaatattcagtatcacaatggttgcactattggtttctctttctcccaattgaccccaaagagactacatcaaagaagagtacatttnnnnnnnnnnnnnnnnnnnnnnnnnnnnnnnnnnnnnnnnnnnnnnnnnnnnnnnnnnnnnnnnnnnnnnnnnnnnnnnnnnnnnnnnnnnnnnnnnnnnagagagctctcacagtcaaacagggtggctcggatgccacaaacccaaagaagcaaagttccaaaataatataaaatttaaaaggttttgtacataacttgttcaaaatttgtccagcaccaactgataccaagcacaatgatatggtacttttagagacag

SEQ ID NO: 277334 - DNA, 390 bp, Homo sapiens
aaaaatgtgttttaaaaccagtcaaatatcttttctatacaaggaacgctttaaaaggaacttttacaaatcaacaaagaaaattagtaagactctgatggccagataggcaaagcccctgaactgaacagacaaattttgcaagaccaggagcaagggatgacatacttccgggaaaaccttccacttccctggccatcaaagaaatatgcattaagtcaacaatgaggaactacagtgtatctccacagcaaatattattcaacaaacaaatatctttttgaatgaastctcccaccagtgaaaaggatatagggcaaagagcattttcacatactgctggtgaggggcaaacaacacaagtcttttgggaagcaatttagtgaaata

SEQ ID NO: 277335 - DNA, 596 bp, Homo sapiens
cctcagcctcccgagtagctgggattacaggctgaagccaccgagcctgcctccgttatcttaattattattataattatttttttgagtcagggtcgcactctgtcacccacattggagtgcagtgacacaatcacggctcactgcagcctcagcctcctgggctcaagtgattctctcacctcaacctcctgagtagctgggaccacaggttcaggccaccatgcccaactgttttgtttttgtttttatttgttttaattttttgtggagacgaggtctcactatgttgctcaggctggtcttgaactyctgggctcaagtgattctcccacttcagcctcccaaagtgctatgattacaggcatgagccactgcacctggtaatcttaatttttaaactgttctttcttctcatcaaaaaagacatttattcaagttagattatattgtcttggtttagttttgcttttgctctttcttaatttttattaatttccagtgatgaaattatttatatattgtttaattgtttctcctttgatatcaccaggataggaagaaaagaaagtttatacctggttaattcgtcactg

SEQ ID NO: 277336 - DNA, 596 bp, Homo sapiens
cctcagcctcccgagtagctgggattacaggctgaagccaccgagcctgcctccgttatcttaattattattataattatttttttgagtcagggtcgcactctgtcacccacattggagtgcagtgacacaatcacggctcactgcagcctcagcctcctgggctcaagtgattctctcacctcaacctcctgagtagctgggaccacaggttcaggccaccatgcccaactgttttgtttttgtttttatttgttttaattttttgtggagacgaggtctcactatgttgctcaggctggtcttgaacttctrggctcaagtgattctcccacttcagcctcccaaagtgctatgattacaggcatgagccactgcacctggtaatcttaatttttaaactgttctttcttctcatcaaaaaagacatttattcaagttagattatattgtcttggtttagttttgcttttgctctttcttaatttttattaatttccagtgatgaaattatttatatattgtttaattgtttctcctttgatatcaccaggataggaagaaaagaaagtttatacctggttaattcgtcactg

SEQ ID NO: 277337 - DNA, 635 bp, Homo sapiens
gtttacttgaaaaaatacatacatatatattttctttaaatataactttgctttttatagctatactagccatagattaaatattatatatgaggccgggcgagatggctcacacctgaaatcccagcactttgggaggggaaggcaggtggatcactgaggtcagaagtttgagagcagcctggccaacatggtaaaacctcgtctctactaaaaatcaaaaattagccgggtgtggtggcaagcacctgtaatcccagctacttgggaggctgaggcaggcgaatcgcttgaacctgggaggtgggggttgcagtgagccaagactgcgccactgcactccagcctgggggacagagcaagactctgtctcrtcatatatatataatatatgataatccatttttaaatggaattggatcatagtgttgcctcctattggttttttatttacgttatattgaccattttatcattatcttaacacttctttaaaagtgtgatttttaatgtttgcataatacccctttatagtatattttatttaactatatccataatactggagatgtaggttgctccaaccttgtgctattatcatagtgctttttaagctcatttgcatgtaaatcttt

SEQ ID NO: 277338 - DNA, 553 bp, Homo sapiens
actgctgcttcagcctcctgagtagctgggactacaggtttatgccccaaagcctggcttgttctctgttttgtttttgtttcctttttttttttttttttttttttgagatggagtctcgctctgtcgcccaggctggagtgcagtggcgtgatcttggctcactgcaagctctgcctcctgagtagctgggcctacaggcgcccgccaccgcgccaggctaattttttgtatttgttagtagaaacggggtttcaccatgttagccaggatggtctcgatctcctgacctcatgatccgcccgccttggmctcccaaagtgctgggattacaggcgtgagccaccacgcctggcctttttttgtttgtttgtttgtttgttttgttttgttttgttttttagtagagaaaatgtctctctatgttgctcaggctggtcttgatctcctggagtcaagcaatcctcccacctcagcctcccaaagtattgggattacagacatgagccactgttccctgccccatttttaatgtgtctgtttggccagaggg

SEQ ID NO: 277339 - DNA, 601 bp, Homo sapiens
aactcccctaaactggccttgcccctcccaatcttctcttccctggcaaatctccaccttgccaccaacagcctagtccttgacagaatacgcctaatcctcagtgtgaggttttatacttttgtagaactcagcttgtattaaaggctaaaagagcagtggttaattcaagttcatggagcaagccctaaaaccaaactagtccacagccagtcacagaacaaaaaaatccttatttcccactaagggatcatttcagtcctggcttctgtagggttccagccaaattccaagataatctgcaagatgaaatttcactaagtttttcacccattaattaagttttctatgaccatttaaacatgggaaaaaaatcatacagcatactagaacttattttattaagtagatgagtaagtggtttcctgtttatcagctaattatttgctttttgtgaaatgcaccttgtttatgcaaaaagtcaaaaaaataagttggcattgtttctctgtgtaaaaagaaatgtaaataatkaatgtttttaaaataaaggaataatctgctgtgatagagagtatctagttattctatggcaattgac

SEQ ID NO: 277340 - DNA, 490 bp, Homo sapiens
caccatttatttctaccatgatcattacacaaaggattagaagtgtagtgtaaaaatgtgcactacatactaaatatgaaaaataataaaatgctataatcagggaaaacgcaagttggaacagaaggtcaaaaaccaggaaggaaaacagtatcaagatatcacgtcctgggtcctgcagagttccttcaataaagccttgaatttgactcttgagtttcctggcagccaaaggggagaggaaaacatgctggtgatgtgattcttgtctcccatggggaaggacaggggagccttgctgtgcagaggaggaaacccagtcccagggaggttaacgggctctccggtttgcactggaactaacacgcatatcacattttcctaattctcygactagtgtcaaccctgtgtcattcaattcaaatatgtatttttagactctaatgaaaagcttccttaaattgcttgagccaaggagtttgagaccagc

SEQ ID NO: 277341 - DNA, 370 bp, Homo sapiens
agttgtaactatcccagatgttagcatagtccatttcactgccacagatgacatctccaggaccttgagggtagctaggcagtgacatcagggtgagagacattttaccctcaggaagccatctggagcacatacacctacacttagctcccccaaccttgcagtggactatcccctcctcctcctccatttagtcagcatttgtgccttttatgactcttgtcctcttcaagaccacccttgatgtttgtttaaccccctttaaagtaactattatarcatttgctctggtgagtgatggagaatggagatgagctcaaaaaaagcaccttgcctgctttcccttccagggcccaagcatttgaaacca

SEQ ID NO: 277342 - DNA, 524 bp, Homo sapiens
gcagtgaaaaaattatggtgtagcagaaaggggaagtcagaagaggcatccttgtgcaggtgaggaatgctgatctccatgtcccaggtgctgggtggcagggaggtgggtgamagcagctacagtgcatacatattggatgagtgggtggacgagaggtgaagcttgtgaaaacccccttcttctttttttttttaacttttaagttcaggagtacatgtgcagatttgttgtataggtgaactcgtgtcatgggggtttgctgtgcagattatttcatccacaggtatgaagcccagtacccattagtcattttttctgatcctctccctcctcctactctccaccttccaacaggccccagtgtgtgttgttcccctctatgtgtccatgtcttcttatcatctaggtcccacttataagtgagaacatgtggtgtttgggaaacccccctccataatgctccctttgattctgtgacagaggaagccagatcatgagctgcaagttgacaaaggagagga

SEQ ID NO: 277343 - DNA, 524 bp, Homo sapiens
gcagtgaaaaaattatggtgtagcagaaaggggaagtcagaagaggcatccttgtgcaggtgaggaatgctgatctccatgtcccaggtgctgggtggcagggaggtgggtgacagcagctacagtgcatacatattggatgagtgggtggacgagaggtgaagcttgtgaaaacccccttcttctttttttttttaacttttaagttcaggagtacatgtgcagatttgttgtataggtgaactcrtgtcatgggggtttgctgtgcagattatttcatccacaggtatgaagcccagtacccattagtcattttttctgatcctctccctcctcctactctccaccttccaacaggccccagtgtgtgttgttcccctctatgtgtccatgtcttcttatcatctaggtcccacttataagtgagaacatgtggtgtttgggaaacccccctccataatgctccctttgattctgtgacagaggaagccagatcatgagctgcaagttgacaaaggagagga

SEQ ID NO: 277344 - DNA, 596 bp, Homo sapiens
ggtgaactcgtgtcatgggggtttgctgtgcagattatttcatccacagrtatgaagcccagtacccattagtcattttttctgatcctctccctcctcctactctccaccttccaacaggccccagtgtgtgttgttcccctctatgtgtccatgtcttcttatcatctaggtcccacttataagtgagaacatgtggtgtttgggaaacccccctccataatgctccctttgattctgtgacagaggaagccagatcatgagctgcaagttgacaaaggagaggaggaagaaagcttaaggaaagagaagaaagcatggaacaagcccccaggagtaggaagggcaaacagaagggctgagtaggatcaggtggctgagtatgaattttgagagtggacagcagggaagaattttttctaagctccgatcagctttggaggtgcaggtgcagggtggactaagttagacttagctggagaaggttaaacagccattgacagctgggtcctttattctaagcctggggctctttccactcagctgccaagtccacaagccccacttgccaccccaggcccctccattcacagcaa

SEQ ID NO: 277345 - DNA, 617 bp, Homo sapiens
taagggcagtaaaagaaaacatttagtgaaaattgtatgaatatctgggtgtgaaagtgctttctaagcaggcaaccaaaatctgaagtaatataaggaaaagactaatagatgttaatacataaaaacttaaaatgtgctctgaaataaaataaaaacctgccatgtacaaaattaagagataaggaaaactggggggaatagygagcaggaagggaattgccaaatacatataaaagaattaaaattgctattacctaaaaagatcttataaaactgttaggaaaaggcaaacacaccagcttttagaagcagaaagagaatacaaacaggcaattcaaataaaacgaaatgcaaatgaccaataaatttgtaaaagccccagtgaggtataatttatagccccaaaccagcctagattgagaatgttaaatgtgcaaaaagattatggacacccttgcccataaactgctgttggggatagagtcgcagccaacctccaggacaacaggcaggaattggaagcaaacactccctcaactccaccgtaggcactgcagcctcagaactggttctaaagaaagagttccagggtgcatagctatgcgatcaggcag

SEQ ID NO: 277346 - DNA, 617 bp, Homo sapiens
taagggcagtaaaagaaaacatttagtgaaaattgtatgaatatctgggtgtgaaagtgctttctaagcaggcaaccaaaatctgaagtaatataaggaaaagactaatagatgttaatacataaaaacttaaaatgtgctctgaaataaaataaaaacctgccatgtacaaaattaagagataaggaaaactggggggaatagcgagcaggaagggaattgccaaatacatataaaagaattaaaattgctattacctaaaaagatcttataaaactgttaggaaaaggcaaacacaccagcttttagaagcagaaagagaatacaaacaggcaattcaaataaaacgaaatgcaaatgaccaataaatttgtaaaagccccagtgaggtataatttatagccccaaaccagcctagattgagaatgttaaatgtgcaaaaagattatggacacccttgcycataaactgctgttggggatagagtcgcagccaacctccaggacaacaggcaggaattggaagcaaacactccctcaactccaccgtaggcactgcagcctcagaactggttctaaagaaagagttccagggtgcatagctatgcgatcaggcag

SEQ ID NO: 277347 - DNA, 602 bp, Homo sapiens
ttcctttttccttaagccaatgaaatagatattttatatattttgatagtgaaatatcacataaacatgacacatataaacatacagacattcagacacatggataaaaacaggctgtatagctttatacagttttttatttgccagtttttaaataattttcttccctctttaaactattaatctcttgattacctgttccattgctctagacagttgttacttaagcaaccctaaatttacaccttcaaagggatgactcaggtgaaagtttacatctccaaggcacagaacttagatctaaacaccattatttgctgaaacaaaaaggacatggataaaggcccactcaaaacaagattgtcaggaaaagtatcctaaacaaaggtacgatttggtgtataaacgttaagccaatgtctttcttattgtaaaagtttctaacggctcctgtgcagggaggtgcccttataaatggagatttccttaaagatatacrtttcttctataaagagtgtcaaactagccagctaaatgccagcaatctagttagatgggggtctttcaacttagtttatttcttgattaggttactgactcag

SEQ ID NO: 277348 - DNA, 513 bp, Homo sapiens
tggagatgcagtgcaggagggaggtgtccaaggactcaccttctccctgggtgataggagggcagaaagtgaccaggagtccacaggcgtgccccagctgaggctcaggtgaaaggaattccttgcagacactcagtcttcagtgttgtttggcttgtttgttctatgctgtgcttccytctcaagaacttcaagccttcaggaatctggtcttagcaggttgaggggcactggagacagaccagcatgtccattttagggacacagtaaaagggaaggaggcccctggatgccctccaggattggctccaggggtgctacattctttcaaggggcacagaagatgatgctggtggcctgcacctctgttgctggtgcagcaggggagctgcagcgtggacacactgcggcatgcctgagatggactgggagctggagtgtgcagccccacctcgtggagcaccttcagagggccgggcttagccctgctcctggaaacaaacagagcagctc

SEQ ID NO: 277349 - DNA, 603 bp, Homo sapiens
ttttgtggttctttgcttaactgatttttttgattaacaaaccaaaccaaccacagatcccaaatctactggattggaggactccttgcataccaaagtctggctttaagagtgtaagagagaaaaccaagttattaagtgtgagtaaacacaggattgagttcatgtgctggacagctggaaggatgccagtgcgtgtgctgatgctgggaagacagagttccatgggaagttggtgcagagtgacgctctgagttgtgttagcagcgtcaagatttcagagcagggcaagagatgaaactgtaaaatgaggtccccagacactctagtactcatgcacggaaccctgttcacattgtcctggggactgagggggccaggacaatatcatctgagaaagcctcctcattcaackttttccacatgcagcagcattttggagactgcatgtgaattgcatgcccagctatgcagcaccatgggctgtgtttctatttctgggcaggctcttgtgctgacaggggattatgagcaatgtcttctctcctacatatgcataatgtttcacattgtcccaagcatggtcattatatcaccttaaaa

SEQ ID NO: 277350 - DNA, 603 bp, Homo sapiens
ttttgtggttctttgcttaactgatttttttgattaacaaaccaaaccaaccacagatcccaaatctactggattggaggactccttgcataccaaagtctggctttaagagtgtaagagagaaaaccaagttattaagtgtgagtaaacacaggattgagttcatgtgctggacagctggaaggatgccagtgcgtgtgctgatgctgggaagacagagttccatgggaagttggtgcagagtgacgctctgagttgtgttagcagcgtcaagatttcagagcagggcaagagatgaaactgtaaaatgaggtccccagacactctagtactcatgcacggaaccctgttcacattgtcctggggactgagggggccaggacaatatcatctgagaaagcctcctcattcaacgttttccacatgcagcagcattttggagactgcatgtgaaytgcatgcccagctatgcagcaccatgggctgtgtttctatttctgggcaggctcttgtgctgacaggggattatgagcaatgtcttctctcctacatatgcataatgtttcacattgtcccaagcatggtcattatatcaccttaaaa

SEQ ID NO: 277351 - DNA, 603 bp, Homo sapiens
ttttgtggttctttgcttaactgatttttttgattaacaaaccaaaccaaccacagatcccaaatctactggattggaggactccttgcataccaaagtctggctttaagagtgtaagagagaaaaccaagttattaagtgtgagtaaacacaggattgagttcatgtgctggacagctggaaggatgccagtgcgtgtgctgatgctgggaagacagagttccatgggaagttggtgcagagtgacgctctgagttgtgttagcagcgtcaagatttcagagcagggcaagagatgaaactgtaaaatgaggtccccagacactctagtactcatgcacggaaccctgttcacattgtcctggggactgagggggccaggacaatatcatctgagaaagcctcctcattcaacgttttccacatgcagcagcattttggagactgcatgtgaattgcatgcccagctatgcagcaccatgggctgtgtttctatttctgggcagrctcttgtgctgacaggggattatgagcaatgtcttctctcctacatatgcataatgtttcacattgtcccaagcatggtcattatatcaccttaaaa

SEQ ID NO: 277352 - DNA, 609 bp, Homo sapiens
tcctatcatgtaaattatccattcctaaagcagagcttgaaagtctgctgcaatggccgagaaaattgagctaattatttcagtttggtggcagactcataaatctggtcttggtttcctttttcaaaggcaatgccatcctctaggtgagtttcaggcacttcctcaaatgccgtgcttgtgtctccaagtgtgggattgagttacactctgcttgagtgctgtttgtctgttctctgatctctaatgacctatgttcatttagggactcggggatggcatctctgtcttccaagttacttaagatctctgaatccaggaaargatagagcttaccatgctcctgacctctgcctattcctctttctcctcctcctcagggcactggatttgggagcctgagatcccagagcagtgggaggagaggcctgaggaggcgtgctaagtaaatgttaatgaacccgtaggttcagactggaatgccttttagggatttcagacttgttttgataaattaagcccaacatctggatggcatttgggttaagaaccatcgagagctgcccacttaccctgtgatccatctcgccagtgcacatcacttttatt

SEQ ID NO: 277353 - DNA, 493 bp, Homo sapiens
tcttaaaagaaataaaaaacaaatgaaaatacaacacatcaaaatacatgaaatgcagttaatgtagtgctgaggggggatttatagccctaatttattagtttagaaaatcagagtaatctcaaattaatactttaagatcctacgtcaagaaactgggagaaaaaaagaacaaagtaaacccaaagcaagcagaaagaagaaaataataaacagcagaaattcacaaaattgtaaatagaaaaggaatagaaaaaaatcaatgaagcaaaaagctggttcttcaaaaaaaaaaatattaatacaattagacctctagcaaggctgatatggtttggctgtgtccccacccaaatygtatcttaaactgtagctcccatagtccccacgtgtcatggcagagacctggtgggaggcaattgaatcatgggggtgggtttttcctgtgcttagtgaataagtctcacgagctctgatggttgtataaagtgta

SEQ ID NO: 277354 - DNA, 611 bp, Homo sapiens
aattttagggacatattcaaaccatggcatatagatatagatagatacagatattgatataasttgagtatcccttatttgaaatacttggaaccagaagtgtttcagatttcagattttttcagattttggaatagttgtactatagtggtcaaacatctcaaatcagaaagtctgaaatttgaaatgctctaatgagcatttcctttgagtgtcatgtaagcactcaaaaagtttcagattttgaaacatttcggatttaaaaattttagttttggaatgctccacctgcatacacacacatatgtgtgtatatattgcagaaatgaagaacagcatttctcaagagaagagagtgaatacagcaatttgaaatttttgcaataatttgaactagtgaatttcattcttaacataatattttagagaaataactggcatgacagcactctttcaggggctcttagttttacagtgatgaaattgaacttcagaacagtaagccttacctgaagtcacacagcttatgaaaggcagcaggtaaagtagacctagtttgctgtctttcaagaaaatgttagctgtgattgcacacctgtattaatcatatg

SEQ ID NO: 277355 - DNA, 611 bp, Homo sapiens
aattttagggacatattcaaaccatggcatatagatatagatagatacagatattgatataagttgagtatcccttatttgaaatacttggaaccagaagtgtttcagatttcagattttttcagattttggaatagttgtactatagtggtcaaacatctcaaatcagaaagtctgaaatttgaaatgctctaatgagcatttcctttgagtgtcatgtaagcactcaaaaagtttcagattttgaaacatttcggatttaaaaattttagttttggaatgctccacctgcatacacacacatatgtgtgtatatattgcagaaatgaagaacagcattyctcaagagaagagagtgaatacagcaatttgaaatttttgcaataatttgaactagtgaatttcattcttaacataatattttagagaaataactggcatgacagcactctttcaggggctcttagttttacagtgatgaaattgaacttcagaacagtaagccttacctgaagtcacacagcttatgaaaggcagcaggtaaagtagacctagtttgctgtctttcaagaaaatgttagctgtgattgcacacctgtattaatcatatg

SEQ ID NO: 277356 - DNA, 611 bp, Homo sapiens
aattttagggacatattcaaaccatggcatatagatatagatagatacagatattgatataagttgagtatcccttatttgaaatacttggaaccagaagtgtttcagatttcagattttttcagattttggaatagttgtactatagtggtcaaacatctcaaatcagaaagtctgaaatttgaaatgctctaatgagcatttcctttgagtgtcatgtaagcactcaaaaagtttcagattttgaaacatttcggatttaaaaattttagttttggaatgctccacctgcatacacacacatatgtgtgtatatattgcagaaatgaagaacagcatttctcaagagaagagagtgaatacagcaatttgaaatttttgcaataatttgaactagtgaatttcattcttaacataatattttagagaaataactggcatgacagcactctttcaggggctcttagttttacagtgatgaaattgaacttcasaacagtaagccttacctgaagtcacacagcttatgaaaggcagcaggtaaagtagacctagtttgctgtctttcaagaaaatgttagctgtgattgcacacctgtattaatcatatg

SEQ ID NO: 277357 - DNA, 1189 bp, Homo sapiens
aagggtagccactactgcctcctaaagaaccccaatcaggaatcccagattaatttgccccagcatcctgtttggaaaccacatgtccaccctgcaactgtacctggcttgtgtcccacaaggaggaagatgcaggggactccggaagctaaggaggtagacatggggtttacttgggttaatgtggccggggagtcaggagaccttgattcccattctggctctgcccctatccgcatgaggatggccaactgttccaaccatgggttccactctcctcattgctcagccaccaggtttccrggtccctcaggcccctgcacatcctcagatatctgaagaacagtgatcggtgtgacgacagggccccttcacagaacgaacttgacaaagaaccactcaccgcacacacgagccttagaatgcacgtgtcagtgttttgggaaatatgtgctgttttgaaatgtgtctgggccatgagcaagtttggggggagacaggataggagcttttcttccagttaatgaagtgaggcttcatggaggaagaagattttcttagtcacatttcctgtttcacactgaccttttaaaaggaaawgtatgaatgcaaagggatagtatgagggagtttttgaggggtaatggaactgttctgttacctgattatggtggtggttwcatgaatcaattcataagttaaaattcatagaactgtatgccaaataaagatcaattttactgtatgttaaattgaaagtaaaaaaaaaaagttacaggaatgaatgtatactcacaaactgaaataactactttgaaggaaatgaacattccatgagagcctaagagagaggagggacactgttttgtgacaaaggaaagcatcaagaatgttttccctgaggaagtgaggcttgagttgggttctaaaaaatgatttagaatttacttgggctaaaggaaggttgattcacacagaagcatttgcatgtgcaaaggccccggagtaggaggaagatggctcattctcatctaaaaaggactagagcacacggagtgccctggagggtgggagaagtgcatggggagtgagaaaaacccaagctggaataagagagtcagattacgccagactgctctaggtggggcctaggttagggtgggtggagaggtgtagctgtgggctggcc

SEQ ID NO: 277358 - DNA, 1154 bp, Homo sapiens
tatagctaaataatattccattgtgtatatacgtcacattttctttctttattcatccattgatggacacttatgttgatctgtatcttggccatcaggaatagtgctgcagtaaacaggagggcaaatatctcttcaatatacttattccctttcttttggatatacgtgtgtgtgtgtgtgtgtgtgtgtgtgtgtgtatccagcargtttttctcattttaaaaactccatagaaatagtgatgtctaatgtactaactcttacatatgtaaattgtgtggtttccagggatacagagacttaacaaatagcagacatggctgggcgcagtggtttacgcctgtaatcccagaactttaggaagccgaggcaggtggatctacctgagatcaggagttcgacaccagcctggccaacatggtgaaaccctgtctctactaaaaatacaaaaattacctgggcgtggtggcaggcacctgtaatctcagcaattcaggaggctgaggcaggagaatcgcttgaacccaggaggcggaggttgcagtgagccgagatcacgccattgcactccawctgctcctttacagctgcatctgcatcccttttgattattgatgtcacataattatgtctttatacattttgtgcccaaaaatataaactaataattattttaagtgtgttagtcttttaaattctgtagaaaacaaatgtggcattacaatccaaagttataataatttwagcttttagactaatcattgttttttaaagtagtctcttaaattatgtcacaaagtaaacttacaaactgttgtttcaataatactagctcttataattgcctttattgagatcctcatttcttcatatggtttcaagttactatctactgttctttattttactttgcaggacacccttggggcatttcttataggacaagtctagtggtaatgaattccctcagcttttgtttatttgggaatgtcattttctccatcacttttgaaggacagtttttccagatacaggattcttgtttgatttttttttttcttttaacattttaaatatgttggcccactgcctctggtctccaaaatttctgatgagaaatttgctgataatctcattaaggatcccttgta

SEQ ID NO: 277359 - DNA, 572 bp, Homo sapiens
tctatatatatttcattagatttatacctaatattycctagtttttagaactattgtaatttttttttttttgagatggagttttgctcttgttgcccaggctggagtgcagtggtgtgatcgcagctcaccgcaacctccaccccactgggttcaagcaattctcctgcctcagcctcccaagtagctgggattacacacatgcaccaccatgcctggctaattttgtatttttagtagagacgaggtttctccatgttggtcaggctggtcttgaactcccaacctctgttgacccgcccgcctcagcctcccaaagtgtgggattataggcgtgagccaccacacccagccttttgaaatcttggtctccacttgtgtattagtttatagaaattcagttgatttttgtgtattgaccttgtctcctgtgatctcacaaaatcactttagttgtaagaggatttttttgatagattacttggggtgtttttgtttacttatttttgttttgtttttgttttgaggtagagtctcaccttgttacccaggctggagtgcagtggtgcaat

SEQ ID NO: 277360 - DNA, 572 bp, Homo sapiens
tctatatatatttcattagatttatacctaatattccctagtttttagaactattgtaatttttttttttttgagatggagttttgctcttgttgcccaggctggagtgcagtggtgtgatcgcagctcaccgcaacctccaccccactgggttcaagcaattctcctgcctcagcctcccaagtagctgggattacacrcatgcaccaccatgcctggctaattttgtatttttagtagagacgaggtttctccatgttggtcaggctggtcttgaactcccaacctctgttgacccgcccgcctcagcctcccaaagtgtgggattataggcgtgagccaccacacccagccttttgaaatcttggtctccacttgtgtattagtttatagaaattcagttgatttttgtgtattgaccttgtctcctgtgatctcacaaaatcactttagttgtaagaggatttttttgatagattacttggggtgtttttgtttacttatttttgttttgtttttgttttgaggtagagtctcaccttgttacccaggctggagtgcagtggtgcaat

SEQ ID NO: 277361 - DNA, 603 bp, Homo sapiens
tgggtttctttattttacttggagttcattgaacttcttggatgttcatattcatgtctttcatcamatttcagaagtttttagccatagtttcagatattctttccccttttctctctcttattcttctgggactcccagtatgcatataatggtgttccacaggtcctttaggctctcttcactttcctcaatctttttcctttctgttcctcagacttgattatttccagtgtcctatcttcaaatttgctgattatttttcctgcttcctcaaaactgtctttgaatcctaaagtgaatttttcattttagttattgtacttttcagctccagagtttctttttactttcactttaggcttgctatctctttattgttattcccattttattcatacatctctttcttgaccatctccatatctttatttagttctttgagcatctttaagacagttgttttaaagtctttatcagtagatcttccatcagttatttttcaggaacagtttctgttgatttattttttggatgtgccatgctttcctgtttcttcgtatgtcttgtgatttttgttgttgttgaaaactggacatttca

SEQ ID NO: 277362 - DNA, 575 bp, Homo sapiens
gtgaaccctgtctctacaaaaaatacaaaaattagccgggcacggtggcatgcacctgtagtcctagctactcaggaggctgctgagggggtggattgcttgagactgggaggcggaggttgcagtgagccaagatcaaactgctgcactccaggctgggtgacaaagggagactctgtctaaaaaaaaaaagaagaatcaccttggaaacttgttaaaaatcagatgtcttcttaaaagcaggtattgaggttataaaataatatattctcaatatactcacagtataattggcaacacaaacaaaataattataattcagggaatttattttctatgttactcatttggcacattaaatttactgctttacataagatccacaatcagttattttttcatgtatatatgtctcatttccttcaatagatcagacattgcttgaaggcagagattctgtataataccacactgccactgtaattagtcctaaaatatccracacaatttttttgaataaatcaatggtattcatgcaaaatattcagtgggtacttaataaatgttggacttat

SEQ ID NO: 277363 - DNA, 561 bp, Homo sapiens
gctcctttaaatcagtcacatattgattaaaataagaagggagattctccctttcctacctaagctagctgagggcatatagcaaaatctcttttccttgtgtcaaaattaaaacaggactctcagtgtcctgcgccatctacccagggtaacttcctacccttcccattgctaaaggagatagatagtaattattcagcacccccctccatgaggactgacatagataatgcaagtagagttctcagcaaagggcatggctactaactgcacacatcgaagcccattgagaatactggtaatktgtatatttatttcatgtaaccagaaatctccatattttatttaaaaataaattttgtctctgggtgttgtttcacttgcgagtacgccaggcttgtgactgtgtatcctttgtcctcctggcttaagtatctccaagtagaattattgggaagtttttagataaaataaaaatcttaggaaaggttggggctggccttggaggaatagaggggagggaaggagacagaactgggtcctgggaaaaaggaggcaggc

SEQ ID NO: 277364 - DNA, 659 bp, Homo sapiens
taagctatgaggatgcaaaggcataagaatgatacaatggactttggtgactcaggggaaagggtggaaagggagtgagggataaaagactacaaagtgggttcagtgtatactgctctggagataagtgcaccagaatctcacaaatcaccagcaaagaacttatgtaaccaaacatcacccattccccccaaaacgtatggaaataaaacattttaaaaaaaggaaaaggttttaaggtttttaaaatatgtgtagggaaagattatctcagatgtatttttaaaaaaaccaagrtattttatagggatttaatagatgttttcaaaatcaaaataaaagttgtttttcctcattagtaagccagaaagttggaattaaaactacagtgatgtaagtgcctgagtcttaagtaagggtcttaatattagtcttaaacagaggagggatagggttagaaactttctaaatgaatgctccctgactgaactcattgttttaatgcagcatataatcctctggataaatctctgaataaaatttcagatgaaaagaacacttaaatggccacattatatcaacagaaagacaggcatttcaggactaaaaaagaacataacatatggaatactgaaaacctgtactgtagcccagcgcca

SEQ ID NO: 277365 - DNA, 659 bp, Homo sapiens
taagctatgaggatgcaaaggcataagaatgatacaatggactttggtgactcaggggaaagggtggaaagggagtgagggataaaagactacaaagtgggttcagtgtatactgctctggagataagtgcaccagaatctcacaaatcaccagcaaagaacttatgtaaccaaacatcacccattccccccaaaacgtatggaaataaaacattttaaaaaaaggaaaaggttttaaggtttttaaaatatgtgtagggaaagattatctcagatgtatttttaaaaaaaccaagatattttatagggatttaatagatgttttcaaaatcaaaataaaagttgtttttcctcattagtaagccagaaagttggaattaaaactacagtgatgtaagtgcctgagtcttaagtaagggtcttaatattagtcttaaacagaggagggatagggttagaaactttctaaatgaatgctccctgactgaactcattgttttaatgcagcatataatcctctggataaatctctgaataaaatttcagatgaaaagaacacttaaatggccacattataycaacagaaagacaggcatttcaggactaaaaaagaacataacatatggaatactgaaaacctgtactgtagcccagcgcca

SEQ ID NO: 277366 - DNA, 570 bp, Homo sapiens
ctagctctttttttgttttttgcttggacacaacctcttggctactcaaatagtgaaactatactcaactaagaaaagttatagaggtaatattggcacatattattgcatatctgactacctagaaatttcatgtgtaaatttagattttatgtcacatgttaattaggatgtctgagatttgattaaagcatcaaatttagctaaaattgattttacctcttttggagctggagattttacaaaactttaaaaatagacttcaaatttattgctttgctgtttttctttttcttcttgtttgtttcagtcaaagacaatgtgagtaaatgaatgtgaagttgtggagatggaattaagacagttaggaagtggaagggtgactctaacggcaatcttcatgctgtagttttatagattttcttgacttttctcccattattctagtrtataaagagtatatggaagaaacagtggggacattaaagtttaaatggactcagatagatgtacatctcatgttgtattttgaaaaatagtgaccaaggtatgtgtgctgaaaggcatagc

SEQ ID NO: 277367 - DNA, 584 bp, Homo sapiens
ccaggagttcaagaccagcctggaaaacatggtgaaaccccgtctctactaaaaatacaaaaattagccgggtgtggtgrcatgtgcttgtattcccagcttcttgggaggctgaggcacaagaatcacttgaacccaccaggtgaaggttgcagtgagcctcgagatcatgccactgtacttcagcctgggtggtagtgtgagactctgtctccaaaaataaataaataaaataaataaataaataaatggcatttctattatgacttcatttgtgtgaaattatgtccatttaggcattcatacattcttctactaatacacaaacacacacacacacacacacacacagaataatactcaccaaatgttagttttttctgaatggtaagtttttttgttgactttttaaaaactcatcttacttgaatttattacaatgagcagatttctttattatcaaacacttaagacattaaaaacattatggagaataatttgatgaattcctgtgtatccactacccaacttaaggaaacacatgcattacaaaaaaaacctttggagtttattatttttgtatg

SEQ ID NO: 277368 - DNA, 584 bp, Homo sapiens
ccaggagttcaagaccagcctggaaaacatggtgaaaccccgtctctactaaaaatacaaaaattagccgggtgtggtggcatgtgcttgtattcccagcttcttgggaggctgaggcacaagaatcacttgaacccaccaggtgaaggttgcagtgagcctcgagatcatgccactgtactycagcctgggtggtagtgtgagactctgtctccaaaaataaataaataaaataaataaataaataaatggcatttctattatgacttcatttgtgtgaaattatgtccatttaggcattcatacattcttctactaatacacaaacacacacacacacacacacacacagaataatactcaccaaatgttagttttttctgaatggtaagtttttttgttgactttttaaaaactcatcttacttgaatttattacaatgagcagatttctttattatcaaacacttaagacattaaaaacattatggagaataatttgatgaattcctgtgtatccactacccaacttaaggaaacacatgcattacaaaaaaaacctttggagtttattatttttgtatg

SEQ ID NO: 277369 - DNA, 364 bp, Homo sapiens
tttattgttgaggtggaaatgtaaattggtgcagctattatagaaaatggtatggastttcctcaaaaaattaaaaatagaactaccttatgacccagcaatccctcttctggacatacgtccaaaggaaatgaaatcagcacctcatagagatacatacagtcccacattcactccagcattgttcacaacaaccaagatatggaaacgacttaaatgttcattgatgaatgtataaagaaattatggtacacacacactggagtattattcagccttaaaaaaggaggtcctgccatttgcaataacatggataaatctggaggatattatgctaaatgatataagccaagcacagaaagaa

SEQ ID NO: 277370 - DNA, 509 bp, Homo sapiens
gaaaaagtgaagtgaaaatatgtaactttcagaggctaaatcataaaggacattgcagtttacaccttgttcattttcttggatcacccaatctggagaaaaccagctgatgtgtcatgaaacactcacgcagatctatggagaggtccacaaggtgaagggcttagatttcrtgcctatatccagcacaaatttgctagccatcggagtgagccatctgggaagcacatcttccagccccagtcaagccttcagatgatggtatcctggccaatatcttaactgcaacctcatgagagattctgagccaggactgcccagttcagctcctcccaagtacctgatccacagaaactgtatggatgatgaatgcttattgttgattaagccactaagctttgggttaatttattatatagcaatagataactattaatgtagggagcatatgtgatgcctttttaattttaaaggactatttaaatggaataaaaatagaatgagaagtg

SEQ ID NO: 277371 - DNA, 620 bp, Homo sapiens
caatcacaagggcccttaaaagtagaagaggaaagcaagaaagggggccagggtgatgtgatgcgatggtgatggtgatggtgatggtgatggygatggcgatggcgatggcgatggtgatggtgatggtgatgtgacgtgacgtgatgtgataagggcttgacccactgttgttgaccttgagtggaagagaaatgcagtagcctctaaaagctggaaaagacataaaaccagattctcccctcagagcctccagaaaggaatgcagccctgcccacaccttgattttagctcagtgagacccatgttggatttctgacctacaactgcaagataataaatctgtaatgtttgaagccaccaaatttgtagtaatttgttttagcagctgcaggaaattaatgtatggctgcttaatcaattaggagcaattaatgcaaataagtcacggaagactataaataaccaatttaaacaaccaaaaaataacatttaacttggaacaaaagttcatttttgaagtaataaaagcagaagcacacaaatctcttggcttaaagaaatacggaaaaggaaatatgtacgaggaatgttttttcatttccactagaatactagaa

SEQ ID NO: 277372 - DNA, 601 bp, Homo sapiens
cccattttaaaaaataggcaaatcataggaacagacacttctcaaaagaagacatacgtgtggccaacaagcacatgaaaaagttcccaacatcactaatcgttacagaaatgcacatcaaaaccacaacgagacatcatctcayaccatcagaatggctattattaaaaagtcagaagataacagatgctggcgaggttgtggagaaaagggaatgtttacacactgctagtgggaatgtaaattagttcagccattgtggaaggcagtttggagatttttcaaagaacttaaaacagaactgtcattcaacccagcaatcccattactgggtatatacccaaaggaataaaaatcattttaccaaaaagacacataaccctaacacatggtactcagtgagacaagctaaactatcatggacatccagtcacttatgggagagaaaggaatcatcattataatccatttagtaggaggaattctttcatatctaatctttcataaggttatcttacattctccagaatatttcagaatgtggtttaaattgttgatctcaagttggtcaacataataaaattacttcaagagaaaagct

SEQ ID NO: 277373 - DNA, 533 bp, Homo sapiens
acaacaatattgggcagtattgagactattcaggtggcccaagcacagaataatgccagttgaaccaaatgctaccttcaacagtttcttacatcttaattaggatatgagatgctcttgttcttaaaattgaaattgctgaaggcaggctttctagaagtctagtctgatgacattcatagactactacctgtatttttaatagacttrttgcctctgtgtgcacttgtgctcaattttaatcattcacagaaaaagggtcaactaacgtttgacaagactgtgactatatgttatggtaaatacacattaaaacaaaaactaaaaagccttcaataatgtgaaatgctgattacttttgtttttcttccattctggttcatttttccatctttttccatgtcttttgcctagcaccacagttgaaagagtccagtgcagtacaaaaggcattagattaggagtcagaaattggcatttgcctgggtctgtcactgattatcagggcttagacacttcttgggctctctttt

SEQ ID NO: 277374 - DNA, 486 bp, Homo sapiens
gtgctgctgcaaagactccaacttgcaatgagaaattaaaaacctaagcacacgttgagcttatttttttcatgttctctgcaaattttttaaaaatcggaagagaagccaatattaaatagtatcccaagttggttgaaatctgtgatgaagtaagaaatttgaaataacattctgaatcccyctgtgattttaaagcattatattctggttattcaacagattttatacaattcgctatcgagaaaaggataaagaaaagaagtggatttttcaaatctgtccagccactgaaacaattgtggaaaacctaaagcccaacacagtttatgaatttggagtgaaagacaatgtggaaggtggaatttggagtaagattttcaatcacaagactgttgttggaagtaagtacctagaaatgtttgtttcagtaagcttttataatttttttcttagttacctaatttttaattatgttattcattg

SEQ ID NO: 277375 - DNA, 551 bp, Homo sapiens
gatttgtttgaagttctaaaattctaagattcaatgtagcttattctaatattttagtattctgggtatttcaaggttatacatattatcttctgtctattgctttttaatataatgtttcaagagcaaattgatacatgatttatgtacattgctacagctcaaacctttcctttctattttctatcataccctacttaaaagagccagtctttttcacaacaatggagcaaccagtttgattttgtaaaatgcccagtctctgttcagttcagacaatgtttgcgttttatgaaycaggcatttccccatgaatctaaaaacatccttttctctgtcacttcagccactcggtttctcatgctctctttccttccacttttcaaaatctattctcaggaagcatcatgtctagtatataccaccccacctgggatgactgtaagtcactgttagagccaccacagacatgttcgcatttcaaatctcatacccagtatttagtttggtgccaaaataattgcagcttttgccattaagagtaacaaagg

SEQ ID NO: 277376 - DNA, 473 bp, Homo sapiens
aaacatcatttcttctcaatccattcatcatttcattctcattattattactctttccaaaacagaaaagcaattatttcagtgttgtaatgggtttgctttgaagaccaccttaagacattactgaatacatcttcatttacttcatctatctccatgtttcaaaatgagtccagtrtgtttactaatggtgcccatttaacaatttccattggtttagtggttctcagctgtaatgtaacatactagtatgtggtaagtttgaaagatactgcaagtaattatcaatattggtcaaaatactgaaaattcccagtgatttgttacttgagtctactcaagcagactcaaggagatgataccaacaatgatgatattctcactcatttggtaatcatgcatgctctcttgaacgggggagagagggacagagctacagccaatagtccaggactgtgtctaacccacacccc

SEQ ID NO: 277377 - DNA, 671 bp, Homo sapiens
tgtgatggttgctttgtccttagttgtctgaccagtgtgaccagcccaaagcttggtgtattggtaaaagagccaaaattatccattaacttccagtttactagaccattatattttctttgaactttttctcaaaaaaaaaatcaattaaaaaatcgagaaaatatgtgccgtgtttgattaccttagctaaaagtatgttaaagattgctctaaacacatttccagagcagacaaattaccttgcttgatgattgttattgggattagtttccttgggacatatgctggctgcaaagagaagaagaaagtcaacttttgagtcattgtgaataactttctgttctttaaaacgttcggagaactggaagtagccctttcttgtcttcaatgaagtctcctgtgacactggtttaatagttgctggtggcggggcgtggtggctcacacctgtaatcccagcactttgggaggctgaggcgggtggatcacctgaggtcaggagttcgagaccagcctggccaacatggtaaaaccccatctctactaaaaatacaaaaaaaaaaaaattagttgggcatggtggygggcgcctgtaatctcagctacttgggaggctaaggaaggagaattgctggaacctgggaggcggaggttgcagtaagccgaga

SEQ ID NO: 277378 - DNA, 531 bp, Homo sapiens
ccatttgacatttttgtggcatcagaatattagtattgtaggtttaacattattttcaggccccgagataaagaggagctgtccatttgggtagtggttaaaacagtggctcaaagtcaaatttcaatgactcaagagtcaaaccacatgagaacttgggcatattagattctggttttaattcacttytaggatgttctaatgaaagttacaaaacatactgactcaatctaacatctggctaaaagtcaatctaatgtcctactttcaaaaggcttcaaatttctggtcaacttaacctttgatgatgtattaatagtttgcctacacagaaatttttcaagtgtctgcttgagacaaggattgctaagaatggaaggatgcctgatacattcactgtacacagtcataaagtgtgggtggggaccataaaggtaatctctcttcacatcaatcatttgataattgttacattttaacaagtggtaccacttctctttttgatgatagtaactgtggatttcttaaaat

SEQ ID NO: 277379 - DNA, 531 bp, Homo sapiens
ccatttgacatttttgtggcatcagaatattagtattgtaggtttaacattattttcaggccccgagataaagaggagctgtccatttgggtagtggttaaaacagtggctcaaagtcaaatttcaatgactcaagagtcaaaccacatgagaacttgggcatattagattctggttttaattcacttctaggatgttctaatgaaagttacaaaacatactgactcaatctaacatctggctaaaagtcaatctaaygtcctactttcaaaaggcttcaaatttctggtcaacttaacctttgatgatgtattaatagtttgcctacacagaaatttttcaagtgtctgcttgagacaaggattgctaagaatggaaggatgcctgatacattcactgtacacagtcataaagtgtgggtggggaccataaaggtaatctctcttcacatcaatcatttgataattgttacattttaacaagtggtaccacttctctttttgatgatagtaactgtggatttcttaaaat

SEQ ID NO: 277380 - DNA, 387 bp, Homo sapiens
aacggatgtcttttatgtcaatagaaaacttcaccccgtgtattccttctgttgcttcagttttaaagatccactgtatattgacttggtagagaagcatgatataggactgaaacataaaaatataccgtrttattcattcaggaattagaaaagacaatatttttattaggggaatagtggctataatagttacttaatctagcaattgctttactttgtccctgtcccaacctttttcaagagaaggctcttttacgatgtggattttctggcaggttatacagaaataaggccttttttatggcaatatcacttgcagtatttttttcttttcttttttttttttttaagagagcgggtctccatgtgttcctatgttgccca

SEQ ID NO: 277381 - DNA, 558 bp, Homo sapiens
acttactgaatatccattgtgtctttttccttaatcgcctgggaggaaccatctatcatcctgtcctgaagggagctcctcctatgtctggttggaccttaagatttaggtcccttgttaggaaacctgcttggttaaggatttttgataggaaggctactggttgtcagtggcctcagtgctttcgggctatgcccttgtttacactgtcaacaaggtggtattggagtgttacagggtcacagagaagaccttcagttatcaattataggttttaaacttaccatggcttttaaaggaataggatacacggtktttttctttactacttccatctctctttctctttgacttcttctttgtctctctctttctgactccctctttgtctctgtctcttcctctctctgtctgactttctctttctctctttcctttctgctggtctttccctgcctctgccagctgcttatgctgctgttctcctctctccttcccctttttgatggcttcagcagtgtaagactgccacctccttgggtttttgcactgcatgca

SEQ ID NO: 277382 - DNA, 624 bp, Homo sapiens
aaccacagcatcatacttaatagtgagagatggaatgttttccttcatgatggagagagcacagtgattcctatgcttaccatattattcattatgctattggaggtcatatccagtacataatgcaagaaaaaaacagtaaaattttaaaagaaataaatacaaaatgttatctatttgccctccatatgattgtatttagaaaatctgaaatatgctaccaaaatttttactagaatgaataagtaaatttagcaattacaaggtagaaagttgtcatataaaattaaactgtgtttgtatgtactgacattgaattactgaaaattgtaactttaaaaatatagtttaaaatggcaccaaatctcagaaaatatttagcgatttacttaataaagatatgtaaatcactatgttgaatactacaaaatctgagagaaaagaacaacaaaaaccattttaaatatatataatttatatattaaatatatataatttattagaaggttaaatattgttaacatgtctattcttgctaaaaacttccatagatttaacgccagyctaatttaaatcctcctagacttcttaagatagattaatatgctcattctaaaatgccta

SEQ ID NO: 277383 - DNA, 611 bp, Homo sapiens
aggggatctataaggaggctaggatatgggggtaagctgagaggtcctcctgtgggttgtaaattgcaagctttgcatagttgtgtattcttcttcaatgaaaagagagcttggacataaggtatttcactgcatttgccttccctcttacagaaaaggtcaagctgcaggatagtattgtaatttatactcctctcaggtggccatttctccccatcagagagagaatatcagggccaagccatagtgcagaaaaaaattgagctgcctctttttcagggtttgtgggtcaaattggtcccaatggcttaggatgcatttcaagggtgagcttgttggtgtctgagtgtttcccatctgaaagacaaaacagcccacagttttggtttgtttgtttctcccccacccaagaaccctcaatggtccctggaccctactgatcagaatagttgtgctcaccaacrcagcagcagaaacacctcttacccaagaacccacaacagtccctggaccctgctgattggaatagttgcacccaccaacacagcagcaggaacacctcttgcctaagaacctgcaatggtccctggaccctgctgatcagaagagtt

SEQ ID NO: 277384 - DNA, 611 bp, Homo sapiens
aggggatctataaggaggctaggatatgggggtaagctgagaggtcctcctgtgggttgtaaattgcaagctttgcatagttgtgtattcttcttcaatgaaaagagagcttggacataaggtatttcactgcatttgccttccctcttacagaaaaggtcaagctgcaggatagtattgtaatttatactcctctcaggtggccatttctccccatcagagagagaatatcagggccaagccatagtgcagaaaaaaattgagctgcctctttttcagggtttgtgggtcaaattggtcccaatggcttaggatgcatttcaagggtgagcttgttggtgtctgagtgtttcccatctgaaagacaaaacagcccacagttttggtttgtttgtttctcccccacccaagaaccctcaatggtccctggaccctactgatcagaatagttgtgctcaccaacgcagcagcagaaacacctcttacccaagaacccacaacagtccctggaccctgctgattggaatagttgcacycaccaacacagcagcaggaacacctcttgcctaagaacctgcaatggtccctggaccctgctgatcagaagagtt

SEQ ID NO: 277385 - DNA, 554 bp, Homo sapiens
gcaaactaatgctcccaactccgaagagtcaggggttgttagagagctctttcccagaaagcctgacacccatgtctttagtctggtggccgtgctagtcgcttttaactggcaaacaggtgcctggtatttagcccccaaattctaaggaaaaataggacagaatagcaagtgaaaggggtctgatggtactcactgcttggtgacagtcccttcatggtcgccaaagtgtgtctggaatttattccttccggtgggttcttggtcttgctgacttcaagaatgaagctgtggatcctcgcggtgagtgttacagttcttaaagatggtgtgtctggagtttgttcctttagatgttcagatgtgtctggagtttcttccttccagtgggttcatggtctygctgacttcaggagtgaagccgcagaccttcacagtgagtgttacagctcttaaaggtggcatgtccagagttgtttgttcctcccagtgagttcatggtctcactgacttcaggagtgaagccgtagaccttcgcagtgagtgttacagct

SEQ ID NO: 277386 - DNA, 554 bp, Homo sapiens
gcaaactaatgctcccaactccgaagagtcaggggttgttagagagctctttcccagaaagcctgacacccatgtctttagtctggtggccgtgctagtcgcttttaactggcaaacaggtgcctggtatttagcccccaaattctaaggaaaaataggacagaatagcaagtgaaaggggtctgatggtactcactgcttggtgacagtcccttcatggtcgccaaagtgtgtctggaatttattccttccggtgggttcttggtcttgctgacttcaagaatgaagctgtggatcctcgcggtgagtgttacagttcttaaagatggtgtgtctggagtttgttcctttagatgttcagatgtgtctggagtttcttccttccagtgggttcatggtctcgctgacttcaggagtgaagccgcagacyttcacagtgagtgttacagctcttaaaggtggcatgtccagagttgtttgttcctcccagtgagttcatggtctcactgacttcaggagtgaagccgtagaccttcgcagtgagtgttacagct

SEQ ID NO: 277387 - DNA, 647 bp, Homo sapiens
caactttcttcaatctcttccagaagagagaagcatagggaatactttctaaatcattcattaaggttaacgttattctaacacccaaaccaggcaaagatatttatttaacaaaaggaaaactataaaccaatgtctatcatgaatattgctaaaagtttgataaaatattaacaaatcacattaaaatgtataaaataattatacaccacttctagtttgagagtttttattatgaataggtgtctggtttatcagaggctttgactaaatatatttacatgattttccttctttacactgttaatgtaacttttgatttttgaatgttgaatcagtcttgtatgatacactggtgcctatcagagggtggaggggaagagaaaggagaggatcaggaaaacataactaattgatagtaggcttartacctggatgatgaaataatcagtacaacagaccccatgacacatgcttacctatgtaacaaacctgcacatgtacccctgaacttaaaagttaaataaaagaaacctctcaactgtttcccaaacttcttgtaccattttatatttacaccagcaatgcatgagagtattaattgtttcgcatccttgtcaacacctggtattattaatcttttaaat

SEQ ID NO: 277388 - DNA, 651 bp, Homo sapiens
caagtgctctgactttgttctttttcaacactgttttgaatattctgggtcttttgccttcccctatatttaaaatcaatttctcaatatcctcaaaatagcatagtagggtaatcagaaaacaactgtaaaatgcaataaacagtgttatatctaggatctatcagtcatgcatactacagggatgtgggtagcctcactgaaaaatctttcatcttgtmgatcatgtttctgcaactccttgaccacaaggatttacagaaaatgttttactataaacattttctataaaaaagtttattttctaggaatattttagaaaatattaattaattaattaatgcattaaataatgaattattgattagtggataaatccttgcaatgaattatgcaaagccattttgtaagaatcaaaagcaaagcaatttctctaatagttcattttataacatattgttgatgacacatgtaaatattgtttatatattttccaaatctatttccttagtttctttaacatgttttttaagagaagtattaaaactctcaatacttttcatttgaaacaaaaatgtttcaatcttacccattgataaggaatcattatattccatctaacactctgtttctatgaatttcatcattcaa

SEQ ID NO: 277389 - DNA, 651 bp, Homo sapiens
caagtgctctgactttgttctttttcaacactgttttgaatattctgggtcttttgccttcccctatatttaaaatcaatttctcaatatcctcaaaatagcatagtagggtaatcagaaaacaactgtaaaatgcaataaacagtgttatatctaggatctatcagtcatgcatactacagggatgtgggtagcctcactgaaaaatctttcatcttgtagatcatgtttctgcaactccttgaccacaaggatttacagaaaatgttttactataaacattttctataaaaaagttkattttctaggaatattttagaaaatattaattaattaattaatgcattaaataatgaattattgattagtggataaatccttgcaatgaattatgcaaagccattttgtaagaatcaaaagcaaagcaatttctctaatagttcattttataacatattgttgatgacacatgtaaatattgtttatatattttccaaatctatttccttagtttctttaacatgttttttaagagaagtattaaaactctcaatacttttcatttgaaacaaaaatgtttcaatcttacccattgataaggaatcattatattccatctaacactctgtttctatgaatttcatcattcaa

SEQ ID NO: 277390 - DNA, 520 bp, Homo sapiens
atttaaagagtttttaaaaattaatacattacaaataattacaggagaaaagttattgtgtagycctcagtgtccatctaagatccatagatggggctttaatctctcagtgagagctggttacatgaagataacactgttactggatacagatacagcaagttgtatttctactgctataaacaagaaactcttgacaataaaaaatcttgatataatcattgctactgctgcatatagaaaagtaatgcagttgtcaatgcctcattcaaccatttcctccctctctcctcccatccacttctactagaaaaaatttactcagttcttagtctttcatgccactgagttctgattcaatgtgctggagggtgattcatagcctcactttctatctttaagggaatcttgcacagagagtccagagcatctgtgtagggatatttgctctgccttatggagacagaacttgcccatttataggtactggggcctgaggaattgttaaatagagagtttc

SEQ ID NO: 277391 - DNA, 559 bp, Homo sapiens
catttgtgaatggatcatgatcatgaaactatataaaatgaggagaatgatgataaaaagcagataaaaaataaaacatggccaggtgcagtggctcactactgtaattccagcactttgggaggccgaggcaggcagatcacttgagctcaggaatttgagaccagcctgggcaacatggcaaaacccccatccctaccaaaagtacaaaaaattagctaggagtggcggtgcatgcctataatttcagctactcgggagcctgaggtgggaggattgcctgagcctgggagtcyaagactgcagtgagccaagatcctgccactgcactccagcctgggtaacaaagtgagaccctgtctcaaaacaacaacaacaaaaccatgaattacccctaggtcttggtatgatatcttaggcagaactctctgctattcaggggcaactacttgttcagaagatcttggttcagctgtcttctgaagatcaattgattctacagcatttctgataatacccaaattgagtactcctattgtagtagcctttaaattttgta

SEQ ID NO: 277392 - DNA, 582 bp, Homo sapiens
actacttgttcagaagatcttggttcagctgtcttctgaagatcaattgattctacagcrtttctgataatacccaaattgagtactcctattgtagtagcctttaaattttgtagaattctggattgcttatttaattgtgaaacatgtacccaaggactgacccctggggtttcactgctgtatctggagtttcatggctgtatttggggtttcatggctgcatttgttgttaacagtccctgataaggtggtttccagtgatgttcaagagcactttttctcttatcctttcaaattgacaaaattactggctgaagatcatgatgagatggtttaggaaaatgttttggaagcatggccttaacattttggtgataggatagatatagtacaagagtcccctgtgaaattttgccatgtctacttataacaggacagagtacagtattcctgaacatagaggacttccaagtttccaattactaggaggatgaccgatgtgtttccacgggagtgtaccattatggctctaaaagctagtagtgagaatatctttgtcggagatgtgatccaatcaat

SEQ ID NO: 277393 - DNA, 582 bp, Homo sapiens
actacttgttcagaagatcttggttcagctgtcttctgaagatcaattgattctacagcatttctgataatacccaaattgagtactcctattgtagtagcctttaaattttgtagaattctggattgcttatttaaytgtgaaacatgtacccaaggactgacccctggggtttcactgctgtatctggagtttcatggctgtatttggggtttcatggctgcatttgttgttaacagtccctgataaggtggtttccagtgatgttcaagagcactttttctcttatcctttcaaattgacaaaattactggctgaagatcatgatgagatggtttaggaaaatgttttggaagcatggccttaacattttggtgataggatagatatagtacaagagtcccctgtgaaattttgccatgtctacttataacaggacagagtacagtattcctgaacatagaggacttccaagtttccaattactaggaggatgaccgatgtgtttccacgggagtgtaccattatggctctaaaagctagtagtgagaatatctttgtcggagatgtgatccaatcaat

SEQ ID NO: 277394 - DNA, 374 bp, Homo sapiens
gaatttttgcatacatgaattaagcttgtatgtgtgcatttgggagaggctcaggttacaattgtttgaacataaggcaaaatgaaacrgtgtatgcaacctagttaaagggagaagggagaggatatttcctagtagtaaacacatgcatgatctaagacatctagatggtaaaaaaaacaaacaaactatgtgtagagaggtaaaattatctaaatgtgtttaaatgtaaagagaagtaacaatggatgcacaagtgggtagcagctactctgaatttctgattaaggagcttatgctttgatcttcatatgatggaaagctattgaggattttagagagtagtgacttaatctgaacttttaaacaaattg

SEQ ID NO: 277395 - DNA, 534 bp, Homo sapiens
ggttacaattgtttgaacataaggcaaaatgaaacagtgtatgcaacytagttaaagggagaagggagaggatatttcctagtagtaaacacatgcatgatctaagacatctagatggtaaaaaaaacaaacaaactatgtgtagagaggtaaaattatctaaatgtgtttaaatgtaaagagaagtaacaatggatgcacaagtgggtagcagctactctgaatttctgattaaggagcttatgctttgatcttcatatgatggaaagctattgaggattttagagagtagtgacttaatctgaacttttaaacaaattgccttgaagacattggaggatggatttcactaggtcaaatctgcaatcagagaaagtagtttttaagttagcatgcgaatactcaagtgttaagtgccgtaaatatggaagtggaaggtaatagagatgagagtaaggagcagaatcacgaatcaattaagaagtaaaagcaaagggctgtttgattcagagtggagagggagagagaggcaaa

SEQ ID NO: 277396 - DNA, 601 bp, Homo sapiens
agggcaattccctgttgggaagaaatgcctttagcaaagaaagtaaagttgagttttacaaaacaaacaaacaagcaaacaagaaaccacacaaaactatgtccaagtctttagggagggatttggggagaagtggcagaaataaaaggaaatcatacctaataacttccattatcttaatgggccaggatttgatctcacatcatctggtttcaaattcatattaataatctcagcctaaaactgcattttcaggcgtaattgggaactgggccagaattagaaaataaggtgctaattttctcacatattaggtatctgtggcaggatgtattgtctatcatggtctcacaagttctcttatgcctcatgtttttgttacarttcgatgctgatactcctctcagtgagagataagaggtctatgttttctgctttagtatgtgggtgaaaatgtgactacacttgaagtgactcctggggttaagtcatcaaaagtgatacagctgccacatggttctcctagggcactcatccttggaaaccagctactgtcatgctttgagaaaatccaggccattcaacaagtgcatagatgggt

SEQ ID NO: 277397 - DNA, 518 bp, Homo sapiens
tgctgcagtgtggatgacttttaaggacattaagctaagtgaaatgtcagtcaaaaaagacacatattttgattccacttacatgagagtagttaaattcacacagacagaaagtagaatgggggttgtcagagaatggagggtggaaggaaaagtgagttcatgtttaatgaggacagagtttcagttggagaagataaaatttgtggatatgtatagtggtgatggttgcatgacagtgtgaccacactgcatgccacagaactgtgcacttaaaaatgaatacaattgtaaattttatattatgtatattttaccacaataaaaaagaaagaaygcaaaaataaacaaatgagcaaaaaaatgacagaacctcattaattatcaagatggtgaattctttaagatatattgttaaatggaacaaaacaagttaatctagagtgaacagttggctttcataaaaataaagtgggaaaaaattatatatatatatatacaacttctttaataataag

SEQ ID NO: 277398 - DNA, 518 bp, Homo sapiens
tgctgcagtgtggatgacttttaaggacattaagctaagtgaaatgtcagtcaaaaaagacacatattttgattccacttacatgagagtagttaaattcacacagacagaaagtagaatgggggttgtcagagaatggagggtggaaggaaaagtgagttcatgtttaatgaggacagagtttcagttggagaagataaaatttgtggatatgtatagtggtgatggttgcatgacagtgtgaccacactgcatgccacagaactgtgcacttaaaaatgaatacaattgtaaattttatattatgtatattttaccacaataaaaaagaaagaacgcaaaaataaacaaatgagcaaaaaaatgacagaacctcattaattatcaagatggtgaattctttaagatatattgttaartggaacaaaacaagttaatctagagtgaacagttggctttcataaaaataaagtgggaaaaaattatatatatatatatacaacttctttaataataag

SEQ ID NO: 277399 - DNA, 593 bp, Homo sapiens
gtacctggtctaggatgggctcactgcttaattacttcaacacacacacacactctgcttaaatgattgaatttatgtaagccatccctatttgccattttttaaatactagtcacacatatgtgtttgtaataaaagaaaatatttctgcttaaaaatatatccatatatacatagatattttaccatatatacattatgcacatagtataatagagtttttctctggaggagccaccaagacatatcaygtggtccaagaattgccttagataggaagagtatctcttcaattgtagaagtatctgtggacaaaaatttcaggcagatgaattaagtttttagttggagtgacaggacatcatagagagagtttctcagttttattttaaacatcaatttattagattcttgatgccgcattcatttcaattcttcatactcagtttctgtagaatggaatttgtgggaggtggccagtgacaagagccacttttatctttcttttaggaggcacagtgttttcccatcagaattgaggggctagttgttactgaagacaattaatattaagattcatgtattagactcac

SEQ ID NO: 277400 - DNA, 500 bp, Homo sapiens
tgcactacatcacaaagttatcttggaaatatttgccattaagttttagctcgttttctttccaatgtttcaggaatagagtaatattatttaaatatggtatggatttagaaaacaacgtaattttttttcttttaacataaacactgtctttatgaaaccaaactgtttttttcccaaaagaaaagaaaattacccatttgttaaccccacaccacctccttcaaggatatrtacttaattctaaatcatggaaaaaaggggttaggagacagggtaactcaaggtcttttataacacattaagttacaaaaagctttacatgtgttattaaaataatgtatggatgaaactcactgcataccaactatagatattttattaatgaattaaaatgaaaatatgggaaggcagtgccttattcaaatttgtaatgctcacaataccttaccttacaacacattgtcttggtatttgcacagtaattatttattgtgttt

SEQ ID NO: 277401 - DNA, 1098 bp, Homo sapiens
ctgctcccgcctatatgtaaaatgttacctctattcatttcctacttccatgcaacaaattaccacaaataaagggcgttaagcagcatacttctatagtctcgcggtttctatgaatcgggagttggacatggtctacctgaattttctgtttcagggtctccccaggctgcaactcaggtgtcagctgatattgtgctctcatgagagtctagactgctaaagatccatttccaaactcctgcaggctgttgatggaattcattgagatttccgattttgttctggctgtcagccagaaggtgtccctaggtcctaatctgcttccagtgtcctaccttgtgtcccatacatagctatggctatggctgtttgcttcttcargtccagaaggggaatctttctaacccagtccctctttttttatttttattttactttaagttctgggatacatgtggtgaacgtgcaggtttgttacataggcatacatgtgccatggtggtttgctgcacctatcawtgaacatagctatctaatgactatttatatttagctgttaggtctaatttcaaggggcaaaaccatgtttcatggccattttattaacaaccaatacagtagtataaaaacaatgaattatgttgaacagtactacaatttaatagatctattcacaaatctccatctatttagaagcaattcgtttattaaagccattgctattttaagttgcattttgaactattaacaaaaattgaacattaattaaatgctagcatgcccactwctttgtgctttttcccctgtctcacggcagtcagccacagtagtgctggctttcatgcaatgtgaaacgttgctattattaagcttccaaacactcatcttcctggatccttgctgaggagttaaatcttgtgttacagggcagtactccaaagcaaaagtttcttatccaattttatattaactcaagcctttaggatctcccaaggcaaactttcctgaaatgtttgagctggatcctgtgaaaacattgcctgaggatccctcttctcactttagcctttccagcacttctgaagtcaggtgatg

SEQ ID NO: 277402 - DNA, 589 bp, Homo sapiens
aagtccttaaatcttattattttatagtataggtagttttctttgtttaactggttatataattttttaaaatgctatattaaaatattaaaattggaagtatgggtttgtacataatataaaagcagttttaattttaagactccacattgcatttataaagcccaagtactaaagtgtaatcaataaatttcctatgaagatagagatctagatagtggcgaaaagtgaatcattggactcatggaaataagaatatataaataaaaatgaaagaaaatatgaatattctatgaaggaagcaaggtcaggataactgtaatcactctaggataactatttttgagtgtccctaacagttcactcaaatctaacatggttatcacttataaccaycttcattttgtcaaattttcagaataactcctagtatcattattgaagttgtatttcaaaaccttaattttaaagggttcagtcaattgcagtgaaatgggaagattccaagggtatgtaactagatctagaccccttttgaagttaaagctgaagttcccagaccaaaacatcaggaatgctctggacaaga

SEQ ID NO: 277403 - DNA, 598 bp, Homo sapiens
actttataatttccagacatttgggttttaaaaagttttttaaaaattgttttttagcctaactcctatggtcaagaatttcaatcttatgaaatttgttgagacttactttaaggccaagatatggttcattttgataaatgttccatgtgcacacactcacacaaaatgtatatcagaagttgtggagctcagtgtattgtatatgttagttaggtcaaatttgttatatatattattcaaatattctatatcctcactgattttttggtctgtcctaaacattattgagacggctatattaaaatccctggatgatgattgtgaattcctctatttctccatttagttctattcagttatttatatatgttgaggttatgtaattagaaatataaaatatataaagaattatyctattttcctagtggatttaacctttattattaagaaatgtctctcattatatctaactaaatattctgctttgaagccccctttatctgataataatgtaacaacctcaactttttgctgtttttagtagtttctttgtaaatttttttttatgttcacctttttatattggaagcttatt

SEQ ID NO: 277404 - DNA, 575 bp, Homo sapiens
taaaacaattgtcattttaacccagtggtagctcttattgcctagtggtggtggctgagaccaccatggggtgggggcaaggttggaaggtaaaatggattggtaggaatggtaaattgtggggtacagcatggggttgaggggagtgggctgacatgcatgggcaccctgggcgggataacagtttagagccccttcaaagaaatgcagaacatttatttagaggagcacctgcctgggggaagagcagtgcaacaggcatgtcaccactaagagcctgtcctctctgtggtctgggcaattcggctgtggatccaaatatgtacactccactcagcaaagtgaaactccaaagrcagccaaggtatttattacctgttgttaccagagcacatcccttggcgttttacaccccaagtcaagcagcttataattgtcacaggtgttcgaataagtgagataggaatctgcaggattggttttgcaaactacaggtcatgaagaccctgctgataaaatgagatgtggtagaaaaaaaaaaaaacagccaaaccccaccaaaaacaaggtggtga

SEQ ID NO: 277405 - DNA, 444 bp, Homo sapiens
actatgcaggccagtttccctgtctttcccctcttccctttcttctcagtctattcccatatcctttgctcagtagacaggcagttatctgctctaccctcctccattcacaaacgtctagggtttataattttaggaaggtgctgcaaaaatacacaccccttttcaaaataaataaacactccttttaaatgatgaagaaacaaaactttaaatcgraagtacacttgggggttgtcaccttgccagcatgagggaacacatcatcacagcacaggtatgcactgcgttaatgatggaaagcttccttctcatcgtacacaagcttcaggtcttccatttggggggcaatgtagagcagagattacttgcacatgaggacataaaattgcccccaccccaaatgatcaggacttgaaaagatatttagaaaagaaaagagag

SEQ ID NO: 277406 - DNA, 444 bp, Homo sapiens
actatgcaggccagtttccctgtctttcccctcttccctttcttctcagtctattcccatatcctttgctcagtagacaggcagttatctgctctaccctcctccattcacaaacgtctagggtttataattttaggaaggtgctgcaaaaatacacaccccttttcaaaataaataaacactccttttaaatgatgaagaaacaaaactttaaatcggaagtacacttgggggttgtcaccttgccagcatgagggaacacatcatcacagcacaggtatgcactgcgttaatgatggaaagcttccttctcatcrtacacaagcttcaggtcttccatttggggggcaatgtagagcagagattacttgcacatgaggacataaaattgcccccaccccaaatgatcaggacttgaaaagatatttagaaaagaaaagagag

SEQ ID NO: 277407 - DNA, 484 bp, Homo sapiens
aatcactatctatggctactgtagcctcataaaatgtgtttcttaaataataagtcataaaagtcaaaatgacttccttatccatgggctacacaatggatgttgtgttagcagacatgaaaacaacattaatcttcttgtacatctctatcagagctcttggatgaccaggtgcattgtcaatgagcagtaatattttgaaagggattttttttttctgagcagtggttctcagtagtaggcttaaaatatttagtraagcatgctgtaaacagatgtgctgtcatcctgattttgttcttccatttatagagcacagacagaatagatttagcataattctaagggctctaaaattttcagaatggtaagtgagcatttatatcaacttaaagtcaccagctgcattagcccctaaccagaatgtcagctggtgtttggatgcttggaagccaggaattgactgttcctccctacctatgca

SEQ ID NO: 277408 - DNA, 560 bp, Homo sapiens
tctctttactgtatcccaaacaaatttgtgctgtttgaatttttcaccatgagcataagatgaaacattattgaaaatatatttacacacaagccattaaacttacagaactgctaaaagacacagctaatcaacaaacgtatttgatgcaaaaatgttatacacagagcagatagctaagagtagaggtactcatataagaagtcttctcctaattggaaaaggctcatctaggggaaaacacactagaaaagcttggagtttgtgaagcttcttctgggagtgtcagtccacaattaatctgcctcaaaactcctgcttattctgcaggttccagctcaaacagcaacctccctggaaaggtccctcccaccccaagtctccaaggcagggactcttcccctttgggcccrtcagactgtatacaaccctattgtacaactgtcctattgtaattgtcagtttgccttactaaactgtaagttccttgagggcagggatcacgccttttgtcttctcattcccagagcagtgcatgatgcatagaagtcactcaataa

SEQ ID NO: 277409 - DNA, 620 bp, Homo sapiens
tgtaatttaggaggaaataatggcacaaagagactctgatttgcttctaaagggatgcttgttttgacttactatctattctagtttagttatatttttctgctcaggttaaattagagtcattctggatctctctcatcatcactctagaatctctcggtgggattttggggccagtcctcactcgagtgagctgtgctatcagctgtcttctgcaggcagtgaatctgcagaagagaagtcagcctcttcagacgtgggcaaagcctggtgagtaatayagaaacatgagtatgactactgtggtaggatggtgggacccacggcaaagcttttctttattcataattttttttcaaagctgagtttccaattgaaaaaataattaaaacactgtacttgattttatagagattgttttagaatcagaaacaattatccttgggcaaggcgcttaatcttgctaaatcttagctctatttacatcataggattattttacagatcaaaagaggtctgtctttaataaagactagaaactggggtggaggcagcctgggagtaactgggagctgtcaggggtctacactagtgcagggaaacaggcagaggaaagggtg

SEQ ID NO: 277410 - DNA, 497 bp, Homo sapiens
ccttacgtattatatatgcactaaaattacataaagacaaatattcctagattcaaatctgtcacatgatgaattacacaaaattacaattgggaagtctattctagcctacagggtaatctgcacagatgctagtgcctatctgaagccatccaaactagtttaataagatctaaggcccacatgcagactttcaaccctgctcataaattktgactgttctacctagtcattcccaattggtgggccaagagttaccaggagtgatcagaaatcatctgcgttagagatgaagtctttataacaattgttaaggcactaccataatgtttgtaaaaatataaatatacttataaaaagtgggctgtttctcctgcagtgacactttacttgtttgatcaagtagtaggatagcaggtggtagttaagatgtgaaatgttgaaaactaccaatatggctaatagagttagacaagtatatttagacagactgtcag

SEQ ID NO: 277411 - DNA, 497 bp, Homo sapiens
ccttacgtattatatatgcactaaaattacataaagacaaatattcctagattcaaatctgtcacatgatgaattacacaaaattacaattgggaagtctattctagcctacagggtaatctgcacagatgctagtgcctatctgaagccatccaaactagtttaataagatctaaggcccacatgcagactttcaaccctgctcataaattgtgactgttctacctagtcattcycaattggtgggccaagagttaccaggagtgatcagaaatcatctgcgttagagatgaagtctttataacaattgttaaggcactaccataatgtttgtaaaaatataaatatacttataaaaagtgggctgtttctcctgcagtgacactttacttgtttgatcaagtagtaggatagcaggtggtagttaagatgtgaaatgttgaaaactaccaatatggctaatagagttagacaagtatatttagacagactgtcag

SEQ ID NO: 277412 - DNA, 472 bp, Homo sapiens
gggcagaggttgcagtgagccaggatcatgccactgcactccagcytcagtgacagccagagcaagacccagtctcaaaaaaaaaaaaaaaaaaaagtaaatcctggatcaaaactggatcaaaatttagtattcttcaacagtgaaccagaagatgaaaatggaagtaaattagcaaatgacatgaagagttggagtcatcgcaaaaaaaaaaaagtagaaatagttgctagttatagaaaacaaccaagctagtgtatttatgaataaaaatcaaatggtactagcacaataaggaaaagcctgcctaagtccaagaatggctttttaaatacataatggcctacaaaataaatgtaagaaatatagtcctattgttaagtacctccaaccagaaataatctctctaaacttttgcagaaatttaggctatagctttcttatggtgcgtaacacttaactttatataaat

SEQ ID NO: 277413 - DNA, 608 bp, Homo sapiens
atattttcaattttttaaaccctcatttaggatgcattttcctatttgcataaaaaaaagaaaaaaatgccctgctggcagtgaattcaagggatgagggaaaatcgtcctctaaaacaggattgttaaatctggaattattatcagaagccagaggtaaaaccatgctatctgtacactctccactgcctgttccagcagataaactcacctggttacaacaaggctggcacccatttctatgattctgaggccggttagcttcctcctcagagctttagacccatcagctcatctcaatgcctgaagttattagcatgagataataaattattcatttcaagcaatttgttttttcaccaaaagcaggatgaggaatrcaagtagacacgaacttcagtgtcaacagtttcagagagaagttgcacaatactcgcaactttaatagcgagccctttagacactgtggtattacctacataagagtaatgagtgaaatgctgattgtctaggttcaaattctggctctgctctttattctgtgcctcaatatcctcatctgtaaaatgggcatagcagtgcctccttttgggggttaaaacataaat

SEQ ID NO: 277414 - DNA, 612 bp, Homo sapiens
gtgtgggtgatgatgatacaaatatatatatgtattagtccattctcacactgctgtaaagaaatacctgagactgggtaaggtagaaagaaaataggtttaattggctcatagttttgcaggccatatgggaagyatagtggcttctgcttctggggaggcctcaggaagcttccaatcatgacggaaggcaaagggggagcgaggcacttcacatggctggagcaggaagaagaaagagagagcagggaggtgctacacactttagacaaccggagcttatgggaactcactatcatgagagcaccaagagggatagtgctaaaatgttcatgagaaaccacccctatcacccagtcacctcccaccaagccccacctccaacactggggattacaatttggtatgagatttcggcggggacacagatccagaccactgcaatacatgtgttgaaattcatagaactgtaaggaaagtaaggagaaaagaaagaaaaaaagtcaatttgactgtaagatagtttttaaaattaaattaaaagaaaagaaataggacatggccagcaccccaaagccttgctgttccccttcccagatactgcctctcctc

SEQ ID NO: 277415 - DNA, 612 bp, Homo sapiens
gtgtgggtgatgatgatacaaatatatatatgtattagtccattctcacactgctgtaaagaaatacctgagactgggtaaggtagaaagaaaataggtttaattggctcatagttttgcaggccatatgggaagcatagtggcttctgcttctggggaggcctcaggaagcttccaatcatgacggaaggcaaagggggagcgaggcacttcacayggctggagcaggaagaagaaagagagagcagggaggtgctacacactttagacaaccggagcttatgggaactcactatcatgagagcaccaagagggatagtgctaaaatgttcatgagaaaccacccctatcacccagtcacctcccaccaagccccacctccaacactggggattacaatttggtatgagatttcggcggggacacagatccagaccactgcaatacatgtgttgaaattcatagaactgtaaggaaagtaaggagaaaagaaagaaaaaaagtcaatttgactgtaagatagtttttaaaattaaattaaaagaaaagaaataggacatggccagcaccccaaagccttgctgttccccttcccagatactgcctctcctc

SEQ ID NO: 277416 - DNA, 584 bp, Homo sapiens
cacgttcatcaattttgtgaagaattgcttccgggtgactgactaggaggctattccagatctctggcagtggaggaagcctctttaagaatagtttaaacacgttgttaaaatgtttcatcttatttcatttgtgtarcagttgatatctggctgtcctttttacaatgcagagtgagaactttccctaccatgtttgagaaatgtctggactccattgccaagaatgtgttgcctgaaacacttgtttagtatttaaagatagaactctgccctttgcttggctttaagtatgtgtgaaatatcactatgggacatagtagtagcgatggtcagacatggaaatggtgagaagacaaaataaacatgtggaataaacccagtatttgaagaaaaaagaaaagatgtagctaatgtttatttcagtgagattggtgtttaggaatgaacagtttgacacagaaggactggtgacagggacgagcacaaaaccttttctggtaccagtgtcagggtattcatagcgacgatttcctctgcccagatgctctcaccccaggcctggcagggtggccctgagctgc

SEQ ID NO: 277417 - DNA, 584 bp, Homo sapiens
cacgttcatcaattttgtgaagaattgcttccgggtgactgactaggaggctattccagatctctggcagtggaggaagcctctttaagaatagtttaaacacgttgttaaaatgtttcatcttatttcatttgtgtagcagttgatatctggctgtcctttttacaatgcagagtgagaactttccctaccatgtttgagaaatgtctggactccattgccaagaatgtgttgcctgaaacacytgtttagtatttaaagatagaactctgccctttgcttggctttaagtatgtgtgaaatatcactatgggacatagtagtagcgatggtcagacatggaaatggtgagaagacaaaataaacatgtggaataaacccagtatttgaagaaaaaagaaaagatgtagctaatgtttatttcagtgagattggtgtttaggaatgaacagtttgacacagaaggactggtgacagggacgagcacaaaaccttttctggtaccagtgtcagggtattcatagcgacgatttcctctgcccagatgctctcaccccaggcctggcagggtggccctgagctgc

SEQ ID NO: 277418 - DNA, 1192 bp, Homo sapiens
atcaacatgggtcgaaatcattgccttccccctcaccagctgtgtgaccatgctcttctctgaggatcatgatctacctatcaagcccttcctcacatagctgtggcacagagacctaatacttaatgtcctggtatagtgcctggaatttggtgagtattaaataaatgtcgaggccaggcgtggtggctcatgcctgtaatcccagcactttgggaggctgaggtgggcggatcgcctgaagtcaggagtttgacaccagcctggccaacacagtgaaaccctgtctccactaaaaatacaaaaattagccaggtgtggtggtgggcgcctgtaatcccagctactcgggaggctgaggcaggagaatcgcttgaacccgggatgccgaggttgcagtgggccgagatcgcaccactgcactccagcctgggtgacaaagagagactccatctcaaaaataaataartaaataaataaataaataaaaatgttgagatgtttctcattttctgattccctcttttaagactccctgtctgtagtactatttgtaacacttactttggcaccacatatgttwtctgtttagcttgttgggctaaatgtgagtttatgaagtcacttaatgagtttattgtttaaataattttttttccggcttcccaaccttaaattttaattttatttctttttgagatacagtctcactctgtgcctaggctggagtgcagtggcatgatcttgggctcaatgcaacttccgcctcccagggttcaagcaattcttctgcctcagcctccatagtagctgggattacaggtgtgtgccaccacgcctgggtaatttttgtatttttagtagaggttgggttttgccatgttggccaggctggtctgcaactcctgacctcaggtggtctgcctgccttggcctcccaaagtgttgggattacaggcatggagccactgcgcccagcctaacttcttaatttctttgatcttttagcatgagtttaatcatctataaagtgaagttaattataaaacaatataatatctctgtgtctttgtggcttgaataagatgagaagtagagcctggcacttagtaggtgctcaaaaatttaaatatttttctcttttttatataggawgctacaactttttaaattttaaacaaaaatgtagacc

SEQ ID NO: 277419 - DNA, 518 bp, Homo sapiens
gtgagcacgtagaagtactctacattcaccattaaaatgaagacaagtccggtttgtcttattcttgcctaatacccttccccaaatccagcttcccagttgcccagctttcgaagttctttacttgctttccggttttcagttctgattttagatgttcttttctgattataaacccctctgggttagggggaacatttcaygtcttgatcagggtggagttacagaggtgtatccatatgtaaaaacaatcaactagtgtacacttaagattagagtactttattgtatgttatacatcaatttaaaaaatcacaatctacttcttaagccatgtgtgctgattttttatcgggaaaatgtacacttgcatgctctgggcagttggaatcatcctttggaggcgccctgactacatctggcctttctaggctgtgcccaccagagagacccttttccttccttttgaaaactaacctgtgttcattttgtaagagagttgcttccagttagctcag

SEQ ID NO: 277420 - DNA, 604 bp, Homo sapiens
gttggccgggatagctttcccggaggtcgcgtcccccagcggaggcggcgggaatcgcggaggttttgtgctgcggctggggtctttctggccgtcccgcctctagatgccgggtggcagggagccggtggcggtcggccatgtgaaggtggccatcttggccggccagcgagggctcctcacggccttccttcggcgtccctgcccggctcgttgccggccccgggatatctgaggggcgcaggcccaccttctagtcgtttcctggkgaatggctctgctgaagatggccggaaagcagattaatgaaggtgctgccatcgatttaaacaatcgccctcctgcccgctcccctgcgctaaagtttctgagggatcctcacccttcgtggttcgtggacttaaaagtggaggcagcgctccagcctttccctccagagagaaaggaggccgctcccaagtccgtccttgccccgtggccttcctgttcctttgaagggggggggaatcgatgtttcaatcctctgttcaggagaatatggaacgaacatttcttttttggtgggtgggggctattcgttcccttgaatgtgcttaagcagatc

SEQ ID NO: 277421 - DNA, 514 bp, Homo sapiens
tgcaatttctgctccaggggtcaatgaggaacaaacctgccttcatgaacagcacccacttaggagggaagctcctggaagccaagcccactatctggctggtttactgctgtatctccagtgcctasattagtgcctggcacattgccaagtatatatttttataattgaataaaaataatagaagtgaataaatgaatggaaccattacttctttaggtcataccaatgtggacttaaaaatggagtcaatgccagagtcaaacaacttgaacttcaaaagggtccccttgaagttgttagtggaacagatttctttgctttctcctttcctggaacccaggctctacttgaaggggcagggctgcgctggtagatgacaaatgccataaaaagctcagctcctgggccgggcacagtggctcacgcctctaatcccagcactttgggagactgaggtaggcagatcacctgaggtcaggagttcaagaccagcctggccaacatggtgaaa

SEQ ID NO: 277422 - DNA, 586 bp, Homo sapiens
tgttctacttctaggatgttttctggacttttcacctcatgcttatgatttatctttttgttctgtttatacattcatttactatttaaagtttattattgtgacttctaagtcataaatgagaaatctattgagtagttgtagtattatactaaatctagtaagcttacaagactctcctattaatggtaataacttttagtttattttcagcaaataacattttattttcagcagcaaatcatattctctacaaatgatgataatttaatctcctcccttctaaatgtaaaatttattcatttttatctcattgacttggctacaacttctaaaattatattgagtggtgaaagtattagtgggcattctcttttatgggaatatttgtattaaaattaagtatgttgttrgttattaattagagaatgatataaactctgagatgttacaattttaagaaattaaagatgttattttcatcatatgacttttcgatgattaacaagttaagtatctttttctttcttacctgctgagatgatcaataacagtattacctttcaaacaatcttgaaagaaagcc

SEQ ID NO: 277423 - DNA, 586 bp, Homo sapiens
gaaatctgagtgagaaccagaatcccaaactcaatctgcctttatcattgtcaaggcatagtataaaatgcaaaggaagtaccttttaatacattggtgtgcaaagaattttgaaggcattattcccatgaggttcttctggaagctatatgctctatcccagcatgcmtcatttgttattaagaaatcaatgtcagaattccggaagttgaaaataaaagtccaaaaattggacctactacagaaaagattgctgagtaaggtgcacttttaaactacattactaataaaggaccacaagaaggtgttagggttttagaaatttttagtaatgtgatgaatcagatttaaactattttgataaaaatgaatttctacagaaaggaaaataattgtccagttcagcaaactgcatagattgattgtttatagagaaatgttaattttaagtttttgattatcaaataaaaatacataagaacacctttatatattacatggaaatatacagtttaaaataaatgaaaattagcaattacaatatgattattattagctgtataatctatgttcctccaaagtaaag

SEQ ID NO: 277424 - DNA, 574 bp, Homo sapiens
actcctgtgtttggaacctgacaagactaaatgagaggctgcaaacctgagtgtcctctgcgtgagacacatttccatatgatatgatgataggctgcactaattactcatgactgaatggaattctagtaatgtatcagtaccttttgacttagatgatcattttgatgaaagrgatcatggagaggtgggataactgatgctgtgaaatatatatatatgtgtgtgtgtgtgtgtgtatatatatatcacatattaatctattttaatatatatacacacacataaagccattaggtgatttccagtgccaatgatttaatcaatcaggataatgtaatgaagtttccaaaaccaaaaatgatttgtttgagagagtttccagttacctgaacttcatatttaagggctcacataggattaaagtgaagggctgaaaaaggtagcccattcaagtggtaaatgaaagagttcaggattggctatagtgagaccagacaaaatagactttaagtcaaaatctctcatgagagacaaatgaggacattttataatgataaaagggtcaatccac

SEQ ID NO: 277425 - DNA, 574 bp, Homo sapiens
actcctgtgtttggaacctgacaagactaaatgagaggctgcaaacctgagtgtcctctgcgtgagacacatttccatatgatatgatgataggctgcactaattactcatgactgaatggaattctagtaatgtatcagtaccttttgacttagatgatcattttgatgaaagggatcatggagaggtgggataactgatgctgtgaaatatatatatatgtgtgtgtgtgtgtgtrtatatatatatcacatattaatctattttaatatatatacacacacataaagccattaggtgatttccagtgccaatgatttaatcaatcaggataatgtaatgaagtttccaaaaccaaaaatgatttgtttgagagagtttccagttacctgaacttcatatttaagggctcacataggattaaagtgaagggctgaaaaaggtagcccattcaagtggtaaatgaaagagttcaggattggctatagtgagaccagacaaaatagactttaagtcaaaatctctcatgagagacaaatgaggacattttataatgataaaagggtcaatccac

SEQ ID NO: 277426 - DNA, 562 bp, Homo sapiens
aggaatacacactcttctcaagtgtatatgaaactttctccaggatagatcacatgttaggtcacaaaacaagtcttaacaaatatatgaggattgaaatcataccaattacctttttctgactgcagtgcaataacactagaaatcaatagcagaaaaaaaacagaaaaatttacaactatgtgtaaattaaaaaacactcttgaacaatcattgattaaaaaatgatttaaaaaggtgaactggaaaatgcctcgagacaaataaaaacaaaaccaaaaataaaagcacaacatascgacatatggaatgcagaaaaagaagtactaagagaaaggttattttgataaattcctacattaaataagtaagatctcaagtaaataagaaaactttaccccatcaaagacttagaaaaagaacaaactaaacccaaatcaagcaaaagaagagaaataacaaagattagaatcaaagtacatgaattagaagatagaaaagcaatagaagaaaatcaatgtaactgagttaagtttttgaagaggtaaacaaaattgacaaa

SEQ ID NO: 277427 - DNA, 563 bp, Homo sapiens
gtagataaaagacttaaacgtaagtaaccaaaattttaaaactactagaagaaaacaaataaaaaagcttcacaacactggtcgtagacatgatttcttagctatgattccaaaaacacaggcaacaaaagcaaaaatgaacaaatgcaattacatcaaactgaaaaagcttttgcacagcaaaggaaacagtcaaaaagtaaattcaatctatggaatggagagaatatttgcaaaccatatattttaaaataggttattctccaaaatatttaagaaactcctgcaactaaatagcaaaaaaaccctaataacccaattaaacaatggactaaggactttgacagacatttctttaaagaaggaayacaaatggccaataggtgtttgaaaagatgcccaacatcactaattatcagggaaatgcaaagcaaaaccacaatgagatattatctcacacctctcagcatggtttttatgaaaaaaatcaaaacaccacaggtgttggtgaggacgtggagaaattacaacccttgttacactattgataggaatccaaaatg

SEQ ID NO: 277428 - DNA, 579 bp, Homo sapiens
tgggaacacatagagcccattggggaaaaaagatcaggatgggataattttgtttaccaagagcctatattcctgaagatatataaggattaaaaacggaagtagattttacatatcagaccatatatcatacaccccacatgcagtaccttctgtggtcattgaagcaagctcatgaagtaagtaytgatttctatcctataaagctagaaaatacattgcaagctgggtgcagtggcctgtaatcctagcactttaggaggctgaggcaggtggatcacttgaggtcaggagttcaagaccagcctggccaacatggtgaaaccccatctctactgaaaatacgaaaattagctaggcacggtggcatgtgcctgtagtctcagctactcaggaggccaaggcaggagaattgcttggacctgggaggaggaggttgctgtgagccgagatcgcaccattgtaccccaacctgggtgacaaagtgagattccatctcaaattaaaaaaaattaaaaaattgcaaaaaaaaaaccccacctagaattcacaaacaagtctttcttacattaaaactct

SEQ ID NO: 277429 - DNA, 281 bp, Homo sapiens
tgtagataagctatcaatttacatttccagggtgaaattcaacagaatgatttcagggtaaatgtcttgaggcccacagggaatttccttgtagacaaattgtgagggaggtacgtagcttctaaaaatatatatttgtagctatyttatttcgcaataaaatgggagccaggttttcctgatgaagttcccagcttgacttttccctttgacttagcgacgttgggtttgcaagatttattttcttttcacaggagtttatctgcatagaagagaaggga

SEQ ID NO: 277430 - DNA, 281 bp, Homo sapiens
tgtagataagctatcaatttacatttccagggtgaaattcaacagaatgatttcagggtaaatgtcttgaggcccacagggaatttccttgtagacaaattgtgagggaggtacgtagcttctaaaaatatatatttgtagctatcttatttmgcaataaaatgggagccaggttttcctgatgaagttcccagcttgacttttccctttgacttagcgacgttgggtttgcaagatttattttcttttcacaggagtttatctgcatagaagagaaggga

SEQ ID NO: 277431 - DNA, 601 bp, Homo sapiens
gtgggcagatgaaaacatgaatgggctagttttttgtttgtttgtttgttttttaaggattcaggatattgtatgattggggaaaagggggatggtatagtgttaaaactattgaataaagagaaatatagaagaattattggagcaaagtccttgagtaggaggagtagatgagtgttagtgcacaaatgttggcacaggtcactgtaaatagcgtaaaccattcatgcaaggtgatagtaggaaaggcagagtgtatgtgctcagatgcctgtaggtagatatgtgtgataaaagctcctgattgttctcttcttcttgtttcaagttttctcaaatatctagaaaacaaagccaatcagctagtaatgaagagaacataattgagatgagatatgtagagaaataaaaaatataaaatgttcacctaaaacattaatacttgaggtacagaatttgtggtgccagattctagaaaggtagagctactcagggaaaaacctttacatatatacatagagagcatcttgaaggattcactagttattaayctgtgcatatgtaaagtgaaattccatgatactgagtaaagaacaacttt

SEQ ID NO: 277432 - DNA, 575 bp, Homo sapiens
aaaacaaagtcaatgaaatagatacagaaatcacagagagaaaatcataagggaaaaaaacccaataamaccaaaaggtagttctctaaaaagatcaaaaacatttggcgggcaaatgtttggtcactcagaccgataatcccagaggtctctgaaggctcaattgggaggatcacttgagcccagaagttctacacgatggtcagtcctgctattgcactccagcctaggtgacagagcaagacccaatctcttaaaaaaattatattcctctattataataatcatttaaaaaaacacaaataactaatatcaggaataaaataagagagagaagtacatatcttacagacattaccagaacaatgaaggaaaattacaagcaaataatgaaaataaacttaataatctacatgaaattatcaaactatttgcaagccacaaattaccaaaacggactcaaaatgaaataaaaatggctgcatatctatgaacaaaattgactttataatgaaaaatggaatgcaaagaaaacctcaggcctgtataaaatctgtaaaacattgttagtaata

SEQ ID NO: 277433 - DNA, 595 bp, Homo sapiens
aataaaaatggctgcatatctatgaacaaaattgactttataatgaaaaatggaatgcaaagaaaacctcaggcctgtataaaatctgtaaaacattgttagtaataacaaatctcacatttagaaaatcgaagagaatataccaattcatacgaagtgtctaaattattaattatactgatacccaaacttgaaaatctaaaaatgtgtttatacaaataagtgagtgtagtaagttctcataataaaaagttaatatattaaaaacacttttagttttacgtactagcaataaaactttgaaaatggmaacaaaaaataagagctataactgtatacacttgaagctgttaaacattaagagaaactgatcaagatccaaataaacagtgaaatgtaacatgatgattcgaaacagtcgcttcttgtcaaatcaagttatcaagccattgagtcccaatagcaaatttcatggtaaatttttctaaaaattgacgagctgattctaaaatttatatggaaattcaaatataatagaatagccaaaatagtggctaaaaataaaatcgttgggatacaggacttacagtaaagc

SEQ ID NO: 277434 - DNA, 565 bp, Homo sapiens
tttgggatcttgccttaaattctttagggcaggggttcccacaggggtctccaaccttggggcaatggactggtaccagtgtgtggccgattaggaactgrgccacacaacaggaagtgagtggtgggtgaatgagcatgactatctgagctcctcctcctgtcagagcaatggcagcattagattctactaggagcatgaatcccattgtgaattgtgcatgcaaaggatctaggttgcaccctctttatgagagtctaactaatgcctgatgatctgaggtggaatagtttccctcaaccatcccccctccatccgtggaaaaattgtcttccatgaaactggtccctggttccacaaaggttggggactgctgctttagcgtatatacactcagaagtgtgactgctgaatcatatggtgtattcgttccttctcacactgctataaagtaatatctgagactgagtaatttataaagaaaagaggtttaattggctcactgttctgaaggctgtacaggaagcatggctagggaggcctcaggcaactaacaatcatggca

SEQ ID NO: 277435 - DNA, 614 bp, Homo sapiens
gtcttccatgaaactggtccctggttccacaaaggttggggactgctgctttagcgtatatacactcagaagtgtgactgctgaatcatatggtgtattcgttccttctcacactgctataaagtaatatctgagactgagtaatttataaagaaaagaggtttaattggctcactgttctgaaggctgtacaggaagcatggctagggaggcctcaggcaactaacaatcatggcagaagatgaatgggatgggaaagatggcacatcttcacrtggccagagcagaaggaagagagagagtggggaggtgctacacacttttaaacaaacagatcgtgcaataactcactcttgccatgacaaaaccaaaggggatggtgttaaaccatgagaaactgcccctatgatccaatcaccttctatcaagccccacttccaacattggtgattacaattcaacatgagatttgggtggggacacagatccaaaccagatcatatggtaagtctatttttttttaattttaggaagtggtagactgtgtttcatagtatttgcattatttagaatcccaccagcaatgcacaaaggccccaatttcctccacattc

SEQ ID NO: 277436 - DNA, 555 bp, Homo sapiens
tctcactttgtctattgctggttttattgcctgtgcttttggtgtcatatccagaaaacattgccaattcaatgtcataaagattttctgtttccttctaggagttttgtagttttaggtttcacgttgcagtctttaatccatttttagttaggttttatatgttgttaaataagagtccagctttattgttttatagttaatattcagttttcctcacaccatttgttaaggagcctgccctttcttttaggagtggtcttaagatttttttgttgaaggttatttgaccatatatttgaggatttattcctgaactctccattatatttcattgttctatttatctgtcttyatgcttgtgttacactgttttattactgcagctctgtaatatgttttgaaattaggaaatgtgaacttttcagttttgttctttttcaaatgttttggtattttggggttcctagagactccttttaaattttcagtatgttttctttatgtggcaaatatgacattgtgattttgaaaaggattgtagtgaatctgtac

SEQ ID NO: 277437 - DNA, 614 bp, Homo sapiens
ctttaaacagtttgattacctgtcttggcatgtttctcttttgatttattataatttaaattatgtgagcttcttgaatctgcatgtctatttttttcctcagattttataattttcagccatgatttcttcaaataacttctctgttcctttctgtttctcttctctttatgtgatttatatgcttacattgttctccttgacagtgccccattagtccattaagctctgatttccttcatttttcttgctcctctgactttaactgtcttcaagctcactgattcttttatctgcctaatgaagtctgctgttgaacytctctaagaaatttttcagtttagttgttgcattattcagcttcagaatttctatttgttacttttttatagtttttgtctctttcttatattctcattttgtttatggataatttttctggttttgtttagttgtctatttgggttctcttttagctcatttggcatctttataacagttgttttaaattctttgtcagacagctcataggtctgaatttctttagagtaagtctctgaagtttttttttatttcttttattgagacttattactttgcccctttgtatgcca

SEQ ID NO: 277438 - DNA, 1146 bp, Homo sapiens
ctgacagcactagacagatcatagaggcagaaagtcaacaaagaaacaycggacttaatctacactataaaaaaaattgacctaataatatttacagaatattctacccaagaattgcagaatatacattcttctcattaacacatggaacattctccaagatagaccatatgacatgccacaaaacaaatctcattaagttttttaaaactgaaatcaaatcaagtatcttctcaaaccacaatgggataaaaactagaaatcaacttcaaatgggacccctcaaactccccaattcattgggaattaagcaatcaactcctggaatgattttttgcgggggcaatggaattcaaaatggaaatattaaaaaaggattcaaaatgaataataatagtgacacaaggttcaaaaacctcagaatacagcaagagcagtgctaagaggaaaattataggtctaaatgcttgcatcaaatagcctgaaagattacaaattaataaccctaatgtcacatctgaaggaactagagaaacaagaacaaaccaaacccaaagctagcagaagaaaagaaataacwctattgctatgtacatacagcatggctcatcaccatcttgtgtaccatactagaataaataccactttgtctttctttcctatcaagatagtaatcttcttgaaacattagactatctatattaagctcacatctttttcttctatcgagcacttccaattgagctttacatataggagttttgaataaatctttgatgagtgagtgaattawatcaaaagatagctttttattggccttccaattatccttttggaatctttcagaatacaggcactgagctcgtaactttcccagcctcaagaaaaaaaaatacatatataatatatatatataatatatatattatatatataacatatctatctatatataatatgtacactgatatttttcatgggtctctatgttttaatgaccatgttccagagatctttattttatttgctctgtactgttttgtgcagttctagcaatattattttccctctctgaatggcagttctgtacctgcaaatgataaaatcataggttcagtgacttcctatagtgaataataagatgat

SEQ ID NO: 277439 - DNA, 607 bp, Homo sapiens
tgttaacttcttagtttagttttaacttaaggtaagaacaatccaatttgtactaaaatgtcatatttccttttcacccttagctacaatacgatgtaaacatttacccacaagactaagtttcactttccaggttcatatgatcaagataatcttactccatcttttttctgccacaaggaatggaaaagcatgttaaagagtttaagaatgaaaattaacacatctggagagtctgcagtaaacatggatgatggttaattttatgtgtcmatttggctgggctaagggatgcccagatggctgagaaaacattatttctggaggagtctgagaggttgtagctgaaagagattagcatttgactcagtagactgagcacagaagatccaccctcaccaatgtagccatcatccaatgcatccaaagcacagagtgcccaaatggaacaacaaaggaagaggaagggcaaggaagaaatcttcttcagttgatctatcttctcctgtcctcagacatcagagctcctggttcttgggcacccccatcccatacctgcacactcctctccctgtttttaggccattggcctctgtctggactgaga

SEQ ID NO: 277440 - DNA, 540 bp, Homo sapiens
acaattagaaaatatattaaactgagccatatgaaaatgtgattttgtaagtcaagagtggtcgaatatcaaaaacttgatgtggctctacttacagaaaggaataaacaactctaaaggaagaagaatgatgattagaaataaaacaactcttgaataacgaatccacattctctagaccaggtgaaatacaaattgtgtctgtcttagacttgtttgtctttagatctatttcattcttcctcttttctttgtcacaaaggaaagacgcatttaagctgcggtttggccaaytgaggcattatcaggggcttggaagatagcacttctatatctcttgaggtgtctttgtcagtgtgtgtatgtcttctcagtggctaaaacttctactgggcaaactcaccattatttctggtttttctacatgaccaaaaacccttaggtgctggtaatattatctccttcctttgtccctctagttgaggatttgcaatgtccttctgctattatgaatccccagttgtcccattgccctgccta

SEQ ID NO: 277441 - DNA, 527 bp, Homo sapiens
tagacctggaaacataaagtgaactatacaacttcctccccctggagaatcgttctactcacacatcttcctgaggagggatgcttttcagtgccttcggaggactggccgaygattccaaagtatctgactatgaggagaggtttcttccattgatttgcaggctattttctgtcctacagagctggcaaattccctttgctaaataaaaagaaaaacaagctaaaggtaaaatgtaagacctctctgacaagctttcctttactccaggatttctgttacaggggaatgatcattccaagaagagacatggcactgtgaaacaacaggggggttttggggattctagttgtagatggctaaactaggagtaggctaaaaggcatagagaaaaatgatatgaaagtaggggcagaaaaatcaaactatactttccttaagtaaaatctgtttcatatcaatacaatgttttaaaatctcctgtgagaaataagatagttgctttttttctttaacacagaggaact

SEQ ID NO: 277442 - DNA, 538 bp, Homo sapiens
tttcttccattgatttgcaggctattttctgtcctacagagctggcaaattccctttgctaaataaaaagaaaaacaagctaaaggtaaaatgtaagacctctctgacaagctttcctttactccaggatttctgttacaggggaatgatcattccaagaagagacatggcactgtgaaacaacaggggggttttggggattctagttgtagatggctaaactaggagtaggctaaaaggcatagagaaaaatgatatgaaagtaggggcagaaaaatcaaactatactttccttaagtaaaatctgtttcatatcaatacaatgttttaaaatctcctgtgagaaataagatagttgctttttttctttaacacagaggaactgttattttctctatattcttaaagtggttcatcccagcacaactcagttgttagcctcagtttycagttctaatatttatactgattactggtctgacctgaggagtatgcaggaatgtgagaaaaaaattgacatgttaccctgaagattttc

SEQ ID NO: 277443 - DNA, 562 bp, Homo sapiens
gacacattagaaacatcaatttttgaaatgttgtggataatactaaaatgtaaakaaagaagaaatattactgtcaggattccagacattaaaaaagacataaaggctctgtaatcagaagtacagctacctggaggaaagatttatcagagaagtgagataatccattcctgaccataggccatcatttctgtctgaatacctctgctcttcagagacatttctttccttcaagaacaacatctgatccaccaccgtcctaggaaagataaaggtcatacttgcccaacctccttgatttctttagagacaaacatgattaagcctattgaccaatcattaagctaaagatttgtactgcttctaaatgagcttccctcatctcatcaagtactattcttttctagtaactaggaagccttaattttagccaagatactttctgccaagtaaccgtgatcctaagaataatttgtcagtctctgacctcttgatggcactggtggctagatgtaagagtttaacaaaatatataaaccaggctatgtaaaatatattcaag

SEQ ID NO: 277444 - DNA, 562 bp, Homo sapiens
gacacattagaaacatcaatttttgaaatgttgtggataatactaaaatgtaaagaaagaagaaatattactgtcaggattccagacattaaaaaagacataaaggctctgtaatcagaagtacagctacctggaggaaagatttatcagagaagtgagataatccattcctgaccataggccatcatttctgtctgaatacctctgctcttcagagacatttctttccttcaagaacaacatctgatccaccaccgtcctaggaaagataaaggtcatacttgcccaacctccttgatttctttagagacaaacatgattaagcctattgaccaatcattaagctaaagatttgtactgcttctaaatgagcttccctcatctcatcaagtactattcttttctagtaactaggaagccttaattttagccaagatactttctgccaagtaaccgtgatcctaagaataatttgtcagtctctgacctcttgatggcactgrtggctagatgtaagagtttaacaaaatatataaaccaggctatgtaaaatatattcaag

SEQ ID NO: 277445 - DNA, 533 bp, Homo sapiens
aaaaaaaatcgacctgataatttcacccaagaaatcagacattagactagcctaaacattgggatggaacccttgctagaggtttatgtgtgcatggaaatgactgtccttcagcttctttttgagccccctgccgctctactgagtagagacttctctagggagtggagaaatcacgtckaaggcccctgtatgtcattctctgcatggctcttgggcacgcaccaaagtattgcaggtgccagctgtgcccaaggctgcaggatgccgaccagcaattctttactctcactgaagaataaacctgaattgagcagaaattcaaggaagaaaaaagaaaaatgactgccctccctttggggattttagctgtggtcacagacatcaaaagtaacaacatgggaaaatcaagctgaattatagtagaatctatgtggcttttcaccctgtgtttaatttagtcagatggctcagtaaatgatacaaaccttttaatgtagctatcttagtttcaactccatgcatggtacagg

SEQ ID NO: 277446 - DNA, 593 bp, Homo sapiens
cacagacatcaaaagtaacaacatgggaaaatcaagctgaattatagtagaatctatgtggcttttcaccctgtgtttaatttagtcagatggctcagtaaatgatacaaaccttttaatgtagctatcttagtttcaactccatgcatggtacaggaactctggctaaattaattatagttgatcacgtaatttcttttcttaaaatgttttcctatacattgaagtctaatttccttagcatttaatctcagattcttcattactccaaatagtttattcacaataatgccttatttttttctagtttctctaacttcctcagcatttaattctagtttcttcattactccaaatagtytattcacactaatgttttacttttttttaatttctctatattgaatgtccgtctcccacacaatcttctctgcctctcaaaccacatagaccctttattatttcttctttaaaactcttcttacacattaccgcctcctccactccctctgccttttaaaatgaatgacactcttagccctttttgtgttcccatagcactgtgttcctaactttaatgcactacctaattt

SEQ ID NO: 277447 - DNA, 622 bp, Homo sapiens
aatgtagctatcttagtttcaactccatgcatggtacaggaactctggctaaattaattatagttgatcacgtaatttcttttcttaaaatgttttcctatacattgaagtctaatttccttagcatttaatctcagattcttcattactccaaatagtttattcacaataatgccttatttttttctagtttctctaacttcctcagcatttaattctagtttcttcattactccaaatagtctattcacactaatgttttacttttttttaatttctctatattgaatgtccgtctcccacacaatcttctctgcctctcaaaccacatagaccctttattatttcttctttaaaactcttcttacacattaccgcctcctccactccctctgccttttaaaatgaatgacactcttagccctttttgtgttcccatagcactgtgttcctaactttaatgcactacctaatttattctcctagctgtggttccatttgttctaagacagtatcagagccttgttcaccactgtgtctcagtgtttgttgaaagaatcaattagtaaatatgctgtttatagatgtatrtccattacataatatatgaaacatagcagga

SEQ ID NO: 277448 - DNA, 468 bp, Homo sapiens
tgcaatgagaacattaggtaaaaatggaaaaaaatctgaatacaatatagacgttagttaaaaataatgtataaatattaggtcattaatcatatyagggtaatgtgttaataatggaggaactggagctgttttgaactctgtattatctttgcatttttttatctaagactgttctagaatagtctattttaaaaatagttaccaagaagaaaataaaagttggcattagcaaactaaatcttcaactgtcataaaacaattttgaatttagagtttttaaattagcattcaagagttggagaataatggacatattttggagaaagagaacctcagaaagtttagcactcatgagcccctttaacatgttttatttaaggatgtttttagtaaaatcctatgaaactaataaaattatacaggagtttgatataaagaaacagtggtgtgtaaataaacgtaatt

SEQ ID NO: 277449 - DNA, 468 bp, Homo sapiens
tgcaatgagaacattaggtaaaaatggaaaaaaatctgaatacaatatagacgttagttaaaaataatgtataaatattaggtcattaatcatattagggtaatgtgttaataatggaggaactggagctgttttgaactctgtattatctttgcatttttttatctaagactgttctagaatagtctattttaaaaatagttaccaagaagaaaatamaagttggcattagcaaactaaatcttcaactgtcataaaacaattttgaatttagagtttttaaattagcattcaagagttggagaataatggacatattttggagaaagagaacctcagaaagtttagcactcatgagcccctttaacatgttttatttaaggatgtttttagtaaaatcctatgaaactaataaaattatacaggagtttgatataaagaaacagtggtgtgtaaataaacgtaatt

SEQ ID NO: 277450 - DNA, 429 bp, Homo sapiens
ggtttctacttaatgaaatcattgtaagttgaaccatcctaagtcaggactgtctgtataacctgggggcatagattaaatcatcaacattgcttacgatcccttggtaaaccctatggaaaaattgaaagtgcttagcagrccctcacaggcagacaaaaggactgctaggaacagagtgtctcccatagatatttaatatgcttcaaatgaatgtgattaaaaataatttattgagtggagtggataaattaattcaaattacctgaaagcctacaacagttttaaagggccgtgtaagcaaaagtgccatcattctggcctcacaggtattgagattgttcaaaatgcaaaaagcttctgagtccccatcgttctatgaccagaaagttggctaaaaaaaaaaaaaaatttataggacataacttt

SEQ ID NO: 277451 - DNA, 429 bp, Homo sapiens
ggtttctacttaatgaaatcattgtaagttgaaccatcctaagtcaggactgtctgtataacctgggggcatagattaaatcatcaacattgcttacgatcccttggtaaaccctatggaaaaattgaaagtgcttagcaggccctcacaggcagacaaaaggactgctaggaacagagtgtctcccatagatatttaatatgcttcaaatgaatgtgattaaaaataatttattgagtggagtggataaattaattcaaattacytgaaagcctacaacagttttaaagggccgtgtaagcaaaagtgccatcattctggcctcacaggtattgagattgttcaaaatgcaaaaagcttctgagtccccatcgttctatgaccagaaagttggctaaaaaaaaaaaaaaatttataggacataacttt

SEQ ID NO: 277452 - DNA, 1082 bp, Homo sapiens
aaaaataactgggcattagaaaagagattaaaaggggagacaatttagaatgatgatcagagaatgctgtgatgaagcacgcttttaaaaatgtaaaatattctcaatatcagaaaaggttgaataaaaatttttaaaattgataatgatagagttgtattttttaatgaaaagcgttrtattacatgagaagatctgccatgtatccctatatatcaaagagtaaaattcaaataaattttaaagattgtaggaataacaataaaataatctgaaacattgaaagacttgaaattatctctcaggccgtaaaaatcaacttgacaaaacttgtagacatacaatattagaaaaatggtaatgaagttttaaatatacataagctattaataagccattggatgttttaatcatatttttaaatgatggttgagtgttcatgatgttaagtgaaaaaagcagaatgcattaactatacatatcaactaagtttgcaaacatatatggatctatatcaaatgaatatagaacattttaaagaaaacagcatcaawcccggctaatttttttgttttttgtttggtatttttagtagaggcggggtttcactgtgttagccaggctggtctcaatctcctgacctcgtgatctgcccgcctcggcctcccaaagtgctgggattacaggcgtgagccaccgagcccggctggttgccttcttaagactggtaagatttttggtwatttagcaataagttctcaatattgtgatgaagagaaaaattgtaagacccttcaaaacctaatgttatttatacatattcagaaactgttttatacaatttccttcctgaattgatcctgaacatttttagctcgtttacttgatgattttactataatgaaaagagtctgttgtttctgattaattcacatggtctttctacacagagagataaggcaaggtctagagatatgtcttgcttcatttgtcctttctatttacaaaagtgttcctcaggtccccaccatctgggtttgtggttatattgagaatcttgaggcagttgcctcagagacttg

SEQ ID NO: 277453 - DNA, 612 bp, Homo sapiens
aattgacagtttttcaggtgtagaggaacaatataacttacatgttacattcatataacatgtatgttatattcaggttataacatatgttatattcatgttataacttatgttataktcatataattcatacaaaagtatgatcagttgagggtaaagttgaatattattgacactggaacaaaagccacatggtttcccttgttagatagctggaatttatcaatagcatgtttgtgtctcaatttatgtcaactaatctaaaaacaaaaccatagacatatgtatgctgagggtcagttgtttaaacacaaaacattaattgagtacgacctaagaagatgacaaaagagaattcgtcaaaatgggcttatcttatcgttatcaaagcagaaccatacacacacacacatgcataaacaaataaagtgtctggcatgaagaacatatgtttttttttctgagaaaatgtttgtagtataagagaaaatttacaaaattatgatttaccgtgagtaggctatttattttaattaggatggggatgtattcccaaagtacattagacttcagatccaagcaaagagtcagttattttattattatgaaagt

SEQ ID NO: 277454 - DNA, 612 bp, Homo sapiens
aattgacagtttttcaggtgtagaggaacaatataacttacatgttacattcatataacatgtatgttatattcaggttataacatatgttatattcatgttataacttatgttatagtcatataattcatacaaaagtatgatcagttgagggtaaagttgaatattattgacactggaacaaaagccacatggtttcccttgttagatagctggaatttatcaatagcatgtttgtgtctcaatttatgtcaactaatctraaaacaaaaccatagacatatgtatgctgagggtcagttgtttaaacacaaaacattaattgagtacgacctaagaagatgacaaaagagaattcgtcaaaatgggcttatcttatcgttatcaaagcagaaccatacacacacacacatgcataaacaaataaagtgtctggcatgaagaacatatgtttttttttctgagaaaatgtttgtagtataagagaaaatttacaaaattatgatttaccgtgagtaggctatttattttaattaggatggggatgtattcccaaagtacattagacttcagatccaagcaaagagtcagttattttattattatgaaagt

SEQ ID NO: 277455 - DNA, 525 bp, Homo sapiens
catggatctactttgctgcaggctaaatgtcccagtaccttggaaacatatctcaaaagatatgactccaaatcaccattctactcttctggtcatttttctctaactaagccaacatttgtgtttgcccatacctctcgattcagggtgtctgggactaaaagggatatttytaaattatttcaagcagcgtgtttttattatttactctgttctaaatgatacagatacatttctaaatatataacacataattttatttatatacttataaatatagctagttctaaatatttctatttcttttcttaatgattcatagcttggcaaccatttatatagttttttataaaatatcacatgtactgtcatttaaaatacataaacatgtttcagaagtattgtaactgagccacacatacccatttccgtgtatttgttattggctttatgatttaagtatataagaattcatacttgagaatttatccttattaaagcattctcttctgcgacaagtgtggc

SEQ ID NO: 277456 - DNA, 1161 bp, Homo sapiens
actgcctcccttgtcaatttgccccttattttcaaattcctgatgaagaacacttcrtctagtctcagttttttcaagttttctcccagaggcctccttttcataatcaaatatgtgtatatctcttaatctccaaagaaggatgttcttccttgaaagaaaccattttattgactcatagacttaccattttgggggatgaaggtagaggcaatatactgtaagactgcaatgtgtaaatgtcatctttaatgtaaggtagttaaatgcataacaggtttgtgatgacgatataataaattaaaaatgacatgacctttgctgagaatctttaaaattgctacaccctctctagtgattgttttattgcttggaagagaaaaatattcaaaacctaaacatattaaaactaaagttggcttcttttctactaatttggtgtaaacatcaagaggctagatatattttctaagatgttagttgtagtgaataatgttccaaatgttaggctacaacattttgggagataacttcacagaagcttgtgatgttttaattttatctcaattagagctcttatttwtgtgaaatcatttgaagcttaagtcaaatcattttaccataatatgtgttggctttggatgcctgggaaaagtttttcagaggcatggtattccttttcaataggaagacataattcttatcttatttcggaaaaaaatttattgaattgcagtttttaatatttattcttagctctcgcttttgttttcattttgtcttttaatacatgtattagaactactttccctatctttttttctttcaattcctccctcatttacgtctttctttatttttgcttgattttaatttcattttttctattttctactgcctatttcttttaccatattatttagaatatgtattaattttcattttctatttagttttgtcttcacttttgaaatttatttctaaatcatttctcaactctgagagagttcagaagttccttactgacataatttaaaawttttttttctagttctcatttattcttttttcataaattaatttccttgcttattttgaaatattaagctagtcttcccaccaaaaaaaatgttaagtcggaaggtcatgttattttggtat

SEQ ID NO: 277457 - DNA, 1310 bp, Homo sapiens
tagtgtttataaagactacagtagtgtacaataatgtcctaggccttcacgttcactcaatactcataacccagagcatctgccagtcctgcaagttccatcatggtaagtgccctatacatgtgtaagactttttatcttttataccagatttttacagtgctttttaaatgtttagatatacatatgcttcccattgtgtcaaaattgccctcagtattcagtacagtaacatgctatataagtttgtagactaggagcaatagactataccatatagattaggtgtgcggtaggctataccatctaggtttgtgtaagtgcactttatgatgtttatacaatgataaaatcacttgaagatgcctttttcagaaagtatccccattgttaggcagtgcctgactgtatacgtatatataaaaaagtggcaggacttctggctataaggagttcatagctggtgaagaaaatatgcagaagtaagtaattacaattcagttaacataattttagtaataaactaacatataagaagggtgaaaacaaaatatggtgaagcacactgaaataagaagatggaaaaaggagaycttcaaagaacgagtcacagaggaaattgatagaaaattgaaggaagaagagatgtttwtattctgggaaatatattctatgtaaccaacacaatagttgataaaaccataactttaaacatttaaaaatcggtataatttgcaggacttggtcctctttattgcaaagagctgcatactatctgattatttcattgttccccatctgtttttatcacttgtcaccttcctggccctcatggacactgggaactctcwaactaggatgagaatcctggtctcctacatatcacataatcacccttgtcattataccataccactgcatgtgatgtggcctggccacactctttcaaaaagtaggaagcctgaatgaggaaactacccgcatctcatgaagggcttatgccactccattgctattagaggtattccttttttccttccagttcttcatatattccctccttttgctttatgccttaagacggtatttaattggttctttttaacctggcattaaacaatattttggatcatttatattgaaaaagatcaaacttgaagaattacagatttgccaggttagattaggactggggaatgatcccgagaacaacataccacaagttgcctttttacaggagttgctgtatctgacataattaggaagctgattaatcaggaacttgctgctttaactgctatgttgcagcc

SEQ ID NO: 277458 - DNA, 616 bp, Homo sapiens
gataatagtcacagaacttaaagcaacccaatgtctaaacaaatggggtatattcatagaatttaataatatattaattaaaaattaattgattagaaaaattacttttgctctcaacaacatgaatgaatctcaaaacatkttgagtaaaataaggcagaagataaaaatgtgcattcaatatgattcaattctatgaaattcacagttgggcaaattttatcatggtagaaattcagcaagttgtatttggggtcgaagagagaagatagattggaagcaggaacaaagacattttcttagatgacagaaatgttttatacctggattacactgtgggttagataggggaatatgcttgtcaaaatttattaaactgtaaaattaactgtattgaagatactcatcaaccaataagaaataaaaaattagagaaattatgattctatatagcaattaaatggaatattaaaattttgaaataaaaagactaaaatatttgccttgtttcctaaaaaaactgaagattattcaaacatttgaatagaagttcatgtgttaaaaatttgagaataattcttgaggtttgaaagagttgataactgattctttttca

SEQ ID NO: 277459 - DNA, 639 bp, Homo sapiens
tactaaaactatcttgagtgcttccatataggacccaatgctacacttcatgaaatattatattccatagtaaatatgaaatattaatttcttaatgatgtaaaatgctacagatgcttacgttatatgtacatacacatgcacaattagatggtgaattgcagaacacaaaggagaaaaaaacatgtaatctgaatacacaagcctatcatccaaatcagtacaggttaagtcctcttaatcttacattcttgggatcagaaatgtttctgtttttggatgattctggattttggaatatttatgtttacataatgagatagcttggggatgggactcaagtctaaacacaaaatttgtttatatttcacatataccttatacacatagcctgaagtagttgatatttgttttttttaatctacccatcacatcatagaaccaattaaataataaatgmatgtattttatacaaatgtatatataaatatcaatgcataaacttaaatataaatgcatatattttataaaatattttaaataatttttaactcaattggatggaaagaaataaaataaaaataagaaataaattattttttgcataaaattaagtctgtgtgcattgaatcattagaa

SEQ ID NO: 277460 - DNA, 1177 bp, Homo sapiens
aaactcttttaagttttggcttaggttgcagagtaatctaatgccatttcttcaatgatacaatcactttaccagatccttggcctcgcctcctgcaagtgtgtcttcctgatgactgatctaaatggccycctctgcaaagttgaagagttttcccaaaaagtttctttttttttagtctatttcctctgctttgcatgaaatatacactaccatttctacaattattgagcctctacttcgtttaaggctcatggtgggctctggtaagcaaaatagtcatagactcagaacttgactggtctcatattctaatgagaaaagtaggtatgtgttgggaaaggaaatattcaggcttgtcatatggtaaaatataataaaccaaattaaaatgatcagaaaatctagaaacaaactggatttaagtagcaaagggggcaaatgtgaacaccacacttctagaacatctaaaaacaaagtgtcctttaagtgatgataaaacaaattagtccacccacattaatccaattatattgttattcattattctatctttgagttgtttttttaaaatacaacagattttacwaaactcttttaagttttggcttaggttgcagagtaatctaatgccatttcttcaatgatacaatcactttaccagatccttggcctcgcctcctgcaagtgtgtcttcctgatgactgatctaaatggccccctctgcaaagttgaagagttttcccawaaagtttctttttttttagtctatttcctctgctttgcatgaaatatacactaccatttctacaattattgagcctctacttcgtttaaggctcatggtgggctctggtaagcaaaatagtcatagactcagaacttgactggtctcatattctaatgagaaaagtaggtatgtgttgggaaaggaaatattcaggcttgtcatatggtaaaatataataaaccaaattaaaatgatcagaaaatctagaaacaaactggatttaagtagcaaagggggcaaatgtgaacaccacacttctagaacatctaaaaacaaagtgtcctttaagtgatgataaaacaaattagtccacccacattaatccaattatattgttattcattattctatctttgagttgtttttttaaaatacaacagattttac

SEQ ID NO: 277461 - DNA, 576 bp, Homo sapiens
gtaattggattatataatttctcatcataaagccaatactcattgtcactgtgaaatctgttttgcttcctgtgccgagccttccaattgaatggaatttcactgtgaaggggatttaaaatattaaagaaacaaatgagcctttaaaatttttctgtctaaactgtacaatagtcaggaactctgcacaacacaagtacatgatattgtcttcacagaacacacattcccagagcaagttccttggcttacactattaccagtcacactcaatcaagtatagcccttcaaggattccatgggragaaatgtgtgaaacagattttggatatcctgtagggggcagtgggcaagttatcaagggactaggaaatcaataaacaatgcagacaatctaattttcagcgatgcaggcataacatggaggtattgcgaataacttggagatatttatttcagtggtttggttaatattacagtaaattgagtcatacaaaatttttcatttctcagtgcatacaaaagcatgcagtagcattatgtctaaaataccaatgtatataccttaagttaaag

SEQ ID NO: 277462 - DNA, 645 bp, Homo sapiens
gaaaaatggcactgacagacttgctgttcacagagttgccacaaagcttcaatctgaaaataaaacaaaacaaacaaacaaacaaaacactgtatctatgaggtgaactaaagcaaagcacagtaaaacaaaatatgactgtgttcttctatttgtcaacatacatcacaaatagcagtgaagtttgaatatctaactgaacaagagattaatctgtgcatggacctctcggcaatgactgatctaaagctagtgctggcttgggtgatatactgtgaaaacaacaatgagaattcatggaattacagatgaatattattcaatgatttctttttctctctcaaagtgcttccaggataaaaagacacactagaaaaggcagatgtaattaaaggtaatgagagatcaaactttaattgaactataaaaaaacaccacctcttctacttgataattacactaacaccaccaggatcagctccaccatttttatttcccttgaacctttattatcacattattggcatgtatatcytacaattaaaacatcttgaatttataaaaatgttagttatcaaagaaattaaaaagaaataagatgcagtgatgtgcagtggcataacatcagcccatgaactcattgcc

SEQ ID NO: 277463 - DNA, 559 bp, Homo sapiens
gatctggtacaatccagggaaaagatttcaaaagctgtaatgtcagctaaaccaaattgatgtgcttcagactaccacagttgctataggttgagttgaacataatgtccaggcagttgaaatcatgtccttgaattctgttcatttaagctgataagaaatatttgttagtatgtcttgataatgggagacacagatctcaattttgtcacartactatatctgagccaagaaaagcagataaaggtattaaatcattattctgaataataaatctctatgcctacattatcaaagtagcttaggaggaaactatgtaagaaacatttgccttaacttggtatcagctctattttttttattccattctgattgaacccatacaaaacattaatagtccttttatttaaattaatgaaaatagtgcattatataacatcatttcctatgcattttctattacttacttacttgcacccacgttcttaagtataagacctaagtagtttttacagtttcattatatacagtcctattaggaccaaagtaatcagatata

SEQ ID NO: 277464 - DNA, 512 bp, Homo sapiens
tgggagatttttatgaatgggaggagcactaggaaagcttctgaggtacagggaattgtccatttttgcctaggttgatagttaaacagaggttagcattttagaaaaacmaaacttagtttaatgtttcatgaaattatctgtagatagatagatattccactatgaatatttaaagtcatagacacaaaaacaggggacttaaagttcggaaagaaccatgttgtaatttcagctcctctacatgttgctgctatgtccttaaagaattgcttaataactcccaatgcttaagtatcttactctgtgaaataatgatgacatttatttgaatcattgttatgaggattcaagatatttggctattcaggaactagctaatgctgccactaagagttattatttgtgattgccagatggcctctgaaattctttatagctatgaactcgtttaattcccacattcaccctatcagataggtactattattatggaatttccctctaactat

SEQ ID NO: 277465 - DNA, 512 bp, Homo sapiens
tgggagatttttatgaatgggaggagcactaggaaagcttctgaggtacagggaattgtccatttttgcctaggttgatagttaaacagaggttagcattttagaaaaaccaaacttagtttaatgtttcatgaaattatctgtagatagatagatattccactatgaatatttaaagtcatagacacaaaaacaggggacttaaagttcggaaagaaccatgttgtaatttcagctcctctacatgttgctgctatgtccttaaagaattgcttaataactcccaatgcttaagtatcttactctgtgaaataatgatgacatttatttgaatcattgttatgaggattcaagatatttggctattcaggaactagctaatgctgccactaasagttattatttgtgattgccagatggcctctgaaattctttatagctatgaactcgtttaattcccacattcaccctatcagataggtactattattatggaatttccctctaactat

SEQ ID NO: 277466 - DNA, 538 bp, Homo sapiens
attgatctttatattcaatgcagtcccaatcaaaatcccagtacattttgttttagtaattgacaaactgattataaaatttatataaatgcaaaagaccaaagatagcaaatacaaaataagtagctggaataactttctttctcagatctcaaagcttataacagaagttgcaataactaaggcagtgtcttatcagggcaaaaaatatatacaaacaaaccagtacaacaaaatagcaagttcataaactgacctgtgcatatatgggtacttgatttatatcaatatttccaytgcaaaacagtagaaaaatactttttttcaatatgcgtgtactggtggtgtaatttgaatccatatgaaaaaaatacttgaaactagatttctaacaagtttgtgtggtcacttacacatacaaaaattaattcaagaccataatccttaaggtcaaaggcaagacaatatagcttctggaagatagtagagttagatgttttcatgacctcaggataagaacaaatgggcaaaacaactt

SEQ ID NO: 277467 - DNA, 603 bp, Homo sapiens
atgttaaacgtgcaaattctttgtcccacaccagaactgctgagtcaaaaactctgggagtggggcctagcaatgtagggtttaacaaagtgtataagtgattctgaggcatgctaagtcagagaaccacttcccatagctgaaaatgagccactagaccacctgtaggtctataacagaaactttgtcttttttgatttacttcacagatagcagaaaaagccagatcatgagggccatccataatgcccatagaaaagccaatccaaacagcctagttgaggtttgctcagagttccaagcagcagtggtccttacctctcttatttttcaraaggatctaccccccaaaagagtccatatctaaaatcttccaaaatttagcttatttaattttctaacaactgccacaactctaggattctaataacttctttgccattaaactgttctcaatttttctgtatgattgtagtggaatggatgatgaaaagtggaaaaagagagggttattgagaagcctcttctaagcttttcataaccatttttgtagaagctgccccaccctacccatatatttctgtgactctgctgcacaacctc

SEQ ID NO: 277468 - DNA, 603 bp, Homo sapiens
atgttaaacgtgcaaattctttgtcccacaccagaactgctgagtcaaaaactctgggagtggggcctagcaatgtagggtttaacaaagtgtataagtgattctgaggcatgctaagtcagagaaccacttcccatagctgaaaatgagccactagaccacctgtaggtctataacagaaactttgtcttttttgatttacttcacagatagcagaaaaagccagatcatgagggccatccataatgcccatagaaaagccaatccaaacagcctagttgaggtttgctcagagttccaagcagcagtggtccttacctctcttatttttcagaaggatctaccccccaaaagagtccatatctaaaatcttccaaaatttagcttatttaattttctaacaactgccacaactctaggattctaataacttctttgccattaaactgttctcaatttttctgtatgattgtagtggaatggatgatgaaaagtggaaaaagagagggttattgagaagcctcttctaagcttttcayaaccatttttgtagaagctgccccaccctacccatatatttctgtgactctgctgcacaacctc

SEQ ID NO: 277469 - DNA, 603 bp, Homo sapiens
atgttaaacgtgcaaattctttgtcccacaccagaactgctgagtcaaaaactctgggagtggggcctagcaatgtagggtttaacaaagtgtataagtgattctgaggcatgctaagtcagagaaccacttcccatagctgaaaatgagccactagaccacctgtaggtctataacagaaactttgtcttttttgatttacttcacagatagcagaaaaagccagatcatgagggccatccataatgcccatagaaaagccaatccaaacagcctagttgaggtttgctcagagttccaagcagcagtggtccttacctctcttatttttcagaaggatctaccccccaaaagagtccatatctaaaatcttccaaaatttagcttatttaattttctaacaactgccacaactctaggattctaataacttctttgccattaaactgttctcaatttttctgtatgattgtagtggaatggatgatgaaaagtggaaaaagagagggttattgagaagcctcttctaagcttttcataaccatttttgtagaagctgccccaccctacccatayatttctgtgactctgctgcacaacctc

SEQ ID NO: 277470 - DNA, 560 bp, Homo sapiens
gaaataactatattattgtttctatttgcctaaccggaattggtgagaagaacatcttacattagtaatttgaatgtttttttgtccatgttgcttacaggagccgtttttcttggtctttatgatataagggtatgcacaccagaataaattgagaaggtatctattatatacacatctttatccaaaaccagatcctgaattcagatattcaggggagtaatttggtctagtgtatattgaaaaacaccttaagtaattctgataggcactatcagacaaacagaactgcaatgaatggatgaacarcaatttattttatttcccattttttaaaaatgttactttaaaaaatttttgtgggtacatagtaagtgtatatacttatggggtacataagatattttgatacaggcatgcaatgtgaagttagcacatcatggagaatggggtatccatctcctcaaacatttatcttttgagttacaaacaatctaattacatttttaaaaatatacagttaagttattattgactatagtcaccctattgtgctatca

SEQ ID NO: 277471 - DNA, 568 bp, Homo sapiens
tactaacttttttcccatgcatcattttccattctggcaccttccaaataaactttgtgtacttgaattcttattcagggctcatttctggaaaaatccaacctaatacaaagatcaacttcctatgtctaaatatcaaagaccagtataacttttagagtcaaaataaaaatacatatttttcttcaagcttttctactgtcatctaaatcactttagaatctcctttcagattccctaaagtacagcttgcttttactgcataattcattatgtcataatagtaatactkatttgcattgtataatgctgtatgttttgtcagagtgctttgagctatacaatctattaacccgtatcttttgacttactattttttcagtatataggctctctttatccactgatgctttaaagtccttgatagcaagcaaatatagaaagaattgtgctataccctgatggctgaccattgaatatggaaatgaatcaattcaatgaaattaaactatatttgttgcacaacaacaattaaggaatataattttattataaaattcctatcaga

SEQ ID NO: 277472 - DNA, 568 bp, Homo sapiens
tactaacttttttcccatgcatcattttccattctggcaccttccaaataaactttgtgtacttgaattcttattcagggctcatttctggaaaaatccaacctaatacaaagatcaacttcctatgtctaaatatcaaagaccagtataacttttagagtcaaaataaaaatacatatttttcttcaagcttttctactgtcatctaaatcactttagaatctcctttcagattccctaaagtacagcttgcttttactgcataattcattatgtcataatagtaatactgatttgmattgtataatgctgtatgttttgtcagagtgctttgagctatacaatctattaacccgtatcttttgacttactattttttcagtatataggctctctttatccactgatgctttaaagtccttgatagcaagcaaatatagaaagaattgtgctataccctgatggctgaccattgaatatggaaatgaatcaattcaatgaaattaaactatatttgttgcacaacaacaattaaggaatataattttattataaaattcctatcaga

SEQ ID NO: 277473 - DNA, 528 bp, Homo sapiens
ctatgatctagtcacttcctgaatttactaacttttttcccatgcatcattttccattctggcaccttccaaataaactttgtgtacttgaattcttattcagggctcatttctggaaaaatccaacctaatacaaagatcaacttcctatgtctaaatatcaaagaccagtataacttttagagtcaaaataaaaatacatatttttcttcaagcttttctactgtcatctaaatcactttagaatctcctttcagattccctaaagtacagcttgcttttactgcataattcattatgtcataatagtaatactgatttgcattgtataatgctgtatgttttgtcagagtgctttgagctatasaatctattaacccgtatcttttgacttactattttttcagtatataggctctctttatccactgatgctttaaagtccttgatagcaagcaaatatagaaagaattgtgctataccctgatggctgaccattgaatatggaaatgaatcaattcaatgaaa

SEQ ID NO: 277474 - DNA, 579 bp, Homo sapiens
aaatttcctttataaaatcatcagatctcaagagactcactcactatcatragaacagcacgagaaaaacccacccccatgattcaattacctcctaccaagtaccttctccaacacatgggcatttttacaattcaaggtgagatatgggtgaggacaccgagccaaaccgtatcaacatctgtgtctcagtatgagaatgcatttcaagttagtaaagattaagcatttaacctgcaagtgtttcttttatacagaatgaaaaaaaatggaatacaattggtaaaatcaattatttttgcaggtagaaatgttgaaattattaactctgggcaaaaactacctcactttggaaatttctctttttccatcaagtaaacctgatggctaatgttgcagcattgtgagtcatgtgtgaggatagcattggggctgccaaaataccactggacatggggtaatataacaatgtgttggatattaaagatctagaagcaactcttaatccagtttccaataaccagtcccatgagacatccaatccttcacctgaaccagttaaaaaaaatgaagaatgtc

SEQ ID NO: 277475 - DNA, 579 bp, Homo sapiens
aaatttcctttataaaatcatcagatctcaagagactcactcactatcatgagaacagcacgagaaaaacccacccccatgattcaaytacctcctaccaagtaccttctccaacacatgggcatttttacaattcaaggtgagatatgggtgaggacaccgagccaaaccgtatcaacatctgtgtctcagtatgagaatgcatttcaagttagtaaagattaagcatttaacctgcaagtgtttcttttatacagaatgaaaaaaaatggaatacaattggtaaaatcaattatttttgcaggtagaaatgttgaaattattaactctgggcaaaaactacctcactttggaaatttctctttttccatcaagtaaacctgatggctaatgttgcagcattgtgagtcatgtgtgaggatagcattggggctgccaaaataccactggacatggggtaatataacaatgtgttggatattaaagatctagaagcaactcttaatccagtttccaataaccagtcccatgagacatccaatccttcacctgaaccagttaaaaaaaatgaagaatgtc

SEQ ID NO: 277476 - DNA, 504 bp, Homo sapiens
gaagctggactcctacctttcaccatatacaaaaattaactcaagacgtattacatacttaaatgtaagacgttaaactataagaatcctagaagaaaacctaggaaacaccattctggacataggactttggaaataatttatgactaagtccttgaaagcaattggagcagaaagaaaaattgacaagtgaacctaattaaactaaagagcttctgcacagcaaaaggagccataaacggagtaaacagacaacctacagaatgggacaaaatattggccaactatgcrtcctacaaaattatagtatctagaatctataaaaaatttaaacaattgaacaagcaaaatacaagtaactccatttaaaaatggacaaaatactaaaagactcttctcaaaagaagacatacaggtggccaagaatatatggaaaaatgttccatacagcaaatcatcagagaaatgcaaaccctaaccacaatgagataccatctcatacca

SEQ ID NO: 277477 - DNA, 504 bp, Homo sapiens
gaagctggactcctacctttcaccatatacaaaaattaactcaagacgtattacatacttaaatgtaagacgttaaactataagaatcctagaagaaaacctaggaaacaccattctggacataggactttggaaataatttatgactaagtccttgaaagcaattggagcagaaagaaaaattgacaagtgaacctaattaaactaaagagcttctgcacagcaaaaggagccataaacggagtaaacagacaacctacagaatgggacaaaatattggccaactatgcgtcctacaaaattatagtatctagaatctataaaaaatttaaacaattgaacaagcaaaatacaagtaactccatttaaaaatggacaaaatactaaaagactyttctcaaaagaagacatacaggtggccaagaatatatggaaaaatgttccatacagcaaatcatcagagaaatgcaaaccctaaccacaatgagataccatctcatacca

SEQ ID NO: 277478 - DNA, 623 bp, Homo sapiens
agtagatttgtattgattcagtatagctacactaaactatattttccagattttcccttcccttcataattctgaaatagcatgagctcaaaacaacattttgttatttggaaggtaaaaagtaaagttgaaattttaagtttggaaagtaagtgcagagataccaggggctgttatagctcacacacacactgtccctcattaatgatgggctcatcttgtgcacagggcatggggacaacagctgggcctgcagttcctttaactcccactggctsttctttagcttttccaacttctggaccatgtgtgtgtttggctccatgaagaaggataccagattttccataagttccttcacctcattgaagtttgagacctgaaaagggtgaaagataaacgtgggttctaattcgtcctctgggttctgtttcatccttttagtttccagtttttccttgctttccttcactttactgtcatctcttcccgactgcctgctctgattatgtcaggcttggatgcaaacaaaacagccttgtattagttcttgaaattgaatacagtcaagtcgctattaaatctccctctctttttacatatgcatatattatttatagtgg

SEQ ID NO: 277479 - DNA, 623 bp, Homo sapiens
agtagatttgtattgattcagtatagctacactaaactatattttccagattttcccttcccttcataattctgaaatagcatgagctcaaaacaacattttgttatttggaaggtaaaaagtaaagttgaaattttaagtttggaaagtaagtgcagagataccaggggctgttatagctcacacacacactgtccctcattaatgatgggctcatcttgtgcacagggcatggggacaacagctgggcctgcagttcctttaactcccactggctcttctttagcttttccaacttctggaccatgtgtgtgtttggctccatgaagaaggataccagattttccataagttccttcacctcattgaagtttgagrcctgaaaagggtgaaagataaacgtgggttctaattcgtcctctgggttctgtttcatccttttagtttccagtttttccttgctttccttcactttactgtcatctcttcccgactgcctgctctgattatgtcaggcttggatgcaaacaaaacagccttgtattagttcttgaaattgaatacagtcaagtcgctattaaatctccctctctttttacatatgcatatattatttatagtgg

SEQ ID NO: 277480 - DNA, 623 bp, Homo sapiens
agtagatttgtattgattcagtatagctacactaaactatattttccagattttcccttcccttcataattctgaaatagcatgagctcaaaacaacattttgttatttggaaggtaaaaagtaaagttgaaattttaagtttggaaagtaagtgcagagataccaggggctgttatagctcacacacacactgtccctcattaatgatgggctcatcttgtgcacagggcatggggacaacagctgggcctgcagttcctttaactcccactggctcttctttagcttttccaacttctggaccatgtgtgtgtttggctccatgaagaaggataccagattttccataagttccttcacctcattgaagtttgagacctgaaaagggtgaaagataaacgtgggttctaattcgtcctctgggttctgtttcatccttttagtttccagtttttccttgctttccttcactttactgtcatctcttcccgactgcctgctctgattatgtcaggcttgratgcaaacaaaacagccttgtattagttcttgaaattgaatacagtcaagtcgctattaaatctccctctctttttacatatgcatatattatttatagtgg

SEQ ID NO: 277481 - DNA, 572 bp, Homo sapiens
tgcaatttcaagtctctatctgtttacttttgttctacattgagaagcaatttcctaagtatccttttcaggaatgagcatgcatgtgaattttttaaatgagtacaatattattatgatgtagatgttacaagaaattttgagaaattaaatacataggcaattctaatattattccatcccatttcatttatcctcctatttggcaagtatttactctgcccttacagtgtacctggtatttgtgcttgaggmttaggataaggataatgatggtagaatccttttgataaagatctcatattcagttaggaggaaaagcaaacaaaatcttgtaatactgtctaacatattacattgcaatagacataagtctagggtgccatcaaagtatacaggaagatatgtcaactcttccttgttgtgtctgagaagtacccaagaggaagtaactctagtgaatcaatgaaggataaatagaattttctgtcatcttcttagccttagcccttacaaagtcctcttcctaaacctgaaccagaggaattatgcacagaaatacacaacgatag

SEQ ID NO: 277482 - DNA, 572 bp, Homo sapiens
tgcaatttcaagtctctatctgtttacttttgttctacattgagaagcaatttcctaagtatccttttcaggaatgagcatgcatgtgaattttttaaatgagtacaatattattatgatgtagatgttacaagaaattttgagaaattaaatacataggcaattctaatattattccatcccatttcatttatcctcctatttggcaagtatttactctgcccttacagtgtacctggtatttgtgcttgaggcttaggataaggataatgatggtagaatccttttgataaagatctcayattcagttaggaggaaaagcaaacaaaatcttgtaatactgtctaacatattacattgcaatagacataagtctagggtgccatcaaagtatacaggaagatatgtcaactcttccttgttgtgtctgagaagtacccaagaggaagtaactctagtgaatcaatgaaggataaatagaattttctgtcatcttcttagccttagcccttacaaagtcctcttcctaaacctgaaccagaggaattatgcacagaaatacacaacgatag

SEQ ID NO: 277483 - DNA, 572 bp, Homo sapiens
tgcaatttcaagtctctatctgtttacttttgttctacattgagaagcaatttcctaagtatccttttcaggaatgagcatgcatgtgaattttttaaatgagtacaatattattatgatgtagatgttacaagaaattttgagaaattaaatacataggcaattctaatattattccatcccatttcatttatcctcctatttggcaagtatttactctgcccttacagtgtacctggtatttgtgcttgaggcttaggataaggataatgatggtagaatccttttgataaagatctcatattcagttaggaggaaaagcaaacaaaatcttgtaatactgtctaacatattacattgcaatagacrtaagtctagggtgccatcaaagtatacaggaagatatgtcaactcttccttgttgtgtctgagaagtacccaagaggaagtaactctagtgaatcaatgaaggataaatagaattttctgtcatcttcttagccttagcccttacaaagtcctcttcctaaacctgaaccagaggaattatgcacagaaatacacaacgatag

SEQ ID NO: 277484 - DNA, 572 bp, Homo sapiens
tgcaatttcaagtctctatctgtttacttttgttctacattgagaagcaatttcctaagtatccttttcaggaatgagcatgcatgtgaattttttaaatgagtacaatattattatgatgtagatgttacaagaaattttgagaaattaaatacataggcaattctaatattattccatcccatttcatttatcctcctatttggcaagtatttactctgcccttacagtgtacctggtatttgtgcttgaggcttaggataaggataatgatggtagaatccttttgataaagatctcatattcagttaggaggaaaagcaaacaaaatcttgtaatactgtctaacatattacattgcaatagacataagtctagggtgccatcaaagtatacaggaagatatgtcaactcttccttgttgtgtctgagaagtacccaagaggaagtaactctagtgaatcaatgaaggataaatagaattttctgtcatcttcttagccttagcccttacaaagtcctcttcctaaacctgaaccasaggaattatgcacagaaatacacaacgatag

SEQ ID NO: 277485 - DNA, 558 bp, Homo sapiens
ctggagaacgagatcacatgtgggcttggagaatgagtgcaaagttttattgagtggaagtagctctccatcaatggtggagccagaaaggagatggttttctccggagtcrggctgcttggctgcctgggctctcctgcaactgctctcgccaaagtccactttggatggcccgctggtggatggcccgctggtggatggcctgccggcgtgctggtgcctgtctgtgtgtgtgttttccgctggcctgctccctccacttcctctacccttccagccacttgtgttcgtctctatgtctggccacctgtgggtcggcctgccagggtctcgagtttttataggataggggtgtggcaggccagggtggtcttggaaaacgcaacatttgggcgggaaagcaggagtgcctgtcctcacctaggtccgtgggggtggatccctagccaggaccgcctttttctacatagtacttcttttccccgcttccatatcatttaaagggaccatgcccttcccttcccagcactcacaaatcaaaattacataaacgtacag

SEQ ID NO: 277486 - DNA, 558 bp, Homo sapiens
ctggagaacgagatcacatgtgggcttggagaatgagtgcaaagttttattgagtggaagtagctctccatcaatggtggagccagaaaggagatggttttctccggagtcaggctgcttggctgcctgggctctcctgcaactgctctcgccaaagtccactttggatggcccgctggtggatggcccgctggtggatggcctgccggcgtgctggtgcctgtctgtgtgtgtgttttcckctggcctgctccctccacttcctctacccttccagccacttgtgttcgtctctatgtctggccacctgtgggtcggcctgccagggtctcgagtttttataggataggggtgtggcaggccagggtggtcttggaaaacgcaacatttgggcgggaaagcaggagtgcctgtcctcacctaggtccgtgggggtggatccctagccaggaccgcctttttctacatagtacttcttttccccgcttccatatcatttaaagggaccatgcccttcccttcccagcactcacaaatcaaaattacataaacgtacag

SEQ ID NO: 277487 - DNA, 449 bp, Homo sapiens
ctaacacggcaaaaatacctatgggagagatgcctatgggaaagaaagaatttattttcaaactttgaacattcctagttttcataattccattttgtatagacctgctttgtgcttaccaggttgcagaactctaatcaggaccctgttcacacttctcgtacattaaaagctataaataacaacttctatacatttactgcttttattaagatttgatttttattttgctttgcaattataagtttctaaagataggagcttaacgggagactgtgttccattacacaaacaacttcaacattgattttcaattttctgacgtacaatgagtggaatggaycaactgtatcttccagagactgtgatattagaagccaccaccctgtaaactcaagtgtttcatttgagatattccatcaatcttcgtgagcaatcttgagagtgtg

SEQ ID NO: 277488 - DNA, 619 bp, Homo sapiens
cattacttctaggtaaagtatttgcatttttacagagacattttagaaataatacccacaggagcgattctctaataacagtgtggtggtttaggggatatgcatacatttgggcagcagaattgcctgtcacttctcaatcatacctgcagacagacacatactcagcctttgcctgtggctaatcctagaggatatttgagtcccattcraaagccccctcaatcatagtgttgaatctctctttgccatatgttattctggttctctattggggtgagtatattctcctgctttttctagaagtagttacctgtggagtcagagagaggggctggattcttgagatttgctatgccaagcatcaaaatatccatcatttacatcaggaaattaaaaagaaaataaatgtaaagtagaaaagcctttaattctgttaggctgaagtgacataagttcaacctgtacaagaagagcagtggacctgtacatcatattagacagtgttatgcatcccaaggtaatctcactggattagctgcactgcaactaacgatgaacctcccgctagacccagatgcctggaagctgatgtcttgtaccccaaacaaatgagcag

SEQ ID NO: 277489 - DNA, 619 bp, Homo sapiens
cattacttctaggtaaagtatttgcatttttacagagacattttagaaataatacccacaggagcgattctctaataacagtgtggtggtttaggggatatgcatacatttgggcagcagaattgcctgtcacttctcaatcatacctgcagacagacacatactcagcctttgcctgtggctaatcctagaggatatttgagtcccattcaaaagccccctcaatcatagtgttgaatctctctttgccatatgttattctggttctctattggggtgagtatattctcctgctttttctagargtagttacctgtggagtcagagagaggggctggattcttgagatttgctatgccaagcatcaaaatatccatcatttacatcaggaaattaaaaagaaaataaatgtaaagtagaaaagcctttaattctgttaggctgaagtgacataagttcaacctgtacaagaagagcagtggacctgtacatcatattagacagtgttatgcatcccaaggtaatctcactggattagctgcactgcaactaacgatgaacctcccgctagacccagatgcctggaagctgatgtcttgtaccccaaacaaatgagcag

SEQ ID NO: 277490 - DNA, 619 bp, Homo sapiens
cattacttctaggtaaagtatttgcatttttacagagacattttagaaataatacccacaggagcgattctctaataacagtgtggtggtttaggggatatgcatacatttgggcagcagaattgcctgtcacttctcaatcatacctgcagacagacacatactcagcctttgcctgtggctaatcctagaggatatttgagtcccattcaaaagccccctcaatcatagtgttgaatctctctttgccatatgttattctggttctctattggggtgagtatattctcctgctttttctagaagtagttacctgtggagtcagrgagaggggctggattcttgagatttgctatgccaagcatcaaaatatccatcatttacatcaggaaattaaaaagaaaataaatgtaaagtagaaaagcctttaattctgttaggctgaagtgacataagttcaacctgtacaagaagagcagtggacctgtacatcatattagacagtgttatgcatcccaaggtaatctcactggattagctgcactgcaactaacgatgaacctcccgctagacccagatgcctggaagctgatgtcttgtaccccaaacaaatgagcag

SEQ ID NO: 277491 - DNA, 619 bp, Homo sapiens
cattacttctaggtaaagtatttgcatttttacagagacattttagaaataatacccacaggagcgattctctaataacagtgtggtggtttaggggatatgcatacatttgggcagcagaattgcctgtcacttctcaatcatacctgcagacagacacatactcagcctttgcctgtggctaatcctagaggatatttgagtcccattcaaaagccccctcaatcatagtgttgaatctctctttgccatatgttattctggttctctattggggtgagtatattctcctgctttttctagaagtagttacctgtggagtcagagagaggggctggattcttgagatttgctatgccaagcatcaaaatatccatcatttacatcaggaaattaaaaagaaaataaatgtaaagtagaaaagcctttaattctgttaggctgaagtgacataagttcaacctgtacaagaagagcagtggacctgtacatcatattagacagtgttatgcatcccaaggtaatctcactggattagctgcactgcaactaacgatgaacctcccgctagacccagatgccyggaagctgatgtcttgtaccccaaacaaatgagcag

SEQ ID NO: 277492 - DNA, 579 bp, Homo sapiens
tgagtgcataatttaaaaatttaatgattttatgagatattaaaatatatcccaaataggtgcgcaatcaaattcagcactctgtaatctgtcgcgcacaaataattccacattttaaagaaatttaatttttttcaaatgtataattaaatgtagacatagaaaaccacatagggaaaattaagattggcaagcattgactcctttacctatatatttgaccaattttaatgatcacttttgcttttatttcctgtccaaaatattattgtagccaaacataaacttcataaaaagaacttcaatctttgycttcaatactaaggcctttttttccctttacctgatgatcttgcaactcatcaactgacaatctgtaaacacactttgattgaataacctaatgtacatacaatgcataataaatattattatatttcacttgctttgtagaaaaataggtattttcttaatgtagatcatgagttgatgggtgcagcaaaccaccatggcacataacaaacctgcacattttgcgcatgtacaccagaacttaaagtataattttaaaaaaatagg

SEQ ID NO: 277493 - DNA, 548 bp, Homo sapiens
tcataatcatgaggaccatgaaataagaccatactaaatagctagatgagtgcataatttaaaaatttaatgattttatgagatattaaaatatatcccaaataggtgcgcaatcaaattcagcactctgtaatctgtcgcgcacaaataattccacattttaaagaaatttaatttttttcaaatgtataattaaatgtagacatagaaaaccacatagggaaaattaagattggcaagcattgactcctttacctatatatttgaccaattttaatgatcacttttgcttttatttcctgtccaaaatattattgtagccaaacataaacttcataaaaagaacttcaatctttgccttcaatamtaaggcctttttttccctttacctgatgatcttgcaactcatcaactgacaatctgtaaacacactttgattgaataacctaatgtacatacaatgcataataaatattattatatttcacttgctttgtagaaaaataggtattttcttaatgtagatcatgagttgatgggtgcagcaa

SEQ ID NO: 277494 - DNA, 620 bp, Homo sapiens
ctctgtgcagtttacagattgaaaataagcataagaaagtgtggaaacctggagaagagacaccaacaaggataaaagagagatttccatttggtgactgaggactggtttatgtcacagatgtgttctatttggtctccaatgatgctttattgttgttgattttgaggatttatttgccaatatgttaaatagggaaatatttttagtactsttgaaattcagaagatccagcagcacagaatcagtatttccagggcatgagccaagtgcagttgaaggcatatactccttgacatagggcttagaatttcttattcgcccctagattacctccagattctgtactcattcaagtacactgcctgtcccttagaggcactgggattctgtctctcttggaaaataaactcaaaagctatgggaaaggaaaagaggagataggagtttaagggaaaagagtttctgagccaatgaatggaatgggatggccacactggatctctgagtgtggcaaacaaagacaggcgacaaagggaaaaataatggagccagaggaaactagcagaagagagcagacaaaaaccatacactgtcccagcaattgcaaataaaccagt

SEQ ID NO: 277495 - DNA, 393 bp, Homo sapiens
ctgtgatgtaagggaaaagtaaatcttactgtgttactagagttctaatttttgtgtattttggtaaataatgtgaattatcttgactagtacaacttcactgtcccaagaaggaagatcagctatacagtttactgctctcaaaatgttactggcattttcttactcttctatataatgaaacatagcctcataccaggatgtgtcttttcactkgtttttagtatacaaggcagggagcaaatttaatatttgcaaaaggcctagtgaattccagagggtatcactgggttccaaaaagaatgtcagacacataatagatgctcaatagatgtctgatgggatgatggatggatggagaggtgaaagaacatcacatcacaatagagaatt

SEQ ID NO: 277496 - DNA, 607 bp, Homo sapiens
agaaagtgggatggttaatttcatatatcaacatgattggaccattgggtgtccattggtaaaacagcattctgggtgtttctgtgaggatgtttttggatgagattaacatttaaatcaataggctgaataaagragattgccattcttaatgtgggtgagcctcacccaataggtttaaagcctgaatagatcaaaaggttgaccttgctgtgaataaggggaaattccttctgtataagtgctttgaatctggaagatcagttttttcctgcctccacgttcatgatgaaacattggctcttcccaggtctgaagcatgccagcctttggattaaaactcacaccatcagttttcctgatcctcaggccttcagacttgttctagatctacaccattggccctcctgttctccaacttgccaaatgtagatcttgggacttgtcagattccacaattttatgagccaaattcttgtaataaatttatctatctatctatctatctatctatctatctatctatctattatttctattggttcagtttatccaaagaatgctgaataatacagaaggtaatggggatgtttgagaatttgaagaa

SEQ ID NO: 277497 - DNA, 574 bp, Homo sapiens
tctattagagattggtggagggtattaattactaacaaagagactggagaagataatattaactttttacttcaaaggctaatgtttygtgattgaggaaaattaagcaatgtacatttaaacacaataaatccagtagttaaactaacacttttattttagctataccccttgttaaggaataaaaaataaagtccaagagggagaagcatttttagtgtagtagcccaaaagctgcctcaatttatctctttttatagaaataaacttaattatttacaattaaattcgaatttaaaaataattaaactcagcgttaataggattgtgttggttcattccatgacttgtatgagaccttttcagataactaatctaattcaattttgaaagcagccctgatagacacatattacaatctccattttacctctgagaaaacatgctaaaaatggttaaggagcatcttcaataacacacaacgtgtacattgcaaagctaacatatgatctcagatgtcacatcatgctacagctgtctcaagtactatattattgtaagaatagtttttgac

SEQ ID NO: 277498 - DNA, 592 bp, Homo sapiens
tcaaaacaagtgtcatttggcccaaaataactttggattctcttcatgaaacaattatttaattgactaaaatagattgaccaactgattttagatgtctcctgaggtttgcactgtttgtcttagtctgtggaagttgttaaagaagacaatttgtgtctgatggactaaaatctaacaggacaggaaccatcacatattgaaaatgtaaaccattaaagaagacaacaagtactttccatacattaggctgtaccagtctatgtttgattgctttaacaaaataagctgtggcaggaacttgattggattaaaacctctggtaaacaaccagctaaatctgagaccttggacataacacttcctcatcaccaaattctgggaaatgaactgaattagctytaagatatctattttcaattcctttattattttaattgtgcaagttcagaaaatcaatgtatgtcagaccaggtgttgaggcggagagaacacttaagtttggtccatctgagacagagtggaaacaagagagactggtatccacctacattaatatacttttctatgcatatcggctaacaaacagacc

SEQ ID NO: 277499 - DNA, 592 bp, Homo sapiens
tcaaaacaagtgtcatttggcccaaaataactttggattctcttcatgaaacaattatttaattgactaaaatagattgaccaactgattttagatgtctcctgaggtttgcactgtttgtcttagtctgtggaagttgttaaagaagacaatttgtgtctgatggactaaaatctaacaggacaggaaccatcacatattgaaaatgtaaaccattaaagaagacaacaagtactttccatacattaggctgtaccagtctatgtttgattgctttaacaaaataagctgtggcaggaacttgattggattaaaacctctggtaaacaaccagctaaatctgagaccttggacataacacttcctcatcaccaaattctgggaaatgaactgaattagctttaagatatctattttcaattcctttattattttaattgtgcaagttcagaaaatcaatgtatgtcagaccaggtgttgaggcggagagaacacttaagtttggtccrtctgagacagagtggaaacaagagagactggtatccacctacattaatatacttttctatgcatatcggctaacaaacagacc

SEQ ID NO: 277500 - DNA, 594 bp, Homo sapiens
tttattattttaattgtgcaagttcagaaaatcaatgtatgtcagaccaggtgttgaggcggagagaacacttaagtttggtccatctgagacagagtggaaacaagagagactggtatccacctacattaatatacttttctatgcatatcsgctaacaaacagaccttgcaccactttccccactggtgccaaacctgctaagaccttgcaagctatttgaaaaagttaagatagcaacattctggtataaatcttacgcaaagcagttgactctaccactcttatgcgcacaagaccaggaaagggccaactgtaaccattgccttattacaatacttaaggctccacccaagaagaagcttatccactattttctgatcatgcaataggtgtgttaacatgatttcttattgtgcctgcacatccagcactcccaccacacatgtaatgatgctcacttacctcaggcattattcctgtcaccctcttcaaaacactgcaatgcactcttcttggggaggcagccagacaacacttactgctttactgtctctcttgtgcctaaccttttcaatcataagtcttactaaa

SEQ ID NO: 277501 - DNA, 445 bp, Homo sapiens
ggtccaggtggtacctcacaaacaaactacactctggtatacaccatctttgaacttcacaattccctgtgcccaacaggtgattttaaaataaaggkttaaatgaataatttttgcaaaactgtattttgcttttggagaattgtggaaataatccaaatcaagaagtagctctggtttatctttgaatcatagaaatttaaacctagaagggaatttcatgaaatttgtattattaacctatttctaagataaggacattgagacttaaacaaataaatgtcaccaggtttatcttttgcttgtcttctttccaaaccatacacatgtacaacatgatatttcttagaaagtttatggcaaccctccttgttcccataaactgaaatgaacaaatcccaatatgaaattgactaaagttggtaccagagtctttttttaaaat

SEQ ID NO: 277502 - DNA, 445 bp, Homo sapiens
ggtccaggtggtacctcacaaacaaactacactctggtatacaccatctttgaacttcacaattccctgtgcccaacaggtgattttaaaataaagggttaaatgaataatttttgcaaaactgtattttgcttttggagaattgtggaaataatycaaatcaagaagtagctctggtttatctttgaatcatagaaatttaaacctagaagggaatttcatgaaatttgtattattaacctatttctaagataaggacattgagacttaaacaaataaatgtcaccaggtttatcttttgcttgtcttctttccaaaccatacacatgtacaacatgatatttcttagaaagtttatggcaaccctccttgttcccataaactgaaatgaacaaatcccaatatgaaattgactaaagttggtaccagagtctttttttaaaat

SEQ ID NO: 277503 - DNA, 445 bp, Homo sapiens
ggtccaggtggtacctcacaaacaaactacactctggtatacaccatctttgaacttcacaattccctgtgcccaacaggtgattttaaaataaagggttaaatgaataatttttgcaaaactgtattttgcttttggagaattgtggaaataatccaaatcaagaagtagctctggtttatctttgaatcatagaaatttaaacctagaagggaatttcatgaaatttgtattattaacctatttctaagataaggacattgagacttaaacaaataaatgtcaccrggtttatcttttgcttgtcttctttccaaaccatacacatgtacaacatgatatttcttagaaagtttatggcaaccctccttgttcccataaactgaaatgaacaaatcccaatatgaaattgactaaagttggtaccagagtctttttttaaaat

SEQ ID NO: 277504 - DNA, 507 bp, Homo sapiens
ggctcacctccaccctaacactgcatagttctttttctggtggtaccacatcttaggttaaatgaagagaggagagtttatcctttccttatttcctagctataatcacaatctttttgctgtcaaagcatcctacataaaatgtccttgctgtccagcaagtcatgtccagcaagtcatgtctagcaagtcatgtccttgccgtttaaacccagcagctgaatagcaatgcccagcctctcttttcaaatagattgtcacctgtccctgccatctgtgaggacttataggactgccctgcaatactccctgaaygcacgcctgccactagttctcagtcagcctcttccttgttcatacatttacacagactctttattgttttttactccaatccaactttcttcagaattcttcaactcatcatcatcaggtctcagtatttccgaactccaattatggatagaaataaaactatttttcacaaacaactgtctcacctacaac

SEQ ID NO: 277505 - DNA, 592 bp, Homo sapiens
ttcttatacatcactcaccttttgagataccagtctcaactgaatcaatttttaatttttgtttttccacttcttattcttctatcaccccaatcactaaagccagcagcaycgaaacatatctgtgtgggcttgcaaatgatggggtacagggagtttatgatattttcacagagatagcaattcttgagtggccaagagaagtcatgaatacatactaagtatttttagacaaggcatatataactaatcatgttgtctaagatatggcccttagccttgaaaggaaagaaactttgtatagtattctgggactgaagagatacaattgtgcatattcaaactctctaatcttctgtcaatataactgacacttagtaaaataactgccaaagagcctggatgaatatgtgccctgaccaccagtctctgtagtactgctgaatcggaagtcaaattataatcagaaatttaattagcaaacatggaaacagaaaatgttaatattccttacatgaggaagagttaatcacacctgagcacaagggcaccctctactctggggtggatttagatgagcatttctagtcga

SEQ ID NO: 277506 - DNA, 515 bp, Homo sapiens
cttctatcaccccaatcactaaagccagcagcaccgaaacatatctgtgtgggcttgcaaatgatggggtacagggagtttatgatattttcacagagatagcaattcttgagtggccaagagaagtcatgaatacatactaagtatttttagacaagrcatatataactaatcatgttgtctaagatatggcccttagccttgaaaggaaagaaactttgtatagtattctgggactgaagagatacaattgtgcatattcaaactctctaatcttctgtcaatataactgacacttagtaaaataactgccaaagagcctggatgaatatgtgccctgaccaccagtctctgtagtactgctgaatcggaagtcaaattataatcagaaatttaattagcaaacatggaaacagaaaatgttaatattccttacatgaggaagagttaatcacacctgagcacaagggcaccctctactctggggtggatttagatgagcatttctagtcgac

SEQ ID NO: 277507 - DNA, 446 bp, Homo sapiens
ttatttttctccccatacattgtcctttggcatgacaggtgatatcatgttaaacattgtcagaggaaatgacttaagcaagcctctgtttatttagaaaaaagtcccacaaatttatgaaattataataaatgtaaaatagtattatgaataaatcatactgtgacattatacttgggggcttcatcattcaggaaaggcatatgctgtccaagaaatatagcctccagagtacatcgctttaagatggagtatttagtgagcacattagagaagcttattctcttatttatgatcaggttggttttaattgaaagcaggctggaaggcatccaggcaaggcagctgtgattacaggatttctcagaactcggyaatactgctctttttgagaaatctgtacaaactcctaagatataaggaatatctaatcagatgtcatgaaa

SEQ ID NO: 277508 - DNA, 466 bp, Homo sapiens
agaaaaagatcatgtgatttgcagaaatatggattttgctggaggccattatccttagcaaactaatgcaggaacagaaaatcaaataccacatggctctcccttataaatgggagctaaatgatgaaaatacattgacacatacagggcatcaacagacactggggcctatcagaggatggctgtggaaagagtaagaggattagggaaaataactaatgggtactaagcttaatatgtggatgataaaataatctgyacaacaaactcccatgacacaagttttcctatatgacaaaccagcacatatacccctgaacttaaaaaatatattaaataagaggtcacaactgaggtcttccctagaccaactgatcccttatcaatctatagccacatgagtagccagacacatgagatctcaagattcatctatctgaagaaaagcccaacttgccaaccaaca

SEQ ID NO: 277509 - DNA, 594 bp, Homo sapiens
tgtttttcagggtacatgacttgtcctccaacaaacacatagagttagaaagcattttttgaatctaataaagtaaaaatatttataacaaaccctaagcatgtcattttctgtgtcctccatatttagcaatctttaggaactgagatataaagaagactaatatagattctccacagacaaaattaccaagtccttgcttcctccaagccacatagccacatagttagccatttctgtggaggtagtaatcagtgaaaactaatgcatatcccttgactgttccctcaaaacccacgtatttgtgattatactgagacaggcattgtgctgggatatggatataaatcaatgaacaaagtaggcataycctttgtctttgcagctcatacaacttatcgggctttcgtatatcaaggggaataaattcaaacagttgcacgtaaaagaaagaaaaaacattcgattaatggaatttttctcagttcatcactttaacaattgctgaacttttatgatctagagacctgtgatgggtaccgggaatgccttagcaaatatacaccatccttacccatgtggagtttgtactct

SEQ ID NO: 277510 - DNA, 631 bp, Homo sapiens
cacatagagttagaaagcattttttgaatctaataaagtaaaaatatttataacaaaccctaagcatgtcattttctgtgtcctccatatttagcaatctttaggaactgagatataaagaagactaatatagattctccacagacaaaattaccaagtccttgcttcctccaagccacatagccacatagttagccatttctgtggaggtagtaatcagtgaaaactaatgcatatcccttgactgttccctcaaaacccacgtatttgtgattatactgagacaggcattgtgctgggatatggatataaatcaatgaacaaagtaggcatatcctttgtctttgcagctcatacaacttatcgggctttcgtatatcaaggggaataaattcaaacagttgcacgtaaaagaaagaaaaaacattcgattaatggaatttttctcagttcatcactttaacaattgctgaacttttatgatctagagacctgtgatgggtaccgggaatgccttagcaaatatacaccatccttacccatgtggagtttgtactctgtagacaatgtcagyattctccttcctgatatagactggagctaagattctacatataggtgtgcattttaa

SEQ ID NO: 277511 - DNA, 590 bp, Homo sapiens
tcaagcatgcaatagcattatgtctgtaaaagcaatgtacatgccttaattaaaaatcactattgctaaaagttgctcaccatcatctgagccttccatgcttctagagagtcctggctcagtgttgacagtygctgattcatcagggtagtagttgctggaggttggatggctgtgacaatttcttaatataagacaatgaaatttgtcacatgtactgaatcttcctttcatgatagatttctctgtaacacatgatgctgcttgatagcatttacccacagtagaactctttcaaatgtggagtctatcctttcaaaccatgcagctgttttatgaaaaagtttatttatttaatattctaaatcatttgctgtcattttaacaatgtccacagccttttcaccaggagatttcatcacaaaagatcactatcacttttcttgctcatccataagaagcaactcctcttccattcatataatatcataagattgcagcaattcagtcacaccttcaggctccacttctaattctacctctcttgctattttctctacatctgcagttgcttactccatggaagtctt

SEQ ID NO: 277512 - DNA, 590 bp, Homo sapiens
tcaagcatgcaatagcattatgtctgtaaaagcaatgtacatgccttaattaaaaatcactattgctaaaagttgctcaccatcatctgagccttccatgcttctagagagtcctggctcagtgttgacagtcgctgattcatcagggtagtagttgctggaggttggatggctgtgrcaatttcttaatataagacaatgaaatttgtcacatgtactgaatcttcctttcatgatagatttctctgtaacacatgatgctgcttgatagcatttacccacagtagaactctttcaaatgtggagtctatcctttcaaaccatgcagctgttttatgaaaaagtttatttatttaatattctaaatcatttgctgtcattttaacaatgtccacagccttttcaccaggagatttcatcacaaaagatcactatcacttttcttgctcatccataagaagcaactcctcttccattcatataatatcataagattgcagcaattcagtcacaccttcaggctccacttctaattctacctctcttgctattttctctacatctgcagttgcttactccatggaagtctt

SEQ ID NO: 277513 - DNA, 559 bp, Homo sapiens
gatctggtacaatccagggaaaagatttcaaaagctgtaatgtcagctaaaccaaattgatgtgcttcagactaccacagttgctataggttgagttgaacataatgtccaggyagttgaaatcatgtccttgaattctgttcatttaagctgataagaaatatttgttagtatgtcttgataatgggagacacagatctcaattttgtcacagtactatatctgagccaagaaaagcagataaaggtattaaatcattattctgaataataaatctctatgcctacattatcaaagtagcttaggaggaaactatgtaagaaacatttgccttaacttggtatcagctctattttttttattccattctgattgaacccatacaaaacattaatagtccttttatttaaattaatgaaaatagtgcattatataacatcatttcctatgcattttctattacttacttacttgcacccacgttcttaagtataagacctaagtagtttttacagtttcattatatacagtcctattaggaccaaagtaatcagatata

SEQ ID NO: 277514 - DNA, 533 bp, Homo sapiens
gtcatgtccttgtgcagtggcctttgatgtgtgttcacgctcttcccccttcactcactcgcctgcttcccatgctcccttgtaccccctcgccacatccctgtcttggggcccagctgcagcctgctgcctgcycttcatggctctgcacatggccctttgcttgagggctccccactccctgcccaccaatacccaggtgaggaacagaccctctggcctctcaccccacttcagtgctctcttccccaacttctctcgggctctttgctcatgaggtgagagctggtgtgagggttgtgtcagcagctgtagccagagagaggtgttgactctgagagaccttgcactccatactgaaaggaggtggggtcacagtgaatttcacatcccctctcaaccaggagtggagggctaggtcccttccccatggggagtacacttgggtgttctaggagggatgcagtctatccatgcacttgggtggaggggagtctctgtgcctgggaattaggacccctgctccaaccatc

SEQ ID NO: 277515 - DNA, 506 bp, Homo sapiens
ccccacctctcccagcctgtatacccagattactttggtgaactgagagctggagtactgttcattcatttattcattcacccactcattcagcagacatatactgagtgctactttatgccagaccctgggctggcagctgtttggaggcaaagatgtatgaggccatctcaggagagactacttgttaggattcttgagttttgaccaacagaaatgaacttggaccaacttaagcaaggaaaaagcgttcatgggaaggatgctgggatagctcacaaaaccaaaagaatagctgaacaattaattggccytgggaagggtgggagctggggcaactacgaggcttgcctcccaggagctgctgcggttggcagatcaacaccaacttgccattggttctagtgggtccccttccactcaagattcaaattccaagtgaaagaacctggcctggagctcagggcttcatagagtgggaggggggcagtcttccaaaagatgcg

SEQ ID NO: 277516 - DNA, 536 bp, Homo sapiens
attatttttcatatatgtaaccataataaaaataatttctaaaaagaagtgcttaraaaatatttattgctttttttctagattaataatgaatataagaaaacgtttgtgaaaattaactgcaagtgattgggaagcttgtgtgtattgggctttggtttgtttcaaagatcatccaaatcagaatctgagcttattaaaatgctgtttcctggacagacctcagcctgcagaagcagaatctccgtggtgggatccagagcttgtatcttggccaagccctcccagaagtttctaacatacactgaaggttctcctgcttcaagagccaagatcctcaggcacaaaatcaggcaacaggagtcctgggctctgcccttgcttgtggagttctggaaacgaatgcatttggagtaggtgatgtttaatgatcctttctgttctcaattcctgtaatacaaataaacaataaaatacttacatctttattatttacattatagtttaaagttgtatatattgatgcaaacaattag

SEQ ID NO: 277517 - DNA, 398 bp, Homo sapiens
ttggctcttgtcacccaggctggagtgcaatgtcacagtgtcggctcactgcaacctctgcctcctgggctccagtgattctcctgcctcagcctcctgagtagctgggattacaggtacctgccaccacacccagctaatttttgtatttttagtataaaaggggtttcactatgttgggcaggctagtctcaaactcctgacctcaggtgatctgcccgcctcagcctcccaaagtgctgggattacaygcatgagcccctgcacctggccttttgtcatcttttgtagcagtttctaatttaaagtctgttttctctgatattaatatagtcacttctgcttctgttttgttacttttccaatatctgtttccatccttttactttcagctgatg

SEQ ID NO: 277518 - DNA, 553 bp, Homo sapiens
tcctgaattggaaagttttgccatgtcatacacaaccaaagagaaaaatgaccacttatattagttaggataaagcaacaaactgcagtaacaatgctacagttaaaaacaatctgacattttcaattcattagtgcaacactagactattttcttgctcacctatgcatccagtgtgggtcgtggctgagctctgctcatggtagtcactcgggatcccaggctggtaggggctccatcgtggggatgcgtgcttttgtgatcactccatcagtggaatggaaatatggtggatgcacgctaggtcttaattcttctccttggaagtgacacatttcacttttgcttacattttcttggccacatcaataaatattgccacctaatattgagggggtagagaattacattccttatatgcaaggaargggatattatgagaagatttggtacagctgtaatgacccccctgtaaagtgacattgactatatggaccagatcacagttgatgctgctggtttcagggaaatggcagtgcctagctgggactaa

SEQ ID NO: 277519 - DNA, 1109 bp, Homo sapiens
ttttggggaatattttcaatttacaatccattttcacctgcgagcctctagaatgattgctggggaatgggattttttagatggtttaggccatttccgactattccatggcatggcccagaattttgtgaattacaaagaagttaagatcagcattgtttttgatgattgtctggttgaaaatgtatccatcaatgaagaatcatgcccactgtgatttatttaaaaaattaccgcttttatgttgtcctcttccttaagaggtctattacaattacataatactcyactcacacaaaggatgtaattttcattttgtctgtattattgtccttcatctaaaacagaaagtttagttggagaactctgggaatcgttcattttagtttttgtacaatgtcagtgtgggtctgagtgtggccttggcacactgcacagaggtgagctgacagagagctcttgctaattgaccacagacttgttagaggccctcagaccagttagttaccctcccagcctcagttttctcaatttgaaatggacatatatgttgtwttttggggaatattttcaatttacaatccattttcacctgcgagcctctagaatgattgctggggaatgggattttttagatggtttaggccatttccgactattccatggcatggcccagaattttgtgaattacaaagaagttaagatcagcattgtttttgatgattgtctggttgaaaatgtatccatcaatgaagaatcatgcccactgtgatttatttaaaaaattaccgcttttatgttgtcctcttccttaagaggtctattacaattacataatactctactcacacaaaggatgtaattttcattttgtctgtattwttgtccttcatctaaaacagaaagtttagttggagaactctgggaatcgttcattttagtttttgtacaatgtcagtgtgggtctgagtgtggccttggcacactgcacagaggtgagctgacagagagctcttgctaattgaccacagacttgttagaggccctcagaccagttagttaccctcccagcctcagttttctcaatttgaaatggacatatatgttgt

SEQ ID NO: 277520 - DNA, 609 bp, Homo sapiens
ggtcaaaataaagtcagagacagaagaagttctgaactaaaagcaacttttaaaagtctgtatttttcataagtctaactggtaaaagctacttttcttactttccttatggggccaacgaagattatgaaatgagtgtacatgaaaacacgatcactcttctctgtcaatgttgtcattgttatgcatactataactactacaaattagaatacaattataaaggctttcaaacgacctttcctggaggccttgggaggtggcttatttcagtgcacctggaggtgggaaaacggtatgatttaatagaacatgtcatgcgatagtgcaaaataattttttttcatcttttagtagaratttggcatctaacataagctaataaagctaaagtcatagactctacactttacatatataggattgtacccaaagctaaagtgatacatgtaaatgattgtgatgtctttaggaaactctaaaaaaaatgagttaaatttcaggcacataaagttctgactatgaaaaactccctttctatatttttgtaaagataatgtagtaaagaaaaagtaatttcctttccttaccatcataaggttcatggct

SEQ ID NO: 277521 - DNA, 394 bp, Homo sapiens
tgcatgatatcagcaagtacgtaatgaattgattctacaaagattcatattcatactctgctggacactgaatatctaatgggggataggacagggcttgctctctctaagaaggtgcattcttagagatacataagtaaacagtcaattttataacaatgtcaattacctgcctccaccctacctaccctgcccccatcatctctggtgatgacacaccctgggccacaggtggactcctttagctggagtgaggttgaaaaagactctggtggtgcatgtgggcamgggatgagaaaaaagtaaaggatggagataaggggaggggactgaaagagactttgaaatatctaacttagaatatttcaacagaaaagctaagttcatcaccaaa

SEQ ID NO: 277522 - DNA, 394 bp, Homo sapiens
tgcatgatatcagcaagtacgtaatgaattgattctacaaagattcatattcatactctgctggacactgaatatctaatgggggataggacagggcttgctctctctaagaaggtgcattcttagagatacataagtaaacagtcaattttataacaatgtcaattacctgcctccaccctacctaccctgcccccatcatctctggtgatgacacaccctgggccacaggtggactcctttagctggagtgaggttgaaaaagactctggtggtgcatgtgggcacgggatgagaaaaaagtaaaggatggagataaggggaggggactgaragagactttgaaatatctaacttagaatatttcaacagaaaagctaagttcatcaccaaa

SEQ ID NO: 277523 - DNA, 573 bp, Homo sapiens
caataagataattttattaatgaagtcctaatactatcttttcagaaattaatatttcatagaataacatgtattaaaatattggttgtatatcacattgagaacaaaattattttggctagctttagaataygtgaatgctgtctttgctattcattctattatggagtatttttaatgttgatgcagtttaaaagttgcctatttcccatatttgattgcaaaataaaattgttaagtgcatttttaaatgtaatgttcttatttttacacaatctatggttaaggtaaaatgaatgaaggaatgaatgaggaatgaatgcttagttctacccctccagaagcaatgatgatgaggaagaaggggaggaggagaaacaggaggaagaagagaaggaagaggagaaagattatggaatctttataatctgagtgatatatattaatcatgaatatattaaaaggtatgttttaattttggaaaatattttgtataaagttgtgaatattattttttacttaaccttatattgtaagcttcaagaactcaaaaataaggattcatataaataa

SEQ ID NO: 277524 - DNA, 571 bp, Homo sapiens
aaattttggacagcctcacatgaagtaaaaaattgacagtgtccaataacttttcctagttaataaaatgttaaggcttacagaaaaagtattcactttcataatgaaaatatatgaaattattttgactaaactatctraaatatcaagacttaagagaacaatgtaaataactctctattttttcctgcaacagagagttattaaatgtttttcaccattttgatacttattattctacaaccatgaaagccaaatcaggctatttcaaacttacttatatgaagcatttttgttagtagaaagcttcttatccctctgcttgggaatataaataatgtagagattttttggttgttgttctcaaatgccaacttaaaaagctacatatcctcttttgctctcaagtgttttatatcatatattaaagaattcttctcttgaagacattataaaagtatttgttatagtataaatccagttcagaaaaaatatacttgagcaacttctaagaagaaaatacgtgatttagacattgagtctgaaatattactctgacaatatttgtatt

SEQ ID NO: 277525 - DNA, 572 bp, Homo sapiens
tgtcttttccccagtgtatgttcttgtcacctctgtcaaaaatgagttttctgtatgtgtgtggatttgtttctgagttctctattctgttccattggtctatgtgtccgtttttatgccagtgtcatgctggctctgtagcataacttgaagtcaggtaatgtgattcctctggttttgttcttttagcttaggatagctttggctattctggtctttgtagtcccatataaatttaaggattgtttttactatttccgtgaagaatgctattggcattttgatagggattgtatcaaatctgtagattgctttgagtagtatgaacattttaactatattgattattccaatccatgtacatggaatattctcccgtttttygggggtcctcttcaatttcctttatcaatgtttttatagttttcattacagagatctttcacttctttgattaattccaaggtatttaattttatgtgtagcttttgtaaatgggattactttttaaatttctctttcacattgttcactgctggcatatagaaatgctactgatttttgtatgttaa

SEQ ID NO: 277526 - DNA, 597 bp, Homo sapiens
ataaacacaaattggctgcttttttctcttttccctttctcttaggaatttctggcaattctgaactaagagaaacgggcaatgttctccactgtcttttaaaatatccaaaatgaaaaaacgttattgtataggtagatgtaaaaattaatgaagcacataaaggaacagatagtgttagagcacttatttcagtatacatgactactattgttaaaaacattgcagacaagagttttgatttattaattctaaaaaagatttrcagtgacttcttgtccaattttctacaaaaatataattttttattgattttaagttaaaatttgtcatagttttggccagaattagcaacaaaacgtatagttttctgctcatttcgatataccatagcatgctaaatgaatattcacatttttataaatttatgttttttagttttaaataattttacttttcaattatccctatgatttattttttcctaaatgacttcatttatatatttaactgcattaggagttggttttgtaattatcatttataacattacctgcaaccctatcaatgtcagtggaggcaggcctgtttttttgg

SEQ ID NO: 277527 - DNA, 597 bp, Homo sapiens
ataaacacaaattggctgcttttttctcttttccctttctcttaggaatttctggcaattctgaactaagagaaacgggcaatgttctccactgtcttttaaaatatccaaaatgaaaaaacgttattgtataggtagatgtaaaaattaatgaagcacataaaggaacagatagtgttagagcacttatttcagtatacatgactactattgttaaaaacattgcagacaagagttttgatttattaattctaaaaaagatttgcagtgacttcttgtccaattttctacaaaaatataattttttattgattttaagttaaaatttgtcatagttttggccagaattagcaacaaaacrtatagttttctgctcatttcgatataccatagcatgctaaatgaatattcacatttttataaatttatgttttttagttttaaataattttacttttcaattatccctatgatttattttttcctaaatgacttcatttatatatttaactgcattaggagttggttttgtaattatcatttataacattacctgcaaccctatcaatgtcagtggaggcaggcctgtttttttgg

SEQ ID NO: 277528 - DNA, 597 bp, Homo sapiens
ataaacacaaattggctgcttttttctcttttccctttctcttaggaatttctggcaattctgaactaagagaaacgggcaatgttctccactgtcttttaaaatatccaaaatgaaaaaacgttattgtataggtagatgtaaaaattaatgaagcacataaaggaacagatagtgttagagcacttatttcagtatacatgactactattgttaaaaacattgcagacaagagttttgatttattaattctaaaaaagatttgcagtgacttcttgtccaattttctacaaaaatataattttttattgattttaagttaaaatttgtcatagttttggccagaattagcaacaaaacgtatagttttctgctcatttcgatataccatagcatgctaaatgaatattcacatttttataaatttatgttttttagttttaaataattttacttttcaattatccctatgayttattttttcctaaatgacttcatttatatatttaactgcattaggagttggttttgtaattatcatttataacattacctgcaaccctatcaatgtcagtggaggcaggcctgtttttttgg

SEQ ID NO: 277529 - DNA, 552 bp, Homo sapiens
tgccagccaaaagagggctatggcagcaaggagatggttaggggattgtacaaattatttcaaccatccttttctctatgttctctgaaatggctattaatagtattggatttcctggattaattatcatgattgatttgtatttcaaagtgtgaattttattgtatttccttaattttgtaatttagctactcctgatattttcttttagcaatcaaagttttaattccaaataaccyatacttacacacaaattttcctttctctttttaaataacagtctatcattcattacttaatctgtttgatctgcagatttgaattcttatccgcaatctcagatgcacagcatgcgacaaccaagcgatagcgtctaatcgaacatagcctaagagacttcttccattctgcctcattcgtaagctgctattcattgtcctaacactaattcccatccatcataagagaaactgatttctctttgtttcctttgggaaccaaagcctctgatacccagttttatcactcacgagttttaccttaaacaccaga

SEQ ID NO: 277530 - DNA, 552 bp, Homo sapiens
tgccagccaaaagagggctatggcagcaaggagatggttaggggattgtacaaattatttcaaccatccttttctctatgttctctgaaatggctattaatagtattggatttcctggattaattatcatgattgatttgtatttcaaagtgtgaattttattgtatttccttaattttgtaatttagctactcctgatattttcttttagcaatcaaagttttaattccaaataacccatacttacacacaaattttcctttctctttttaaataacagtctatcattcattacttaatctgtttgatctgcagatttgaattcttatcygcaatctcagatgcacagcatgcgacaaccaagcgatagcgtctaatcgaacatagcctaagagacttcttccattctgcctcattcgtaagctgctattcattgtcctaacactaattcccatccatcataagagaaactgatttctctttgtttcctttgggaaccaaagcctctgatacccagttttatcactcacgagttttaccttaaacaccaga

SEQ ID NO: 277531 - DNA, 605 bp, Homo sapiens
cagctactcaggaggctgaggccagaggattgcttgagcccacgagttcgagactagcctgggcaacatagtgagacctcatttcaatttacaaaaaaaaaaaaaaggcagagaagaggcaaagaatacaaaccaattctaatatgattacaaccaaatttatgttatttcagattgcaattttccttgatattctacattttaaataatatttatttacttggaatggttttattaagattgttggcaggattctttttccaaataaytttttttgaaatgagcttaatacatttttaaacatacttttcactcatttagcaaaaagtactgagcaccaacattgagttatgaaatgtcatagctttgcaggcttggcaatgaacaaagtcccttttctcgtcaagctcacattccagtggacatagatttaggcatattcattactgtacttttgttaaatgtctgaccacttttatattttacaagccctagctcctgcacaatgactgacgttaaagttctgacaaactcacttatgggacccctctcaataaatgtttctgctgagtggtctccttaccattataaatgttgaagttggg

SEQ ID NO: 277532 - DNA, 586 bp, Homo sapiens
aaaccagatgctgtctttgctgcctctgctcctcagcatcaagaagaattccattgttgactctgagtctcctggttattggtttaatttcaaggtctgggatgaaggactctgactggcaaaaatctagatgaygtgcctgaatctttattgcaagagcatctgggaatgtcactgttgacactttgaagttctactgtggggagtgaatttctcaatcctaagaaatgcttctaaagccgggtgaccaataagtaacagatgtctactatagttgtaaaataagaagtaaaattctgtcacttttatggaatgaaaataatcttgaagaaattattaatgaacccatattagagaaaatatttaatcatattcatattgattaacagcaccctgaattaagtgattctacatggccgtaaaatctcaaatgatttattagcagtcagtgctcaataggatgcagagaagtaatccatatcttttggcgatcacagggaatacaggtcctacattgtatcaaataatatcacactaaatttctacaattcatatggaaaataattactatatttagagaaataga

SEQ ID NO: 277533 - DNA, 343 bp, Homo sapiens
atgatcacgaggcttgattttaatatatttacatctcagaaatatttttaaagaatatttaaaagattatattattatattccataatctatgctttgctcagtgaattgcccattagaagttatttaaatctgtttcaatgtcaagttcttataatagttcattttcattcaactcttgattaactctgaatggattattcacttggttatttgtaaaaagtcaggcaccagaaatatttaatgccaacattgtttacattgtccttcctagatactctgggtttgacatctttggmcatagtagtcattatctcaatgtgggagattacaccagaaaaatc

SEQ ID NO: 277534 - DNA, 580 bp, Homo sapiens
cttccatttccctagtaaaaatttaaccctgtacagctaaaactaaytatgcactaggcttttccttgagctaagcaatatgaagtactaactcaggccccagagtactatatcatgcaatgaaacactcactttgcttaatgccctagtgaattgaagaattaatacatttcttaagtgccaaatataatcccatgcattaggtcatgttttgggagaatgtagttcaatttgaaaaaaacaacttggtattagcacataaaataagaagtttatgaaaaatagaaataaaatatatccctaagcaaaaaatttatttttttccaagagatgtttgttgaataatagtgacaatttatcaattatagtatgctctagggctagtttcacatttactgttaagaaaagttgtggtctcttccaagatggctgaataggaacagctgcggtctgccgctcccagtgagatggatacggaagatgggtgatttctgcatttccaactgaggtacctggttcatctcactgggactggttggacaatgggtgcagcccatgaagggcgagccaaagcagggtg

SEQ ID NO: 277535 - DNA, 580 bp, Homo sapiens
cttccatttccctagtaaaaatttaaccctgtacagctaaaactaattatgcactaggcttttccttgagctamgcaatatgaagtactaactcaggccccagagtactatatcatgcaatgaaacactcactttgcttaatgccctagtgaattgaagaattaatacatttcttaagtgccaaatataatcccatgcattaggtcatgttttgggagaatgtagttcaatttgaaaaaaacaacttggtattagcacataaaataagaagtttatgaaaaatagaaataaaatatatccctaagcaaaaaatttatttttttccaagagatgtttgttgaataatagtgacaatttatcaattatagtatgctctagggctagtttcacatttactgttaagaaaagttgtggtctcttccaagatggctgaataggaacagctgcggtctgccgctcccagtgagatggatacggaagatgggtgatttctgcatttccaactgaggtacctggttcatctcactgggactggttggacaatgggtgcagcccatgaagggcgagccaaagcagggtg

SEQ ID NO: 277536 - DNA, 975 bp, Homo sapiens
attatgtttctgaatcaatgtctgaattctgctcaaaataacaagatacaacttacaacattaaagattttcaaaccagtagggtctgagatttaaaaaaatagaaagcatatattagtttatttatttttttattttatttctttaatttttgttatagcaaactaccacaaatatcattgcttagaacaacacaagttgattatcttgtagttttatagttcaaagtctgacacaggtctcactgtgctaaactcaagatgtccacagggctgccttctttctagtctctaaaggataatacagttccttatcttttgtagcttctaaagcccrccctcactcattttttggctcttaggcctcttcttccatcgtaaaagccacaaacttcwcttccatttccctagtaaaaatttaaccctgtacagctaaaactaattatgcactaggcttttccttgagctaagcaatatgaagtactaactcaggccccagagtactatatcatgcaatgaaacactcactttgcttaatgccctagtgaattgaagaattaatacatttcttaagtgccaaatataatcccatgcattaggtcawgttttgggagaatgtagttcaatttgaaaaaaacaacttggtattagcacataaaataagaagtttatgaaaaatagaaataaaatatatccctaagcaaaaaatttatttttttccaagagatgtttgttgaataatagtgacaatttatcaattatagtatgctctagggctagtttcacatttactgttaagaaaagttgtggtctcttccaagatggctgaataggaacagctgcggtctgccgctcccagtgagatggatacggaagatgggtgatttctgcatttccaactgaggtacctggttcatctcactgggactggttggacaatgggtgcagcccatgaagggcgagccaaagcagggtg

SEQ ID NO: 277537 - DNA, 580 bp, Homo sapiens
cttccatttccctagtaaaaatttaaccctgtacagctaaaactaattatgcactaggcttttccttgagctaagcaatatgaagtactaactcaggccccagagtactatatcatgcaatgaaacactcactttgcttaatgccctagtgaattgaagaattaatacatttcttaagtgccaaatataatcccatgcattaggtcatgttttgggagaatgtagttcaatttgaaaaaaacaacttggtattagcacataaaataagaagtttatgaaaaatagaaataaaatatatccctaagcaaaaaatttatttttttccaagagatgtttgttgaataatagtgacaatttatcaattatagtatgctctagggctagtttcacatttactgttaagaaaagttgtggtctcttccaagatggctgaataggaacagctgcggtctgccgctcccagtgagatggatacrgaagatgggtgatttctgcatttccaactgaggtacctggttcatctcactgggactggttggacaatgggtgcagcccatgaagggcgagccaaagcagggtg

SEQ ID NO: 277538 - DNA, 572 bp, Homo sapiens
cctttgttgagtcttgagtaggtaaacaaagtggttgggaagctcaaactgggtggagtccaccgcagctcagcaaggcctactgcctctctagactccacctctgtgggcagggcatagctgaacaaaaggcagcagacaatttctccgcacttaaaacgtccctgtctgacagctctgaagagagtagkggttctcccagtatggcgttcgagctctgagaatggacaggctgcctcctgaagtgggtccctgacccccatgtagcttgactgggaaacccctcccagtaggggctgacagacacctcatacaggtgggtgcccctctgggacgaaccttcctgaggaaggatcaggcagcaatattttgctgttctgcagtatttgctgttctgcagcctccgctggtgatacccaggcaaacagggtctggagtggaactccagcaaactccaacggacctgcagctgagcgacctgactgttagaaggaaatctaacaaacagaaaggaatagcatcaacatcaacaaaaaagacatacacaccaaaaccccatctgtaggtcacca

SEQ ID NO: 277539 - DNA, 587 bp, Homo sapiens
aattttgattacttggaagatcatgtaaagattcttttactaatcaatttgatattacccagagaaacaggaagcgtcaaggcagtaaacagccagggtctgtaaagaataaattaggcccaaataactttattctctttgtgatagaatagcaagcttctagataataataatacaaaaatcagtggcaatattttgaatttcacaacagatctactctctatccagcggggcattctattataattaagactcakaaatgaacctgtggaatacaaatgccacattccatgggccccagtctagtattattgctatcacgaagaataaaattaaatcacataaaatctatgatttcatacttaaatgtgattaaaggaactgattaccttacagatgattagtgggacattttaagaatgtgtaaagtaatatttacaacagttcagaacaccacagttaggagataatgtcagcagccaaagaagttatgatggaattaatcagtgacaatgacacttttgtgtgaaagttctgtttgggctttatttattccaattagaatgggaaaaaaaaaagacaaagga

SEQ ID NO: 277540 - DNA, 583 bp, Homo sapiens
ttctttctccttcctaatttacttataaacagagtctccagtagagactgtctgtttataagtaaattaattttatcagcctctgaagtcagactccaattttagggaaaacttgcaggtgattgtagtggacatgtatcagtctttttggatatcccatttgaactactatcctatgcttgggaaattccaaactgaacgatgtcagtgacatgcatatcctttcccagcatcacttatgggcagaacatagatgcctgacctgggctctgtcaaacacagcaagcatgtgcctagatttggaattaggagatagtgagggaaagaaagggagctaccactgagtcccagtagagacagaagcaggcgtggctaattcagattcccaggacagttgtggcaacagtgttggtggtagatcyagtatctggggttagcttttagagcttcagcattcagtgatgattagcagcaatagctgtgatgctgtcttgttgcaggatgggcctggggttcagtttcaagctagagaaccctcagaccagttctccagccctttctgtgattttggaactattcagta

SEQ ID NO: 277541 - DNA, 410 bp, Homo sapiens
gcagtgacatattggttaatgcataattttcttaaagaattttaatttaattttaaaatttagatataatgaatacatacacacacacacacacacacacacacacacaccactgtgagtactagaaaacttatctgtaggcttaattttatctataaaacagaccttcatataatttctcatttagagttggtttcaggaaatataatccctcctcctctgtttccttctttctgaaggtctttgttggcttttcagttctataactcgaaggacaatatatatacctctgtaactcaatgagttaaaagtctgtttatctactacccattgcagaygagtctgtttttctgaatagacactattattaaacacacaattctaaatttgatcgataaatttagaaggct

SEQ ID NO: 277542 - DNA, 543 bp, Homo sapiens
aatgtctccaaattttgttctgggcttaaagcagacttttctcctaatgtcagctgctgattgggtgataaatttattctttaaaataagctggccttttacagaatctggagttagggaggtgtactttcttagggcctcctttagccatcctagaaaagtggaggggttttcttttttccttgcataattgtggatagctttgagtagttcatagggtttttcttattctttctcaacctttctaaaatgcaagttagcaaatgcctgaggctctaatctctatgatctgagtcagtatcctaatgagcgtctatagtggggactgcctgttgccctgtggggagtttttccgtttcttctagggccattagattgtttacctggctaaggtgctacagatctttaaattgttgggctgctgctaaagctgcgtttttttktttttttttagtaggacttaaggtctgatcacgaagtaacatgatatcgctctatgttagattaaaggactgccttaatccttgcaggacagctatatag

SEQ ID NO: 277543 - DNA, 544 bp, Homo sapiens
ggtcagtttcacctccaaactcccttccaaaaacctcatcttcaaagaacaattgctttgttcatgggatgtatcagtatttctttttagtactctataaaatgtactattttctaatatctgtgaactcatgcaacagatgagttcccttgccatacttttgaaataagcagtctttaataattttgtcttgaatttaaatttattcttggacataaatgcataataataaatgtaagtgtcctacattgtatttttaatatatattttttgaattatttaaattaacagtataaatggttgagaaattgtgattctttttagatggaattttaacaaccctttagttaggctgcctcttgttatacattcattgatgtgcattcaatattcttattacatactggatcagaattaggttcatagttctttaattctttgcaacacagacaaaatatcayggtgacattttccatatattatatcctgatgcacctgagcataatctctggaaactttccggtttttgatgagtctcattaca

SEQ ID NO: 277544 - DNA, 574 bp, Homo sapiens
acctacctgtctatttttaaatcttctagttatatttgaagtaaacatggtaatgttaagcaattgaatattattcttaagggtcaaatctgttggaaatatcataaggatttctcttaattctatacacttttggaagattccttatactacttaactccttgtttcatccaaccttgaaaagcaccattcataaatgccaattccttgtcatagtacacaaagtctcacttaacctggccttgtccacatcttagactacatttccttcagctctggccacattggacaggctggtattcctgcaacaatttaagtgtgtacctttttcagctttcatgcgtacttttcatgacctggagaactctttatctagaacttcacatgactttctctttcaaattatcaagatatttgccgaaatcatttctttagatatgtcttccaggaaaaccctatctattaggcttatctattaaaagtaatggcaaaaaccacaattacttttccaccaacctaataagagtcactcaccattccatcatgtyctatgcccttctccaacttgaatgtt

SEQ ID NO: 277545 - DNA, 616 bp, Homo sapiens
aagggttcatttactatgtctaaatgaaaggaaaatagagttgaatatttaatgtaccctcaaagtccatttgactgaaacttgcattcagataagctatttaatcattgtgtgcatgtgtgcactgtgtgcatgtgtttgtaggcattttagaaaactacaaattctcaaaacaaatatctcctgacaattacctctgctcctctgcttgtttaccttggttccccatcttacacacaatagactcatgaacattttcccggactattatttggagtggaaaattaaaatcatacattttctcccatattattaccaggtcagtaatacctttggtcttaaaaactatctcagaggaagtgtcagaactattagtttggaagctaatacagtattcagcatgtgaatttttgaaggcaaagggtyttgatgcaatttgcatcttcgagcaaggagtggttgacttttctccatctcctctttgtgcccaaatgtaagtaaattaacaaagtatcaacactacaagccattcatgatggttttataaaacatatatattttatattgaatgaatttgatataccacacacaatatgcaaacacaaaatttacccat

SEQ ID NO: 277546 - DNA, 609 bp, Homo sapiens
tatcagtcactattgtaaactttattttcatttctatctttccacttggtttacttttctctttttaaattactgtctttctatattttaattctatatttttctgtattttcattctgtttgtgtattattttatcttgaaataattattgatttacacaaaactttgggaaataatagagggaggtttcctgtacccgttactcagtttataccagtgctaacatctaacataacaatagtaaaatattactattagaaaattgacattggtatagtacaccaactttattagtattttctcaaatttacttgcatgcatatacacatttagttctacacaaatttgttacatgtaaaatctatrtaaccgcctgagttaagatagagaactgtacaatcttcacaaggattctttttgatagccatatcaatctttgcctctatcccttggtccttagttcctggaaaccagtaattttcttagcatctctataattttgtcagttcaagaatgttatataaatggaattacaccgtacgtaactttttaaaatggacttctgtcacttggtgcaatgcctttgagatttatcaggtcattttata

SEQ ID NO: 277547 - DNA, 609 bp, Homo sapiens
tatcagtcactattgtaaactttattttcatttctatctttccacttggtttacttttctctttttaaattactgtctttctatattttaattctatatttttctgtattttcattctgtttgtgtattattttatcttgaaataattattgatttacacaaaactttgggaaataatagagggaggtttcctgtacccgttactcagtttataccagtgctaacatctaacataacaatagtaaaatattactattagaaaattgacattggtatagtacaccaactttattagtattttctcaaatttacttgcatgcatatacacatttagttctacacaaatttgttacatgtaaaatctatataaccgcctgagttaagatagagaactgtacaatcttcacaaggattctttttgatagccatatcaatctttgcctctatcccttggtccttagttcctggmaaccagtaattttcttagcatctctataattttgtcagttcaagaatgttatataaatggaattacaccgtacgtaactttttaaaatggacttctgtcacttggtgcaatgcctttgagatttatcaggtcattttata

SEQ ID NO: 277548 - DNA, 635 bp, Homo sapiens
tcattcacccactgaaggacatttgaattgtttccagtgtggtgcttttataataaaactacaatgaacatttaaactactttaaaacatgggttttaaagtaaacataagttttcattttcctggaaaaaatacttattatgaactgaatgtttgtgtcctctcaaagttcttattatgacgtggagcatttgagargtaatcatgtttagatcacgtcatgagagtggatacctcatgatagaatcagttcccttatacgaacagacaacaaagcacttgctttctctgtttctgccatgtgaagatacagcaagaagctggtcatcagtaagccaggaagagagccccaccagggatctgaagcagctggcatcttgatcgtggatttcacagacctcagaacaataagatataaatccttttgtttaagccaccaagtctctgatattttgttatggcagcctaagctgactgaaataatgccaaaagttgcaaaaatgcaactgctatgtcatatggtaagctgtaaaagaaccctaacctcaacctcacactctatacaaaaattaactgaaaattcatcatagacttaaatttaaaaatgttaaagtacatatcttttttaggaaaac

SEQ ID NO: 277549 - DNA, 614 bp, Homo sapiens
agaattctcctgggtcttgtccatgaccttcaaggaggtgcctctatgagtttgcaagaaccacggcattactggactttggctgccctctaaagcagaaatagcttagatcacaacacccaagtcatttcaaatatctggaaagccttcaaaagaaggatggctacaaataaggccatacagagacgactacaataaacacctaactcttcaatggtcagacactgaagaacatgtactaatatcaacaccattgatgaaaaaataacctcaaaaaatgaactaaataagacatcagggaccaatctggagaaacagagatatgtgacctttttggcagataattcaaaatagctgcattgaggaaactcaagcaaattcaagataacacaaaggaggaattcagaattctataasataaatttaacaaatagatggaaataaattttaaaaagtaaaccagaaattctggagctgaaatgcaattggcatactgtagaatgcatcagagttctttaattgcagaatggatcaagcaaaagaaagaatgagtgagcttgagcttgaagacaggctattagaaaacacacagtcagaggagacaaaagaaaaag

SEQ ID NO: 277550 - DNA, 491 bp, Homo sapiens
gaatattgatgcagaaatcctcaacaaagtactagcaaacaaaattaaacaatgtattagaaagatgatccaccatgagcaagtgggatttatctctgggatgcaagggtgattaaacatgcacaaatcaatcaacatgatacatcatatcaacagaatgagggataaaaaccatatgatgcatctaaaatatatagaaaagcaaaagcaaagctcaaaatcaattatacaccatatcaacagaataaaggaaaaaaaccatgtgatcattttaattgatgatgaaaaagtatttgataaacttcaacataacttcatgaaaaaaccctcaagaaactggggatagaaggaacayacctcaacataatgaaagccatatacaacagacccaccagtagtaccataatgaatgattacaaacttaaaaagccttttctctaagatctggaacatgacaaggatgcccactgccatcaatgttactcaacata

SEQ ID NO: 277551 - DNA, 615 bp, Homo sapiens
cttcactgacctacaatctcagtgtttactgcatagaaattagttaatatttgatgcctatgccaacatgaatctctattatgtatcttcaaatcttgtatagttttaaatgttccttaaaaaataataagcaagcaaaatttataattagaaaaaagtcttaaaaaaagttttggaccatggtatctaatgttatatatatttagtacaaagctatctaaaaaatgtagaaaatgccagaagagatattctatcaagcatatgaactacattaaattgtttttatatgaaagataaatatgaaatactgaaacataccaaaaacaaagtactgagcatcaatgcattaccatacagaaatcaaatacttaaatgatttaacagaataaaatcagcatgccttccacagaaacatcaaccatttccacagaagaaaaatttctccaaatacaatatatggtcaataacactaattcaaaatrtgaattaaacattaatttctctacataaaccttcctgtaagttgtctactataaacatgcatgtacaaatattttcaaaagtcacatactgcacctcagaatactgcaaataaattcataatcatttctgaag

SEQ ID NO: 277552 - DNA, 627 bp, Homo sapiens
attttctcagtaaatatagataatgccaccctcttgagacgttgtaattaggataaaatcaaatcagtaatatgaaagtgttcagataatagagaaagtttttaaataaactctttactttgaaataatttcagacttacaaacaagttgaagaaagagttcccatgtgcccttactcagcatcccaaacggtaacatgtgacataatcatagttcaagaatcaaaactggtgaattaacattgaccaatactgttaaactaagctacagaccttaaatgttaccaaatgtgtcagcaaatgttcgttttctggtccaggatccaatccaagaccccacagtttctttgattctgataccaattgagactcttctcatctctgacaggtcctcagtcttcctttgtctttcatgaccttgacacttttgaagagtacaggttagttattttgcagacagtcycaattcaggattgcctgatgtttcttcatgattagattcagattgtgcttttttttttgccaggagaccacagcagtgacattgtgtccttctcagtgcagtgtatcaagaggaacatgatggtcattcctggcaatgtccacttttatcacatgattaaggtag

SEQ ID NO: 277553 - DNA, 630 bp, Homo sapiens
atcaccatcacgtagcataccaggttgcctacaaacacagacttcagactgtggcatttgatgaaatagatgtgattactcatgatgctggcccataaatgtactaatttaagaaatggagtgcacttgctgcataattagcgcaagaaaccagcttaacatgaactattctggaatgagaatcactcaggcaggaaaaaagcctttcaccaattaaatcggaaaaagtggtccattcccacttactaggtcagtttaatcagctcattgggaaagcatttttaactgttttttaacatcaagattcagttctgctaaaagtctgaaattctattgggccaatctgaggacactttatagtaaagacagtaggacagtaagtccttgacttagaggctgcaaactcaaaacccttaacctgaaattagataatagatgtgtttggtttggcctgcaaaagtgcaaaaaacaaattttttcagcccatctttctaattgatcagatcttctgtaaaaacaagatttccagcctctcctgaaaaactggaggatcggrcaatactgggcctctgttcacatgtggcagcatcagccagggctgagtggtggtgagcacttcagcctgagcat

SEQ ID NO: 277554 - DNA, 496 bp, Homo sapiens
atgtcttttctttgcatgttgaaatgattaattatatagaatcatactttgaaaattaggtttgctaaaaatcccaaacatcacaagttaatatattatatgatcaccaccaatttttggctaataaaatgacagcagtatgtttgtactgtacaacttttagactcaataatgattaaaaaagcctaaagacataaatgaaaacataacgttttgatataatttaacatttaaaaatataattacacagccatacttaaagatgattcatggacactctactgctgaatactaatataatttagataaatgtggttgttttaaataaaagaatagtgaataaattatcaaatatttacactgctcatatgaaatatttattaaagtttcacttgcatatgcctaaaaagtcacacaaaatgttttcttcagatctgggcaaacccaaagctaaatgtttttktcagtatttctaatagaaaactatttgaacaca

SEQ ID NO: 277555 - DNA, 537 bp, Homo sapiens
atgagctcagtgtgagaattcaggtggagggactgagcacacagaaatatgttagagagtgaggaaaatgaatttggagcttaggaacaggtttatgaaaagaaaggcagatttgggaggaaccagcacatagagagatgtggaaggaatagaccctgcactcagccctgttcctggtacacagcagcttctccaggaatgtttgttaaaaaatccaatgtaaatggttgagaaagtccatgaagagtagatagagtgaaaagaccaaaaggatgaggataaaacgacaggagacactagcagtataaggggtgggcagaaaagaaagacctgggctcattktacacattgtagacctgaaatataatattttatctaatattttatttttaaattaaatatttcaaggttgttcccaatgtacaaatcacctttaaaagaggattttgtgataaattaatgtagttaataacaaaattgctttgaaggttgacagtatttaaacttttaaatgataaccctttatcaagtagtaat

SEQ ID NO: 277556 - DNA, 537 bp, Homo sapiens
tatgccttattacagatgctattaagggcacactttaatactatgcatgctaattttattcactttaaagaaaaaagcatctaaaactcaaccagaagctttccatttaatataatattttcctttaggagtaagtrtatgagaaggtagtttggacacacttctgaggcttaaaagactttatatatgaactttgcattagcaaaaataatttttagtagaagcataatttttatttagaccaagcttgtccaacctgtggtctatgggccacatgcggcccaggatggctttgaatgtggcccaacacaaattcataaactttcttaaaagatgagattttttgtttttagctcataagctagcattagtgttagtatattttatgtgtgtggaccaagacaattcttcttcttccagtatggcccaggaaagtcaaaagattaagacccccctgatttaaatttttttttttttgaaaaacaccgggaaaaatataaaaaaaagaaactaaaaattacctatagtattactttt

SEQ ID NO: 277557 - DNA, 443 bp, Homo sapiens
agaaatatagaaaagttaaatttgttagatgggtggagatattagagataaatattttaggaataagtaaatattaggaaatatatatgaagtagtgataatggtttatgtattaaacttcagttgaacagaaagagaaatccatagaactcttttaaaccacttattctgaggtgactaaaataataggaaagagaagtaaaaaattatttttaatctttctccatgatgtcagcccctatattagtctgggctatctaagtccttgaaaaatctctagaaaaaagggtggtgggcacttatcaaggaaagatgttctttgtgttgacagctgagaaaaggtagagatatattatagtagagaaaacaactaaggaaaaataacagaaactaatrcaaatttaatgctcttacactatcatcttatacaataaatccaacaa

SEQ ID NO: 277558 - DNA, 509 bp, Homo sapiens
aataatgggggacttcagtactccactaactgtgataattttatttgaaaattgttactactatcactagaaaaagaggaaagaattaggggaaaaaagggatttgaaaagctgtggcagagtagaaacatatttttcaaagaaatcttgggaactgaagggccttaggactgctcatttggatygttaaaagacaggaagttgaactatatggaaaggggttctggagtgtatttctggcatgagctcaacctgggctgaacggcactatggggagggacttttgcatgatttctcctcaactttcccaatgaagataaataaaatttatgcaaacattttaaatatttaagtgttttagaacctggcctgttctttgagcattttgaataaaggactagatatgggaagggaagactgcaatgcttcttagtaaattctatttatgagcgattttgggaagtttctagcaggcaaggaatagtgtatcagaatgaatgatatagtac

SEQ ID NO: 277559 - DNA, 579 bp, Homo sapiens
tgctggcacatctgtagtaaattccattttgctctctcattagctttttgactttgggcaagtgtcgtaagtcatttcccgaggcagcagactccgaggcagatttgtgtgcaggggtattcttaggatcaatgtctatcttaaggggagtgaaacaggattaggcagagggggaagttgaattgtgttttagttacatagaaggcatcagttgatttgggggaacctctggagctgggatgacccttcagacttgtcctgaattagggatcagggctcaactttaatatccccttgtcagtcagtcattggattggaaaagggttggaaggcctaggaaggggatgtaactttggataaggcagctttccttaycctagggcaaagcccacagagggattccactgagacttgtcagccacagacacaagaacttagggaagtggggacttcagtcatgatggggaggagatgggcaaccttgccagcttcctctgcagcatgctactaaattacgtgtgtcccagttctctttctattttaacaaatggagagaggaagaaactgtcatttatttaa

SEQ ID NO: 277560 - DNA, 547 bp, Homo sapiens
gataaggcttactgggtttcctccacaaagtccattagcattagagcataccttttctgtccaatcacattaatacatggatgtccatgcttcagtcatgcctatccaaagaagtctccataaaaggccgaggaggayggggtatggagagcttccagagagctgatcacatagaggttcctggagggtgttatgcccagattgggcatggaggctccatgtcccttccctatgccttgcccaatgcaactcttcatgtgtatcctttgtaatatcctttatgataaaccagaagatacaagtatgtgtttccctaagttctgtaagccactttagcaaattaattaactcgaagaggaggaggtcataggaagtatgttttgtagtcagctgaccagaagcacaggtaaaacaatgctgtgtcccggcagacagtgtgaggactgaattggaggacaccagctgctggccactgcggaactgattgtttgcttgctggaggggagaaatccccgtacatttagtcaaagaaggcttctgtgccgac

SEQ ID NO: 277561 - DNA, 584 bp, Homo sapiens
atgacactccagtagcaaagtccatacctatagcaaagatgttggttttgaaataccattatctaataaaaggaactaggactccttggagaagcagttgattttagggcttagaacatctgtctgtgatgtcaaaaaataagggcttaaaaaggataggggcaygtcaaaaggacatgggaccaacctgaaggtgcttctaatagccaaaactggaacaatttaggcaacaaaatatgatatattttatggaattataatctatagaataaaatacccatgaagccatactattagaataaataaataaatgaaggataagggacagctcttacagaaggattctggttaataaatatagcaagaatcagggaaatctttattaggcgaagatcacagaagtaattgttgcagacaagattcaggggtggatgttaaaatcagtatatttaacacagccttcaagtttttcctcccaagatatgtatcagttgcaaagggaaagttgatttctccactgtaattcgttagcttaaacaaatgatgaagggtagcgttgtcagtaataaaacatttcaacgtca

SEQ ID NO: 277562 - DNA, 585 bp, Homo sapiens
taatgctaatcatgggctaggcatgatggctcatgcctgtaatcccagcacttggggaggctraggccgaaggattgcttgaggccaggagtttaacaccagtgtgggcatagcaagaccgtgtctttgaaaatttttaaaaataataatgctaattatattctctataaatagttattataatgtcattgtcttaagttttgaaaggacaatccagaaattgttctctattttgttgctttctgggaagtactcttatcatagctgggtagatctctaggcagtatagtcatggggtaggtttgaaaaccaggccatgcctcaaaaaatgaattctacctctgtagagtaagcacaactaactccattttgcatttacagataaataaatgatggttggcaactgttgtccccaaatttgcatttcaatggcctagtaatgtcccatcgcttacctagtacttcacaaggatgttagtgataaggaataattaatgatctgttaacaagatcacatctttgattataatgtacaatagatgtacaaattctatatttaacttttatttgccttttaattgctat

SEQ ID NO: 277563 - DNA, 563 bp, Homo sapiens
gaagggatagagtgtatgtttcacagtaagctttaagttgagataactgataatagggccaacttttctttgagcatcaaagtgaatgaaatacaattttaagttaattcttttgaactttctttcctttcttccttccttccttccctccttccttcctccctccctccttctcttttcatttcttttctttttccttccttccctccttcttccccttccgcttccacttccccttccccttcctctctctctctctctctctctctctctctctctttctttccgatagggtctcactctgtagccgagactagagtgcagtggcatgaggcatgatcatggctcactgcagactcgacctccccaggctcaagtgatcctccacttttgcctcctgagtagctggaactacaggcatatgccaccatgcctggctaatttttgtattttctatagagacagggttttrtcttgttgcccaggctggtctccaatacttggactcaagcaattcacccactttagcttcccaaagttctgggactgcaggcataagccac

SEQ ID NO: 277564 - DNA, 608 bp, Homo sapiens
tgaagtgatgaaaccattttaattttaaacttccagccctatctaagacttcaatttaagaatgggaaactgaaaaaaaatatatacactattttgttgaaataaayctttcttttctacttccagaaacatcatgagattacacagcctgatttataaaagaatttggagcaagcttcagactttaaacattcaaaactgaggtttgtttatttcattttctacttactgaaagaagagtttttagcctgaactaaaggcctgtgctgtatgtacttgaggtactggagtgctatatgtactaactaaattgtgaccctattttaccactggtgacccgagtgaggattcaaactttcttcatgtttttatttttaacataaatataaaaatgctgagctgtagaaaatattgaatacacatggatttaacctcaagaagctccgtaaaattcttagatgacattataaaaacaagaagcagttaaacctaaagcatcctccttaacataatttgagaaaaataaaatgttcatatcttatataagatacccataactccttgttaaaacactaaaatgagtaagaaatatgcactgaccaatttaa

SEQ ID NO: 277565 - DNA, 608 bp, Homo sapiens
tgaagtgatgaaaccattttaattttaaacttccagccctatctaagacttcaatttaagaatgggaaactgaaaaaaaatatatacactattttgttgaaataaacctttcttttctacttccagaaacatcatgagattacacagcctgatttataaaagaatttggagcaagcttcagactttaaacattcaaaactgaggtttgtttatttcattttctacttactgaaagaagagtttytagcctgaactaaaggcctgtgctgtatgtacttgaggtactggagtgctatatgtactaactaaattgtgaccctattttaccactggtgacccgagtgaggattcaaactttcttcatgtttttatttttaacataaatataaaaatgctgagctgtagaaaatattgaatacacatggatttaacctcaagaagctccgtaaaattcttagatgacattataaaaacaagaagcagttaaacctaaagcatcctccttaacataatttgagaaaaataaaatgttcatatcttatataagatacccataactccttgttaaaacactaaaatgagtaagaaatatgcactgaccaatttaa

SEQ ID NO: 277566 - DNA, 608 bp, Homo sapiens
tgaagtgatgaaaccattttaattttaaacttccagccctatctaagacttcaatttaagaatgggaaactgaaaaaaaatatatacactattttgttgaaataaacctttcttttctacttccagaaacatcatgagattacacagcctgatttataaaagaatttggagcaagcttcagactttaaacattcaaaactgaggtttgtttatttcattttctacttactgaaagaagagtttttagcctgaactaaaggcctgtgctktatgtacttgaggtactggagtgctatatgtactaactaaattgtgaccctattttaccactggtgacccgagtgaggattcaaactttcttcatgtttttatttttaacataaatataaaaatgctgagctgtagaaaatattgaatacacatggatttaacctcaagaagctccgtaaaattcttagatgacattataaaaacaagaagcagttaaacctaaagcatcctccttaacataatttgagaaaaataaaatgttcatatcttatataagatacccataactccttgttaaaacactaaaatgagtaagaaatatgcactgaccaatttaa

SEQ ID NO: 277567 - DNA, 588 bp, Homo sapiens
gccagtgcaaggaggaatcccagggaccccttttaataaagcatctgactgcatgtttttatgtttaattactcacagctttcaagccccatagtgggacaagcccataagaaagctgtcactcccttctttgtcaccagatgagaatgatcaaaccaggctaatccagctcctatgcagaggctctcctcccagcatgtctgaatcacaacagaaaccaaagccatattcccctcattcactcaagccattttgaacctgcttgggagtctaccctgctgtccccagaaaccctcataatgagagtaataccttctcatactctgtctgcgcgtgtgtcaacatctaaacctatcctgccttttgcaggacgctaccaaaacacccttgttccaaaatattaaaagtcycaagactgcagcagcagaggattgaaccaaatgcaaggccattcttagcgtgggatcctgtgtacctatacaggtcacaaacatggagccagccctaggtaaacccaacctccagcatcagctatcccttgtcttttcgttaattttgtgatctcagttggggaagcataattcatag

SEQ ID NO: 277568 - DNA, 540 bp, Homo sapiens
acattcgatgccacttaagagagatgtaggccaggtgcagtggctcatgcctgtaatcccagctacctgggaggctgaggcagaaggatcgcttgaacccaggaggcggaggttgcattaagccgagatcacaccactgtactccagcctgggagaaagtatgagactctgtctcaaaaataataataataataaaagagatgtaaatgcaatagaatgcatccatctaattccctgtcaagggagatcagatgggttttaatctgtgccccaacatatgtatacacacatactcattgctaccaatgttagtttttccaagtttagtaaatgatgttgatggcagtggaggcttgtctggagcagccactgtgaagatgctgctacagcagtggaggtgcattcagggctgcttgctccatggagtcagcaggggccgggaacaggtgggagccccgtcatctamtaagtcagcagggcaggagccctgcacctgcgggtgcagctgcagccgcccagccagggctttggacccagaca

SEQ ID NO: 277569 - DNA, 1175 bp, Homo sapiens
caaatttccaggcaacaaaattaactcttgttgagaactagtgacctagaagaacttattagaagtctaatgaccctcttatgactttgtgttgtaaactggtaatcccacggaatgaatgtctccgggrctttcatcctagaagaatctcatccctgaagaatttcttgtgctattttttctggatctcttcccctctacttcagcagtagatattaggtgaacatgctatcctcacaactggttttaatttcttgaactagtatagtgcatgtattttttttttttttttgcccttaagaaacacacagtggtttccattccttgcagaagcctagatggctcctgcattggaagaaatcaggaagggagaagattgagaagaagaactttttagtgagtcttatttaagctgaaaagaaaagaaatcttgacctcaactctcttaaaccttatagaagtttctgatctttgaaagcagaaattccagatgtagggcaagcttccatattggtawcctgagagggacactggagaaggcaaagattaatttagaaaatcaatccttaaaataaaatttgtaaagtttatgtaacccaggtacctgtggaagaaacaatttgttcattattgwctattttctcatctctcataacggaactttctacttttagttggacaccaccatttctgccacatttccttaggagaaatgatgtgtgcaagtcctgtcccttaggagatgagctttcaatcctctgactctcctccccactcctctttggccagcaaatgaagaaactggagctttacctttaaattagaagatggaaaccatgtgtggaagatagcagaactccccagcagaacagactccttacctcttacactagagagaaataaaatttttatcttaattaagacattttgctttgaatcattttgttacaggtgtttggactgtactctaaataacaccattcccccaaaaatatatgagttctttttggcatgtcaagtttcaaatatgtgagtataaattgaattttagaacaacgtcagtaagttggatattgcctataatattttattattttttaggataaaaagtaatgccaaatgagaacaggatatggctgcaaatcagcatcagggatattttttggggtaatgaa

SEQ ID NO: 277570 - DNA, 566 bp, Homo sapiens
taattttttatataagatttggtaaaatattacaaacagaagcaaataataagccattctttttaaaaatataatctgacctaggacattttatgtctcatttgcaaaatattctatttgagcattgagttataaaaactttcactcgtgtctgtragaagagaccaccaaacaggctttgtgtgagcaagaagactgtttatttcacctgggtgcaggcgggctgagtctgaaaagagagtcagtgaagggagatggggtggggccgtttttataggatgtgggtaggtagtggaaaattacaatcaaagggggttgttctctggcgggcagggatgggggtcacaaggtgctcagtcggggagcttttgagccaggatgagcccagaaagggaatttcacaaggtaatgtcatcaagtaaggcagaaacgggccattttcacttcttttgtcattcttcagttacttcaggccatctggatgtatacgtgcaggtcacaggggatatgatagcttagcttgggctcagaggcctgacaaaatgttcttgaccattagttgttca

SEQ ID NO: 277571 - DNA, 566 bp, Homo sapiens
taattttttatataagatttggtaaaatattacaaacagaagcaaataataagccattctttttaaaaatataatctgacctaggacattttatgtctcatttgcaaaatattctatttgagcattgagttataaaaactttcactcgtgtctgtaagaagagaccaccaaacaggctttgtgtgagcaagaagactgtttatttcacctgggtgcaggygggctgagtctgaaaagagagtcagtgaagggagatggggtggggccgtttttataggatgtgggtaggtagtggaaaattacaatcaaagggggttgttctctggcgggcagggatgggggtcacaaggtgctcagtcggggagcttttgagccaggatgagcccagaaagggaatttcacaaggtaatgtcatcaagtaaggcagaaacgggccattttcacttcttttgtcattcttcagttacttcaggccatctggatgtatacgtgcaggtcacaggggatatgatagcttagcttgggctcagaggcctgacaaaatgttcttgaccattagttgttca

SEQ ID NO: 277572 - DNA, 603 bp, Homo sapiens
attttatgtctcatttgcaaaatattctatttgagcattgagttataaaaactttcactcgtgtctgtaagaagagaccaccaaacaggctttgtgtgagcaagaagactgtttatttcacctgggtgcaggcgggctgagtctgaaaagagagtcagtgaagggagatggggtggggccgtttttataggatgtgggtaggtagtggaaaattacaatcaaagggggttgttctctggcgggcagggatgggggtcacaaggtgctcagtcggggagcttttgagccaggatgagcccagaaagggaattkcacaaggtaatgtcatcaagtaaggcagaaacgggccattttcacttcttttgtcattcttcagttacttcaggccatctggatgtatacgtgcaggtcacaggggatatgatagcttagcttgggctcagaggcctgacaaaatgttcttgaccattagttgttcaacttttggagtatatagaacataaatgaccacttttcaggtcaaagatagttgggttaaccaaatagggtgacatggaagacaatatatgttatattaaaaaaaagtctaacagaaaattatac

SEQ ID NO: 277573 - DNA, 618 bp, Homo sapiens
tgcaaacgatataattctgtacatagaaaatctaaagttgtatacaagaactactagaacaatagtaatagaataacagaaataataaattatttcatcaatgtagtgggatgtaagcaacatacaaaaattaattgtacttttatatagtagcaatgaactctacaaaaatgagattgagagtaacttcattcagtgtaacattatatagaataaaatgcttaggaatgaatttaacaaagtatactcaagatctatacactgaaaactacagtacatttgtaagtgatattaaagaagacttaaaaacagagacaatacatttttctgtataggaggactcaatatttataagatggcgattttcgccaaattgatttatagtaggttaaaagcaatttatatcacaatctcagtatactttctggcagaaattgccaaaataacctygaaatttacttggaaatgcaaaaagacctaaaatagccagaacaatttaaaaaataaaaaagctgaaagactatactttctgacttaaaatattgtgtagagctgcagtaatcaagacagtgttgtgttagaataatggtaatcatacagactaatggaaagtaattg

SEQ ID NO: 277574 - DNA, 511 bp, Homo sapiens
aaagcacaggtaacaaaaacaaatatggaccaatggtattacattaaatttattacaattttttttgccacaggaaacaaaacagaatgaagaggcagctcatggaatgggggaaaatatttgcaaaccacatatctgataaggggttaatagccaaaatgtataataaataacttagttgcaagaaaataaacagattttaaacagggcaaagaacctgratatacattttttcaaagaacacatacaaacggccaacagatatatgaaaagatgctcaacattactaatcatcaggaaaagcaagttaaaattacagagatatcctctgacacctgagataccaattcacaccttgctattaccaaaataagaaaatataacaagtgttggctaggatgtggagaagcaggaatccttgcacattgttgtggcgagtggaaattaggagaaccatttatgggaaacagtgcgaagggtcctcaaaaaattaaaactagaactaatatat

SEQ ID NO: 277575 - DNA, 562 bp, Homo sapiens
ccctctactgtagaagaggataactatcttttaccaccatttcactgttgccattacctggccatacatataygtgtgcactgagaactcaaaatcctaaggcccccaatgaactgaacatatcccctcttagtcaatggtaatccagggtaaccttaaaaactgaattcttagttttgatgaaacaggaggttgagaacgcctcgttacacctcctaccttttatggttcagacacaacagtggaccaatattgatgttaaaatggtgattataagactgacgaaaaggattctttgtggtgatagatatcacattataaacaagacctaaggccatgccaggcaaggggtaagtcacacactcctacatttggagaataaattacattctaactgccacaagtttttttctttttctctagcagctaaacagcactgatctccagataagcaatattgaaacaatcgcagctcatccaccaccaccagacactaattaacccctttgcttcacaagccataactacaacttttgacaagagactgagttagtaacctctt

SEQ ID NO: 277576 - DNA, 599 bp, Homo sapiens
aacagctccaacattttcatggctgaaaactgaaagatttcactttttgctcaagcaaagcccagtacaggtccaggaacctctccaggtgtctcaacagttaagactgacggaagctccataactcaatatttgcgtcctctgtgtccttttcagtcaattctgcagggaaaaagaatgctgaaggggctcacacagacaattaatgtcctcaactcagaaatgacatgactaccttgtatccacaatccacctgctagaactcatcatcagcccttgcccaactacaaggaaccaggaactgtgattttcctttgagattagaaagcacgtactgattaccactgagtaacagaaacctttgctaggtagttcagtagccaatgtttatgttattttatgttatttgaactatagaaatactgttcttgtcacagaaaagtactatgttataattacatttttgttccagaatagtttttttatttttttccttaggaattaaaattgyctttctccgttttttttcattattttgtaggtattttcattaatttaatgctaaactctttaaattgtctaaatcccaatgctttcat

SEQ ID NO: 277577 - DNA, 628 bp, Homo sapiens
ataatattaatagcattttacaataatatcacaaaatagtattagttttttgtaataaaatattaaaccttcatatttttgtataaatttgaaaaaataattttcatcaacaaattaaatttttaaatttatgtagatatagcttaaaaatcctttatgttattttgaaaatttgaaattttcaaaaaacacgtaacagcaaatgcatttgtttttaataactgaaagcattcatctctcttttctcttattattttttttctctcccacccaacgttaaaacaaatggactcatactcatcatataccttatttgagggagataatttatatataaatttatacaagcacacacatgtatatttaatatatgttgtaaataaacatgtttattaggtgcattaaatttctcattttacatataaattcaaaaagaaaatgcttattttttaaaaatacaaattattgatacaccccaaatttggaggtcaatgctagaaaaacgaaaatgrctccctattctttacttattgttagatgagtataaaagataaacacaatagtttttctgagtatttaaccagattatagagctattgatccattaattcagttgtagaagaaaatg

SEQ ID NO: 277578 - DNA, 584 bp, Homo sapiens
cttactggactgatgagaaatttattaccacacagcccagtcagaggaatgtaaatgctataatcaaccacaygttccataagaaatgcattaatcagtataggttaaataataaaagttttaatatttaatatgttttcctagaacagtggaaagattcagcaacaagatagcaatgtaggtgacataagggaaacagagcaacatcgtatgccccctaggaaggaccctgcagcagacctgactttgttcatcacaggcaccacagagcatactaaaatcaaataccaaatataaaactcaggtagagttttaaagggccacaaaaatgtcagtgcagcaggtgtttagatgatctctatggaaagcacatattaacaacaaccccagtacaaattaacacttgaaatattcatcattacatagtgagatttgtattatgtagggaagaaagaggagaatgactcaaataactaaattttaaatttgaaagagcttttcaactgtttgatgaaaacagctctaaatatatttttacttatctatcattagcttcttggaatttttattcagaacactaaaat

SEQ ID NO: 277579 - DNA, 469 bp, Homo sapiens
cagattacatagggatatgcaaactaaagctcagaaaaatttaaaaacgtgctcatgattaaaagttggtaagtgacacagttgtatcactcaaagtgaaaaatggtacactagctaaagcagtgtctgtagtaagagttggcaaactttttctctaaaaggccaaatggtaaaattctaatctatgtgggtaatgtggtctgtctcaactactcaactctgccattacagtacaaaagaagctacagacaatacataaataggtgtggctttgttaccataaaacaatatttatgaatactggtagcagttccaatctgatccatgaaccaaattttgtcaaattctggtctagagcatttgagagataaaagggataaagcatctataagaaycatggaactggtaactttgataagcaccatggattcacttcagagagaaaatgactggctcattgtttactaat

SEQ ID NO: 277580 - DNA, 625 bp, Homo sapiens
ctattttaaaaaagtgactatgaatgtggacagaattgtggaaaactgagaactcttgtacatttttgggtgaaaatgtaaaatgatgcaagctctaggaccaacaatatagaggttccacaaaagttaaggatagaattatcatttgatctggcaatcccatttcttaatatatatccaaagggaataaacttaggatctgcattctcttattgcagcattaattacaatattcaggctatggaaacaacagaggaatcatatcaagttggaggactagaaggtttcaatgctcatcccattcctcctttatacacacagataaaactaagaaaaactaaataccatgaaaaataactcttggaaagctcaagagtttggtaaagaacctgcagctatccagatgagcaaaagctgaggatgactgcatagaaaagcatagaagtgtcttgcctcatcccctactctggcataactttgcctcaagagggatctccttggcaaaattttcccccrccaagaaaaaaaaggacaatcaaaggacctcagtagccctcaccaataccacagaaatcctcaactttttcaagcaaggatacttgtagtctctgctgatgctgatccc

SEQ ID NO: 277581 - DNA, 559 bp, Homo sapiens
gactaaggatgtaaggatatagatgcaaattactgaagtgtttgctactgtttcaaattttcctctcaaagaatttagaacttccatgaccctctgatcacgaggtcmaccactgagagacccaccctgatcacaccaaaagagtcccctttggtcttttgtcctagacctgtgacactctgaattacttatgttttcagttgtggcttagtatgacaggtataaaatagataatcttttctgctgttttggctgtgaaatcaaaacttaaaaaattaagatgaaaaaagtatttctcacataaacaaaaactgacaaagtatgtcaccactaagcccaccttacaaaaaaggctgagggagttcttaaaattgaaataaaaacatgataaacagaaatgtgaaagcatatataagcataaatgtcactggtaaaggtaaatatatagacacatacagattcatgtaacaccgtaatggtggtgtgtaaattaattacaaacatagaattttaaagataaaaagtgttaatggacacacagtatacattgaaaaaaaca

SEQ ID NO: 277582 - DNA, 597 bp, Homo sapiens
cccctttggtcttttgtcctagacctgtgacactctgaattacttatgttttcagttgtggcttagtatgacaggtataaaatagataatcttttctgctgttttggctgtgaaatcaaaacttaaaaaattaagatgaaaaaagtatttctcacataaacaaaaactgacaaagtatgtcaccactaagcccaccttacaaaaaaggctgagggagttcttaaaattgaaataaaaacatgataaacagaaatgtgaaagcatatataagcataaatgtcactggtaaaggtaaatatatagacacatacagattcatgtaayaccgtaatggtggtgtgtaaattaattacaaacatagaattttaaagataaaaagtgttaatggacacacagtatacattgaaaaaaacagtacaaaaatacaaattgtgttggtgggattaaaagtatagttagtgtttttgtatatgagcttaaattgtcatcagattaaaataaaagattgtaaccacaaaatattttatgtgagccttaagacaaccacaagaaaaataatcaggaggggccttgaaaatggctgactagaaggacctg

SEQ ID NO: 277583 - DNA, 597 bp, Homo sapiens
cccctttggtcttttgtcctagacctgtgacactctgaattacttatgttttcagttgtggcttagtatgacaggtataaaatagataatcttttctgctgttttggctgtgaaatcaaaacttaaaaaattaagatgaaaaaagtatttctcacataaacaaaaactgacaaagtatgtcaccactaagcccaccttacaaaaaaggctgagggagttcttaaaattgaaataaaaacatgataaacagaaatgtgaaagcatatataagcataaatgtcactggtaaaggtaaatatatagacacatacagattcatgtaacaccgtaatggtggtgtgtaaattaattacaaacatagaattttaaagataaaaagtgttaatggacacacagtatayattgaaaaaaacagtacaaaaatacaaattgtgttggtgggattaaaagtatagttagtgtttttgtatatgagcttaaattgtcatcagattaaaataaaagattgtaaccacaaaatattttatgtgagccttaagacaaccacaagaaaaataatcaggaggggccttgaaaatggctgactagaaggacctg

SEQ ID NO: 277584 - DNA, 552 bp, Homo sapiens
tgataaacagaaatgtgaaagcatatataagcataaatgtcactggtaaaggtaaatatatagacacatacagattcatgtaacaccgtaatggtggtgtgtaaattaattacaaacatagaattttaaagataaaaagtgttaatggacacacagtatacattgaaaaaaacagtacaaaaatacaaattgtgttggtgggattaaaagtatagttagtgtttttgtatatgagcttaaattgtcatcagattaaaataaaagattrtaaccacaaaatattttatgtgagccttaagacaaccacaagaaaaataatcaggaggggccttgaaaatggctgactagaaggacctgtcagtcaccttttgtacaaagaaagctaaaaacaatgagtagataagcatatgtcaactaaagcatctaagagagaacaacagaattgatcaaggaagtgacaggcaaccactcagtaagggaaggagaagaaagcaaagcaggtggcctcatcaggattggctaaaagccaggagaaactccccactgtgggga

SEQ ID NO: 277585 - DNA, 519 bp, Homo sapiens
ccccaggggctttgagagtagtaaaggaagctacctggagtccacacaatggcatttttctacaaaataggttcacactgggtcctaggcatatcacaaaatttaagcagccatagcatagaacaattttgagagcccagtcctcaccatactacatccttccctgaaagcccaacagctcctacatctccacactcctcaagtcctactgatatcctattatgtccacccagaaggctgcagtgtcacaacactggctggaccctactgtgtgttyaggtcctcagcactgcagcacaacccatgtccaggctataccatgtggaagggcagtaaagcacaccgggaaggttgcacttcaaaaaaaaaaaaaaaggcagccgaagtgtgtgctccccagagcctacgaggtgtttacctttgtctcccacagcagggtcgtcatacacatggacatgccttcaggtgtgttgaggaccactcttcatgggtgctgatctagggcctgagaaattccag

SEQ ID NO: 277586 - DNA, 519 bp, Homo sapiens
ccccaggggctttgagagtagtaaaggaagctacctggagtccacacaatggcatttttctacaaaataggttcacactgggtcctaggcatatcacaaaatttaagcagccatagcatagaacaattttgagagcccagtcctcaccatactacatccttccctgaaagcccaacagctcctacatctccacactcctcaagtcctactgatatcctattatgtccacccagaaggctgcagtgtcacaacactggctggaccctactgtgtgttcaggtcctcagcactgcagcacaacycatgtccaggctataccatgtggaagggcagtaaagcacaccgggaaggttgcacttcaaaaaaaaaaaaaaaggcagccgaagtgtgtgctccccagagcctacgaggtgtttacctttgtctcccacagcagggtcgtcatacacatggacatgccttcaggtgtgttgaggaccactcttcatgggtgctgatctagggcctgagaaattccag

SEQ ID NO: 277587 - DNA, 1206 bp, Homo sapiens
gtgttgaggaccactcttcatgggtgctgatctagggcctgagaaattccagtactacccaccactgtcgctgctaccatccaagtatgtcatccagggccctaaggacaaacctactttgtccagtggtgtcataacctgcacatgccatccacgtgcctgaggatgggcccaactagcctaacagcacctgttcacattttctaagggcctggggattgacctccccagccaccactgccagtgcaaacacttgccttcaggggcctgaagacaggcttacccagattgccaccaccaccacaactgcctgtttccacatgcaccatccaggggactaggaatcaactcacctagcctgctgctgtggtacccatacacactaccaggaggcctgacaccaggttcaccccacccaccactggtgcccatacatgttattcagggatgtggggatttatctgccctacatgtcataacctgcctgtgcttgcacataccattgagaggcctcagaacaggccrgattgcctgctgccacaagcacccatgcacaccattcaggggaaggggaattgacwtaatataatgtgtgtagtttttatactgacagatttcttagatgacatgaacaaattcctagaaatacacaaattatctgaactgatgcaagaaaagcagagtaatcaaaaagactcataacaagagctgaaatcagtaataaaaaaatttccacataaaaatttttcaagctcagatggcttcattgatgacttctaccaaatacttaaagaagatttaatagcaagtcttcacaagctttcaagaaataagaggggaacacttcccaaattatatacattgttatctctactaaaaatacaaaaaattagccaggcgtggtggcaggtgcctgtaatcccagctactcaggaggctgagggaggagaattgcttgaacccaggaggcagaggcatagtaagccgagattgggccactgcactccagcctgggcaacaagagtgaaactccatctcaaaagaaaaagttactatgcaaaattatatatacttatatagttataaaagacagcataaatgcatattttwcttctttcttctcttaaatgatttttaacaactatataaacaacatgggtataactgttgttgagactataacatatagaaatgtagcatatttag

SEQ ID NO: 277588 - DNA, 589 bp, Homo sapiens
ataagcaaaaactgagggaatttatcaccacttaactggctctacaagaaatgcataggggagtccacatgaaagcaaaaggattatatttaccaagatgaaaacataataaaagagggagaaaagaatgaaagatatacaaaacaacaagaaaccaattaacaaggcaggaatgaattctcacctatcaataataaccttgaatgtaaattatttaaattctctatttaaaagacacagacagctgggcacagtggygcacgcctgtaatcacagcactttgggaggctgaggcaggtggatcacctgaggtcaggagctcaagagcagcctgggcaacacagtgaaaccctgtctctactaaaaatacaaaaacattagctggtcatggtggcacacatctgtaatccagctacttgggaagctgaggcaggaggatcacttgaaccagggaggcagagattgcagtgagccaagatcatgccactgcactccagcctggacaacagagcaagactccatctcaaacacacacacacacaattatgatccaactatatgcttcctacaagaaattcacatcgcctgt

SEQ ID NO: 277589 - DNA, 565 bp, Homo sapiens
tgggcacagtggcgcacgcctgtaatcacagcactttgggaggctgaggcaggtggatcacctgaggtcaggagctcaagagcagcctgggcaacacagtgaaaccctgtctctactaaaaatacaaaaacattagctggtcatggtggcacacatctgtaatccagctacttgggaagctgaggcaggaggatcacttgaaccagggaggcagagattgyagtgagccaagatcatgccactgcactccagcctggacaacagagcaagactccatctcaaacacacacacacacaattatgatccaactatatgcttcctacaagaaattcacatcgcctgtatagcacatatagacataaagggaagggatgagaaaagatattccacataaacagaagcaaaaaggtggcaggaatagctgtccttatatcagaaaaagatgttgagaactttttttagaactgtattaaaagacaaataaataattgtataataataaacagatcaatacaggaagaggctataacaattttaaatatatatttactcaacactgaaata

SEQ ID NO: 277590 - DNA, 1197 bp, Homo sapiens
ttttctatatctgatttggctgtatgtaaagagaaatctggtcatttctctgaagatccaggaaaattcatggatgagtttgagaaattaactctgacctatagtttaacttggcaggtttgttgtctctgtgttgtacagtagaagagaaacaatgcattttgaggacagcaagaacccatgcagatgaggcattggcttgtaacccgaaccataatatatatcaggcaggaggtatagcagtttcagatcaagatccacagtggaactatcaaaggagcagtgagaactttgggaggaaagatcatatggtcacttgtttgttggaaggtacaaagaaatgtttgaaaaagacagctaactaygaaaaggttaaggaagttgctcagggcaaagatgagatctagctttgtttcaagggcgtttagtcgaggcaatcacaaaatgtactaacactgatcctgccttgagggaaaaacaatcccttttgggagtatattttataacccagtctgccccgatatctgcaagaaaccacaaaaaagagctatgggccctcaaactcctatggaacaacttttggatttggcatttttattttttaataacagagwttcaattggtacattataaattaataattctctagttatttctaatgactgttaaaacaatctactgagttaatctcagctattttatttttcatataatttccaatctctttttaatgttttcaattatttgccagaaacttaattaactagaacatagcattcctgattttatttaaatatatgtttaattatttcaatcttttgattaattgtaacagatataaaatcactggttgttgactcctattatacatagctaccaggctctaacgaagaaaataccccatctcagggaatgacacctctaagatgttgcagactgtcactcttcttaatgttagataatgtttctgtgacaatctgacataattacacatatggttacagcgtcttgtgtgtagtagtaatggcaaaggttgtgtttttttatgcctgatccacatgatattctggaaacaaattagtgtaatttgtttttggcatatcttacttctattaaaawtttatcccctgtaaaatatgggataatattcttgtcagaataatgtctaatttacaaataaaggataaactattgaaa

SEQ ID NO: 277591 - DNA, 460 bp, Homo sapiens
tttgaccccacaccaagtacaaggagttctagaagctaaaggacaacagtggatgacagggggatgcttattgaaatgtcaggctttgctgctagacactcctgatgaactcktgataccaggtgctaatcaatggaaaatagttaagcatttgcatgactctattcatttaggaagagattccctgtttcaattaatgtcttagctttttataggaaaaggcttacttaaaagagtaaagcaggttatttgggcctgtaatatatgctcggaataacccaaataaccaatctttacctcctcctctagtaaggccagttcagcatgggggaacatagcctggtgaagattggcaaatagattatacttaggtgctcccatgtaaagggtttaaatatttactaatattcgttgacacctttatcgattggattgaggcttttcctaccctgtcggaaaa

SEQ ID NO: 277592 - DNA, 613 bp, Homo sapiens
caataataatatattaatgttacatcataacattttctttgatgatctacagtacctacaatgcctaataggtamatcaaccgtgtttgtatctctgtaaagaatgatcctacagtgttaagatgatgaacaatagaagatatagcttaccccaaaccacaggttctagagtttttcaaatgagaattatttcaattcatgatgatggtctatagaatcaataactcattacagattactaaagcatatcccctggcccccaaacttttactaatgtagttttttttttttttttcaatgagggatgcgattcttttgaacaccagtaacggtgtttcagattaagccagcacgttttctttccttagatggtttgtgacatttatattcatttggaaaccctgattttactcaactaatcattattgctgttgttcatattttattatatttttctctttagttatctcattgttaaaaggaacaggacttttaaaaattatgtgtgtgtatgcgtgcgtttctttcttgcccaagtattacgtcaagtttctcaagttttaccttacacagtgcatctgggtcacattttctgctcttttaggcttgccat

SEQ ID NO: 277593 - DNA, 647 bp, Homo sapiens
aagccagcacgttttctttccttagatggtttgtgacatttatattcatttggaaaccctgattttactcaactaatyattattgctgttgttcatattttattatatttttctctttagttatctcattgttaaaaggaacaggacttttaaaaattatgtgtgtgtatgcgtgcgtttctttcttgcccaagtattacgtcaagtttctcaagttttaccttacacagtgcatctgggtcacattttctgctcttttaggcttgccataaacaggtaagtttaaatatctcaagcatttggtctttgccctaaatatgctaaagcaagggaaatattttttattaataattttacctttctaagcaaatcatcacataagaagggcagcacattaattaattaatacatatacccagaggaaaattaaacagttgaaataataaatgtggacatgtctctgaatatttgaatagaattttattatttaagttactagcaaatttaatctgtaggctcaggcaagataatgcttggaagtgttttattcttagaactgagaattctagatacctaagagtttataattttgctctttaaaatgcattttaattacttagaataattttaaagatgatcaattacta

SEQ ID NO: 277594 - DNA, 647 bp, Homo sapiens
aagccagcacgttttctttccttagatggtttgtgacatttatattcatttggaaaccctgattttactcaactaatcattattgctgttgttcatattttattatatttttctctttagttatctcattgttaaaaggaacaggacttttaaaaattatgtgtgtgtatgcgtgcgtttctttcttgcccaagtattacgtcaagtttctcaagttttaccttacacagtgcatctgggtcacattttctgctcttttaggcttgccataaacaggtaagtttaaatatctcaagcatttggtctttgccctaaatatgctaaagcaagggaaatattttttattaataattttacctttctaagcaaatcatcacataagaagggcagcacattaattaattaatacatrtacccagaggaaaattaaacagttgaaataataaatgtggacatgtctctgaatatttgaatagaattttattatttaagttactagcaaatttaatctgtaggctcaggcaagataatgcttggaagtgttttattcttagaactgagaattctagatacctaagagtttataattttgctctttaaaatgcattttaattacttagaataattttaaagatgatcaattacta

SEQ ID NO: 277595 - DNA, 596 bp, Homo sapiens
tgatatattgcattgatgacacaaagacattattttaaacacgttattgttatatgttgatatccatatgtattttttaggatcccaaaaggcacttggattgttttatccaacttaaaaagtttctagacacttgtacattttgaggtgttacaatacttccattagtagtataagatccatcaggggaaggcagtttgtggcagaaaatgtgcttagttttgtacatgttgcatttggttattgtaaggattataaaattaaaaagcattaaatgaaacaaagtaacatataagttatcctagtctgctgacatgtcatgctgatttttcaaaaatgttatttgcaaataagagtgcatcagactacctgartacaatttataaaaaaaaaatcctttcttgttaggaaaaatttgacagagtttatcaaagtccccaatagcaacaatgttgctaataatatggactcttaattgcttcaataaataagcatgtaaagtgtatatttatatttaacatttcaagtaaaagtgacctacatgaatagaagaaaaatttgcaaatgcataggctgttaattaaatgacatgaaaa

SEQ ID NO: 277596 - DNA, 455 bp, Homo sapiens
ttttgtacatgttgcatttggttattgtaaggattataaaattaaaaagcattaaatgaaacaaagtaacatataagttatcctagtctgctgacatgtcatgctgatttttcaaaaatgttatttgcaaataagagtgcatcagactacctgagtacaatttataaaaaaaaaatcctttcttgttaggaaaaatttgacagagtttatcaaagtccccaatagcaacaatgttgctaataatatggactsttaattgcttcaataaataagcatgtaaagtgtatatttatatttaacatttcaagtaaaagtgacctacatgaatagaagaaaaatttgcaaatgcataggctgttaattaaatgacatgaaaagggcaaaattgagcaaggcaagtggatatgtttgaaagacagggttttttttccccatttcttcttacattctctctt

SEQ ID NO: 277597 - DNA, 455 bp, Homo sapiens
ttttgtacatgttgcatttggttattgtaaggattataaaattaaaaagcattaaatgaaacaaagtaacatataagttatcctagtctgctgacatgtcatgctgatttttcaaaaatgttatttgcaaataagagtgcatcagactacctgagtacaatttataaaaaaaaaatcctttcttgttaggaaaaatttgacagagtttatcaaagtccccaatagcaacaatgttgctaataatatggactcttaattgcttcaataaataagcatgtaaagtgtatatttatatttaacatttcaagtaaaagtgacctacatgaatagaagaaaaatttgcaaatgcataggctgttaattaaatgacatgaaaagggcaaaattgagcaaggcaagtggatatgtttgaaagacaggkttttttttccccatttcttcttacattctctctt

SEQ ID NO: 277598 - DNA, 521 bp, Homo sapiens
aatcctcttcttggtaaatgaatttataaattatatagtatgatagaaagctacatattttatagaaaatcaaagtataaaaataattttaaataggctagtaggtagtctattgaaaagaaaacatttggataagaattatattagtgatacaggggatctatattttagacagaggaaatactggagtcaggtattctaggagcacatattctatgagaactgagtcaggtattctaggagcagatattctatgagaatggaaaattagatccatggcctggctaataggccagtgtaagaatattggattttacactaaataaattggatgttggtaaggaaattgtaatatttggcttagaatttgtaaatgatttgtgtagctgctatgcttagaagagactaactgaagcaagagcagaagcagagagataatgtatggagttagagtatttcmtaataaaagttaatgggtgacttggctcagaatggtaggcctagaggtattaagtggttgg

SEQ ID NO: 277599 - DNA, 531 bp, Homo sapiens
tcctcccacctcagcctcctgagttgctacaactasaggtgtgcaccacaacatccacaaaatgattttattttgcatatttttagagatggggcctccctttgttgtccaggctggtttcaaattcctggactcaagcaattttcctgcctaagcatcctaattaactgagttgataggtgtgagccactgcactccgttaagaataaacttcttaataactgggattttaagggaattctatttgttcattattaacttttccactctgtggaatattatagctgtatttctattttactatattttcattgtttctgaattgtatgttacttcttgctgttgtaagtttgagacagaacctcaatgttactataaaaaacacataggaatgttcaggtaatgtgatctttccattgatctattcattatattaattgataatttataaaataaatctatgcattgtaattgaattagtaaagaattttaaatccattttagactaccaaaatgtgttttcagaaaaga

SEQ ID NO: 277600 - DNA, 582 bp, Homo sapiens
ccaccacgatgacagctccattttgtttttttagctgtcattttcccaacattccattagttcttcagattgccttgtgcttccaacgaatcattacaacatatttattgattagacttctctccagatacaagktgtttgaacatgagttatcaagataaaacaatacatattttatgtttattttgatacaaaaaaatctattttccaaattaagtaatactctcacatgaatttactattacctattcagccaaatattccagcaagtcaacttataggttacagaaacttttgaaagaagtccattaagtaatttaaaggtatttgctaactgaagttttctatttttattacctaagaatagggtcggcctgtacaattataaataaatcatgcatctttaagcttattgaatttttaaaaacttttcataatttaaaagttatatgatccattatatgtttattttgtcattatttatgctacataatatctgtgtacaaatcacaaaattatattgaacccaacagaacttatgtaagataggaaggggatatattgccaggtaattttggaact

SEQ ID NO: 277601 - DNA, 582 bp, Homo sapiens
ccaccacgatgacagctccattttgtttttttagctgtcattttcccaacattccattagttcttcagattgccttgtgcttccaacgaatcattacaacatatttattgattagacttctctccagatacaagttgtttraacatgagttatcaagataaaacaatacatattttatgtttattttgatacaaaaaaatctattttccaaattaagtaatactctcacatgaatttactattacctattcagccaaatattccagcaagtcaacttataggttacagaaacttttgaaagaagtccattaagtaatttaaaggtatttgctaactgaagttttctatttttattacctaagaatagggtcggcctgtacaattataaataaatcatgcatctttaagcttattgaatttttaaaaacttttcataatttaaaagttatatgatccattatatgtttattttgtcattatttatgctacataatatctgtgtacaaatcacaaaattatattgaacccaacagaacttatgtaagataggaaggggatatattgccaggtaattttggaact

SEQ ID NO: 277602 - DNA, 582 bp, Homo sapiens
ccaccacgatgacagctccattttgtttttttagctgtcattttcccaacattccattagttcttcagattgccttgtgcttccaacgaatcattacaacatatttattgattagacttctctccagatacaagttgtttgaacatgagttatcaagataaaacaatacatattttatgtttattttgatacaaaaaaatctattttccaaattaagtaatactctcacatgaatttactattacctattcagccaaatattccagcaagtcaacttataggttacagaaacttttgaaagaagtccattaagtaatttaaaggtatttgctaactgaagttttctatttttattacctaagaatagggtcggcctgtacaattataaataaatcatgcatctttaagcttaytgaatttttaaaaacttttcataatttaaaagttatatgatccattatatgtttattttgtcattatttatgctacataatatctgtgtacaaatcacaaaattatattgaacccaacagaacttatgtaagataggaaggggatatattgccaggtaattttggaact

SEQ ID NO: 277603 - DNA, 589 bp, Homo sapiens
tggagatctcatggagaatttctgctagaacagtgcaaaaggggaatgtgggattggagcccccacacatagtactcactggagcactgcctattggagctgtgggaagtgggccactgtcctccagaacccggaatagtagatmtactgacagctttccacctggaaaagccacagacactgaccaccagcagtgaaagcagctgggaggggcattgtaccctgcaaagccacaggggtggagctgcccaaagtcctgcggtgctcatctcttgcttcagcatgatctgaatgtgagacacggagtcaaaggagatcattttggatctttacaattttatgactccccagatggatttcagaatcgcatgggacctgtagcccctttgttttggctaatttctcccatttggaacaggaacatttactcaatgcttgtacctgcattgtgtcttgaaagtaactaatttgctttggattttataggctcctaggtggaagggtcttgtcttgtctcagatgttactttggacttgaactttggggttaatgctggaatgaattattccccaaatcccccaaagagttt

SEQ ID NO: 277604 - DNA, 589 bp, Homo sapiens
tggagatctcatggagaatttctgctagaacagtgcaaaaggggaatgtgggattggagcccccacacatagtactcactggagcactgcctattggagctgtgggaagtgggccactgtcctccagaacccggaatagtagatctactgacagctttccacctggaaaagccacagacactgaccaccagcagtgaaagcagctgggaggggcattgtaccctgcaaagccacaggggtggagctgcccaaagtcctgcggtgctcatctcttgcttcagcatgatctgaatgtgagacacggagtcaaaggagatcattttggatctttacaattttatgactccccagatggatttcagaatcgcatgggacctgtagcccctttgttttggytaatttctcccatttggaacaggaacatttactcaatgcttgtacctgcattgtgtcttgaaagtaactaatttgctttggattttataggctcctaggtggaagggtcttgtcttgtctcagatgttactttggacttgaactttggggttaatgctggaatgaattattccccaaatcccccaaagagttt

SEQ ID NO: 277605 - DNA, 553 bp, Homo sapiens
ataacacataaaaaatttataaatgtattaactttcatcttcaaatcagctgttttggctgttccaggataatggaggtaggtttcataaatatgtttcctttgctagctgacattgtgttaagccatgttagtagagggtgctcaagaaacacaagaggaggagggggatttttcttcctgatgccaytgtgtctcactttccagatttctaaggaatgtgctttttccagcacttgtctccttaacctacacagttttctctacctctaggcacctgcaatgcacacttcctacaaaacttggcttatgcaaagtgcatagcttcttttctgctagtttcctgaagggcacagctttctctagcacctgacttcagcacagtgtattttctcaagcatccagcccctgaagatatgcccccactatctggtttcttctgatagcagcagaaagaaacactcatcagcctgcaaattctccctgtcatctctcttggaagctttgcagtggaatgccacagatgaggcacattcacacgaacagactcccca

SEQ ID NO: 277606 - DNA, 596 bp, Homo sapiens
tattttaatatatataacattaataaatatgtaaataattaaattgaggtaattacatgaattcttattttcaatgttttataattaatttaattatctgggtcctcaaatggcccctatttgcatagtgaatcctcttcaagcaaggtagctcctgtttccttgtgacttgcctccattcttactttcttgcataaatgatgttctagatttatctcatacctaacctgccacagacctgtaatcatccatgtgttcaagaatctcttttgatagagatcaagatctgagtactaagtgttctcatgtccagtggggtatgtttgctttgttgccstttctttgaaaaggattaggaaattaatgcactcgtacacatatacatatccacacttgcaaatataaacagacatgtacatatacaggcatactgtgaaagaaaaataaatctgggggtccccaaatcactaagctaaaagaagctaaaagaaaaagccaagctagaaactgcttagggacaaactgcctcccattctattcaaagtcacccctctgctcactgaaataaatgcatatctgatttcctcctttggaca

SEQ ID NO: 277607 - DNA, 596 bp, Homo sapiens
tattttaatatatataacattaataaatatgtaaataattaaattgaggtaattacatgaattcttattttcaatgttttataattaatttaattatctgggtcctcaaatggcccctatttgcatagtgaatcctcttcaagcaaggtagctcctgtttccttgtgacttgcctccattcttactttcttgcataaatgatgttctagatttatctcatacctaacctgccacagacctgtaatcatccatgtgttcaagaatctcttttgatagagatcaagatctgagtactaagtgttctcatgtccagtggggtatgtttgctttgttgccgtttctttgaaaaggattaggaaattaatgcactcgtrcacatatacatatccacacttgcaaatataaacagacatgtacatatacaggcatactgtgaaagaaaaataaatctgggggtccccaaatcactaagctaaaagaagctaaaagaaaaagccaagctagaaactgcttagggacaaactgcctcccattctattcaaagtcacccctctgctcactgaaataaatgcatatctgatttcctcctttggaca

SEQ ID NO: 277608 - DNA, 595 bp, Homo sapiens
aagtcaatttatttcattgaaaataaatgattttacctcactacattttcactgtagaaagcaattgtgggaaagaaacatcattaaaccataaattgcgaatattaacaaaagttattagtaatggttaaataaattcacttttatagcattcatataaacatggcaggcacacaaatgtgtgtgattatcttagaacagttgagacaccattcgaagcatgcacttatatattctctagaatctgctttaatcagaggagcacataaatatgagatgatgcatgataagcaataaagagacatgggttgagaaactatgagttaacaatgtttgcaatatattgagaactatataaataaatagatatttcaaactgcataattaaggatgtctctttaaacaaggagtggttttatttaaaagtgtatttccatccacaaaaagcatatggcaagtggaataaytgctgtgttataaaccccatgtaactttaacttaaacaaaaaaaggaatcattagccacagtactgagctttgttactcaaagaatagccttcattctaaggctgtagttggccaaaggtttgatgta

SEQ ID NO: 277609 - DNA, 360 bp, Homo sapiens
gacgatcaatggtcacagcaaaagttttctgaggagctaaaggcatttttcttgttgactttttggtgagcaaaagaacaacatctgattactatgagagtgttttgagaaagttagccaaagcttcaccagaaaaatacccaggaaagcttcaccagagagtccttccccaccatgacagtgcacctgcatatccctttcatcacacaaggccaattttgtgagacttaaaatggaaaattattattcattcaccttacagtcctgattttgcsccttctgactttttgttccctaatcttaaaaaaatctgtaaaggacacccattattttcagacaataaaaataaaaactattttg

SEQ ID NO: 277610 - DNA, 590 bp, Homo sapiens
taaatcctctacatttcctctaaatttaagacaatctttatatacaatttttagttagtaaaatgaaaccaaatattagttttagcaaattgattttaaaaactataaagtgaacaatagtacttaagaattaaaaataattggcaaatgatagcygtatcattattttttgtggctgctgtaataaatcaccacaaactaaatgaattaaaacaatagaaaattattgtcttactcttttggagatcaggattccagaatcaacttgttggcaggaatatgttccctctagaagctctggagaagaatctgctcaaggaatctctcatagactctggtggctagtggcaatacttggtattttttagcttgaacatgcataatgcaacgtatgcttctattttcacagtatcttctcctctgtttcttggtgtttttgttgttgttgttttgtttttgtttttaattgcttttcattttctgtatgttgttaatttttttttccaaataagttgactttcacagattccaagtatttggttgtatacacatctttagtttgggggttgggacatcattcaatccactac

SEQ ID NO: 277611 - DNA, 401 bp, Homo sapiens
tgtttttaattttaattcaataaaacagcagaattatgctaaagggagaaaatgtaagacattcattactcccctggaaatcacataaatactatatttgttgtgaaaaagcagatagcaaaaaattattttaaggtaaactaaaatctgggccaatagaaaaaaatcgccaaatactgaagcaacatataaaaccttataggacaccttaaataaagttgaagatgtacacattctgtaacacaattttttcactcccaacttgataacactgagaaatgttcatgcatatgyataaagagatatgcccatgaatgttcactacagtattgatctcaaaaattttaaaagactaggttaagtgtcaataaacagaagaataaaaaattaaactggtagaa

SEQ ID NO: 277612 - DNA, 623 bp, Homo sapiens
atgatccaacaatgccaccactggatatttatccaaaaaaataaaaataaaacattccataaagggatacctgtactctcatgtttattgcaacattagtcacaatatgaaatatatggaatcaacctatatcagttcatgtgcctatcagttgatgaatgaataaagaaaatctggtgtatatacacaatggaatactctttgaccataaaaaaaagagaaatcatcttatttgctacagtatggatggtactggaactcatcatattaagtaaaataatacaagcacagaaggacaaatatagcttgctatcactcctaagtggcagctaaaaatgtttatctcatagaactagagaatataacggtagataacagaagttgggatggttgtgtgggtggggatggaggggataaagtgaaggtggttaagaggtataaacatacagctggatagaaggaataatttccaacgtttgatagcagagtagagtgactatagttarcaataatgtatatgtatttcaaaactggaagagagggctgaaatgttcccaacacacagaaatgatagatacttgaggtgatggatacccccaaataccctgacttgatccttacat

SEQ ID NO: 277613 - DNA, 628 bp, Homo sapiens
agtgttattaaattcttaggatcaacataaaaatatgtcaattaaaacaacatatattagttgctacagtatgtattaaggcattaatagtttcaaaactgaagtatcatgacaaaatatttaaattttaatttaaaaacacagttaaatcttattttaaaggttttaaactttcatgatcatcttcctgtaaggtatttggatactttgtttattatgagtatattcctaatccacaaaatttgaacagattaacatttacttaaatacatttacttaaatacatttttctcactatggataaaaaaaaatttaaggatactgctaagtagactataaccattgttatgcagaagacttattgtagaggcaaaacaataggtagacaaaactgttgcttctaaaatatctttcatgtcatcaatagcaagttcacatctacccttaagaatgtcactatttatacaagagataagttgtaaaaataaygaatacatttgtaatatttaccggatttcatgaaggacctacctttttgactatgaaataatatttataccaacacaattagagcaaataagtgaccagtatattaaatacttgaatgttagagtgaaaatgacaccca

SEQ ID NO: 277614 - DNA, 558 bp, Homo sapiens
tgccatattgagggctcagtgttggtttcagctgatgggaaactgggcactcagcagctgccatagccaagtcagccttgctgagtggaagtccatgttgctgagactatgcataacctccattcctgccaccatgaccactttgctcataggcccattggggatgacggggtagctggggaaagaggctgagtgttgcccacagaatgagtcatcttatccacttggttattaaaatcctcctctgctaaagttacccattgatgagcactcacaagggatataaatatcttcagtttttgaccacacagagaggtccaaccacatacttcttccccaaatttctttgtcaccaattttccaatcaagcttcttccaaattcttgacctttaagtcaaaccattggttacagcccacatatcagtatacaatcgcaaatctggccatttattcctccatgcaaagtacacaaccaggtgcactgctcgaagttctgcccactgaaaagattttccttyactgttataccttagggttatcctagaaaggggatatag

SEQ ID NO: 277615 - DNA, 569 bp, Homo sapiens
tcattttgaccaaactcaaaccttatttccttatgccatataaagtttaaaaattattaaaagttaaaatcatgttcatttgttttcaatataagagacattcatcaatatttgtgtaatcacaatccaaattatcttcctgttttgtgggagttcctcattttgtgtctgcaagagaatcagaaacctcccttacttacaaaatccaaaggttatgtgttgtttgctccttatacttctgactgatccattcagaagacatttcacaacaaagaacacaaattcaggagaaagtggtgaamcagtaacaacactgagaaacctaaatacattcacgattttaaacatttcataaaatatttaaaaaccattaaacagggatagatttctttatttgaggcaaatacttccacattgtgctaaaacatctcaactgatctgttatatattatttaggagaaaattttttaaaaaataaaaatttacattaaaagcaaagagggaaagtgtgccatttagcataaatttcatgcaggtaaaacttttttccagttaaagcaattatttga

SEQ ID NO: 277616 - DNA, 1058 bp, Homo sapiens
tggcagcttcctgtcacgttagcctcatctatttctacttgccatcttgaactttatgttttagttctatggaaaaattcgtatctcattcgatactctatttttttctaaaagaatgcatttttacattacacttattctgccttttatactgcattctttaacagtaaaattcaattcatccttcaaaaatcaatcgttcataaaatgttctaaccctccytatccccatctatgttttatgtattctggacccccaacataaaagtgtttttacttgtttaaagcatttttacatttggttgaagtggtgtctttgtttctcaactaatttatgagctatctcacaattattctgtattttatcttaaaatttcagaatttaccacataaaaagtcattgataaatttttgttgtaataatacataatgcaattactttaaatatatactctcttagaacttcacacatgtagggtatgagccaaagccactggtaaaggctttttactttttaaacwataatacataatgcaattactttaaatatatactctcttagaacttcacacatgtagggtatgagccaaagccactggtaaaggctttttactttttaaactagaaggtacacattaaccttaaggaagaacagaatttagactctggggtaggggtttaagaagagtacttgaagaagacacgaaggtattatacactacccaactctccttgtgtgcttaaaaatattaaaaaatagaaaagaaagaaaaaccacagaaattcaaaagtacggttacaaccatatactacttgcctacttattattatatttgctttttttcttttttcttattttttaattgtaaattgaaaaattatgtttgtatgtatttctggagtacaaagtgatatgaatgcaawgtgaaataattaatttaattaacacatttgtcacttcaaatacctatctttttttgtggtgacaacatttgaaatttacttagtgattttgaaatatacaatacattattatttaccacattcaccatgctgtt

SEQ ID NO: 277617 - DNA, 1269 bp, Homo sapiens
ataatatattgaatacagattcacattaaaagtgaaaaatcagtatattctagttataamattatggatgagtattatttttccccttagtggggagctcaggcacctttccacttcatcctagctataggcacaaagaccaggagtgcacatataaaggccaatcaaataaaaactccttttcttttggatgatggtactagtgcaaaaagacatctgggttatgttttaaaaatacaacctctcaagctatgcccacagaaatgctaattaattatgtctggcaaaacgatgagttgaggcatgcatatcttaaacaatcagcctaggcaattttcatgaagattctgtgagctagataagtttgtaggtatgatgaagaaagaaataaaatctcttaaaagcagcattttccttttttctctggcaagtgtttagaatttaataaacaaatgaaaataaattttatcatctagacttacattgagcaacatcaaatgaatcttttacaaacccaattgccaaacggagagaagagagaaagaaagagagagcaatactaaaaataatgcccatactctgactcaaaaagtcaagagttcttaatagctcagggaatactgtggtcagcaggacagwaggcatgcatatcttaaacaatcagcctaggcaattttcatgaagattctgtgagctagataagtttgtaggtatgatgaagaaagaaataaaatctcttaaaagcagcattttccttttttctctggcaagtgtttagaatttaataaacaaatgaaaataaattttatcatctagacttacattgagcaacatcaaatgaatcttttacaaacccaattgccaaacggagagaagagagaaagaaagagagagcaatactaaaaataatgcccatactctgactcaaaaagtcaagagttcttaatagctcagggaatactgtggtcagcaggacagcggacctcacgcccggctaatttttcttttatatttttaggagacacggggtgtcgtcatgttggccaggctggtcttgaactcctgacctcaggtgatccacctgcctcagtctcccaaagtgttggaattacaggagtgagccaccacgcccagactttccatttatttttgttatcagtttaccttagtagaagacaaaatctgtgcagccagggatttctttagtattattawtaataataataataataatattgcagtaatctaagcacttcagacaatacttat

SEQ ID NO: 277618 - DNA, 373 bp, Homo sapiens
aatgacagaagaaacaagttctagcctggtcctgctgaaatgcatttcccccaaacatacccaattccataatttcctactacaaagtttctatttctaagattagttctgctggtctagatctgggaatgatagcactgacatagcagtctctaggcaaagaatactgcagtgtggacacctaaagctggtgtcagtgagtcttataaagaagccagagctatgtttcttttttttttttatttttcgacaaatgtaaagccacttaacagacaatgaaatccgatgtaggaaaacaacaactttcttaaacaacagtgartgacagtagtcacagaaagatggcattcacattatggccaccttccaaata

SEQ ID NO: 277619 - DNA, 570 bp, Homo sapiens
ggatccaactgtccaggaagcatccttgaaaattctggggatataactctcatatacaaacacacttatatactcatcagaacaaagaacaaaatattaatatacaaataaataatcatatacataaatacatattcagattagtagtaagtggcaagaagggaaaataatagggtttggaagctaatggttagagtggacggtgacaataactacagcaaccagatatctgagtcgaaaataatgacaatgagtcagtatgaaaaattccagccaaacattctaggccaacagcaaccattgggacttccagcaatgatgaacatgttcaatatatgtgatatycaatatgctagtcattaggaacatgtgccacctggcactagaattatggctgtttaactgagaaatgagagtttaattgtctttgattgatttaaattcaaaataccccaagtagctagtgtctaatctattggaacagcacagctctaggcccaagaacaatagctcttcatgtgggaattatttagccacatttgaggaaaagaagagagatcagtgttagta

SEQ ID NO: 277620 - DNA, 615 bp, Homo sapiens
gctactgctctcaaccctgaaactgcttctctagacccatgatactcatcatctgaccctggaactctaccaaagaaaaatccatgtctccgtgatccgtctgggtggtaagaaatagctgaaacagaatgrcaatgtcctctgcctgaactctgcttttcaaatagcacatctcattgccagaatccaattctcatgcagaatagtctataagacagagtgggaaatgttgtttttagcttttcagcttccatggtacaaaaggacactaaaaattcacactgctggccagtctcatgttagcctatttctggagcatctccttcaatacaatgcttcaacatcttttaaaataacaacagccatcctttgacatcatgccttcctccaactataatcttattgttctggtgtattttatagaaaagcgctttgaaaaaagttttctggactgttccacttccacatgccccagatattcttcatgttcctccaatttggctttgatatttctcactttatttaaaatgattttgccagaaatgagtcaagttttgtgttacaaatttagtgtcaaattattgctctgattttctcaaattttctgtaagattt

SEQ ID NO: 277621 - DNA, 489 bp, Homo sapiens
ctctcatacaaactttctgcttttttgtggtaaatccatttcattgggtatactttgtcttatatcttagattacatttttccattgaatattttatttaataatttgaatattcttcatttgtaggagaggctttttgtactagtctatttcggctgggtggcttaagcaatagaaatgtattttctcgcaggtttctttttgttttctacagcaaagtttcattagctgtgaaaattgaggagataaagacaggcagttttattcctatggcaaactaattttttgtttcttttgtgattagtaagtcattacaccctactcacttctctacctagcaatgagtaccttcaatcaaagaamaatgtgatagaagatgttttctccctctttaagattctcataccatatttaccttgaagtgtgttagcattccacattcctaaatccagctgtagggttgattcatatgcatatcaactgccccta

SEQ ID NO: 277622 - DNA, 632 bp, Homo sapiens
ggtggggacattatgggtaatttgatgctgttcttgaaactttcttgtacaataatacttttttttttaagtgagaggattatgttatattgtgggaaaaaaatacaataaaaagcaattcttatttagataaatccttgcaagttttcggaataacattgcaaattacatttcctacgataagctgccaagaaaakgtatttattagtttgacattgtacttctctgtctcactaaatgtgaaagaagtgtcaatagaactctgaatatacacagcaaatttaagaattttatccaaatgaagttactctttgtgtgtatattagacagtattgcctagaagttaagcttatggttaaaggaaattagaataaatcacccaaaaatatgcttatttagcataaggattattttaagctgaaggcagttgataaacaggacactttgttttctatccctttcaaaagcctcaaggcagagtataaccttttctttgtgaagatgttcctccttcccttttccataccaggaggaggcaaacaaccattatcattggagaaataaatttggcaccgccttgagtctacaccagaaaatgctactaagataacacttatcttctattagtttct

SEQ ID NO: 277623 - DNA, 579 bp, Homo sapiens
tcagtaggtctagtttctgattgctaagatttaatttgtattttcggttttaaattatatacacctatacttgcataaacttatacaaaaatttatatggtttaacattttaacataccttcaacaatttcgtgatgccaaattattattggtatttacaatccacttctccttctccagggctcattttctagaatagcttgttctactataaaaatarcaatcctttgttaacaatttactatgtgctaagatccatgttacattcatgaagtgcattatcttacccctaacaatctctaagttaaaaagtgaaaaattattctattttacatgtgagaattcaaggcttagaaaattaaatctatttcttgaagacttaaaattctgaatttttactcaatcttattgaccctaatgccaaagctatttgatttaaataatttcctttttactttgacttatttaattgtaattgtttttaagtctttatttttactaaaattaactattttagtgttctttatttgtatgcactttaaaactagtagtacatagtctcttatttgttaatattta

SEQ ID NO: 277624 - DNA, 572 bp, Homo sapiens
tcccagatactcaagagactgaggcagaaaaatcgcttgagcccaggagttggaggctgcagtgaaccacgattgagccactgcactccagcctgggtgatagagtgagatccagtctcaaaacaaaacaaaacaaacaaaaaaaaagccatagagaattatgtctataatataggatcccacatacctgaatcctttcctgctctaaccaaagaccacatgtgaccactaaggcaatgtgtgtactgatgagaaactgcagcaaaggaacactattctaggagttatgctagattggcacctagtaaaaccttctcaagttttctccatatcctcatcgaatactctagtcaagcagcctcgattgcgcccaggctgtctttagcctaggctctgcaggcctgggtggtcttcccaatcccacagatgacagcttaccattctactatgaggaaggctgtctcaggtgagccagggcattggtcccaaaggcatgggtagaaatggaacacrgcccatctcaaatctgttcaactcagagcaaagggaagcactctagccccaacctggta

SEQ ID NO: 277625 - DNA, 544 bp, Homo sapiens
tggtgcacttataggaatcaatacatttcctttcttgcttaagaccgtgtgagctagacttctgtcacttgcagctgaaacaatcctaatgcccctgtgtcaaaaacacattcccaggcctgtgaaggtagctgaattagaatctccagtaatatgacatatacctgtatctgtatctttctggggaatctcatgatctaacagctcttgcttgaaaaaaatttcctctgacgttctaccatggagtgtgcaagaagcccagttgggaaatccaagattatccacatgtaaagatggctcaggctgaatgcttcggcaagtctaggagtcaaggtattttacatgatttrtctttaatctattcctgctcttaaactctcagatgggaatcacactttctgattgtggcaatttctcagctttggagaggagggagacagagttctgtggttctgtgttcagtaagacccatttcctcatctttctgcactcccagtcctccacgtatgagccaaagtgatgtgtgccaatttcaggcttggct

SEQ ID NO: 277626 - DNA, 892 bp, Homo sapiens
ctcagacaggctgttgttttgctttcaccaataaatcatttataattagaagtagaaaactattctttccagtgcaaatacatccctttcaaaagcagttctctttttgtgaatgatgtctagtgtctaagaaackagggtaacctttattatatgcattgctctaatcgaagcattgttttttgcggtgaactcaaggttacatgtttaagaaaagcatcgggttaattccattaggaaaagtgtcttattcataaacctttagccactggaaaaacaccattaggaggccacacaagtgtgtatagctggatagaatttgacaactggcaaaacaaaacwtgacgttgtgcaaagtgagcctgtgagtttaaatgtatggattgtacaccttgctcttcctaattgcagatttaacaggatttgatgacctaatgagtttatttctgaatgatttatatttctttgtcagttcaatgatttagtattttaaatttttttaaatcacattttattgagataatgctattagtgtttctttcccatcacttaacaaagttaagtcactcctctcccaccccacttttgtacctaccaatgtttttttcacagttacaggctgattggcttgacgtgtcttaggataccacccaaagagagcttcattttataaataccaagctcattttcctaaatattttcaaaaagatagatttatcctcatatagtawattcagattaataattttggaaagggtcatgtgaccatggtattacatggctgtggaagaccctccaagatcttgttttgggatagaaggactcagacatccaaacttttaaattaatgaacttattaaattctaaaactttgtaacagtgttaatttgag

SEQ ID NO: 277627 - DNA, 550 bp, Homo sapiens
tgacgttgtgcaaagtgagcctgtgagtttaaatgtatggattgtacaccttgctcttcctaattgcagatttaacaggatttgatgacctaatgagtttatttctgaatgatttatatttctttgtcagttcaatgatttagtattttaaatttttttaaatcacattttattgagataatgctattagtgtttctttcccatcacttaacaaagttaagtcactcctctcccaccccacttttgtacctaccaatgtttttttcacagttacaggctgattggcttgacgtgtcttaggataccacccaaagagagcttcattttataaataccaagctcattttcctaaatattttcaaaaagatagatttatcctcatatagtaaattcagattaataattttggaaagggtcatgtgaccatggtattacatggctgtggaagacsctccaagatcttgttttgggatagaaggactcagacatccaaacttttaaattaatgaacttattaaattctaaaactttgtaacagtgttaatttgag

SEQ ID NO: 277628 - DNA, 599 bp, Homo sapiens
tacgaagagtttgtcaaccagaataatctagaacctggcaattcaaataccattcaaagcaaatgttttatctaataactggaactaaatgttaggcctcatgacagttcaatatttactaaataagtttaataacagggtaagccctcagtatccagagcagagacaagcacaccatatttacacatacaaattctgcctttarccatctgaaagggccccgaactattgcagcaagcaaagagtctttgcattgtcctaaaatccatacaatactttatattttacacattttaatagctagtttaacaaataacaagtaccatgcttaattctctgcatgcattatttcaactaattattggaataatcttataaagtgggtactttcgtctcagcttacaggtgagaaaacaaaagttaaatagatcgcccagggctctgctggaacgtgttaagcagggatttcagcctgtccagtcagaccccagaagttgtgttcttaaccattagcaacacatcatcccaggcaggccctacatgagcctcataaccaattttatgctggatagtattatccctatttcacagatggcaaa

SEQ ID NO: 277629 - DNA, 525 bp, Homo sapiens
ctttcagaaatgagtaacattgtaggatagtacttattgcttgtacttagctttgtgtgctagctgagcatttgtaaatagaaggcattcacgggtaaaatgtgtttcctttagccaaatgcacaatggtagtgcctttctagaatccaagctaaagatgtcgtcacatgccacatccacacacttcttagcaaaaatccaactagaagaactttgctatttacaacaaaggcaaatgctrtcaagaagtaggcttagtaccacaggaagcggagccaaatgtgttcttgaaatttataagttgacctgaaaataatgttttgggaagccatggcttgccgttgtcagctgtcaaaattgagcttggcaggagaaatcagggtcaggaacagaatagagatagtcaaaaagagacagaacagagagagggctactgttgtttctggagtccagtgaccacccgggttctagtgtggtactggcagtggactaaataagtggatccaccctaaggtggagagaagg

SEQ ID NO: 277630 - DNA, 525 bp, Homo sapiens
ctttcagaaatgagtaacattgtaggatagtacttattgcttgtacttagctttgtgtgctagctgagcatttgtaaatagaaggcattcacgggtaaaatgtgtttcctttagccaaatgcacaatggtagtgcctttctagaatccaagctaaagatgtcgtcacatgccacatccacacacttcttagcaaaaatccaactagaagaactttgctatttacaacaaaggcaaatgctgtcaagaagtaggcttagtaccacaggaagcggagccaaatgtgttcttgaaatttataagttgacctgaaaataatgttttgggaagccatggcttgcygttgtcagctgtcaaaattgagcttggcaggagaaatcagggtcaggaacagaatagagatagtcaaaaagagacagaacagagagagggctactgttgtttctggagtccagtgaccacccgggttctagtgtggtactggcagtggactaaataagtggatccaccctaaggtggagagaagg

SEQ ID NO: 277631 - DNA, 525 bp, Homo sapiens
ttcccgacccacaaaaactgtaaaatctttctcttgttttaagccaccaaacttaaacattaaacagcaataagataactgatacagctcccatactcacatgtagattcatcagcagatgtcagatgactttacttgtttaaggtggttcagcacaatctctgtccaattagatatgcagacacagagataatgcttaggaagctagccttaaatatttttaaaaagcaagaatgtaagaaatttcatcagaaatttsagcagcttcacacaacagagaagacaagattcccagatagcaatttcatgattcacaataaaccatggagtgggggaaatcagaatccaaagttgctgtaatttttttaattggcaaataaaactgtatatattagtggtgtacaacataatgatacattatggaacagctacatcaagataattaacatattcatgacatatcaattaacatatccattgcaatattttcaatgcccagttttcaacagaaaattacaagatatg

SEQ ID NO: 277632 - DNA, 1085 bp, Homo sapiens
ctcttcactcttggaggattattttgctggatgtagaagtctaggttggtgggtttctttgttttgttttgttttgttttcaacactttaaatattttactccactctcttgttgcttgcatagtttctgatgagaagtccactgtaattctcatctttgctcctttataggtaraggcaaaggtgtttgtctttctttggcttctttcaagagtttctctttgtctttgtttttttctgaagtttgaatatgatattcctaggtgtagaatgtttggcatttatcctgcgtgatgttactctgagctcccaagatctatagtttggtgcatgtcattaattttggaaatttcttggtggttattactttaggtatttttctgctccatcctctttgctccttctaatttgaattacgttcaaactcttgaaattgctccacagttttggggtattctattctgttttttttccccatcattttagctctttgtattctaatctgtaaaatttctatggacacatwtaatagctcctgacagtaaatatactacttgttccaggtgcatttgaatggaagcctcccataaatgattttttaaatagtcccagacaaaatatagcaaacaacatggggaattcctgagagttgacatcctctctgaatcgccctagggagtcaaggtgggcagtttctttgtaggtgctttagttctcctttgtccctccagataacatgcaatgtagattgctttaggctgaatcttcagcggggccagcaacacwggtcatcttctccaccatttagaacttttcatttgtcttggtcatggttctggggtcttcagcaggcagaagttgtcatcttgaggtgggcaacaggtgccaggtgaggatgctggttctgagattggaagccttatttgaggggcagaaggaaggcatttgggaatagtaagccataatcaacaagcatcagagagaaatgtgacagaaattccacagtggggctttataatagaaaaagcagaaggtatgctggaggatccatggattacggattcatgcatcatgaaagggccggt

SEQ ID NO: 277633 - DNA, 536 bp, Homo sapiens
gaacagcgaggctgtaggttaggcagagccagaccataaaaggcctaagagccagggtaagggacaaggaagttatgcaaagttttagagcagagtgtgatgacctcagaatttcaagctcgctgatggtctagggccaaggactgcctcaggtggaaaggtttcctctcattgcaatgaattgtacttgcaaacttacttattctggggcactaaccagtgccaatacttggcttttttttctttgcagcctgagttcccaacaaaccctgtacagttttctgggtggtgmccaactatagtgggcttcagcctttcttaatttgccttccactgaatgaagcgcctgagacacagaattgggcgtgatatggtttggctgtgtccccacccaaatctcatcttgaattgtaactcccacaattcccacgtgttgtgggaggaacccagtgggcagtgattgaattatgggggcaggtcttttctgccctcttttcatgatagtgaatgagtctcatgagatctgatggtttcaa

SEQ ID NO: 277634 - DNA, 539 bp, Homo sapiens
tcctaaaagggttctcaaagtctgtccaattggtagtgaggaagaaaaaataaaactgagtgtgttttctgtaggcagggatctgggggagcatgcgggggctgtaacataaactgccacaatttgataaagagcaacatcaatatcaacatgaacaacttttttccttcctttgaaagctaagcaggattccaagagcaggtgtgagcctgtgagtgtgtatgcccatgtctgtgtttctgcrgggcagttttaaggaaagcattgagttttcagggacaggtggctggctctggtctctgaaaaggagggctcaaggtggcaaatctgcaggattctagagggcactgtctcagccccaagtagaggtcgagagattggctggtctggagaaattctagaatcacagaatcaaggcttggaaaagccagagagattattttatttctcccaacccctataccttttactttacttgaaggagatgatgatgatagcagcaataactgctggtttttgctcacttattatatagacag

SEQ ID NO: 277635 - DNA, 349 bp, Homo sapiens
taggaatctactatagggttctaaacaagagaatgagaatctctgatttatttgtttttatttttatgtttagggcagagtttcactctgtcacccaggccggagtacagaggtgcaatcacatctcactggaacctcaaacttccaggctcaagcaattcccctacctcagcctgccaagtagctgggatgcctgccaccatgccctgttaatttttaattttttttgtagagatgggtcttgctatgttgcccaggctggtctcaaacaccgggcctcaagtgatcctcctgcytaggcctcccaaagcactgggattacagagacgagccaccatgtccagcctga

SEQ ID NO: 277636 - DNA, 508 bp, Homo sapiens
tatgaaaatatatgagtccactttcctgccctagcaaaaacagactagtggccatagtgaaatctttcttccctgttaaagggtctggcaaaccttaagtcttcatcctgaatgcgagttgctgtttatcagagattgaggtgggaaaagtctacgcattttggctgaactttcattgaacacagaacaaactgtggaaggtgattagttctaaaaagactacatgtcagctctgagctctttttggtatcatttgtgtattcctgtcmaaagtagatgcagggaacagcaacagtattatattgggtaattatagtgaatggatgtgatactttatttgcaaggaatcctactcatcattgtccatgagtaattgacagagcagtgccatttaccaacaagggtttactgagcagctatttggcaagccttgtgctaatttgaatgcaacatgcatacctcaagttgaaatgctctgaaaattttgtttgttgcaatctcgcctttc

SEQ ID NO: 277637 - DNA, 494 bp, Homo sapiens
acatgttgtggggaggggtggttcagtgggagactctgagttagagcagaggtcatgctgctgcagcctccacacctccattccactttgcctggagatgttggctttgctcaggggttggctttcactctttccctgtcaaagctcaactgctctgcatctctagaatgtcctgggtgaaacctgatgaagtgttatcgagcattaagaggtgatgactgggatatctggtggatagattctggctttagratcaattagaactaggtttgcctcctatgtgaccttaggcaagatacttaaacctctctgatcttggcattttcatcattgaaatggaaataatggtatgtatctcagatgaaatggaatgatacacattaaggatacagtagtcaaccattgtgagcccccagtttcatattgccatgattgtcttcaatggttaaatccaaaaggattcaatggaagatgaagttatgatcccagtgaag

SEQ ID NO: 277638 - DNA, 523 bp, Homo sapiens
gcaatgcctttccaggaattagagaaaaacagcagccagcccatctgcccaggaggctgtgagtgcctggacagtgcatgttttgttaattagtacaaaggttctacctgagctggcggaggtcctgccaagtactcttcctggagctagaaaacttgggctgggatctgggcacggctagagtgagtcctctctctcctttgagaccgttttatttgcataaaacagagtgtggcttcctcactgttcacaggkttgctgtagaatccaatgagaccatggacgtaaaagatgcacagcacattgtgaaatgctgacactgcccgtggctagtcttggagcttcctctttctctggacttcattcattgctcctctagctacctttaagactagctcaggtgaatctccttttatcctggccttcccggtgatcctgagattgccttgcttacctctgctatcttagtatttaagtctgtgctatgtgcattgggtggttccaggaggactctcgttgtaag

SEQ ID NO: 277639 - DNA, 578 bp, Homo sapiens
agcattgttcctgggtgtgtctgtgagggtgttgccaaggaagatygacattttagtcagtggactggaagaggcagactcactctcaatctggcaccatctaatcagctgccagtgaggctagaataaagcaggcagaagaacatggaaggactagactttctgagtcttcgagccttcatctttctcctatgctggatacttcctgccctcgaatatagaacaccaagttcttcagcttttggactcttggatttacaccagtggtttgccagggggcttttgggcctttagccatgggctgaaggctgcactttcagcttccctatttttgaggttttgggactcgagctggcttccttgctcctcagcttgcagacagcctattgtgggacttcatcttgtgatcgtgtgagtcaacacacctgaataacctccccttcatatacacatctatcctactaattctgtccctctagagaaccctcactaatacacaggctctacttatgcagtggccaagacatgtatctgacagccttgggcttgtgttctaccagcttgacacctgtttgcaa

SEQ ID NO: 277640 - DNA, 595 bp, Homo sapiens
tctaacagccattccctgaacttacatctgagtcttctcatgttaataaatggcactggccaggtacggtggctcacgcctgtaataccagcactttgggaggctgaggtgggtggatcacgaagtcaagagatcgagaccatcctggccaacatggtgaaaccccgtctctattaaaaatacaaaaattagctgggtgtggtggcacatgcctgtagtcccagttactcgagaggctgaggcaggagaatcacttgaacctgggaggcagaggtttcagtgtgycaagattgcaccaccgtactccaggctggcaacagagcaagactccatctcaaaaataaataaataaataaaaataaaaaataaaaataagtggcactaatattcacccagttattccagcttaaacaatctggatattatttgagattccttttttttcccctatcttcttcttgctaaccccatgtaccagcatgctgtaaaaaatacctaaaacgtggaagtaactttggaattgggtaatacatacagtctggaagagttttgaggaggtacataatagaaaaagcctaaattgccttgaagagcc

SEQ ID NO: 277641 - DNA, 508 bp, Homo sapiens
tttaactaccttaagtactagtgaaaacttcctgggctggaagggacctaagcaggctgtttatcaaaaatctatagagattatgacactaaggtgaataaatgcccatcagaatggaatgtgatctttaatacaagacggatatgatcagttgtcctaagctgtctatgaataacatctgtaaaaactgaccaataaagaggacatagttcattacaacagagataagatgatatggtttggctctgtgtatccaccgaaatctcatgtcatattgtactccccacatgttggaggaggggcctagtgggagatgattgaatcatgggggcggacatcccccttgctgttcttatgatagtgaatgcattctcacaacatctggttgtttaaaagtgtgtggcacttcccttttcactctctctcgctctgccatagaaagacaygcttgattccactttgccttctgccatgattgtaagtttcctgaggcctcccagccatgctt

SEQ ID NO: 277642 - DNA, 595 bp, Homo sapiens
aatgaggtagtcagggaagatgctattatttccactgggtaagtgaggaagatggatttgagaaaggctgactagcaggaaggctcaccactataaatgacagaactagaccccagatcagctgacattttctgttacacaagcccactgcatgacaaggggtggtgatattacagcagttcaaaagttacctgtttaactccaattgtgtcagatccagaaaggctgagcccataaagtcatcctgtagtccaaaatcatagtcaaayacctgagatgccaaagagaaaaagccttgttataaatatctccaatataagctttatgtgataatgtcttggtcataaaatgttggttgtctatgtcaccaaaagcatactaatatttgtattttaaaataattgtttttgtactttggaatattagagtctcacgaaacacttaaagaaaactacattttattttttacttaatattactgatggattatatcaaacagaactttaagatagatgtaacataatcaaataaaatatagtaaatcttcaaaaatgtgggaaaaagcatagaattcaacaagtatgtctttcatatt

SEQ ID NO: 277643 - DNA, 595 bp, Homo sapiens
aatgaggtagtcagggaagatgctattatttccactgggtaagtgaggaagatggatttgagaaaggctgactagcaggaaggctcaccactataaatgacagaactagaccccagatcagctgacattttctgttacacaagcccactgcatgacaaggggtggtgatattacagcagttcaaaagttacctgtttaactccaattgtgtcagatccagaaaggctgagcccataaagtcatcctgtagtccaaaatcatagtcaaatacctgagatgccaaagagaaaaagycttgttataaatatctccaatataagctttatgtgataatgtcttggtcataaaatgttggttgtctatgtcaccaaaagcatactaatatttgtattttaaaataattgtttttgtactttggaatattagagtctcacgaaacacttaaagaaaactacattttattttttacttaatattactgatggattatatcaaacagaactttaagatagatgtaacataatcaaataaaatatagtaaatcttcaaaaatgtgggaaaaagcatagaattcaacaagtatgtctttcatatt

SEQ ID NO: 277644 - DNA, 520 bp, Homo sapiens
taatcgaggtttaggcgatgaacttgctcagcttctgtttgtctgagaaagtctatatctctccttcatttctgaaggaaagactttctgggtaaagtattcttggatgccatttttttctctttctgctggaaccagctggtgctagagtgggcctggagcctaggtctgtggggaagtcagatatccacttcastctcttttccttacaggagagctctgaacagaggagatctctctagtcctcacaccattctggtttggaaaatgattcaggtagagtgaaactgcccttccagccctttactgtgccttttcccattctgtactccactagtgtggtgtaacctttcacctggaatccagagctcagggaagtatttttgtgtgtgtggatggttttttttatcagtctttctgtgactggacaaggggtgtaatctcctattctgccatcttgctgatgttactcttcttagtctcaacaggtatttgttaaataagtaaatgaataagtgaa

SEQ ID NO: 277645 - DNA, 520 bp, Homo sapiens
taatcgaggtttaggcgatgaacttgctcagcttctgtttgtctgagaaagtctatatctctccttcatttctgaaggaaagactttctgggtaaagtattcttggatgccatttttttctctttctgctggaaccagctggtgctagagtgggcctggagcctaggtctgtggggaagtcagatatccacttcactctcttttccttacaggrgagctctgaacagaggagatctctctagtcctcacaccattctggtttggaaaatgattcaggtagagtgaaactgcccttccagccctttactgtgccttttcccattctgtactccactagtgtggtgtaacctttcacctggaatccagagctcagggaagtatttttgtgtgtgtggatggttttttttatcagtctttctgtgactggacaaggggtgtaatctcctattctgccatcttgctgatgttactcttcttagtctcaacaggtatttgttaaataagtaaatgaataagtgaa

SEQ ID NO: 277646 - DNA, 532 bp, Homo sapiens
ttcttttaatttaggttcagtgaaagatttttaactaatgcactaatctatgtttgaaagtgtttttaccaagtatattttagcaagatattatctgatgacattaatagctattatttattttttaaaggagttatatggtcaagtatatttggaaaatactggtttagaagaaaattaaatagattccttttctstagcctttaaataattgaacgttcactatgactttccaagaaggaggcttgacaggcatcacttactaagtttttttgactatgaggcctacttttcttgagtgcatcttttaggaccaacaatccttggatctctctttgggaaatgttacttccttatatttcattatagggaaattacacgttttcaagattatattattattgactttacagtggatttaaataattttattgtaatagaactcccaggaaatccaagtcactaatatgtggtatgtggttaatcttcaataaacatactatacaaaaaggatttagtttgttggttcgaa

SEQ ID NO: 277647 - DNA, 532 bp, Homo sapiens
ttcttttaatttaggttcagtgaaagatttttaactaatgcactaatctatgtttgaaagtgtttttaccaagtatattttagcaagatattatctgatgacattaatagctattatttattttttaaaggagttatatggtcaagtatatttggaaaatactggtttagaagaaaattaaatagattccttttctgtagcctttaaataattgaacgttcactatgactttccaagaaggaggcttgacaggcatcacttactargtttttttgactatgaggcctacttttcttgagtgcatcttttaggaccaacaatccttggatctctctttgggaaatgttacttccttatatttcattatagggaaattacacgttttcaagattatattattattgactttacagtggatttaaataattttattgtaatagaactcccaggaaatccaagtcactaatatgtggtatgtggttaatcttcaataaacatactatacaaaaaggatttagtttgttggttcgaa

SEQ ID NO: 277648 - DNA, 532 bp, Homo sapiens
ttcttttaatttaggttcagtgaaagatttttaactaatgcactaatctatgtttgaaagtgtttttaccaagtatattttagcaagatattatctgatgacattaatagctattatttattttttaaaggagttatatggtcaagtatatttggaaaatactggtttagaagaaaattaaatagattccttttctgtagcctttaaataattgaacgttcactatgactttccaagaaggaggcttgacaggcatcacttactaagtttttttgactatgaggcctacttttcttgagtgcatcttttaggaccaacaatccttggatctctctttgggaaatgttacttccttatatttcattatagggaaattacacgttttcaagattrtattattattgactttacagtggatttaaataattttattgtaatagaactcccaggaaatccaagtcactaatatgtggtatgtggttaatcttcaataaacatactatacaaaaaggatttagtttgttggttcgaa

SEQ ID NO: 277649 - DNA, 525 bp, Homo sapiens
gcctacttttcttgagtgcatcttttaggaccaacaatccttggatctctctttgggaaatgttacttccttatatttcattatagggaaattacacgttttcaagattatattattattgactttacagtggatttaaataattttattgtaatagaactcccaggaaatccaagtcacyaatatgtggtatgtggttaatcttcaataaacatactatacaaaaaggatttagtttgttggttcgaaagactcaaaaaaatcaatagcttcatatgccagtgctgttttgttgcaatattgcataaaaccacaagatggcaatagtacttatcaaattaaagagaggcctgtggttctgctattgaaaccaaaggttagagcgccttgcagggcacactttgaagttcccaggcattttctggcagcatatgctttgttgttattatctggaccattactttcattgacatactttttatgacgataaatgaattgaaaacaagtcaaaaagtacgaaagatg

SEQ ID NO: 277650 - DNA, 525 bp, Homo sapiens
gcctacttttcttgagtgcatcttttaggaccaacaatccttggatctctctttgggaaatgttacttccttatatttcattatagggaaattacacgttttcaagattatattattattgactttacagtggatttaaataattttattgtaatagaactcccaggaaatccaagtcactaatatgtggtatgtggttaatcttcaataaacatactatacaaaaaggatttagtttgttggttcgaaagactcaaaaaaatcaatagcttcatatgccagtgctgttttgttgcaatattgcrtaaaaccacaagatggcaatagtacttatcaaattaaagagaggcctgtggttctgctattgaaaccaaaggttagagcgccttgcagggcacactttgaagttcccaggcattttctggcagcatatgctttgttgttattatctggaccattactttcattgacatactttttatgacgataaatgaattgaaaacaagtcaaaaagtacgaaagatg

SEQ ID NO: 277651 - DNA, 585 bp, Homo sapiens
gaacatgaatattccaatgaatttaaaatttctggtaagttaccatgatatagcacatagattaatttaaaataatagtatggtaaagtgtagcataggatggcactaggtatatttatttcctgaagagtagtagaaggcagttcaggtaacctttaggcttagttttctctcctaaatgcagagttgaagacatgcaagacgaaattattcatgttgtatcccaaatayaacatgaataatttgggatacatatgtatggatgtatttgggatatacttattcatacaacttattcaaatttgggatatatatgtatggatgtatttgggatatacttattcatataacttattcaaattccctttcatatctgacataaacagcaggtggtatctaaatgcaattttctgataacttctggaagtttaggtaaacgaaaatatggattgctttaattttgaatgtaagttgtatattacttggtgacattgagcaactacaacaactatcctagatgtcattttttccaaagggccttactcctgtctcctccaggaattcgctctatgactggtaattgac

SEQ ID NO: 277652 - DNA, 568 bp, Homo sapiens
cttcttatccatgttcttcaatgagagaagttttaaagggtatgcttccacagatgagcaactaaaagtttttttcgttttaaaatacaggtttaaaggaaatgattacagttgccaccatctccttgattattaattaaaggcttttcttcaattatcatattattccatatagtcaatggttatataagttttataagtaaaaaagataagcaaagcaaaaggttaacacctaccatgtaactaaaatacttgaggaacaatgaaaaaaaaaccttcaccccttatgctaaaaacagttaataagtgtttaatgtgacaagtgacttcaaaacttgcaattatcctgctaaagcatggcgtcactgatagagacaaagacggcagatatagtatagtggtaggtggtgtgggtccctgttcttatcttcaacacagtattcccttcaactctctggcagggtgtgggaaaagtccgaggtttccactggtaagtttaataaaagatgtagaaccaatctaagttatacmcttcccaagggacacactctttttatgccttctgtct

SEQ ID NO: 277653 - DNA, 1172 bp, Homo sapiens
tcagcactcccccagattagtcctaaatctatttttagactctagatctagagcaaaaatgagtaattcctcttctatgaagcaatcttctaaatatttgaatcagatgtcagtatcctccataagtttccagacttattactctcccatctgtctcccattcttctctattaaccatccctcactaccttaaatgctctggactaatttttgcttgttaagacatttttaaaaatatagccattatcaagaacacactcctcagtgaaaggctcttggctaggaatttgagttggcaaagaaaacaaaggagtatttaaggtaaagaactgaatcagcttctgtttgcaggaacaaatgaacatggtatacktttaggaaatctatgaaaaccacactggctgaagcggaaaatttgatttagggattaatgagagataaaactattcaatagcgcatatgaactcagttaacagagagtcttgaacgccagactgatgaaatttgatgttataataataacataaaaaggaggaatgtaggtggtgagttgaaatctacaatttaaactacaaawtgcaaatgtgtgataaaactaattaaaatatctcagtggtagcattattccctacttataaatctccaagtccttccagcatcagggagcaagtactcgagaaaagattttgaccatggtgattttacaaaagccatcatcttcagaaatggtgagaacctgtgataacaggcaccagaaaacttcatgagtgataaatgcccccaagtactttctttggagacaggccagtaagataatttaattgttaatatgttacattaaaatcactcagtgttgttaataattgaatacaaatgctaccttaattgggacaaatgatttgaagccccagtcattcgttatttaaattttcattttgcttgaaataagatctattttttattttctcttctgtttaaatttttacacctacaatgtctatwtggaagtgcagtatagcgatcaaaggccttgtcgaaagaactggtaacaacactgccaccattaaattatcacagatctatgaatactgccagttctgaagatcttcacttaaaaaacagattccaaacccaagtcctactctctaatttttcaacaatttgtgattatg

SEQ ID NO: 277654 - DNA, 583 bp, Homo sapiens
gagcagcgatcataggaaacatgagtttcctcatttcatgagaaaatgacctctacagggattaaattcttcttcttgtaaatatgaaataaaatctaggagaaatacgcctttcagagagtagcagaccctgtggcttatgtgattatctccctccaaagagcagaaagcccttttgctgacatctattaaaataaacaaaaaagggcattggcatcatttaaagagaatgaagcactgatttgagccaagtgttgcactgtggacttagcagatacaaaaacaaaacaaaaataacttcacaattaaataggcccacaaactgaactagagcctcactcctcaggaaagattacagaaaatatttggttctgttattatctggyttgctatatttcctaagattcagggttgattttagccaatagtgaccaaacctgaaacccagctcatttgtaccttatactctttgggggccttttatataattgcaggaatttatatgtaatgcactatgaaaggcaatgcttaggaaaacctaatttacaatttttcatgtaattttggacaatgtttgaaaaaa

SEQ ID NO: 277655 - DNA, 593 bp, Homo sapiens
tgtgtgtaactagatgcattcttgagtcttggaattgaaccatattgatatatgttgggaagctcaaaatttatgacagaagaataagaagggaaaggagacagatgagaaactggaaaagaaagaggaaggagactatgggacctataaaatgagaagaggccgtgagaaaattatgcctaagcttttaacagcttagataaattatggtaagaacatttaaatacttcattttcaattcatatttaatatagaaactatatgcaagtgattcgttacaagcttagaaacacaaaagttgtttggtctaaaatgagaataaaaatacattagaagttcctttgtttttgcaaggcttgttagatactttaggacttatagtaaatatatactcaattagaccttcctgcagaaaagcatgaggcttcagataagctttcctataagtaaactaattagctggagagaccktttgcagtgaaataacttttttatgcttaaaaaaattaagtcctctattaggtgattaaacattttaaatacatttttaaaaaccaattaaaggcaataactgaaaattgtcatctgttaag

SEQ ID NO: 277656 - DNA, 587 bp, Homo sapiens
acacagcttatatagctccctaggctctcctggagccatggtctcctgagtcctcagctgttcgctttgcctcagctgctcctttggctatgcctccccaaagggctgctcttcatcccaaacccatgaccaactgactgtgcttgggtcctcatgggtctcccacctagggctggctgatctttcactgtcccaaatgagctaggcactccccatttctgccaaggtgcatccaggcctagccgccatatacttttgagtttctggcttctaaagccacttctgcacttcgataggaagccacactgtgaagattgtatctggctcccagatcaactgccaaggaagctgcatgaaacaatgcagaagttatctccttgtagggtgaactgtsatcaatgtaataggagatgggaagacaatgtcccacacctcttccctttcacaaactgttccaaaacataattctccatatggcctgtgcacatgtggccatatggatgcacctgctaagcaaccagctatatctctgaaataccagaaacagtgaccaacccatgaatatatttccttgcatttcttcctag

SEQ ID NO: 277657 - DNA, 456 bp, Homo sapiens
taaaaaaaaaatagtaaaatacaatgttttttttaaactctcttcagtttagaattttctgactagctgtccttgtgctttcagattaataatgcagtaggatttctcctgctcttatttatgtagaaagtaaaggaagcattgtagttttggtgtcacagataaaaaacattccaaatcagaatctatggagtgtcaaatgctcaaatgtattgactttcaacattaagaaaacattagtttggtttttatccaaagtcaaaggctattttcctcatttgccacatgaaacttgaacacacatttgtgttcatctaaacagttcacattctcttcycttcagcattagagagagccatagatttatttttatggctgtagattttgaaagcatttgttcttcacccagaacttaccaattcagaatatatttttcttatcatataccattaataa

SEQ ID NO: 277658 - DNA, 613 bp, Homo sapiens
taaaattataataatctaagtgtttgtattacttccatgctacggataaggaaattgtgtctcacagaggtttcatgcgttggtcaaaattacacaaaaagtaaaaggcmgaacctgaaaataagggttcacatcttaggactccaagatggtatacacatttgacttttttgtctttaaacttgctgtgaacatttttccacttttgattcttaagtataaatattaagtgccttctttgtatttcagtattaggcttttaagtcttctacttccaaaaaaaaaattaaaagtaaaatttaacaagcattctaaatattccaattatgaaatatatttcatattatgagatttttcttctgtaaaagaatttatcatttaagattagaagatttaaccttgaggagtatgatccaaaatggctttttatattagttgaatcatgaaaagtcccaacaaagcatttgctggttttaggtgatgaaactaggtgtttaatgaatttattttttcttttctaattggtgattgtaccctgggttatgagaatatgtagaaattgaatgtagtagctactagcaacttgctgaaacatgatgcatttccctgactc

SEQ ID NO: 277659 - DNA, 632 bp, Homo sapiens
tgttttgacacagagtctcattctgtcacccagggtgaagtgcagtggcacaatcttggctcattgcaacctctgccttttgggttcaagcgatcctctcatctcagcctcccgaatagctgggactacaggtgtgcaccaccacacccagctaatttttgtatttttagtaaaaatggggtttcaccatattgcgtaggtcagtctcgaactcctcacttcaagagatctacctgtcttggcctcccaaagtgctgggattacaggtgtgagccactgcacccagccctttctccctcacacttttggaaaaaatatttttctcagtttgttgcttgccatctaatttattacattgctttttaatatacaactatagacaaaagaatcacttttcttttggaaaatttgatctatgactttcattcatataaaagctttcctcaccctcaggtyaatgttcacctttatttttttctagttttttttaaactttgtttttaatcactgtgaaaataattgaaagatgatatttagataaaaatttgtgtaaagctctactattttgatacagattgaaaaggataaaaagaaatgagtaagaagtatgcgtagtgtttagaatgaacatg

SEQ ID NO: 277660 - DNA, 1046 bp, Homo sapiens
gtggactaataaatctgttataaatccctggtaacaatggtggggttttaatgagtaacataaagaacttagaataaaacaacttaaatatatatatatatatatatatatatatgaataatattaacctttattcttatatttgtataatgtagttatctgatttgcagagggagagaaagagacagacaaatggatagacagacagaacgagatcatttagaccataaggttagaaaaatattatgagactatggaaaggtaatgaatatggtagagagagatggagctgaagattataattctttacttatggactgctcyaggataactttgtttgatgttattttagccttctgatatcagtttatatactctaaaacgagtagaaaagaagcatcagtttgtataaatattctatttaaatattgtcaaagcaggtccatgcatcagaagtcaaattaaaactcactggggaaaactttgaaaaggcctgaaggaaatgtacttgatttttataatgtaattggcaaaggaaattgtagtcaaatatgagagctaatgaaagagtgawagagacactgatgcaaggaatcccatggtatttgtgatgaagggatgatttagtagttcagtgacaagacatgagcctggagataaataaggtttaggttctggggaccttgtgagccaggttaaggactttgggttcatcctcaaaccatgaagcattccaagcaattatgtgacaagatcagattctaggggctgaatggagaataaatatgtaagtggcaagattgaaggctgggaatgtaaaaggtggctcctgctgtggcttgggcaaaacatcacataggcttgagctagctttgtgattctacgggattgagaggagaatgctaatttcataaatgtttagtggatatgattggcatgtgaactgaatgcaactggagaaggggaccagtcatttactgagtwgatattggtaattgataaataagaccaaagaaggtgaggtttggggataggcagtgtaaatt

SEQ ID NO: 277661 - DNA, 634 bp, Homo sapiens
tgatggctgggcaagggaacattatgatagatgagttatcaaaatattgctaaaattctttaggcagtttgatatagatgttactgtagctggacactgtcagagaaaggagatagctgtaacagagtaccaaatgaaaaacatttttgaatagactgtccttaagacttcttacctacgaagactcctaatctcttcttatgacataattatcggaaaggcctggaggccacaccttgagaagaaaagcacttatcagttgtgattttcattttcttcacagttttctccactcagctagcttacagaggaaaccaaaatgcagttggttgtttctctttactaacactcagttcctaagtgcttagctttagaagttttttctgcctgtttacttccacttcttgtgtgacataacaatattttagggttttatttttcttttcaaaattcttctggtctttggaaagaaaattaagacactatttactctatgtttgctgatgcagaaccagtaagtttgttcacccacccaagtgattcattctaagcaaattctcccattaggcatttgttgmaaatctgcaaaagttgcttttatttactgattcaacatatcccttcccagtataag

SEQ ID NO: 277662 - DNA, 522 bp, Homo sapiens
ctctttgcataggatgaatgcgcaagaggactgcgtgtaaagaaaggtaagamcattcagaggtagatcactcaaagtattggtgaaatgtacattagtcttaagtacattatttcagacacaaattagacagtaggaaaataaagtgtgacaagagagggcaagagactcaagaagcccaccttggaaagcttgacaggagaagccacccatttcttatttttatcctcttggagtagaattcctcacaggggcttcacattccttgggctcagacatgattaaacatcatatctttaaaaatgttttcctattccaagctgaggaatatataaataacccctttccagctaccactccttggcccggaattcaagccgagtgtcttctgggcttcagtctgctttgacgaggctccatataagaacaacagcaaaaggccaccatgctgagcagcctgggaatctgcatgctgaatgcacaggaacgcagcagtgagcagtaatggaggccttgtttttt

SEQ ID NO: 277663 - DNA, 522 bp, Homo sapiens
ctctttgcataggatgaatgcgcaagaggactgcgtgtaaagaaaggtaagaccattcasaggtagatcactcaaagtattggtgaaatgtacattagtcttaagtacattatttcagacacaaattagacagtaggaaaataaagtgtgacaagagagggcaagagactcaagaagcccaccttggaaagcttgacaggagaagccacccatttcttatttttatcctcttggagtagaattcctcacaggggcttcacattccttgggctcagacatgattaaacatcatatctttaaaaatgttttcctattccaagctgaggaatatataaataacccctttccagctaccactccttggcccggaattcaagccgagtgtcttctgggcttcagtctgctttgacgaggctccatataagaacaacagcaaaaggccaccatgctgagcagcctgggaatctgcatgctgaatgcacaggaacgcagcagtgagcagtaatggaggccttgtttttt

SEQ ID NO: 277664 - DNA, 522 bp, Homo sapiens
ctctttgcataggatgaatgcgcaagaggactgcgtgtaaagaaaggtaagaccattcagaggtagatcactcaaagtattggtgaaatgtacattagtcttaagtacattatttcagacacaaattagacagtaggaaaataaagtgtgacaagagagggcaagagactcaagaagcccaccttggaaagcttgacaggagaagccacccatttcttatttttatcctcttggagtagaattcctcacaggggcttcacattccttgggctcagacatgattaaacatcatatctttaaaaatgttttcctattccaagctgaggaatatataaataacccctttccagctaccactccttggccyggaattcaagccgagtgtcttctgggcttcagtctgctttgacgaggctccatataagaacaacagcaaaaggccaccatgctgagcagcctgggaatctgcatgctgaatgcacaggaacgcagcagtgagcagtaatggaggccttgtttttt

SEQ ID NO: 277665 - DNA, 575 bp, Homo sapiens
  misc_feature (1)...(575): n = A,T,C or G
nnnnnnnnnnnnnnnnnnnnnnnnnnntgccacttattcatagagcaaataggtcccctgttacattatcatgacttatcatatttttaattatataatttaatgattagcccaatgttgatccctcttgctagattctaagttccatgatgatagtaaccatgtttgctttgcctgtttcaatatcctcaatgcctagttcggaatctgtcacacagtaagagtttcataaattttcattgattaaacaataattattgttgtctctaaaaagagaaatagcatcagattgagttataagtttggtttgaagtgagaaaacctagatctgaatctttmcatagcacttttattagctgtatgaccttgggcacattactaaattggtcagtgccttagtttatttgtccataaaatgggaataacattagcaacagcataaacttttatgaggattaatcatacaatgtgaccagaaaaactcaaaatcagctgttattatcataatcatcattggagagagagttatctgaaggaaaataaagataaggcattgaaaacattaaaaatctcac

SEQ ID NO: 277666 - DNA, 575 bp, Homo sapiens
  misc_feature (1)...(575): n = A,T,C or G
nnnnnnnnnnnnnnnnnnnnnnnnnnntgccacttattcatagagcaaataggtcccctgttacattatcatgacttatcatatttttaattatataatttaatgattagcccaatgttgatccctcttgctagattctaagttccatgatgatagtaaccatgtttgctttgcctgtttcaatatcctcaatgcctagttcggaatctgtcacacagtaagagtttcataaattttcattgattaaacaataattattgttgtctctaaaaagagaaatagcatcagattgagttataagtttggtttgaagtgagaaaacctagatctgaatctttccatagcacttttattagctgtatgaccttgggcacattactaaattggtcagtgccttagtttatttgtccataaaatgggaataacattagcaacagcataaacttttatgaggattaatcatacaatgtgaccagaaaaactcaaaatcagctgttattatcrtaatcatcattggagagagagttatctgaaggaaaataaagataaggcattgaaaacattaaaaatctcac

SEQ ID NO: 277667 - DNA, 588 bp, Homo sapiens
ttgtggttttgtctacctttggtctttgatgttggtgacctacagatggggttttgatgtagatgaactttttgttgatgttgatgctattcctttgtgtttattagttttccttctaacagtcaggtccctcagctgcaggtctgttggagtttgctggaggtccactaccagaccgtgttttcctgggtatcaacagcggaggctgcacaatagcaaatattgcagaacagcaaatattgctgcctgatccttcctctgaaagctttgtcccagaggggcacccacctatatgaggtatctgttggcccctactgggaggtgtctcccagttaggctacacaggggtcagggacccacttgaggaggcagtctgtccattctcagagctcaaatgccatgctgggagaaccactgctctcttccgagctgtcagacagggacttttaagtctgcagaagttgtctgctgccttttgttcagctatgccctgmccacagaggtggattctagaggcagtaggccttgttgagctgctgtgggttctgcccagttcgagcttcccagccactttgtttacctactcaa

SEQ ID NO: 277668 - DNA, 557 bp, Homo sapiens
gttgttgtctggaaattcctaataaggttggaacaaggggcttcacatttttattttgcagtgtgcttcacaaattatgtagttggtcctgcaaaaaagctgtatcaatacaggctatgctggatataattagtgtctcacagcaggctatgtaagtggttggcaaacttttcctgcaaagagctaagaatatgtatttcaggttttgtggctcatacagtcttttgcctgaagtactcaaccttgatgctgtagcttgaaaacagtgatagacaatacataaactagttaattttgtaaatttcatttacaaaagcaagtcggctgcatttgccccccaacacaatactttgtcacaccctgtgctaggcaaatgttcttaatctcaggttaccaagattgtctaagagatacataggtggggtgggcagcattctactgtcataacacgcatagaacactttggtacatttttccctaattgaamtatacatactattgctttcctaaagttaacattactccaaaagctttagatgtagttagtatactttaca

SEQ ID NO: 277669 - DNA, 530 bp, Homo sapiens
tccaaatgtaaatacagtcgtatgacacgacctgcagtttatgtccttccctccctctttcctttcctttcaggatttttgatatttttccttctcctttgcttacctatgagtaatagttgtagcatgttttggggcaaaatagatgctgaccagaaatagsgtatcttttcttgtcctattattggaattagtttctacctttcttgaagtaatctgttaactaattgtgcactctaacacttgatcataatgtgaactgaaaatgcaataacaatagctaaagaagataaaagaaaatttaaagtctttttttatagatccggtcagcatgaaagctcagacctcaacatttttattcctttttcttttcctaacatatgtgtggcagagactaagcaggttcttttccttgagcctttgtgttcttcaaactaactgactctggcaccctgctcagaagaatgcagagcaggcccgtgggcaagtgttgacttgtttaaaacactgttgagagcattaggaaggtt

SEQ ID NO: 277670 - DNA, 429 bp, Homo sapiens
gaattctaggggaatgtacctcaggcacagcgagatgcaggtgttcaaacaatgccatcaggtcgctgtctcactttctttctccattggctgtgcttttctcattttcagacagactctccacctgcctacaaagatggtgcccaacatctccaggctgaactggtccttagtaccttggatctcagagagtaagaagtgtctctctctcccccaggatccaaacagtcccagaaaaggaactcacatgctcacttctaaacccatcaccgaggggccagctggggtcttacactcacccttgtggtggggaaggtgaggtctccttttttgcatcctatttaccaatcctgattcctatgggacccactgytgccccctctttttttgtgcatcttccagagttgttcatacatatgcaagaaaata

SEQ ID NO: 277671 - DNA, 465 bp, Homo sapiens
atgggaagccttgagagactgactgtaccaggaggaatggtgcattccggcctggatactgcacttttcccgcagtcctcaaaaccagcagaccaggagattctctcctggctgttttcattaggggttatgctaggtattcatagttgtcttcattgggaccagcccaggtgttcacatccatgctcttttaggccagctaaagaattagaaccatcctcactggggccagcctgggaggtcacagccatctacctagatgccagcccaaatkttcatagccatccttatctgggttagtgttcacaacggtcattattgggccagcccaggtgttaatagctgtcctcattgggcccagcttaggtgtccagagactgtttaatagtggccagaccaggtgctcacagccatcctcatgaaagccagccaggtgttaatagctatcctcactgggcctcaccc

SEQ ID NO: 277672 - DNA, 1169 bp, Homo sapiens
gcacttgaaatcatctcagatctctcctcaaccccataggcaggaactgctatgcaaatagttgttatcctctctgccagcccctacctccacctaccttgtcttatgcctctcttccatgtgayttttcctgagctgcattttttaatatgaaataaacctgtacatatgagtagagtgcttttctgagttgtctgattcattctggtgaacctgagggaggtgttgtgggaactcctgaattggtagtctgccaggaagaagcctcggcagctaggccaccccattggttgctggcatctaagtgaggacagtgctgtgggaccgagcacataatcataggcctgctggccatttgtatgtcattttttgagaaatgtctcttcaggtcatttgaccatttttaaagagattattttgttttgctgttgactcgagttccttatatagtctggatattaatttctcattcgatggatagtttgcaaatattttctcccattctataggtcatctcgtcactcccttgattctttgctgtgcagaagtttgttagcttgttttggtcctatttatgtatttttgctcttctcawtacaattatcattttcatttacttccaactaataaatgcaagtggctgattctgatgagacctgtttcatttcctgcttgaaagtctagagcaagaatacttagctcagagactgaaagtctagagcaagaatacttagctcagagactgatctggatgaggctggggaaggagaccaccagagcttaaacgaagccactaaaagcagtaagagaaacaactgtgaagcctgtgagaaaagcagggtgtgtttctgataaggaaaggtattaagtgtgaaggaaatgtttttattaaagaaaaagtactttgtccttaactaaaatgattcgttactccagaatgaaaaaaaaaaaagagtagggcaaaatataaatggacatagaaagttgtagaaggtttgtggaaggcaaatgcatatgtggtgaagccagtaagattagatacatttatttataaaattcattaaatgtggccaatagtgtaccgawgcaaaactagaatttctatttctgtctgttaaaacaatggtttcttagattgttggtcggctttttaaaaagattgtaaaaag

SEQ ID NO: 277673 - DNA, 470 bp, Homo sapiens
aaactcataaaaaaagaaacattgctgactctttaatgtastattttctgggtgtatggaactcctttctcttttctgttcagctgtctacaactcatagactaaattttgtgaacagaaataaacattttatcttctccctgcctgattccttcagaatttagaaactcttaagggcaataaaattatttgcataagttcaaaaagaatctgttctctttgcaacaggacacaattagaaatattggttatattaccaaggccttgactggaatgtcatatttgggaataatgcataaaatcagacatgaccagacaattttaaggaaataagataaactttatggagccaatgcctacaaagacttcttgaggaaaccagcctggcacctggcttatagggtttccaggcatacaggtgactaaggaaaaaccacttcacggcatccccaggaaacaggataatttgg

SEQ ID NO: 277674 - DNA, 1013 bp, Homo sapiens
attaatttggtttgtttgtttcctaaaatattgatttaaatgtctttatttaaattttaaaatgatagcatttgaaagagtataaataaaattcttaagccgcaatagtaaagraatttagttacaatgcatgaagttagaagcaatagctttggatttgtaaatgtattcttgaagggtgtcataaagaaatattttattcctatttttcctttgttttgttggagtagttttcccccatctttaatgaggtataattgctttaccagttcgaataggtttttatagccattgtggagtctttagatttttctatgtatatgatcatgtcaactgcaaatagggagagtttttcttcttccttttagatttagatacatgctatttctttttcttctcttattgctctggatagaagttccaatactatcctgaatagaatcaatgagagtggatatccttgccttgtatgggattttagaggaaaggccttcagctttacaccattgattatgttagctgtgagtttatcacctacggcctttgttgtgtgggggatatgtwaactctccctatttgccgatgacatgatcatataggtagaaaagtgatagtgagacttattcactatcacaagaacagcacaggaaaaacttgcccccatgattcawttacctcccaccaggtccctcccaagacatgtgagggttatgggagctacaattcaagatgatatttgggtggggacacagacaaaccagatcacatggaatggtgacttccaaactccttataggcagaaccccagactgcaggggtgatggcaggaggcagtgcatggttaggaagctgcacagtcatcctgttcagaggagatcaggctctggccaggtagaataggtggagggacagaagcagtcaggtgtggcacatgctgtgaagctacagagaggggctctgccgatggagtggagatgaggtagagagaagacagaagtcaagaaaaacaaaac

SEQ ID NO: 277675 - DNA, 532 bp, Homo sapiens
atgttgcccaggcttgtctcaaactcctggcctcaagtgatccacctgccctggcctcccaaaatgctggagttacaagtgtgagccaccatgcctggcccaaacttaagttttaaatgaaattctttatacatttgctaaggaattattaacagatatgccaaaatgagatgtgtgaaggtgtttttagagatctgtgctcaaaacgtgggctacgacatgacttcttaatcttccttagtgagctcaattattccttaaaaacacacacaacatagttattggtgtgaaaccctctgtgacccttgctaactcrcacactgaccctctctatggcaacaagtagaacaaggaggaaatgtaattataaatgtaaaacctctagctcatgctggtaatccagaaatattagtgggggtggtagcacagaaggcttgctacaggtggccttggtattctgggagaaggcatttctacacagtttcactctttctgggaagttctggggagagtttctgccagagaccaggac

SEQ ID NO: 277676 - DNA, 532 bp, Homo sapiens
atgttgcccaggcttgtctcaaactcctggcctcaagtgatccacctgccctggcctcccaaaatgctggagttacaagtgtgagccaccatgcctggcccaaacttaagttttaaatgaaattctttatacatttgctaaggaattattaacagatatgccaaaatgagatgtgtgaaggtgtttttagagatctgtgctcaaaacgtgggctacgacatgacttcttaatcttccttagtgagctcaattattccttaaaaacacacacaacatagttattggtgtgaaaccctctgtgacccttgctaactcacacactgaccctctctatggcaacaagtagaacaaggaggaaatgtaattataaatgtaaaacctctagctcatgctggtaatccagaaatattagtgggggtggtagcacagaaggcttgctacaggtggccttggtattctggsagaaggcatttctacacagtttcactctttctgggaagttctggggagagtttctgccagagaccaggac

SEQ ID NO: 277677 - DNA, 573 bp, Homo sapiens
aaagttacttttctgttaaactgtgtggcaaatcaaatacaagatataaaacgtatttttacacaatcactgtggcctgttgggactatgtactgggcttatgatctcttccctccaaattcaggactgattattttcttttctttgacttacatcatagacattcaggatgaggctgcctggatgagccacaaagacaatcacaagtrggaagagggacttgaattttattatacaccaagaatgcatgttcttcctccaagagcagaaagttgacctttagattaacatggaagatggaaataatgatcagaaggctggaaagacacagatgggaaagaagtgacagaggacaagtttaaaggactgcacatatgcaagcttgcatgcttgactagttgcatgtttgacctgaatactagactaagttcacgagccattaaccctaaagtttcacagagaactaatatggaacttgaaaagctgggatgtagtcatctggcccttagcttaaaaaaattatagggtctcactaatttctatttgtgatgataaaagggtaggggagagacc

SEQ ID NO: 277678 - DNA, 375 bp, Homo sapiens
gtctcaaaaaaaaagtaaatagtgctaactgatctctcaactttatccaaagtgagcatttgtttttattagttttatagaaatttaatttatttgatggaaggagagaataaggatttttggcatataacactaggaaagctgaaccaaaataaattgatttctccaaacaaagagtaactcaggaatttatgccaaaacatgttgataaaatatatggcttcgggaacttccatgtaggatacagtayggaagtgtccccactgtgaaactagaaaaatctagttaaattataaaaatcagataatataaaaaaatcttaattgtaaaggaatcagggagctgcagaagcattgacaactagataaactaaaa

SEQ ID NO: 277679 - DNA, 623 bp, Homo sapiens
aggggcagcacactgggtccactgagataatggagcctagtgccatctacacctcaggatgagttcagctccgcatcttagctgtgcaatgatagccgagagacttacactctctcagcctcaatttccccacctgcagaatgaagataatgccatctgcctgctgggttgttagagggttggaaatcatgaatgcacaattcccagtactcctaagcatataagaaatgyttaagtgaactgacttgaactgagtcatggactgatcttctaagcatgtcattacagaatcatgagtgctgaggcaaactatgaaaaggcacttatgaccaccgtggtggtgatctgagcatttttctagggaatggatgggccatggacccccccacttggacaaggatgctaaatccaattagccagaaaaggtgtccttggacgttggcatcaattcatggagcttgtctctggctgaatgggcaggtggaagcctgacagcaggacatttctacattgatcaggcaaatcaactatcttaaacagaacattttcattcattttttatgcaaaagaaactgattttgacattaaaatactgtcagtgatgcccatctcaaccagttcat

SEQ ID NO: 277680 - DNA, 571 bp, Homo sapiens
agagttcaaattattgtcagtgttcccaaatggcatttttcatctgtgtttgagggaaggagaaatatcaaccttactaataactaagacaaccaatacragtgtagtttcctgaaatgtattaatggacattttagtttttaaagcagtcaggggacctggatctgaaatctggacattcttttactctccatagaaaagacaccccaagtagttccaatgcgattagacgattatggctgatcacatttccctttctaagtacacagtctatgaaatcagcaaaaaaagagatcacggttgttgtaactcgatcctcctactctgcggcattaatctttccaacggaataagacagttgcatctctttcttcctccttctctcctttttttcctttctttctccctctctcccttcctttcttctttcttaccttcctccgctccctccccgttcctccctgccttgccttcctttgtccctttctcttttcttcccctcctctctctcttccctccctctctctcttccctccttttctttccttttccttccttcttttctttctcc

SEQ ID NO: 277681 - DNA, 536 bp, Homo sapiens
aaccatgcctcacttatcccttcctccagaaataaatattgagtcagaaaagtctgtggaagatcaaatatgataaagttttacttacagtaccataatatactttaggatcattcagggtgtcagaaactttataaatgcttccctccctagtaagttaaattaaactttttctcttttttagaaattccacgaagaaaatcctgattccaagatgtcctgagatcttgtggttccatgagaattattactttaaaaacaaaacaaaatataaaaaactgtgtttgagtaaactgatagattttactctgactgcaaaagagcacacctatgctgcttgttgcagtractaaccaccaatgttaacatcttcatattttatattcctaataacagtgatgactgagaatctatttgagtttccagctggcagaattaattgttattattttcctaggcgcaatttccttaaacgtacagtttaaattcaaggctggaccactcagttattattgctattagaaaataatatatca

SEQ ID NO: 277682 - DNA, 548 bp, Homo sapiens
ggttgtgggtgggtcgcggtggctcacacctgtaatctcagcactttgggaggctgaggcgggcagatcacctcatgtcaggagttagagaccagcctggttaacatggtgaaaccccgtctctactaaaaatacaaaaaaaaattaaccaggtgtagtggcaggtgcctgtaatcccagctaatcgggaggctgaggcaggagaattgcttgaatccaggaggcggaggttgcaatgagccgagatcgcaccattgcactccagcctgygcaacagagcaagcctctgtctcaaacaaacaaacaaaaagatgcttgtgaataggcaatttaaaagttttctgggccctggagggttcattttcccttcctgccacttaactagctgagcaacatgacctgggaggagttagactattagagtttaccctgagagaggccacaagatgcacacacggataacctcttcagggtacaatggcattagtgtgttaggagaggtaagggacaaagttcaacagaaggctgggtgtggtggctcatgcctg

SEQ ID NO: 277683 - DNA, 548 bp, Homo sapiens
ggttgtgggtgggtcgcggtggctcacacctgtaatctcagcactttgggaggctgaggcgggcagatcacctcatgtcaggagttagagaccagcctggttaacatggtgaaaccccgtctctactaaaaatacaaaaaaaaattaaccaggtgtagtggcaggtgcctgtaatcccagctaatcgggaggctgaggcaggagaattgcttgaatccaggaggcggaggttgcaatgagccgagatcgcaccattgcactccagcctgtgcaacagagcaagcctctgtctcaaacaaacaaacaaaaagatgcttgtgaataggcaatttaaaagttttctgggccctggagggttcattttcccttcctgccacttaactagctgagcaacatgacctgggaggagttagactrttagagtttaccctgagagaggccacaagatgcacacacggataacctcttcagggtacaatggcattagtgtgttaggagaggtaagggacaaagttcaacagaaggctgggtgtggtggctcatgcctg

SEQ ID NO: 277684 - DNA, 508 bp, Homo sapiens
tcaaaaaaaaaaaaaaaaaaagtaaaaacattgaagtasaattggcaggaatgcctttattttttaatctaaaatatttaaaatgtattgtagcgtattgaagtgtccttcagataatatcccttggaactttttttttctctaattttgaagtttagtgatactctgtttttatcttaaagtgacattatctttcagtagttcagtgtttgtctctgtctctctctctttttagcctatacttcctggtatatttggcagtgtaataaatgtagctgtcagctagtataattattcccttttgtgtttaaattattggagatagaagattacatctggatattagtctcttcattcagtattgacaagtgatggtatccagtggtacttaaatcattggatgatggaaaacatctttttcttccattaggaaagaattttacatggacttaaaaatcaaagtatttaatgtgtatatctagtacatgttttatacactgtgcttaga

SEQ ID NO: 277685 - DNA, 379 bp, Homo sapiens
ggatttgcataatcttaatccactatatagttaaataaaagggaaaccaatatttattgagaatctgttatgtttcaggtactttatatttgttaaaccttcttgtgtttagaagcactcatcacactgatattagtctgtatttgcaggacctcaccatgtattgtttcccaaataacaatgaaaacttgaaaacaaggatcaagacctgacttaggaattcgtatttagagcagacaggaccaaacccctagaaattgagactaacagaargccaaatttataagcaagttagaaggcacatggagaagaggtagtatgtacaggtgtagaactgagacagagagagaagagagaaacaggaacaagctaatgtgta

SEQ ID NO: 277686 - DNA, 596 bp, Homo sapiens
tccactaagactttgtgggtagttgttagcaaaatgtagccttttctggctgatgcaacatatatgtgaacttaggcaaattccttaattaccttcttcctctgtccctcttcctcgtcctccttttttattcttatttatcatcattaattttatgacaacagtaattattattattgttatagaagttaccattgtatagacattacagagcatttattatgtgttcagtaaagggatcttaaaatatggtaatttaacatagtagtgaagatcatgaatcttggagccaatttgacttagcagataaaacccaaaacccaaaaatctctgcttttccaactataagctctttcttctgtgcttcgatttttctgttatccataaaaagataatagcacttgcttcatggggttgtgggaggacaaaaataaatgtacacatgtaaaatgcttagaacactgcacaataattgcctcatgaagagtcattcttaacatggtctaatatatttttcacagccaccctataaagttgtyctatgtattatctccataagttaagtattatctctattttacaggcacagaaactga

SEQ ID NO: 277687 - DNA, 594 bp, Homo sapiens
ggtgcttttattcaggattaaatgagattcaggatgatgagatttgggattattaaatactagcaagcaacttttctaggcagaacagaaacataagggtctcagaatattggagcttacagaaattgaagctacaaaatataaggtgagacaaagtagatggtacagaacctagagtgaattgaaaagaaatgggaaaaaagagagaggatgagacaaggatgaagaaagttaacttttagtgccatatttaataaatccaagagaaccaactgaaaaaaggagcactgataattcaatagaattagatgactaactgcaaaatcaccataaaaaatccaagtttcttaaaaagaataatagagtgagaataaagacattctatttaatcttccatgaaaatgtaatatacctatgagtaatcttttaaaatgtgtgagatctatatgatgagaaaaaraacacgtgtctataaaaagttagtcattattttggggtaaaacttaatatgttaaagaagtcagttatccttaagttaatctaaaaattatacacaattgtagagtaagttgtaagtagaacttgatacttaga

SEQ ID NO: 277688 - DNA, 594 bp, Homo sapiens
ggtgcttttattcaggattaaatgagattcaggatgatgagatttgggattattaaatactagcaagcaacttttctaggcagaacagaaacataagggtctcagaatattggagcttacagaaattgaagctacaaaatataaggtgagacaaagtagatggtacagaacctagagtgaattgaaaagaaatgggaaaaaagagagaggatgagacaaggatgaagaaagttaacttttagtgccatatttaataaatccaagagaaccaactgaaaaaaggagcactgataattcaatagaattagatgactaactgcaaaatcaccataaaaaatccaagtttcttaaaaagaataatagagtgagaataaagacattctatttaatcttccatgaaaatgtaatatacctatgagtaatcttttaaaatgtgtgagatctatatgatgagaaaaaaaacacgtgtctataaaaagttagtcattattttggggtaaaacttaatatgttaaagaagtcagttatccttaagttaatctaaaaattatacacaattgtagagtaagytgtaagtagaacttgatacttaga

SEQ ID NO: 277689 - DNA, 620 bp, Homo sapiens
ttttagtaccttctactatgtctctactgcttcaagagagctattgtcttagttgcttatttgctccttgaggagtagaatcttayagcttttcacctttgtacctggagagtctagcataaattcctgccatgtagtagttggtgcatacattaaatacattctagaatggattaataaatgcacactaaattaatgaattgatgaagaatgaataaaaatgatttcttctatttgagttctataaagaggagaagaggagcttggcataaataaatataaacacttggtaaatataaagggagtaatttggggggaaaagagatctctcccggctgggcacgatggcttgaagctcatctgaaaataaaagtgtgtgtgtgataagattagattataagaatgattactgatagtaaccgttgataatatttattggctgattactacatagcaaaatctgtactatgtggttgacctaattacctaaaataattctcagcaaaacactttgattcagctgcttttttagcacacccattttacagataaaacaattgaagcaagtgatagtgtgaaatttgtgttaaggaattataactttggagcccactctgaaa

SEQ ID NO: 277690 - DNA, 620 bp, Homo sapiens
ttttagtaccttctactatgtctctactgcttcaagagagctattgtcttagttgcttatttgctccttgaggagtagaatcttatagcttttcacctttgtacctggagagtctagcataaattcctgccatgtagtagttggtgcatacattaaatacattytagaatggattaataaatgcacactaaattaatgaattgatgaagaatgaataaaaatgatttcttctatttgagttctataaagaggagaagaggagcttggcataaataaatataaacacttggtaaatataaagggagtaatttggggggaaaagagatctctcccggctgggcacgatggcttgaagctcatctgaaaataaaagtgtgtgtgtgataagattagattataagaatgattactgatagtaaccgttgataatatttattggctgattactacatagcaaaatctgtactatgtggttgacctaattacctaaaataattctcagcaaaacactttgattcagctgcttttttagcacacccattttacagataaaacaattgaagcaagtgatagtgtgaaatttgtgttaaggaattataactttggagcccactctgaaa

SEQ ID NO: 277691 - DNA, 620 bp, Homo sapiens
ttttagtaccttctactatgtctctactgcttcaagagagctattgtcttagttgcttatttgctccttgaggagtagaatcttatagcttttcacctttgtacctggagagtctagcataaattcctgccatgtagtagttggtgcatacattaaatacattctagaatggattaataaatgcacactaaattaatgaattgatgaagaatgaataaaaatgatttcttctatttgagttctataaagaggagaagaggagcttggcataaataaatataaayacttggtaaatataaagggagtaatttggggggaaaagagatctctcccggctgggcacgatggcttgaagctcatctgaaaataaaagtgtgtgtgtgataagattagattataagaatgattactgatagtaaccgttgataatatttattggctgattactacatagcaaaatctgtactatgtggttgacctaattacctaaaataattctcagcaaaacactttgattcagctgcttttttagcacacccattttacagataaaacaattgaagcaagtgatagtgtgaaatttgtgttaaggaattataactttggagcccactctgaaa

SEQ ID NO: 277692 - DNA, 643 bp, Homo sapiens
gtctcaacaataggaaattatcgattcagaacagaatgtactttctgtaatccttaacaaagtaacactaatataattagcaataaaaaatggggatgtgggtaaaaagtttcagagtgctaattatcttatttgcgtaaaaggaagtcaatccatactgccttaaaagtgtgggtaaaataatgactctaacctcttaatgattttaataatgtattttcttaatttcaaattgatcttttaataaattatactccctgatatgaaaaaaatcyttttttttctgagacaatgtgtctctctctctctctctctctctttctttctgtctctcactctctgtctgtctcccaggctggagtgcagtggcatgatcatagctcactgtaacccccaactcctgggctcaagcaattccctcctcagcctcctgagtggctagaacttcagggatgtgtcaccacacccaggtattttttaaatttttttatagagacaaggtattgatatgtggcccaggttggttttgaactcctggcttcaagtgatttcctgacttggcttcccaacttgctggtattacaggcgtaagacactgtgcccagctgaaaacattctgaaatgtagcaattatttcagtttt

SEQ ID NO: 277693 - DNA, 604 bp, Homo sapiens
ttgccagggactgggaggggaaggaaatggggagttactattaaaaggtacaaagtttcagttttacaagacaaatcagttttagagatctcctgtacaacattttgcctatagttaataatattgtactgtgcactcaaagatttgttaagaggatagaactcatgttaagtgttcttaccataataaaaacaataagcaaatatagtattaacattcatgctaacagaaatatcatgaaacatacattttgaagaatgttttttcttttctttttttcttttacagtagcaatggttcaagctatgtgagtgaccactatatgaataaatccaggaaaatagcatatcattctgtgtgctgcattgcctgaaagccatmgtgtgtgtgtaggggctgagtgagttttttgagccacacaagccattcagtcttggagcttaacagtttgcccctagtttaaagacatcttccccctaggacacttgtgtggtttctacccttttcttctttgcagctacaactctctaataatgtggagcttcctctagactagctcagcaaattccgctcatttaaaaaacatcaatctcttagctgtatt

SEQ ID NO: 277694 - DNA, 594 bp, Homo sapiens
atggtttctttccctgaattgatgagaatcttaaaaatggtaaacacattgaacatctgtatctaggcttagtgtgtaaggttccattgcttattagaaggcagtattgygggatagtcaaggcaaagaacaaggaatttggcaccaaataaacatacgttacatctggttctgctgctagctgtgtgaccttgctgtgtggccttgcgaaaaagcacttagcttctttaaacccagtttttatagcaacaaatcagaagcaattatggcacttgcctcacaatatagttttgaaaatcaagttagttaataagtatacagcattcagagcaatgcctgccacagagtggccctcaatactagctatcatcttctctgtttttatgtggatgtcatcattccatacaggtgaattatggtaagacatcaaaactttggctgtatagacatccttcaatatatctacttgcacctggctacagaaatcttatttccctttatcccagccagctagctactccttgctgagtcaggaatttactgcttacagtcaatgacatgcctgatgctggatacttggttatttgatggtcc

SEQ ID NO: 277695 - DNA, 1097 bp, Homo sapiens
tatgtattggattttaatgcagctataccttttacagggttaactagccctgttgttctttcagatctgagcaatgctctattatccctgaattacccatgtcagtgtctagcttattgtaaatggaaaataaatgatagtttaatataccagagttgaaataaacctagctataaaaatcttaaaaaccccaagtcttagggttttaatctaatccactactttcctctggaccctttatgtttttcatagtatgaataaagaaaagactctgaaaatccattttatttgaagaagaaatcaacaggactatgtgtgtaattaggcttgttcgaaaaattccatgggtatgattcacyattgctggtcaagatactcttgccataggaagggaaataaaattattgaaccatagaattcttgagcaggaaggtgccttaaactttgacttttccactatttcttgtgctaacagcatcaagatcaagcactattgggtgaaagtatatttctatgaggcctaatwaaaatctcagcacttactctcaggtacagcagaacaaatggccaagagctgttgagagccccagggagcttcacaccctaattaggatataaaagggaattattagtccacatttgcacattaaaaaatcaactcactaaaaagagtcwtctcttggttagattcttcaaatcctttgggttcacccctttggtatatctcctgcttcttttggacatccggttattctcactctcaaaaatcctttgcacctcctcaagagaccaaagggaaagcattatgtaaaattggaattatcattctgggcttcagttgcagtaagcaattagattagatatgaacagaacttgaaactgttggcaaatgacaatttgagaggaggtcatttcccttgccttgatatcctacccctatcatacacacacatacaccttaccacccttgagtgtttttcaaaaaacaacaacaaaaataaactcaaacagcattattcactatgtattaattcttaaaagtaatcttttcatctaagtatacattgtccccatgaaaaacttgaaatatccacagg

SEQ ID NO: 277696 - DNA, 1774 bp, Homo sapiens
ggaaaattttgtcccctgacacaagcacagtaaggggaagaaagcaacatggaataactcaagctaagatcccacatgcacactaggaggatgggatggaactaccagaaatgcacaccttatgcaaatgagatgcccaaccccataggggtttcttacaaaagcctctatatccaaactttgaaacaacaacccatttttctggagcccctctctgtagcagagagctattctctttccttcacctattaaatttctactctaaacctcaccctttgtgtrtccacgtccttgatctccttggctgtgagacaatgtctgcttcactaggtatataactaaagtctgcttcagtaggtatacacccaaaggaatatgagtcattctaccataaagatatgtgcacatgtatgttcactgcagcactatttataagagcaaagacatggaatcaatgtaaatgctcatcaatggtagacaggataaagaaaatacatatataccattaattaccatggtgtcataaaaaagaatgagattatgtccttttcaacagtatggatggaactagaggtcattattccaagcaaactaatacaggaacagacaaccaaatatcgcatgttcttacttatgatgtaaacatcawtattgagttattaccctggaagttgcaaggtgtcaatgaacttcagagtttcaacatagttwcatcagacagactctaccagtttaattgttgtttaggtggggagacagataatctggtgcttcttagtccatcctagaattatctccttaggacactggtatttttctgcctttggactccaagtgaaacactgactcttcctgggtctcaaacctgccagcctgaaggctggaacttcaccatcagttctcctgggtctccagtttgctgaatgcatatcttggaacttgtcaactttcatagtcatgtgagccattttccatgtaataagcctctctctctctctctttctctatttatatataaaaattatattgatataaagatatatttatctctctatttatatagttgttgctgtttttctttggttctctttgtctgtagtaccctgactaatatacctatattaatgtactgtgtatgggatctcaaagggcatgagataatcagttttctaattcattcttccataattttctcaaacaatgtgggccccwtattgagttattaccctggaagttgcaaggtgtcaatgaacttcagagtttcaacatagttacatcagacagactctaccagtttaattgttgtttaggtggggagacagataatctggtgcttcttagtccatcctagaattatctccttaggacactggtatttttctgcctttggactccaagtgaaacactgactcttcctgggtctcaaacctgccagcctgaaggctggaacttcaccatcagttctcctgggtctccagtttgctgaatgcatatcttggaacttgtcaactttcawagtcatgtgagccattttccatgtaataagcctctctctctctctctttctctatttatatataaaaattatattgatataaagatatatttatctctctatttatatagttgttgctgtttttctttggttctctttgtctgtagtaccctgactaatatacctatattaatgtactgtgtatgggatctcaaagggcatgagataatcagttttctaattcattcttccataattttctcaaacaatgtgggcccc

SEQ ID NO: 277697 - DNA, 515 bp, Homo sapiens
agggcatgagataatcagttttctaattcattcttccataattttctcaaacaatgtgggccccagaactttctaacagaaacatggaaatctcaaaaggaatattttttcttaagaaatctgaagctagttaaaatttcattccttacttattccctccctattcctaattacacagaagtatgtttctggcagacttttgataacttgctatttcttttaactgtataaatttaagatatacagtaacataatgttttatttatccatagtgaaataattactgcaggtaagcaattttacatatccatcactttctatagttacttcttatttttcrttttgtatcagagcacataatcttcactcatagcaaattttcaacatacaatacaatattgctaattgtagtcctacttctgtacattacatctttagacttattctatgtaactgcatgtttgtgccctttgacttacatctccccattttctccttctccctgccactggtaa

SEQ ID NO: 277698 - DNA, 556 bp, Homo sapiens
tgtcctagtctgagaggagaagtagcaattgagatactgattgtggataagaaagaaagagccttcggcttgtcccaactgaaaaatcatatgcagtggtagaagaatggttgcagagttgatagaaaaatcttttctgaaccaagataagaactatcattaaagaggtaaagggactctctaaatacctgacagttggatttctatgatttgttgcatagcaaatattggctgccagtttcccaatctggctccagttcttggaaagtcctgatgagaggtgaagccagctggacttcctaggttgagtggggacttggagaacttttctgtctagctagaggattgtaaacgcaccaatcagcactctgtaaaaacacaccagtcagtgctctgtgtctagctagaggattataaatgcaccaatcagcctctgtaaaatggaccaatcagcaggatgtgggcrgggacaaataagggaataaaagctggccactgcagccagtagctggcaatcagctcaagtccccttccacgctgtggaagttttgttctt

SEQ ID NO: 277699 - DNA, 585 bp, Homo sapiens
actttgaccattaacatacatttgagccagatgattttggatttcatctttgaaatataaagctacttactaatttgaaatgtatcagtttgaattcataagaaagaatcatacttttaaacagaaacactatgttaaaatatttgcataaagttggcccttaagagagaaagtagaggaaattcacaagtccaagtccatatctgtcattgactaattctgtgaccctgggcaaatagcataagctttctgtttgtcattcttatcacttgtaaaacagagatactagtaatagmaattttacaaggacttttttgagatgaaataatataaagtgtatgaaaagggcctgggcataaatctgcagaaaataaaataggtttttgataaaggtgcattggggtgaatcccatgatttcaaaattctcctgcgaggatgactaagacattgactggaagggggaaagaaagagaagaaagaactgccaaaacatcctggcttcctgagggagagctcctgggaaaaacatctatttatagttagaaccattttttaaagtaataaaattctaatgattgattaaa

SEQ ID NO: 277700 - DNA, 590 bp, Homo sapiens
atgtctgctttttaaacaattgcaacagatggttgacacttgaacagaatgtataattagctttgcaatctaacacttcattcttacttgctctttctcaaagragagaagctgtgccttatgccattgggtctaatctgttagtttaatcagaagcagtgctatgtaagttctcaggagacatgggctgtgggaggattcctaatcccagccttttgaggacatgaaaagaagctgggagggggtgtagagagaaatctcagtacttttaaaaaaactcatgcctcattctcatttgtgttccaaaggaggaaagtttttatgcctttttcttttctttctcccacctcatctccctcagcctctgcttcttcatctgggataatgattcctaacacggaggctgctctgactactaaatgaaataattcctccaaatgcctagcagagaacctgacacatggcagacactacacaaggaaatgatattgttccctcactatagagaaactccagggacatcagttcctattggtttcagcactgttaatgtgattagagtccttgaatccatccactcaacacttcac

SEQ ID NO: 277701 - DNA, 590 bp, Homo sapiens
atgtctgctttttaaacaattgcaacagatggttgacacttgaacagaatgtataattagctttgcaatctaacacttcattcttacttgctctttctcaaaggagagaagctgtgccttatgccattgggtctaatctgttagtttaatcagaagcagtgctatgtaagttctcaggagacatgggctgtgggaggattcctaatcccagccttttgaggacatgaaaagaagctgggagggggtgtagagagaaatctcagtacttttaaaaaaactcatgcctcattctcatttgtgttccaaaggaggaaagtttttatgcctttttcttttctttctcccacctcatctccctcagcctctgcttcttcatctgggataatgattcctaacacggaggctgctctgactactaaatgaaataattcctccaaatgcctagcagagaacctgacacatggcagacactacacaaggaaatgatattgttccctcactatagagaaactccagggacatcagttcctattggtttcrgcactgttaatgtgattagagtccttgaatccatccactcaacacttcac

SEQ ID NO: 277702 - DNA, 448 bp, Homo sapiens
tagataattaaccctaaaaggcaaaaatcaatttggcaaaaagatgttagaagcatcatcactttttgtttggatgactatttttctttcagttcactccaaacactccttttttttaataaagctgaaaatatttttgtttggagccaaagctccaaatatcaaacctatgtatgagacgttacaaatccttcattcttatagaatagctgaacatacatatacacacacatcaagggatatttttagtgakaaagtggactaagaaataagtgatagatatttaaaaaggttgactctaagcctaaaattatttttctcactgttataaatgaagacactgatgataagagaggttaaataaacaactctcccaagatctggctgctactaaatgtcaatgagaggatttgaactgattttggcctgatttaagaagtgtgactca

SEQ ID NO: 277703 - DNA, 584 bp, Homo sapiens
tattctgttattaatgtgagggacctaatcacactacagaaaaaagtgtatcagtgagtatccttgggaaatcagaaagaaattgagcttgttcattgctgtcagcctgaccttcaagatatgacaagatgccaaaggggggaaaattacttaagattttcagaaactcagagacataaggagagtattttgaaaaagaaaaaaaarttcccctcctttcccaattcacaattagggttgtataatgcttaagttctgtgttatttcatgtgcagacagtgatggttgaaaaccatatacctactcaaaaatcacagaccaaacatatttatgcatatgtatatataatacatatatatatatatgtagtctcatctctaaatttatccttctatccttgtaagtaaaccatcagactagaattccaaaaaaagacagaatagacatgttccactgcttcttgttaaactgaatgcatacgtgtatatagcaggatctagggtgttgcattttgtttctttagtctacacattatattcttcttaaaactcaatggtgaggtagtttcttgcccagggagtgcc

SEQ ID NO: 277704 - DNA, 528 bp, Homo sapiens
cttggcacagataaatatcctaatgtgtcttattcattgcatgtgaacttttgaggcactatagggcaatgggacaagcatggagcttaactcatcctcatacccattagttaatcatgtgactttgttcattctctcgaaacttaaatttttatctttgccataggcaaaggcataataaggcacttattttagggagtgcagaactggacagcagcatgcagggacctytagtagtggatccctagcagtcaagaaaacaaaattatttagacattactgagcagctctgatgtgcaaagcactatgctgtacagaggaaataggaaaattagataagcccctgccaaaaagttactcacaatttgaatgaatggaagagtttgaatagggtttggaaggactaagtaggattaaaaaagaaatcagatgagctagcttattaaaaatcagtacagggttaagagtttcacaagcatttcttgaggtctttggtaattcccgaagagggatccagcctgctagaga

SEQ ID NO: 277705 - DNA, 620 bp, Homo sapiens
taaatgtatgttttctccattaaccttcctaaatattgtattaattctaatatagtattttaaattctctaggtaaacagtcaaatcaccatcaaaacaaaagataattttaatcttttctttmcaagtgtttataaataattaatgcttttctcttaatatctatacttctaaatcaacctaaaacatatgtgtctttaccagcctgctgatacaaataattgacaagtcttacattttgatatcctaggaacacaaacaaaagtcaatagcaattcccagggcaatacctgtcttgttttagcgcttgttcctactgcatttaactgaacagctagtccctggtttcatttattgtttttactttctctgtttgaacatggtcctcgtgttgtttctatggatcagtcttgaatctctttaagaatatgaatcatgtatttttgtttccatttcttgctgtgatcccttgtaagcaaatcccagaaataaataagctccaatcccaactaaacaacactgacatcactcccagtgtccagatgggtggatattattatccctactggagaaacacagtaacagaaactcagtgggttaaagccacttgctccattaca

SEQ ID NO: 277706 - DNA, 620 bp, Homo sapiens
taaatgtatgttttctccattaaccttcctaaatattgtattaattctaatatagtattttaaattctctaggtaaacagtcaaatcaccatcaaaacaaaagataattttaatcttttctttccaagtgtttataaataattaatgcttttctcttaatatctatacttctaaatcaacctaaaacatatgtgtctttaccagcctgctgatacaartaattgacaagtcttacattttgatatcctaggaacacaaacaaaagtcaatagcaattcccagggcaatacctgtcttgttttagcgcttgttcctactgcatttaactgaacagctagtccctggtttcatttattgtttttactttctctgtttgaacatggtcctcgtgttgtttctatggatcagtcttgaatctctttaagaatatgaatcatgtatttttgtttccatttcttgctgtgatcccttgtaagcaaatcccagaaataaataagctccaatcccaactaaacaacactgacatcactcccagtgtccagatgggtggatattattatccctactggagaaacacagtaacagaaactcagtgggttaaagccacttgctccattaca

SEQ ID NO: 277707 - DNA, 622 bp, Homo sapiens
tcagctaaatcttagcttcaatcatgattacattatcaaccacatcaaacagagtgggaccttagatacagattagcaagccccacctactgtttttcaggcacaattataagattataagccctccttttttggggaggggagggataagggtcttgctctgttgcccaggctggagtgcagtggtgtgaccatagctcactctgacctctagcttgaaaagtcaagccacaactacaggtgcgcacctccatgccaagttaagttgttcagtgttttgtttttgttttagtttttcctgtagagacagggtctttctatattgcccaggctggtctcaatcttctggcctcaagctctcctcctgccttggcctcctaaagttctaggattgcaggcatgagccactgtgcctggcctctaagcaccmcaggccccctcactttttaaatgccaacatcctttaattgtccaagtctgcgtttccaacaaagacattatcctgacttttctccttgctttgtctgatttttcaaagagcatatatggtggtgtgggtaagagcttgcattgcactcatatagaagaaaacctgtcttagtcatagattatctgtgtaaaa

SEQ ID NO: 277708 - DNA, 476 bp, Homo sapiens
cctacatttgagtaatgaatcatctcttttccaaagggaaaaatgtaattttctcagactgctacaaatatgtccttttggagcctaggaatatgctatttaagaaacaataccttgagaaagttaaatcctatcaagtgaaataattttccactgcaaattatcactatgaaagcatgctttgcatttacagctattaactattttaggtagtagttacatagtcacaaaatgaaaacacacacacactcacacacgcacacacacatcatacaaccctaaggccattgtatgttgaatattttcttctttccattatttgaaaaaaatgcatataccattttctcaaaaaagtctatccttatttgagattktttcttgaaaacgttgtcctaaaattagaaataaatgatttaaagacatgtccatttgtaaggcacttaacatatattaacgtatgtacttatggaagaaat

SEQ ID NO: 277709 - DNA, 579 bp, Homo sapiens
agttgtgctcatgatggtcaaaggaaagtatttttagaagaaaaataaccttggtggccttgtatttaattggcaatagctggaaaggactgtaatataaatattgagattatatatatggatatatagacaattaaactacatgttygtccccctaaaaaggacagaaaacataatggaaatttcaggggccagattttagcttataagctaatcacaagtaaatatttttttaaaaaaacagataataacaacatcattttgccatgtttgtgtgcgtgtgggtacaggtgcacctgtgaaaatggaatagacaccatcagatgctgtgagttcactgacatgaaacaatcactttctggatgaggctgttataaacagtgttaataagtaatttcaataacatgacaaggcaactgaccctggctaggccagtttaaaacctccagccccataaaatggagtacttagggaggtatttggtgctatgatgaaaagttcatccacacaggcaattcaccacctatttactgaacacccataatatgcttggcactgaggctacagagaagaaggagc

SEQ ID NO: 277710 - DNA, 585 bp, Homo sapiens
tcatgggaacttaatcattctctctgctttcaaatcatcaggtttaccaaaataaagattcacaagcattcacatagcccattctactgagcagatgcatagaccactttgcttttctaaatctgcatttctgataaagttccagcctgagagctgaaattgcaccatttagggagaaacatggcattctctgtttcattagtcagaaaacctgaaatcattatatattagctaaaacaacagcagctgatttttccaggccctctgactctgcataatgtattgcttttcactgtgttagttcatcattcagaaatgcagtatatcctaaaactgacccaggctaagaaaggagattttatttatcgtaggattaaakttttgacaaaggcaagtattgaactggatgtttcctgacttacgtggtaaaacaaacaaacacaaaactttagaatgagtacagtttgattggaaatgacatataattttaatagattgtttccacctgctgtccagtacttaactataggatgatgtaaaagtcacttggcatctcccacaatcaaactctttatcttaaaatgg

SEQ ID NO: 277711 - DNA, 544 bp, Homo sapiens
caactcagaaagtttgaaggaaatgtgtagctcactagatagtttttctcagagtgtattctcttctctgcagttgtggatgcatacccagtagggtcgtgtgtatccttctatatatgakgaggcacatccattgtgaatgtcttacctctctcctgactttgtaattgggtacacaagagggtaacaagaggcctggatgcatgaaataagactatttgggccatcatcttgtgactttctaccaatgaggatttattctgcttttagaaacaggccatgattgtctatggcaaccatgtttcacagtgaatttaccagatctctgtttttgccccaactctccaaagactgtatgacttagtgacacatctgagacttcatggatcttccagataatgagggctgacccaacactacaaatcaactctgtcattacctgatttatattaacatagcaattccacatgctttatttaaaaaaacactctttttaaaaataaagaacaaaatatacagtggctttaaatattccctggttaca

SEQ ID NO: 277712 - DNA, 657 bp, Homo sapiens
tgtcagtttctcctgctacagaggttacaaatacacagtttgctcataaactcatatggtgacataaataataatgatgtcatctacctaatgcttcttacttgtatttccacatacctcatgttatttgactcataacatggtgaagtaaatattggtagcttatttcacagaagaatygatgaaaaaattgaggatctcaaaattagttaaatcacatgagatggcacatcgaatgaggggcagatttggataccagcagctttcttggcctctaaaatctattctcttatgcccatatcttacagcttaggcagagaggttgaggaggaagagattatgtgcgtcctgcaaaaggagactgtccaagtctcccttctttccacaaatacttagtgtgtttgtgatatatgccaggtattagcctactcagtggggtcacagcagtgaagaaaacaaactaggtccccacactcctgaagcttctaaatgcaaacattaatggtttatggatgatttttattctttaccatctactctgccccacaaaaatacaataagacctctttgcatacttttcacaaaatgagaaactatgcctgtagttatagttaaatatgtaggcagtagttcttggtctttttattccaaagtgct

SEQ ID NO: 277713 - DNA, 574 bp, Homo sapiens
ttatatggcagagtatgttacctagaatttcatctttttccaaagagaaggccatttccmaaactaaactctaagaattctaagaaagaaaaatacatttaatttcaaaagcatttcctctgttatgctggcagtacacactcctatagcaagtctgccactaaaaaatgagtctatgttgatgcattttaagagcatgcagtgatagctctgattagatcactagctgcaaatgagaatgcagatacaaatcctgttttatgcattgtaaacatgctgcactctgaggcttaaaggtcctggagatgtcacactagggagtatccatgcatgccttttcttcttccattttggcctgtagttagagtctatgctaatatcatttcccatttcctaagaaagaaattaaaagtcagaaacaatttaaattacttgaattctctcccatgagaggaatttgtatacctcagaaatgaatgtgactctttgatggggaatgcttatttgctgttgacagctttttagtgaaaaagatagaaatcagattgaatttcgacagcgagaaattgagagc

SEQ ID NO: 277714 - DNA, 574 bp, Homo sapiens
ttatatggcagagtatgttacctagaatttcatctttttccaaagagaaggccatttcccaaactaaactctaagaattctaagaaagaaaaatacatttaatttcaaaagcatttcctctgttatgctggcagtacacactcctatagcaagtctgccactaaaaaatgagtctatgttgatgcattttaaragcatgcagtgatagctctgattagatcactagctgcaaatgagaatgcagatacaaatcctgttttatgcattgtaaacatgctgcactctgaggcttaaaggtcctggagatgtcacactagggagtatccatgcatgccttttcttcttccattttggcctgtagttagagtctatgctaatatcatttcccatttcctaagaaagaaattaaaagtcagaaacaatttaaattacttgaattctctcccatgagaggaatttgtatacctcagaaatgaatgtgactctttgatggggaatgcttatttgctgttgacagctttttagtgaaaaagatagaaatcagattgaatttcgacagcgagaaattgagagc

SEQ ID NO: 277715 - DNA, 574 bp, Homo sapiens
ttatatggcagagtatgttacctagaatttcatctttttccaaagagaaggccatttcccaaactaaactctaagaattctaagaaagaaaaatacatttaatttcaaaagcatttcctctgttatgctggcagtacacactcctatagcaagtctgccactaaaaaatgagtctatgttgatgcattttaagagcatrcagtgatagctctgattagatcactagctgcaaatgagaatgcagatacaaatcctgttttatgcattgtaaacatgctgcactctgaggcttaaaggtcctggagatgtcacactagggagtatccatgcatgccttttcttcttccattttggcctgtagttagagtctatgctaatatcatttcccatttcctaagaaagaaattaaaagtcagaaacaatttaaattacttgaattctctcccatgagaggaatttgtatacctcagaaatgaatgtgactctttgatggggaatgcttatttgctgttgacagctttttagtgaaaaagatagaaatcagattgaatttcgacagcgagaaattgagagc

SEQ ID NO: 277716 - DNA, 551 bp, Homo sapiens
aaaacagtggtttaaaaaagtagaggaatctaaataaatattragtccaaaacaataatagtaatacattgtggtgtttaatatatatagaaaaatgtaagttaacaataatacaggcaagaagaagataaataggactaaagtgtgataaaatcctagattttttcagaagtggtaaaagtactaaattatatcacactggaagaagttaaggatgtgtgttttgatttttagaggaaccacaaaaaaacagtaaagttgacaacttaataagtgatgacaatgaaaggataatttataaagtgattaatcaataaaaggcaagaaagctgaggtaagataaatagaaaacaaatagtaattcagttaatattatggtaaatgtaaatgaactagatattacatacacacacctacacacacacacacacacacacacagagcaccacacccgtaaacatttggatgcagcttaaatatgtgtattaaaaaagaggaatagctaagtatacatctcaaaaaatgttttaaataaagaatagaaaaccaaa

SEQ ID NO: 277717 - DNA, 558 bp, Homo sapiens
ttgtggcatttctgttatagcagcccaaatggaataagacaatcaaaaatgataaaaacaatgacagttcttatcaattctattcaacatttaagaatggaaaaaggcttggccacagctttaagatttttttaaaaagagtatagaaaagaacttaaaatgtcatcatttacagataatataattgtgtacacagatatgtcaatactcyatgtaaaatatattagacataagtgaatttaacaaaaattcctggaggctaggtcaataccaaaaccaactgcattactaagcaccagaaacaaacaaaagaaaattattttccaaaaaatgcaaattaaaacattatttccccaaaaacaaatacgaatatagctaagaacagtatataggacctttatgctggaatttaaaaaccattattgagaaaggaactatgaagaactaaatgatgaaaagaaatgttcatagacacaagactcagtaatctcaacttctcagtcttctttaaatttatctttagatctgatgcaattccaataaaaattgtaaatgtat

SEQ ID NO: 277718 - DNA, 595 bp, Homo sapiens
ctacaaaaattaaaaatttttaaaaatgaccaatgagagacagtacatgagaccatgaataaattatcttatcctttattcctccaaagtattattctaaagcacagtttctcgmtccaaaagcattctgtgatcatgagcaattgaatctgccgaacagttggctgtatcacttgtggtttattgtcaatcagtggtcactttcctttgaatgccctccatcggcacctcattcacttcctttttccctatccctttaactactaaatgaatgcatgctgattgcatcaccactaatcactacctcaggatctgttttgggcattaacctgtgataaatttataggtgcatggataaatgaacaaaagaaacaaatatttatcactacaagtgtgtcaataattatggcaaacattattgcaaaaattacatgcagccaactaagtccaagtccaacaatcataattgtaaaattttttgtaaatatatttttattggtcatcttcctcatttattatttataaaagttttcagtcaattctcttatattttattgataaattatgtcatctgcagatgctagttttttcttgc

SEQ ID NO: 277719 - DNA, 593 bp, Homo sapiens
gtaactaagtcctactgtacagagtggttgtcatctgcagaaaatctgcatttgtagtaccagagaattcatgaacatgcagattcctaggccccacctagaacttctagatctaaacctcagtgattgaagcttgagattctgaacatttcaaattatttaaagatgattttcatgttactaaagttggagaatcaggaattaggggctttaaggtattgaggagtggatgaatacagggatatttcttaatacaaataataaatatcttcactttaaatgtcccttccagggtttagatcaggcaatggctacttaacagtcttgaaaataggataaaaagaatttcatctgccttcctctaaaatgcctctgaccagcatctaggcaggaagtacccatcaattmgatttagggaaaaggcccataatctcccccacttcaaatagaataaaagttaaagccagaaacagcttacatatttatctgaaatgcctcaatagctcctttgttccaaatttcaccttaaaatgattacctactaggactaagacagtaatagtgctgctaagtaagaataaacaaaggactcc

SEQ ID NO: 277720 - DNA, 523 bp, Homo sapiens
cgcctgtagtcccagctagttggaaggctgaggcaggataatcgctcaaatccaggaggtggaggttgcaatgaaccaagatcgtgccactgcactccggcctgagcaacagagtgagactccatctcaagaaagaaaaaaagaaagaaatgtgttctagaagtcatcagacacacaaacacccataaatagctttaaaatgaataaagaatgtgatgttgacaggcaggtatcaatcaagaaacattatgttcttacagaaaaaaaaaaagaaaagaaaaaagtagtgaaaggaagagagagtctataagtcaaggtccagccagaaaatagaaactactctaagtatttcaaacagagggaattcaatacagggaatgtttagataagtaatgaaagagctaagaagccaaatagaagactgtgaagcaagtcagacattagaaacaacaggaagataccrggagttggagggacaaagaaatgtgacaatgttattggagtccaacagctgaagccacct

SEQ ID NO: 277721 - DNA, 569 bp, Homo sapiens
ctgaatttagaatcacatactgagctcctaagagacaccaacatccaactctgcggagagagggagtcaatgccaaagtaggaaaaaagaacagggtgcrctcgcaaatcaacaaagaccaaactcaaggagaagatgtcattcagcctacagtaaatcctcacctgactgaaccccatcatgaggggtaaccaaagactataccaatcatagaccctctcaaggtacacacggtagagatgagtactcagtgaagcacaacacttgggtttgcacaaatgagaaggaagataaatcaactttggtcactgagtccactgtcatgagccacactgtgtggtttgaatgacatgattcaggcattaatttaaagagaagatgaagagctctgacagagcaagagtcaggcttgctggggcccttccatcacctcctctctttgacaatctctgaggctttctagagaatgctagagctctccagagcattttggaaatcactcatctggaacataaatgttaccagtacttaactcttcaacatacctgaaaaacttaattttgtgtcag

SEQ ID NO: 277722 - DNA, 569 bp, Homo sapiens
ctgaatttagaatcacatactgagctcctaagagacaccaacatccaactctgcggagagagggagtcaatgccaaagtaggaaaaaagaacagggtgcgctcgcaaatcaacaaagaccaaactcaaggagaagatgtcattcagcctacagtaaatcctcacctgactgaaccccatcatgaggggtaaccaaagactataccaatcatagaccctctcaaggtacacacggtagagatgagtactcagtgaagcacaacacttgggtttgcacaaatgagaaggaagataaatcaactttggtcactgagtccactgtcatgagccacactgtgtggtttgaatgacatgattcaggcattaatttaaagagaagatgaagagctctgacagagcaagagtcaggcttgctgggscccttccatcacctcctctctttgacaatctctgaggctttctagagaatgctagagctctccagagcattttggaaatcactcatctggaacataaatgttaccagtacttaactcttcaacatacctgaaaaacttaattttgtgtcag

SEQ ID NO: 277723 - DNA, 570 bp, Homo sapiens
tacgggccgtgccactccataaccaacttcctagctgattgccacaccgtattttggatctcttctgcttctaaaataatcctgttatttaatttcaaaccatctctaaatcaacatcctcttaacacactcagcctagccacagacatgagcacacttgctargtaactcctgtagatggtgcctcaagttctttccctgcccacagaggaacaatgtctagatagtttccacagctctccttcctgttgagtttctttctttctatacacgccctgacttcccactgccacaactgcaatgctgatttgcttttgctttaaccctctggatctcagaaaagtgtgagcaccggatatgctcctatctccttaggacccaatacaaaactatcttctattatcagtgattctcaaatgtttgtgtgcatctgatgggcttgctaaaatacagattgctgggccccaccctggagtttctgattctgtggttctgaaagagatcagaaaatgtgtacatttataacaagtttccaggtgttactgctctgggaatcatatttttaagaac

SEQ ID NO: 277724 - DNA, 583 bp, Homo sapiens
ctattaagtagaccgatatccctgttacataagcaaaattctttcatataatcacccaagccaaaagcagcattcagtacgcatgaatcatatgccgtaagcagatgtaattcaatgttggaatcaaataacatatgtttatttttacacatttaaaatatttctccatataaaaaactgtcataatttcaytggaaatttttacatcccaatttttagctctatgtacaaccagcctgtttttacactcaaatccagagttggataaaaattaaagaaagattaaaagggtagcagtgttgtatttattactttataagatatttagctagatgacaaatctataatgctattctacatggcatctcatcttgaatggcatttcattttcatagcgtcgatgttgaaagatatgggggaaagggggaaacaggtagaaaaagtaaaatataagtttttgctggcaggcagggtcactattaagtttactatatatcatatgacaaactgatcaattatttcataataatgaagaaagaccaaggaagtggaatgctttgagaatatcatcacagtgatgtgg

SEQ ID NO: 277725 - DNA, 808 bp, Homo sapiens
tgcttacagtctctaaaggttttagcctagctcttttgttatgtctaagactttgaattttagcttcttgggaatgagaaatcattcagccagagaatgacatagtcacatgtgaattttaggaccttccctcaggtacatgtatggaaagtgagagtaggaagaatgatgtttccaacatactgttagttttgtgcagttttgtttgatccataattgcctggaaatacagcattgtgtataaatgctccttcactcttctgttgtaacttatttcttttaaaaacaatctgaaccatctcctcttgtgaatacagtcacatctactttgaccctacagattcctttgtccttctgactgtattcacaggtataatgctaatcctcatttcaaattcaaataggcctttgtttgtagggcaaagatgtcattgaatctgtcaatctctggcccagcatggtctactctaactatgaggaaacaytggctggtataacatgagaactctggatctgatgacaatgctttttcctctatgatgtcctggagcccagagggttagaaatagtgwgtgtaggccaagtatggagttgtgggcagtgcagacactcaaattaacatgacattattcctgagaaaatacatctaagctgtttggggctttaaaaaacatatctttaattgctgccaactctccagttctttttgcaaattatgaaagttggggcttgtgagtcaatacaaagactaaataagatcctgwtggttctattattaggatgtgaaaaaagtcaaaaagcagagcaa

SEQ ID NO: 277726 - DNA, 339 bp, Homo sapiens
aagtggtaggcgttcagttagtgcttgctgactgtttgctggatgaaggtgttcagtaagataggtgtaattgcaatagttactggattgtaacaggaatagatccaaagcaacccactcttaattttaatcaaatatttctaagggaatttgaaaataaaacataacaaaatttccccttggaaattggagatagtaaatgatgcctaagactcaatttccttctaaagatggtttggagatggcccagtttctccagattctttttgctsccagtgatgaattgttgatctatttctcatttgtgggttggattgatattcatcatggagaattaca

SEQ ID NO: 277727 - DNA, 558 bp, Homo sapiens
taagaaactgccaagctcttgtccaaagtgactgtgccattttacattcacaccagcagtatttgagagtttcagctgccctacacctttgccattactactattgtcagtcattttcattttaggcattaagagcagtattttgatgcactaaaatacacacacacacacacacacacacacacacacatacatatatatgtatttgcttmtttgtttgttttgcttggtttggtttttggtttttatttcttgttgttgttgttgctgctgctgtttagatacagggtctcactctgtcacccaggctagcatgcaatagtgtaatgatagctcactataacctcaaactcctgggctcaagcctcctctcgcttcagcctcctgagtaaatagaactacaggcacatgccatctgcccagctactcactatgttgcccaggctggtctcaaacccctggccttaagcaatcctcccaccttgacttcccaaactgcttgtattacatgcatgaaccaccatgccctgggccccttggtttgatttttatctgccc

SEQ ID NO: 277728 - DNA, 558 bp, Homo sapiens
taagaaactgccaagctcttgtccaaagtgactgtgccattttacattcacaccagcagtatttgagagtttcagctgccctacacctttgccattactactattgtcagtcattttcattttaggcattaagagcagtattttgatgcactaaaatacacacacacacacacacacacacacacacacatacatatatatgtatttgcttatttgtttgttttgcttggtttggtttttggtttttatttcttgttgttgttgttgctgctgctgtttagatacagggtctcactctgtcacccaggctagcatgcaatagtgtaatsatagctcactataacctcaaactcctgggctcaagcctcctctcgcttcagcctcctgagtaaatagaactacaggcacatgccatctgcccagctactcactatgttgcccaggctggtctcaaacccctggccttaagcaatcctcccaccttgacttcccaaactgcttgtattacatgcatgaaccaccatgccctgggccccttggtttgatttttatctgccc

SEQ ID NO: 277729 - DNA, 577 bp, Homo sapiens
acacacacaacagatgttcatatcaaaataaggaggaaaattcacaacaattatagtccttctttctgcaactagtcacatgatcatagctggtctttatatctaccttcttccactacccattatgtattttccttgccttcagcaagcacttcaggtagttttggttctttatctgctggggtagcccaaatcttcattcctgaagggtctgggccatttgttgtcttacctggattgggttgytgtagtgttccatttaccttaatcacacagcatgatactaataagagatgccctaaaggctctcctgtatttcaaaccacacttttttttacctccactgtagagtagtagcccaatttcctccttggcaactaggatcaatcagcccagccaatcccttaactcctcctttgtctgttgactcggaggcattaagagcccgaagtggctggttcacagtcttaacttctggttcaattgaatcattgttgtatttattggaggaagaatttctccctctggaactaaattggctaggccagcagagcacaaagtcacagaaataggaagc

SEQ ID NO: 277730 - DNA, 638 bp, Homo sapiens
aggcaaggaaaaaaaaaggtaatgatactgactactcagttgcttagatagctttttattaagagacataattgttttttacaccttattaaataacatgaagagcaggaaagaaacagcattattggtgatttttaatcaggtttctataagtttcagtcatgaagtaattattcaaacaaatgaaggaagacagcacaatccgtaactgcacataaatatatattaaagaaataatatctcattttaagataaagtacataggtggtataaatgcaagtacggcatttttctttatgtactttaccatttcatcaaaaacaaattacaattaattctatttaatgattatgttatatataaaataatgtaccattatayttctaatatatttatccttataatagattattattgtgattattaacagcattaactataacaatagctcatttcatgaagcaccttttctgtgcagtgttttgcagcattactgaagtttattcacatcactttagagttactcttcatttcttgctgaagaaattgaaaccaagagagcttagcttgaagacctaagtgtcaatttctactaattaatagaaataattgggaatctaattaattaattacctggg

SEQ ID NO: 277731 - DNA, 638 bp, Homo sapiens
aggcaaggaaaaaaaaaggtaatgatactgactactcagttgcttagatagctttttattaagagacataattgttttttacaccttattaaataacatgaagagcaggaaagaaacagcattattggtgatttttaatcaggtttctataagtttcagtcatgaagtaattattcaaacaaatgaaggaagacagcacaatccgtaactgcacataaatatatattaaagaaataatatctcattttaagataaagtacataggtggtataaatgcaagtacggcatttttctttatgtactttaccatttcatcaaaaacaaattacaattaattctatttaatgattatgttatatataaaataatgtaccattatatttctaatatatttatccttataayagattattattgtgattattaacagcattaactataacaatagctcatttcatgaagcaccttttctgtgcagtgttttgcagcattactgaagtttattcacatcactttagagttactcttcatttcttgctgaagaaattgaaaccaagagagcttagcttgaagacctaagtgtcaatttctactaattaatagaaataattgggaatctaattaattaattacctggg

SEQ ID NO: 277732 - DNA, 569 bp, Homo sapiens
tgaggatttaaggggcaattacatgtaaamatgtggtatatcaaagatgctcaaataattaatattggttcacttcccctctcgctcttctgtgggtataatttttttaaaaggcacatgcttaacagcaacgatatctccaagtgcagtaggagagagagccctggaagcaaattagtataaaaatgatgctaaataagccagcaactcatctgcccctgatttttttcctttattcaaaaaatatttattatctattatgctccaagcacaaaagatgacaataatccagacatttaaaaagccacgaaaagagagttccagaaggtcggagcagtaggcgcaaaagcccagagacagaaatatctgattaattcaaggatcaagaaagagatgaacacagttgcaatgtgatgggtctagcgagtggcatgagatggcactgaaattaggcaaaagctagactatgggaagtgtaatacagtcccttctcccagccccctacctccggaactaatcatttccttaaattcacatggctttgcttttttttttttttcacaatttca

SEQ ID NO: 277733 - DNA, 569 bp, Homo sapiens
tgaggatttaaggggcaattacatgtaaaaatgtggtatatcaaagatgctcaaataattaatattggttcacttcccctctcgctcttctgtgggtataatttttttaaaaggcacatgcttaacagcaacgatatctccaagtgcagtaggagagagagccctggaagcaaattagtataaaaatgatgctaaataagccagcaactcatctgcccctgatttttttcctttattcaaaaaatatttattatctattatgctccaagcacaaaagatgacaataatccagacatttaaaaagccacgaaaagagagttccagaaggtcggagcagtaggcgcaaaagcccagagacagaaatatctgattaattcaaggatcaagaaagasatgaacacagttgcaatgtgatgggtctagcgagtggcatgagatggcactgaaattaggcaaaagctagactatgggaagtgtaatacagtcccttctcccagccccctacctccggaactaatcatttccttaaattcacatggctttgcttttttttttttttcacaatttca

SEQ ID NO: 277734 - DNA, 417 bp, Homo sapiens
cagtacttgatgcccaagagtctaatgcaagacagttactgatattattaatatgtgttatcacttttcttttcaaaataaacatctcacttgactattgctctcaaaaccagaagagayagaaatagtatttatttttaagataagtttgtaatggccaacatgtttacctatggcttctcccaattaagtaaaatcatgagttaaatttaagcagtaatgagtttctcttttgtcagaaaatctcatggtaacaagcatggttctaaaaagttgtgcagttatgtttcagcagcacaaactcaggctggaacagctctcatgcatccatacactaattcatttatttacacattcattaagtatgtgtattatgtgctagaacctatattaggtataatatggagaaggataaaa

SEQ ID NO: 277735 - DNA, 417 bp, Homo sapiens
cagtacttgatgcccaagagtctaatgcaagacagttactgatattattaatatgtgttatcacttttcttttcaaaataaacatctcacttgactattgctctcaaaaccagaagagacagaaatagtatttatttttaagataagtttgtaatggccaacatgtttacctatggcttctcccaattaagtaaaatcatgagttaaatttaagcagtaatgagtttctcttttgtcagaaaatctcatggtaacaagcatggttctaaaaagttgtgcagttatgtttcagcagcacaaactcaggctggaacagctstcatgcatccatacactaattcatttatttacacattcattaagtatgtgtattatgtgctagaacctatattaggtataatatggagaaggataaaa

SEQ ID NO: 277736 - DNA, 567 bp, Homo sapiens
tccttggcaactaggatcaatcagcccagccaatcccttaactcctcctttgtctgttgactcggaggcattaagagcccgaagtggctggttcacagtcttaacttctggttcaattgaatcattgttgtatttattggaggaagaatttctccctctggaactaaattggctaggccagcagagcacaaagtcacagaaataggaagcaaaaattgtgctagtgggtcactaggggtactagtgagtggtgccactccatttccatcctttaatttctagatgatgaaccccggctataagagtaacagcatcatatactagacactgattcagagyatatacagtctcctggaggacctcacccctggccaattacagtgccaaccaagatattgtcacttggctggcactgtaattgagtcttcaaaagaccattccaccattctatcaagccagctgcttccagatggtagaaaatatggtaagaccagtgaactccacagccatgggcccatcgctgaacttttgctgtgaagtgagttccctgatcttaaacaatgccgg

SEQ ID NO: 277737 - DNA, 585 bp, Homo sapiens
atcttacccactttattaaaatcctcctctgctgcagtcactcttgggtaagcgttcacatgatacacaaatatcttcacattgtttgcccattcagagaggtctatcaatatatctcttactcaaatctcttggtcaccaattttccaatcatgttccttccaggtccctgattgtccagcaaaaacattggctacagcccaygaatcagtatataatcacacatctggccacttcctcttccaagcaacatgagaaactattgcatttctcaaagttctgcccactgagaagactttccctcaccactgtgcttcagcgttatttcagagagaagctgtaatgcagcagctgtccactgttgtgtggtgcctgcatatcatgcagatatgcgtaaaccaggccatgtgtaaaccaggcccctgttttctcttcctttgtcaactgattgtaggaaacttcccatgaggtcataggtacaggcagggagagaaaaattaactatcacataggttcactctattctgagcagatcacgttgaaattcaaggtagttcatttaaaataaatatttaaagagtagag

SEQ ID NO: 277738 - DNA, 558 bp, Homo sapiens
taaacatagaatgggtgatagaagttcaagatgctcacaagaaaataagtgaatttattaaaatttaaatataattgaaaactcatgtatagaaggaaaaacctagacgaggaagagcaattacactgcagtatttttgcagtttttaatgtttttgtaatatttaactcttgggttcttcataaaagagaatctcttgctaaaggacacctcatggtttrgtttgattttgttttgttctgttttcattaaaattgaacccataggactgtcatgcattcatgacatagaggcaaagagcatgagctttgaaattatacaggcatgaagttaaattccagctttgctgttactaaatatagttattaccttgtggaaaatggcactggaaaaccagctttgtgcttcaactttgcatttgtcaattgagagttgttctgagagtcaaatgagaaatatatcccatgcatttagcacagttcttggaacattacaggtgtgcattaaactgtagggagggttatgagtttttctaaaggttttgtgtattcatctgct

SEQ ID NO: 277739 - DNA, 558 bp, Homo sapiens
taaacatagaatgggtgatagaagttcaagatgctcacaagaaaataagtgaatttattaaaatttaaatataattgaaaactcatgtatagaaggaaaaacctagacgaggaagagcaattacactgcagtatttttgcagtttttaatgtttttgtaatatttaactcttgggttcttcataaaagagaatctcttgctaaaggacacctcatggtttggtttgattttgttttgttytgttttcattaaaattgaacccataggactgtcatgcattcatgacatagaggcaaagagcatgagctttgaaattatacaggcatgaagttaaattccagctttgctgttactaaatatagttattaccttgtggaaaatggcactggaaaaccagctttgtgcttcaactttgcatttgtcaattgagagttgttctgagagtcaaatgagaaatatatcccatgcatttagcacagttcttggaacattacaggtgtgcattaaactgtagggagggttatgagtttttctaaaggttttgtgtattcatctgct

SEQ ID NO: 277740 - DNA, 556 bp, Homo sapiens
ctcacccacaggtgggaattgaacaatgagaacacatggacacaggaaggggaacatcacacaccggggaccgttgtgggatggagggaggggggagggatagcattaggagatatacctaatgccaaatgacaagttaatgggtgtagcacaccaacatggcacatgtataaatatgtaacaaacctgcacgttgtgcacatgtaccctaaaacttaaagtataataataataaaaaaaagaaaaattcagagcagaaatacaaaaaaaaagtatttgtaaaggaagagatatctacactgcttctaaaggacaagtaagagctaactagtctggaaagaaataaaaagaaaaagaaaggcagaaaggtatttcacaaagaaggaacagcatgttcaaacagtaggatgactatgaaaacacaatgacactataaataatgcaattttttttcacttgctcataaagtagaggtaggaaagaggtraaatcccatgcaaagatagtttttttaaagacttattatgtctctactaaaaatacaaaaaattagcca

SEQ ID NO: 277741 - DNA, 436 bp, Homo sapiens
tgtccatttactctaggttttccaatttgttatcatatagttgtttatamtagtctctactgattgtgggtatttctgtggtatcagttgtaatgtctcatttctgattttgtgtcatctcttttttcttgtttagtctaacactttatgaattttgtttatactttcaaaaaacaactttgcattttgatgatcctttgtaaattttttttctattccatttagttctgctctgatctttattactttgttccttctactaattttgggtttggtttgttcttacttttcgagttccttgatgttcatcattaggttgtttatttgaaatttttctacttttctgatgtaggcatttattactataaacttgcctcttagcactgcttttgctgtacccactaggttttgatatgttgtttccatttcatttgtc

SEQ ID NO: 277742 - DNA, 436 bp, Homo sapiens
tgtccatttactctaggttttccaatttgttatcatatagttgtttataatagtctctactgattgtgggtatttctgtggtatcagttgtaatgtctcatttctgattttgtgtcatctcttttttcttgtttagtctaacactttatgaattttgtttatactttcaaaaaacaactttgcattttgatgatcctttgtaaattttttttctattycatttagttctgctctgatctttattactttgttccttctactaattttgggtttggtttgttcttacttttcgagttccttgatgttcatcattaggttgtttatttgaaatttttctacttttctgatgtaggcatttattactataaacttgcctcttagcactgcttttgctgtacccactaggttttgatatgttgtttccatttcatttgtc

SEQ ID NO: 277743 - DNA, 436 bp, Homo sapiens
tgtccatttactctaggttttccaatttgttatcatatagttgtttataatagtctctactgattgtgggtatttctgtggtatcagttgtaatgtctcatttctgattttgtgtcatctcttttttcttgtttagtctaacactttatgaattttgtttatactttcaaaaaacaactttgcattttgatgatcctttgtaaattttttttctattccatttagttctgctctgatctttattastttgttccttctactaattttgggtttggtttgttcttacttttcgagttccttgatgttcatcattaggttgtttatttgaaatttttctacttttctgatgtaggcatttattactataaacttgcctcttagcactgcttttgctgtacccactaggttttgatatgttgtttccatttcatttgtc

SEQ ID NO: 277744 - DNA, 468 bp, Homo sapiens
atattatccaattctcccctggcctgtaaggtttctgccaagaaatccactattatcttgatgaggatacccttatatgtgactggacagttttcttcctgtttttagaattccttttttgtttgttagtttgacttttgacagcttaacttttgagtttttactacaatatgcctgagaggagatctttttggattgcatctatgtggaaatayttaagcttcctgtatctgcatgcctatatttctttcaagacttgagaatttttcaactattatttcattaaatatgttttctatgcctttgcccatctcttctcttctgaaaacccccagattcaaatatttggttactttctggtgtttcatatgtcacataggctttcttcattcttttttatctttggatgaccaagttatttcaaaagacctgtcttcaagttcagaaattttttctggctgggtacag

SEQ ID NO: 277745 - DNA, 479 bp, Homo sapiens
tgctatcagtttccctcttaggactacttttgttgcatcccataagttttggtgtactgtattttcatttttgtttatctcaagtattttttatttcatttttgatatcttctgtgatccattgattctgtagaagtatgttatttaatttccacatgtgtgtatattccaagatttctcctgttattgatttccagttttatgttattgtgatttgaaaatatgcttgatatgatttcagtcctcttaaatttgttaagatttgttttgtggcctaaaatatgatctatcctggaggatgttctgtgtacgcttaagaagaatgtgtattctgctgctgttggatagaatgttctgtgtatgtctttcaggtccatttggtctgaagtgtaattcaagttcaatgtttccttattgactttatgtctagatgatctgtccattgktgaaagtggggtactgtaatccctactactata

SEQ ID NO: 277746 - DNA, 568 bp, Homo sapiens
tcaacacgctgcactaatgtggtacatttgttaccaccgatgaaccaacactgacgtatttctatcaacctaagtccatagttaatattagagttcactctttctgttgtacattctgtgggttttgggaaatgtacaatggcacaaatctatcattatggtaacatacagagtattttcactgtcctaaaaatcctctgtgctccacctattcattcctgcctccacccaaacccctggaaaccactgatctttttattgtctccattgttgaatgtcacatagttgaatgtcacatagttgaaaatgtacagtatgtagtcttttcagattgacttctttcagttggcaaaatgcacttaaagttcctccaggtctgcttcatgtcttggtaacttgtttcttttttacactgaacaatrttccattgtgtggatatatcacagtggtgaacattttttaaagagaaaagcccaacccagatttactgcatcagacattttatgtgtgttttaaccagatcctcaagatggctctgatatatatctgggtagatgattataaagat

SEQ ID NO: 277747 - DNA, 568 bp, Homo sapiens
tcaacacgctgcactaatgtggtacatttgttaccaccgatgaaccaacactgacgtatttctatcaacctaagtccatagttaatattagagttcactctttctgttgtacattctgtgggttttgggaaatgtacaatggcacaaatctatcattatggtaacatacagagtattttcactgtcctaaaaatcctctgtgctccacctattcattcctgcctccacccaaacccctggaaaccactgatctttttattgtctccattgttgaatgtcacatagttgaatgtcacatagttgaaaatgtacagtatgtagtcttttcagattgacttctttcagttggcaaaatgcacttaaagttcctccaggtctgcttcatgtcttggtaacttgtttcttttttacactgaacaatgttccattgtgtggatatatcacagtggtgaacattttttaaagagaaaagcccaacccagatttactgcatcagacattttatgygtgttttaaccagatcctcaagatggctctgatatatatctgggtagatgattataaagat

SEQ ID NO: 277748 - DNA, 1101 bp, Homo sapiens
tcaacacgctgcactaatgtggtacatttgttaccaccgatgaaccaacactgacgtatttctatcaacctaagtccatagttaatattagagttcactctttctgttgtacattctgtgggttttgggaaatgtacaatggcacaaatctatcattatggtaacatacagagtattttcactgtcctaaaaatcctctgtgctccacctattcattcctgcctccacccaaacccctggaaaccactgatctttttattgtctccattgttgaatgtcacatagttgaatgtcacatagttgaaaatgtacagtatgtagtcttttcagattgacttctttcagttggcaaaatgcacttaaagttcctccaggtctgcttcatgtcttggtaacttgtttcttttttacactgaacaatgttccattgtgtggatatatcacagtggtgaacattttttaaagagaaaagcccaacccagatttactgcatcagacattttatgtgtrttttaaccagatcctcaagatggctctgatatatatctgggtagatgattataaagatwgtgggagggaagggggaaaatttttggtaagatggtattaataagagtattatagtggcctttcattgtttctacctactgaatgttcatctgccatgtttatgattatcatacctcaatatttttctcaagaagccacctcttttcctcttttgtgtttatatggtttgatccatttcctatattcaggggaaatgggtccagatcttaggtctcggcaatcatttagttccactttttggccaaagtgattatttcaggattggtataagcccacatctagtcaaagtcaatctcagaacttttctaaaggaattgggcaagaagccttctccacacacttggaaagtgaaaaaaattaaaatgagtcatcagtgttttggaaccattttgagttgagagcctgcctgaawatgaaagcaaaatgaaatttgcagaatctaggaatgcagaaagctagcttcttatgacattatctgagcatctagatctagctacatctgaaactaatattttttgttgtcagcccata

SEQ ID NO: 277749 - DNA, 545 bp, Homo sapiens
gggtgtggggtatgaagaatcttttatttcttacaaccacgtgtgaatttacaattatctcaaaataacaagtttgattttttttttttttttttttttggagacagggcttggctctgtcacccaggctggagtacagtggcataatctcagctcactgtagcctcaacttcccaggctcaagcaatcctcccacctcagcctcccaagtagcyggtactacaagtgtgcaccactatgcccagctaatttaaaaagaaaaaaaaaatttgtagagacagggtctcactgtgttgcccaagctggcctcaaactcctggcctgaagcaatcctcccacctcagcctcccaaaatgctgggattataggtgtgagccaccatgcccagccaagtttgatttttcaaaaatcacccaaaggcttctcatcacattaagagtaacattgcattgcttgccctggctcatagagccttacatgacaagggcccttgagatttctctgatctcatcaattaccacactcctaccctccttaagcatcag

SEQ ID NO: 277750 - DNA, 524 bp, Homo sapiens
ggtttcaaactctccacccagatattatatcttagtgttttattgcaagtctcaacattagcaggacaatctagacctaaaagagccaagaattcagggaatagacacattctagggatgaacagaagaatgggaaacaactcaggtaataaaatggtaaacaggatgaaaaagccagataaattcagtaagtgcccaccgacctccctgtctgccaggcagtgtactatgcactgtggagataagagataaggtcatcatagtcttgagcctccaagtccctcatgactcaayctgagagttccatcaggaaaggaaatcatttcaatgaagcgataggtgggctggaaaacctgagcagagtggacaaagctaataggattccatcttagagatgataatcattgggaaaataatgtagtcagagaccaaaccactggtctctattcctcttcaattggagcagggccattttgacctgcatcatttactgagattttctaatcaacacatgaacctattgt

SEQ ID NO: 277751 - DNA, 506 bp, Homo sapiens
ttgattccaggtctattgcagggaaacatacagcctaagttggaatattgtactagtctgttttcatgctgctgataaagacatatctgagactgggaaaattaccaaagaaagagatttaatggacttacagttctgtgtggctggggaggcctcacmatcatggtggaaggcaaggaggagcaagtcacatcttacatgtgtggcagcaggccaagagagagcttgtgcagggaaactcccccttttaaaactatcatatcttgtgagacttattcactatcatgagaaccacacaggaaagacctgcccctataattcaattacttcccacagggtccctcccaccatacgtgggaattcaagatgagatttaggtggggacacaggcaaccatatccaacatcctttttttttttttttttttttttttgcttttcattctttttcccatttaaaatattatttttaatcgacaaataatttcacatatgcatgaggtacac

SEQ ID NO: 277752 - DNA, 506 bp, Homo sapiens
ttgattccaggtctattgcagggaaacatacagcctaagttggaatattgtactagtctgttttcatgctgctgataaagacatatctgagactgggaaaattaccaaagaaagagatttaatggacttacagttctgtgtggctggggaggcctcaccatcatggtggaaggcaaggaggagcaagtcacatcttacatgtgtggcagcaggcmaagagagagcttgtgcagggaaactcccccttttaaaactatcatatcttgtgagacttattcactatcatgagaaccacacaggaaagacctgcccctataattcaattacttcccacagggtccctcccaccatacgtgggaattcaagatgagatttaggtggggacacaggcaaccatatccaacatcctttttttttttttttttttttttttgcttttcattctttttcccatttaaaatattatttttaatcgacaaataatttcacatatgcatgaggtacac

SEQ ID NO: 277753 - DNA, 506 bp, Homo sapiens
ttgattccaggtctattgcagggaaacatacagcctaagttggaatattgtactagtctgttttcatgctgctgataaagacatatctgagactgggaaaattaccaaagaaagagatttaatggacttacagttctgtgtggctggggaggcctcaccatcatggtggaaggcaaggaggagcaagtcacatcttacatgtgtggcagcaggccaagagagagcttgtgcagggaaactcccccttttaaaactatcatatcttgtgagacttattcactatcatgagaacmacacaggaaagacctgcccctataattcaattacttcccacagggtccctcccaccatacgtgggaattcaagatgagatttaggtggggacacaggcaaccatatccaacatcctttttttttttttttttttttttttgcttttcattctttttcccatttaaaatattatttttaatcgacaaataatttcacatatgcatgaggtacac

SEQ ID NO: 277754 - DNA, 506 bp, Homo sapiens
ttgattccaggtctattgcagggaaacatacagcctaagttggaatattgtactagtctgttttcatgctgctgataaagacatatctgagactgggaaaattaccaaagaaagagatttaatggacttacagttctgtgtggctggggaggcctcaccatcatggtggaaggcaaggaggagcaagtcacatcttacatgtgtggcagcaggccaagagagagcttgtgcagggaaactcccccttttaaaactatcatatcttgtgagacttattcactatcatgagaaccacacaggaaagacctgcccctataattcaattacttcccacagggtccctcccacmatacgtgggaattcaagatgagatttaggtggggacacaggcaaccatatccaacatcctttttttttttttttttttttttttgcttttcattctttttcccatttaaaatattatttttaatcgacaaataatttcacatatgcatgaggtacac

SEQ ID NO: 277755 - DNA, 575 bp, Homo sapiens
catcatatgttcatagatattgtggtctttgacatctctcctgttatctatttcattttccttccctggttacaaggaaagctcatacctataaataatcatttatgttttcttttctctgcttgcagttttgactagcttattgtctcactgaatatggctctattcagttcctactgatatgaagagactatcgctaaagattttttttaacctatcagaggaagttcctggatctctggccttaaaatcctgtctctatttattcttgaagaaaaaaattagaaagaaaacatgatattatgccttgcacatagtaggaattcaatcaatatttatttcatttggaaattgacagcaatattttgatttargttgtactagacgaataaatacaaatggcattcacttgatgatggcaaaatggtgccgggacaacatccaacaatgcatcaaatgttccacaataaattcagataaataaaaatactacaaataggcccataaaattactagaagaaataatgagagaattttttaaaataatgttggatagaagtcttttctaaatataa

SEQ ID NO: 277756 - DNA, 608 bp, Homo sapiens
cgtgttgtggttattaaccctttttcagttacacacactgcaaatatcttctcccactttatgttaccatttgtgaaatccaatgtatacatttcttcacttatgacttctgagtattgtttttagctactataaaatagagaaatattcctctcttctcttccgatagttttgtaaattttttgtctttaggtttagctctgttatcaatttggaatttatatttgtgaacattatagttagggtctaaccatatacataatatttgcatatatatcattttttactcattttgctgatttcaaatacatygcttactatattaaaattttatataaatgtttctgaatcatctgttccatttttctattttgctattcataccatgctgtttcaattattaaagttttataaggtatttatatatctggtatggatcacctttcctcattatcttttaaaaagtatttctggatatcctatttcagatgaatctgggaattagattatcaggttccattttactgggactctgtttaaatgtatagattaagttgaggagaattaatacctgtgaaatattgagtgtttccatctagggaatagat

SEQ ID NO: 277757 - DNA, 565 bp, Homo sapiens
attaaccagcagcttgtgttaatacacttagaaaacataaaattgttattactttctcatcagattcatcaatacctttaactatcaggaatattggttcttagccttcartgaattattggggaaacttctatattataaaagccaataaattggccccttaaggagagctacagaaaatttatgtcagtgtaggttatgcaatttcttccaaattttcacttgtctctaccagtaccccagtgccacttcaaccagcttgccattaacattcacggaacctgaggtgggagctcaaatggaggtctgtattccctatatctaaatatttaaaagttacaaatcaaatggttacataaaaacataaaacatgctgtatcttcttactctgacaaatatataccttccttacaccctgagaaaccacattctagttaggaacccttggactttagaccatgacagcgtaggtatttagttcacaggtcccagactccaacccatcccccttctctttctacctctgtctttgtctctcactatgaattatttcatgcagatgtgt

SEQ ID NO: 277758 - DNA, 524 bp, Homo sapiens
ctttaattcaagaaaaaaaaaacctgggaatccactggaatcatgaaggacaccctaaatcctggggacgagaaggtgggcaracagcccctgtgattgcgtctcaatgatgaaagtgagtaaagccccagtgcatgagtggggcagggagcctccttttgtgattcacttttcctctggggaacacagcaatccaagccaagggaaagcgctttgtttctcccaagccctggagccaactcagggagaggcttggagatgctgagagagaaaggtacctggaaaagctgcaggcattttcccagacctggaactgagagcagggtgccattttcaatatgagtgtatacaaagtcagttactctttggcaacctggcagtgtggctgcacaggcattttagtctcaggccagagattggagcacttgctctggaccagggtacaggcctccatggccagaactgtggaaagcacctcaacagtaagcattggaattgtgcttttctccattgcagacctgggg

SEQ ID NO: 277759 - DNA, 568 bp, Homo sapiens
ctggtaccaggaggccctctctgcttcacgactgggcagatctccaggcattcagagcactcgttcacctggctcagcagcctgagttgccccacccttcctatgcagagattgtggtgcagcttgaccctctatactccaaacccagtcagatctgcaggcatttggagcacctgtttatctggattggcaacctgagctgccccacccttcttgcacaaggccctctccactccacacccaggcagaagaaccccaggcattcagagcactcagtcacatggaccagcagcctgaactgsccccacccttcctgtgcagagattgtggcagagcagggccttctcccctccatgccaaggcagatttccaggcatctgggcacccactgtcctggattagaagtgtaggctgctccccttcccatacagagaattggggctgaggaagtttcccagatgcatgcctagtcataccttagggtgcttggtgggcactcactggattttccctcagcacttgtgcttatgcttgccacttggggacctgtagatggacctgcccagtc

SEQ ID NO: 277760 - DNA, 625 bp, Homo sapiens
ggagtacaaaatgaagatctgaaagccagaaaggaaagcagggtcccctcacccatccccatcaccccatcagcagcatcagcaacctttcctgagcacttactacaagcaaagcagcaggggaaggctatcacatgtcttccctccctaaaccaaagggccagagagagaggggacccgagaggggtgcccastatattgctttgttaaattaaacttacggccagttatcagagtcacccagtggtgatagagctaagggccattcttgggccgtgtccagaacaggctcaggtgcctggtaggtgtggtctgggcctctagcaggagctggctggtgtgcctgggctgagtgcccttgacctcttagaatggagtgtgccaagtggagggggcctttgcagccaggctgctggcagagggacaccatttgtgctgctaagctctcagcggagacagcatgcctgagcccaggccagcaggacagacactcaccgagggagctggggatgtgagcacatctgccctaaacacagacctggcatccaactgacttgggcagcgtttggtggaagatgctggatgttcgtccctcaggctgcctcctccagggtctcgcatccaa

SEQ ID NO: 277761 - DNA, 625 bp, Homo sapiens
ggagtacaaaatgaagatctgaaagccagaaaggaaagcagggtcccctcacccatccccatcaccccatcagcagcatcagcaacctttcctgagcacttactacaagcaaagcagcaggggaaggctatcacatgtcttccctccctaaaccaaagggccagagagagaggggacccgagaggggtgcccactatattgctttgttaaattaaacttacrgccagttatcagagtcacccagtggtgatagagctaagggccattcttgggccgtgtccagaacaggctcaggtgcctggtaggtgtggtctgggcctctagcaggagctggctggtgtgcctgggctgagtgcccttgacctcttagaatggagtgtgccaagtggagggggcctttgcagccaggctgctggcagagggacaccatttgtgctgctaagctctcagcggagacagcatgcctgagcccaggccagcaggacagacactcaccgagggagctggggatgtgagcacatctgccctaaacacagacctggcatccaactgacttgggcagcgtttggtggaagatgctggatgttcgtccctcaggctgcctcctccagggtctcgcatccaa

SEQ ID NO: 277762 - DNA, 567 bp, Homo sapiens
cctcataatttagtgcaaaacacctccagaccagatcaccttaataacagaactgacgaagcccctgggattgagtttagcacttgcagttcatgacccagcaggagtcacagagacagaccctggctgagcycggtggctcacgcctataatcccagcactttgggaggctgaggcaggtggatcacctgaggtcaagagttcaagaccagtctggccaacatggtgaaaccccatctctactaaaaatacaaaaattagctgggcgtggtggcaggcacctgtaatcccagctactcaggaggctgaggcaggagaatctcttgaacccgggaggcagaggttgcagtgagccaagattgcaccattgcactccagcctgggcaacaagagtgaaactccatctcaaaaaaaaaaagaaagaaagacccccaattacagagggtagacttagcaccatcctgactacctctaacaggttttccaaaaaaatcaaggctctgtgtagtgttttaaggttttttgtttatttgagtcacttatttatttttcttgcaaaataatcat

SEQ ID NO: 277763 - DNA, 596 bp, Homo sapiens
gtcaacctcttatgaaaatcgtagtttacaactttaagtaaataaacacagttttctacaaacattctaacaaatttagtttcctataacaaatattcacagtctcatatgtaaaagtctacagttcttggaactattaaaaataaacctttcaatatttcaggaaaattccctgtccccttaggaaatatgctgggacagaaaatcaactctacgatgacaagacatagcgtaaatacagatttaacttgaatttcatggtaacgggtatgtaaatatttgctgcacttctctcatctatctaaatagaggctaatggctaatccagggttttgcattctcaaaagtgcttgtgccctctcaaggcacctgctaccaaagctgaaagcctctggtctccacttaattttaatcaagtctgatttaaaagtgtttagggtttataattgttaattctacatagctrctagaaaacactcccagggccccttttctagaagtcatgaccttgtttgggtggggatgggggcggctcttagggcaactcacgtaagataaacatgggttgggggcaaaaatgttgaggccagcctgcc

SEQ ID NO: 277764 - DNA, 583 bp, Homo sapiens
cctccgaagcagctgtggtgtacacgcgtttggatttggtttgattacttaaacagaatgtacttctcactgcctctccttgttttatatcaacatctgaggtggccgcaacagtatccaaattatccagggacttgctcagcaaacagcagacgctcagccacaaatcacagctggagagcccgtttttctatggaattttcagccataaaagggcccagatgttctaagaaaattttcttggtgctgaaaagatgccagatcttagcgaagaactgcaagaagatgrttaactttcagtgggctccttggaaagtggccctgggagggataattgcacacaggaggtttatcagggagtgttcctggaagacacacctgtgaggaagtgagaggggcagagctgggtggagggaggagctgacccacaatgcagcagcagctgaggtctgagccattcccacaggagctaggaagcctccaaatggaagcaaggaggctggccttgatatcacctgtgttggccactccttagccacaggctgtcatctaggaggagcaaggaagctcgcacagctgagtg

SEQ ID NO: 277765 - DNA, 583 bp, Homo sapiens
cctccgaagcagctgtggtgtacacgcgtttggatttggtttgattacttaaacagaatgtacttctcactgcctctccttgttttatatcaacatctgaggtggccgcaacagtatccaaattatccagggacttgctcagcaaacagcagacgctcagccacaaatcacagctggagagcccgtttttctatggaattttcagccataaaagggcccagatgttctaagaaaattttcttggtgctgaaaagatgccagatcttagcgaagaactgcaagaagatggttaactttcagtgggctccttggaaagtggccctgggagggataattgcacacaggaggtttatcagggagtgttcctggaagacacacctgtgaggaagtgagagkggcagagctgggtggagggaggagctgacccacaatgcagcagcagctgaggtctgagccattcccacaggagctaggaagcctccaaatggaagcaaggaggctggccttgatatcacctgtgttggccactccttagccacaggctgtcatctaggaggagcaaggaagctcgcacagctgagtg

SEQ ID NO: 277766 - DNA, 634 bp, Homo sapiens
cacataaaaatccaaagaatgtagaagagccaaacagctttgagaaaaggagaaaaaagttaaaggattcacattatctgattccaaggcttcttataaagctacagtcattgagtcagtatggtactggcaaaaggagagacacattctatgtatctatctgtctatatatctatgtgraatataataaagagttcagaaatagatccacaaataagatcaattgaattttggcaaagatgaaaaaataattcaatggagaaaggacagaattttcaataaatgatgctgaaacaattagacatccatatgcaggaaaaaaatgtttgacctatatgttcattttatacaaaaaattaattcaaaaagaatcatagacctaaatgtaaaacataaaaacttttaaacttttaaaataaaatataggtaaaatcttcgtgacctacaattaggcagagttcttggagatgacatcaagaatttaattcataaaaagaaaaaatttataagttggatttcattaaaactagaaacttttgctctaaaaagagcaaaattaaaattataagaataaaaagaaaagccatggactgtcatatgcctgacaaaggatatacagactataggaagtact

SEQ ID NO: 277767 - DNA, 568 bp, Homo sapiens
atcaaggcacagcattcagtgtctggtgagggcctccttgctgcatcctcacatggcagaaagcaaaaatgcaaaaagggcctaagctggttccttccagtccttcaataaagcactaattcattcataagggcggagctcttttgagttaatcacttkccagaaggcctacctcttaatgccacaacaatggggattaagttccaacaaatgaatttggggagacatttagaccatagtaccatcctccctcctctgcaaggcatccatgtatatttctgctcttgtaataattgtctgtctccctgctctgactttgagaccctaaggcagagctaggttggcctcaccttagtggctcctgtgcccagcacagtgcctggcccagagcaagtggatggatgaatgaacaaatgaatgagacagtggggagtctgcagctcttccaagcagccacaggccctctccactccaggcctttgcaaatgctcttccctcttcctggagcaccagtcccctccctagttgcctgcctaacccttctaaatcctttagcaccacctgcccc

SEQ ID NO: 277768 - DNA, 540 bp, Homo sapiens
tgcttgatgacgtcccataagtcccttagggccttttcagttttcttaattattttttctttgtgctcctctgacttgattcaaatgaacgatctgcaaatttgcgagttctttcttctgcctaagtctgctttgaacagctgtagtgaatttttcaacttagttattgtattttttagctctagaatttctgtttctttagtttatttctgttgacattctcactggactcatccagcattttcctgatttcacttagttgtctatctgtgttctcttttagctcactgagcatcttcaacacagttgttttgaattctttgtgagaaagttcagcaatttgcatttctttaggcttggttactggagttttattttgttcatttgattgggccatgtttacctgtttatttgtaygccttgtgatcttttgttgagattttggcatttgaaaaaacaaccacctctcccagtctttatgaattggcctcacgcacggggagacttttaccaatcagcctggcaaaaggttctgggacc

SEQ ID NO: 277769 - DNA, 375 bp, Homo sapiens
agtgggaggacagatgggtgaatgggtggataaacggatagatcataggaggatggagaaaggataagtggacccataggaggatagatgagtggatgggtaggtgggtagatggatggatcaatcagttctgcctaggcttagggttcagtccttagattgtctttgtgacctggactcctctcagagttctgctgcctgccgatgactcctgaaattgaacatgtgtataatcaaactcatattctcctttctcacatttgattcccttctagtgttctgttcctyggtgactggcaacaccacccacctgcctgcaccaggttggcctaacttgtttggggcaggtttaggtagaaatctgggttctgctcc

SEQ ID NO: 277770 - DNA, 528 bp, Homo sapiens
ggccacagctccgtcccagcagcagctatttcacaaggtaaattaaaaagcaaccagcattttcctctccaactggcaccaaatggattgtttttctgtaactatttccctggtggagagctccctaaagcctgcaggatctatcccaacggactgcatgcctgatgcttccagggatggagaatgcacaaagcagatattgttcccctgcacttggctttggtctgcatgccccaggctcagacttgaaattcaaaccaacaatgccgctgaccttctgggtggggaccttgaaactatgcctctccttttctctgtcagcaaaatggcaatgctgggttgcacggtctggaatattctgggagaaggcatgctaccagggcagttaagtggatgtgttctgcagtcagaagggccagggttcaagtcccggttctgccaccaacaggccaggcggcctggggcaaattactttgcctgtgtgagcctgttttytcatttgtaaaatgggaatgcagagagggatga

SEQ ID NO: 277771 - DNA, 500 bp, Homo sapiens
gggatgatctcatggattgctgggtggtaggattagataatgggggaaagatatgtagtgagatatttggcacctaggaagmaccaaataaagtcatccaataaataaagacttcacagtttgttttggaagcatttgtccaagcctcagaaggccttggtccatgctggggtctcatatctcttccagctgctgctaagcaactcgggatgctcagattctgatgctgcttccagatccagaggatctgcacccagcaaaggcagggacagggaggggcgagggagagggctctctctggggatgctttcaaactagaaggaagcaaagctgcgactggcgggttgggagggggtcacaaatctagacaggaacaatgctgtcatttcgttttagaaattccttaatcttactattttttatttacatttcagtagtcacattttgaacattcaatgtcttcgggcagaaacaaaaatttctcagaactgtcagtgact

SEQ ID NO: 277772 - DNA, 533 bp, Homo sapiens
accagcaccccaaactccacatacscaaaaccgaatgcactcatgttctttccaaatcatatggcttcagatccttctctgacatgagctagtggctctttaaaacttagtaagttgtctccttcagcagaaaacagtccctaacttctccagcctttctccacctttaccactgcagccccagcctacgctggatcagtcaccatcgtccttgttgtaccctgtgcctgtgtttggctaccatcacttgggattttgtgagccccttgagggacgtcgtgttccttctatgtgtgttttgggttgttcgggtgcttaacacataacaggggttcaatcaactgtccttaaataaatggttcccttacaatagtgattgacagataggaattggatgaccatatgactctgttgcatgggaaagaaaaaaaatgaacctgagaacattcttgggattaatcccttaaacaaggggtcagcaaactttgtcttaaagggacagatagtaaatcttgtaggctttgtgagccaca

SEQ ID NO: 277773 - DNA, 553 bp, Homo sapiens
gctgctggaccagtcccgggcagcgttattaagcgmctccagctaccttcaggctgtttccctccttgtccatttccgacttcaaggccttcatgccgggtcccgtttcatcctccctctgaaacgaggttaacaggaaaggatccagtgcctgtccgttcacctcatgccacccaatgtccattgatgccaggacaccaggtactgagctcttcccacagcctgcccaggcttccactggcaatcgggtcccactgtgcagatgaacaaacaaatcccccatctcagggactgcccacagtcacacagccgggaacacacaaggggcctttaaagttagtctcctctgctgactcccatgctctgcccgcaagtgaaaggccttctccaccatcaccgcaccgagggggaaacagaggccatcccggggcagttggccaccccacagcctgtgtgcacattggaagctgggcctgtcatttgtttgggcccacgagagggacacggggcaagggagatgatctccccactggagacctgtggcatcattcag

SEQ ID NO: 277774 - DNA, 547 bp, Homo sapiens
attcaaaatgtcatgtttctgtgtactagaacttaggatacagaggtcctatttacttgttgagtgagcaaatccaggcgagagatgttttagggatgctgtctctgaacacacttgctccacacacgagtgaactgagtgtggcctgagacccctggtccagctgagcgccctgcttctgtgttggcaggacacatttcacaggcaaacgtgtgagtgtgagcacattctggatcattcgtctttttctcttggaaataaattataataagattttcactcgcaaactcaccaaaacgtgtgttctcccttcgaggtcatggaaaattctctcacataataacataggataaagacagatttggcttcctgaattcattttatgaaaatcagacttggaggcattctagaaggagtccaaagaggaaaatttgatttcaggaaccttttgtcatcaactttttcaacactgrgttggcaagctacctcttaagcctgccagagccaatgtttcatcacatccatttctcattgaaccactgggttt

SEQ ID NO: 277775 - DNA, 570 bp, Homo sapiens
aggggttctatgcattttcattattttcagctgtttacaattatgctcaacgctcagaacacacaggcagatttgcttctggagtagaggctggttacagcctgccttctcaggtggtgtatcctctgccatcagccaggtaggcacaggaaggctcgccacttggagcctcttccctcagacccagcacagccaaggcaaggttttcggggcctcctcttccttgcggggagggagactaggaccagcaagtccagccgcccaggtrccagccccctcccttccccaacccctttctctctgcctccgtggcagcctccccacagggctccatccgtttccatgacattgataacaagatcctagcactaggccatctgaaggctctctcttcatccttacaggtacgcatgccatctcctgtgtgcctgcctgcttcagccctgccacctggcctgcgttgcatccgggagatgtgctagcaggggaagaagcctggtagggcccaggggatgtgggtggcaacggaattgctttcctcctggatcccggtttaaccacccttccaaa

SEQ ID NO: 277776 - DNA, 594 bp, Homo sapiens
cggctggtgattagttacttgataaggaagaaagtgatgctactagctcggttcctgttgcttacagtgggtgatctgggcaggttcttgggcgcctgaggtgggcagtggtgggcgtgagcctgtggggttgagtgcagggacccccagtgtacacagaggcaccacgcagacagcacgcctgggcatgggtgtgaggcagagayatttacgccgtgtgagagtctagagtcagaaacgctggttgaaataaaagccttgcatcccagaccagcactcggacaggatgaccctcaacaagtgtctttaatgtttattacagaaaaagcaggcgtgaccaaaagtagagagaaaagtacaaaaaaattcacgcatactcatcacccagcgtcataattaccatcttatagccgcctccttagactctactcctacctaattctgctccaaagcctcctgtgttattttaataaaatctcacacagtattgtttcatccatcaacgttatggtacgcatctctaaaagtaaaacactcattcacacacacacacagagaacctcggagatgtagtacctacactaccaccaacaa

SEQ ID NO: 277777 - DNA, 536 bp, Homo sapiens
ggagggcaagtgtctggtggtgtgcgactcgaacccggccacggactccaagggctcctcttcctccccgctggggatatcggtccgggcggccaactccaaggtcgccttctcggcggtgcggagcaccaaccacgagccatccgagatgagcaacaagacgcgcatcatttacttcgatcaggtcagacccggggggaagcgagcacctagggggtgggcggtctccaggcacctcagcacgaggctgcctgcccaggctaagctggtccgattgsgaaatggggaatcatgtaaagcactcgccttcccaaatatgcctgggtctgaaacttctaccgtccctcttcctacccctctcaccagccccggctcccatttcttccgggcccctaaaagaggctgctgcggcggcgggggagaggcttgggagcccagagcccggcagcgagagctcagggcaagtttcgagcaacaggtcggcgggagccgaagggcacctggtccctggacgtcgttatctcttggccagatct

SEQ ID NO: 277778 - DNA, 593 bp, Homo sapiens
ctccctgggtacctttgcggaacaggataaatgtttgatttgtttctcccaggtagagaagcttctctcccaagagagccccgggcttccacactcttcagagatcgggcaggtggccgcggagggcgggggcagagcgggtggtcagatctcgcctgcaggttccactgttcgtgtgccaggcaccgctggcactgccgctgcctcggagtaggcagcaagccttctccggtacttagagaaaagttgcggaggaggggaggaaaaggaatttggcaactgcgctgagctcctgtaggaaagcgcttgggagccagttctcccttcccgggctcatgtcctttcagagaattgcaaatagctggkgaaagacagactttgaggttgatgagagtaggggaagagctgacgaagctgtagctgctgtttagcgacctggtgctccgtgtttggcttgatgagaaaccccaggatatcagcttacctttagcaaggggtcttaagggagaaaactgttctcagagtttttaatttcagccccaacagtatccagagtctttttaaattccaaattcacagttcacagttgtatg

SEQ ID NO: 277779 - DNA, 1181 bp, Homo sapiens
atggactggattggccatttattgatccactgttttgggttctgttagtgtggccccagtttccctgctggtgggaaaatataatagtgtcagtgatcaagattttcagtgccccattttagacttgcttgatctaccttctttttaagctcagaaaaatagtactctgtcatgttaaatcagttacattgattttgactagtgagccttcactggtagtaactgacagtacaaaaatgtccaggcaaatgttatgcaaatctcagtcaagtaccctcttcyaaaataaatggataactatataaattgtataagtcatactaagtatgaagttttacatgcaaaatgactcaaaaaacttcaggtggagagaaatcataagaaccactgtctttatggtattaatggccaaacacagactcttcattgcccctgaaaaccggcatctgtttacaatgattttgaaatcccaatgttatggaggcataaatgctggagctgagagttaaactaaggtctctctttctgtctagagccctcattctcaactactctaccaatactccttctcctagttgtttgtgaatatawatggactggattggccatttattgatccactgttttgggttctgttagtgtggccccagtttccctgctggtgggaaaatataatagtgtcagtgatcaagattttcagtgccccattttagacttgcttgatctaccttctttttaagctcagaaaaatagtactctgtcatgttaaatcagttacattgattttgactagtgagccttcactggtagtaactgacagtacaaaaatgtccaggcaaatgttatgcaaatctcagtcaagtaccctcttctaaaataaatggataactatataaattgtataagtcatwctaagtatgaagttttacatgcaaaatgactcaaaaaacttcaggtggagagaaatcataagaaccactgtctttatggtattaatggccaaacacagactcttcattgcccctgaaaaccggcatctgtttacaatgattttgaaatcccaatgttatggaggcataaatgctggagctgagagttaaactaaggtctctctttctgtctagagccctcattctcaactactctaccaatactccttctcctagttgtttgtgaatata

SEQ ID NO: 277780 - DNA, 605 bp, Homo sapiens
cccgagattggtttaattatatcagcacagctgcaaggagcaaagatgagagatggcctatgatgctttgttgacttttttttttttttttttttactttgggaatgatctgtccaggtactctgattttgaagacagctctccctggaaatcctctggacaagagaactcatattttcacaccctataacctttccattgcaaaaggcaaacyttccctcccaatatcagctcttccccacaccctttcttctccatgcccttgaaactagcagctccagaatttcacagtcagcccagccttcgtgctggtttcaatggctgctgctcttcttaaaacctataatattggcacgccacaatggactcaataaacaagaacagtctgaaaggaatagatgagacagggactcaatattttcccctagatggttctaaaataccctccacaccatgtgtgtctttttgttcatagatgtgtgtgtatgtgtgtgcctaaatagccaaatctcacctgtctcagaacatttattttttctattatatcctgcaagttgtaacaccaagatgaagagggagatataaaaggagctgcttttttggag

SEQ ID NO: 277781 - DNA, 476 bp, Homo sapiens
cttcttaaaacctataatattggcacgccacaatggactcaataaacaagaacagtctgaaaggaatagatgagacagggactcaatattttcccctagatggttctaaaataccctccacaccatgtgygtctttttgttcatagatgtgtgtgtatgtgtgtgcctaaatagccaaatctcacctgtctcagaacatttattttttctattatatcctgcaagttgtaacaccaagatgaagagggagatataaaaggagctgcttttttggagctgatatacttttggccaaagcttatagattcttagtcatgtataaatctcattccaatgtagggctttcatgactataaacacttttctgcctttcttttcattcaaaatctgagtttaactcattgagtttaaccacattttactttaatctgttccctacaaactataagcttcatttattcattcaagaaatattt

SEQ ID NO: 277782 - DNA, 569 bp, Homo sapiens
caattaaacctcttttcttcataaattatccagtggatatggtttggctgtgtctccacccaaatctcatcttgaattgtaactctcacgattcccatgtgtcatgggaggaacctggtgggaggtgattgaattatggggtgagtctttcctgcactgttcttgtgatattgaatgcgtatcatgagatctgatggttttaaaaatgggagtttatgtttaaaagctccctgttgcctgcctccatccatgttggatatgacctgctcctccttgccttctgccatgattgtgaggcctccccagccatgtggaactataagtccattaaacttctttttcttcccagtctcgggtatgtctttatcagcagcgtgaaaatggactaatacaccagtcttgggtatgtcttaattagcagcatgagracagactaatacaatacctgttagtagagtgaagagaagaataatgaaacaccagtttgtttctcaccgccatttggatcggtttatgatagccaagcaagtaatctgcatccaataattctgcatccaacaagtaattct

SEQ ID NO: 277783 - DNA, 640 bp, Homo sapiens
ttgttgtattctcttcaaatcagaatgttttacagtccttgatttttaggggtgtccctttgtacagtgtctttgcctgacctaccaaattaggccaccccatgaggcagaggtcaaacgaaacrcaagaggggaaaaggagatctgaaagttttggcttaaaaaaagcactatggtcaaatgaccgacttgccctggtctgcccaggaccgtccaggttttaacactggacaccccatgaccctggaaatccttcagtcctgggcagaccaggatggtcaccctacactatgtaaggccagcagttttagttctgggatatgcagagatggaaagatttgtggttaaacgaggcttggggtggaaatggggagcgactgtaaacgggcacaaggtttctttttggagaaatgaaaatgttccaaaattagatggtggtgatgacggacaactctgtaatgatactaaaatttgtctacttgtattcttaaaacaggttaattttgtagtatgtaagttatattcaatgaaacttttaaaaatagattattaaatggcatcttcataataaagcatttgactttttggacagaaaaataataatactctgtccataaaataaatatatgcattaagaatt

SEQ ID NO: 277784 - DNA, 1281 bp, Homo sapiens
ttgttgtattctcttcaaatcagaatgttttacagtccttgatttttaggggtgtccctttgtacagtgtctttgcctgacctaccaaattaggccaccccatgaggcagaggtcaaacgaaacgcaagaggggaaaaggagatctgaaagttttgrcttaaaaaaagcactatggtcaaatgaccgacttgccctggtctgcccaggaccgtccaggttttaacactggacaccccatgaccctggaaatccttcagtcctgggcagaccaggatggtcaccctacactatgtaaggccagcagttttagttctgggatatgcagagatggaaagatttgtggttaaacgaggcttggggtggaaatggggagcgactgtaaacgggcacaaggtttctttttggagaaatgaaaatgttccaaaattagatggtggtgatgacggacaactctgtaatgatactaaaatttgtctacttgtattcttaaaacaggttaattttgtagtatgtaagttatattcaatgaaacttttaaaaatagattattaaatggcatcttcataataaagcatttgactttttggacagaaaaataataatactctgtccataaaataaatatatgcattaagaattwttgttgtattctcttcaaatcagaatgttttacagtccttgatttttaggggtgtccctttgtacagtgtctttgcctgacctaccaaattaggccaccccatgaggcagaggtcaaacgaaacgcaagaggggaaaaggagatctgaaagttttggcttaaaaaaagcactatggtcaaatgaccgacttgccctggtctgcccaggaccgtccaggttttaacactggacaccccatgaccctggaaatccttcagtcctgggcagaccaggatggtcaccctacactatgtaaggccagcagttttagttctgggatatgcagagatggaaagatttgtggttaaacgaggcttggggtggaaatggggagcgactgtaaacgggcacaaggttwctttttggagaaatgaaaatgttccaaaattagatggtggtgatgacggacaactctgtaatgatactaaaatttgtctacttgtattcttaaaacaggttaattttgtagtatgtaagttatattcaatgaaacttttaaaaatagattattaaatggcatcttcataataaagcatttgactttttggacagaaaaataataatactctgtccataaaataaatatatgcattaagaatt

SEQ ID NO: 277785 - DNA, 541 bp, Homo sapiens
gggtactatgatcaacattgtccctgtcagtcatgagacttgagtgaaacgggagtagcttttcaatggaragacatgtgcttgcatgcagaaacaagatgtccattgtactaagaaaccttaatttttatccaaggagccatccacatcttcaaaatggaaagatttccacaccaaagaagctttaaaatacagatcccaggacctccttagaatgtttaattcagtaggtctgggcttataactttttaaatgcttccttggttgtcctaataaagaacctactttgggaaccactggtggtagcaggatgtactagtaaaagaagaaggatgtaatggtatgagaataatatagagccttaaaagaaagattaaattgaactaagtgtactttcattatgaattttttttttttgaggcagagtctggctctatcacccaggctggagtgcaatggcacgatctcggctcacggcaacctccacctcccaggttcaagcgattctcctgcctcagcctcccaaatagctgggattaca

SEQ ID NO: 277786 - DNA, 565 bp, Homo sapiens
aggtaattaattggctcataaaacaaagagttttgatatctctgcctttgggcatggctgcattcaggatctcaaacaatatcataaggacccaatagtcctctcttcagggttttggtctgtattcctctgtttggtttctttcttaatcaagtcctccccttttggggtgatacagctattctgagctggcatcctcatcttttagttttttaaactgagcatctttctctttccagaaggtagcagaaaataacttgagttggaccttatttagcctgattggccttgcttgggtaatatatccatcctgaaactgatcactgtggccaggggatgaattgctttgattagccaagcccaggttaaatgcycatctttgacgcacaggatggagggttagttctgatcccaatcacttgatctgagagcagaaaaggcaaattgtagaggaaaataaagggacgtgatagtgacatttgggtgggccaaagtctcagatgccccgtataaattagtatcaggtttagttctcatgataattccacaaagcagtactgttgtt

SEQ ID NO: 277787 - DNA, 567 bp, Homo sapiens
atattcctggctcagagaaactgtcagatttttttcaaaactgtgttgtttgaagccactaagttttagagtaatttggtatgtggcaataggtaactaattcatcacccccatatctggctcaccagtagcctaactagaaatgcttgacttctactctgttgatggctttatcacttataattaaaagtcaaaaaaaaaagtatctttctccttatctcacttagtcattctgaacaacacacatgtagaaatttaatgccacaaaatgaatcactggtaacttccataaagyttacagtatcttactgaagttctgagaagcccaaaacaaaaaagatcaatgatttctgaattatctgtgaaggctttatgtacacccttatttttccagattttatttaagctgctagtctttcctaaccaagttgctgaggtccttatggaaggccactgcctctcctacaagattatactagtaggtggagatccctttctccaagtagtccgtctgcctgaatcactttcacttcttacaaataaatggaaaccttcatcccccaagaa

SEQ ID NO: 277788 - DNA, 606 bp, Homo sapiens
tacccctttttaaaaaaaaaaaataaagctttattgtaacacagccatgcccattcacttatgtattgtctgtgactgttttcccagtggaatgccagaattgagtagttgagctagagactgtctggcctaaaatatttattacyctgccttttataaaagtttgccaacccctaaatatgaggcttaaaaaagaaaacataaatttctaattacagattagtttcagttctacaaaggaataaaaagagatactatatgaatttattaagacagcagtaatactatttgcttaatatagagttctgtgtttttgatgcaggattttttgcttcgtagcttagctaggtcctggttcttgtctcatacccaggaagaattaggcatgtagacactcagaaagtgagtcaggaaggaagttttattgagtggtgaagcagctttcggtagagaggagcctcaagggtggtcccactacccgaaagcaggagagttccgaatatggctgagcccagggctttctatgggctcagaatagggagtgtgtgctaattggtttgtgagtatgcaaaaaaggttaaagtgaagacatcaaaggtgggcaca

SEQ ID NO: 277789 - DNA, 569 bp, Homo sapiens
  misc_feature (1)...(569): n = A,T,C or G
nnnnnnnnnnnnnnnnnnnnnnnnnnnnnnnaatcatgggggcagattccacatggcttgatgctgtccttgcaatagtgagtgaattctcgagagatctggttgtttgcaagtgtgtgggaccttctccataactcttgctcttgcttttgccatgtgatgtgcctgctccccctttgccttctgccatgagtaaaagctccctgaggcctccccagaagccaagcagataccaacatcattcttccctgatagctcgtagaaccatgagccaattgaactttttttctttataaattacccagtcttaggtattcctttatagcaatgcaagtacagcctaacacagaaaatttgtgctgaggagtggggccttgctgtaaaaatacctgaaaatgtgaaagcagctttggaactgggtaacaggcagaggttggaagagtttggagggctcagaagaagacaggaagatgaaaatttgkaacttcttaaagactggttaaatggttgtgaccaaaatgatgatctgatggtgcaatggacagtgaagttcaggctgacaaggtctc

SEQ ID NO: 277790 - DNA, 508 bp, Homo sapiens
taaaaacaatttattttgcatgtcatgaagaatcattattaatttattaaaagaataaatagttgcatcccaagcccctgagggaaatgactgagaccgtggcccatgatctgaacttagatacacttgcgggggtggccaagagtagccatgggaaaaagatcagacaagaaggaagccaaaaaacgtttctcaaaaaagttgctcaccaaagtaaggtagcccagtttagttaccacagcttggtaaagatgttcttgcacaagacctggctcagaatttacttggtatcataaacattttcctaatcctgtcctrttggcactatttatggcaaacattccttcaggtgtctgatggcactgcagtccaaatggcattatttggtggcacagaggcaaaagttaagggatgaaaagcaaagatgctggctacccagaagattccagaggtcttagacattgagggtgaggaggttgccactcccaaggtctggtccttgcctcct

SEQ ID NO: 277791 - DNA, 591 bp, Homo sapiens
  misc_feature (1)...(591): n = A,T,C or G
ttgtagatgttacattgcactcacagtccagtcaggttctctgcgatgagactggggtcacagttcctggggttgggtgttgtcaaacaaacactgacagaaccctgttatcctcccatggatgactaatgctgtctgctgtgtgtgggctctccttcccgtgagaacacctcattactctttcctgcaagtgaggagggaggccctacatctgcccacttacaccaacagtgcaaacaaaatgctrcaagacaacagtaagcacttagtgtccagggataatacagtttccactaattttgcacattatagcattttggtggaatttttgaaagggtaagagttgccacatgatgtactgttcttattttgaataattcatcatagaacgagtggggagaatgcatggcataaacatggaagcaaagatttgggcttccaagcaatatagttcttctctgaaagacagttttacatagtaggcatgtgaggagtattacgttgttgtaggccaaaacaatggtgaagtgcatgtgtgtgggagcaacacatattaagtgctcatattttctccccnnnnnnnnnnnnnnn

SEQ ID NO: 277792 - DNA, 563 bp, Homo sapiens
tgtggcaaataaatcccaggatcctggtgaatttatcacaacagttgaacagctaagctacaaataaaaactaaactaactatggagaaataagacttaaatccaagagctaaagtttagctttgtttttgttgcttttaaaaaaaaatacctaaattcattcacatattcagcaaatatttgggagcacctattaggtgtcaggtactattctaaaggctgaggatacagcagtgaagaaagcagacaaaaatccctgccatcctgaagcttacgctctgcagggaaagattatatgcaagcgacaagtttgttggcatttagataagccacaagactgcagctagcctagatagcatctttgaattatgtaaaggtacccctccggcacctgggtgcatcaattagaaaraggcgtttctctcttcctgcccctcactaggagtgaaccaagggcagagcatgggctaagcttcaggctccctcagattccctcctctgtagacagcacagccaggacaatcgtatctgacatcacagaagttacaggtggtcagaaaagg

SEQ ID NO: 277793 - DNA, 1627 bp, Homo sapiens
ataatacactctctcatctgcacacagaacatactccaagattgaccacaggctcacccataaagcaagtctcaatcaactcaaaaaaatcaaaaccataccaaccacactcttggaccacagtgggataaaaagaaaaaaaatcagtaccccagtcctctcaaaaccacacaactacatgaaaattaaacaacttgcttctaattaacttttggataaacaaaaaaattaaggcagaaattttaaaaaaatctttgaaataaatgaaaacagagacacaycatagcaaagtctctgggatgcagaaaaaccaggggaaaaaaggaaagtttacagcacgacatccttatgtgaaaaagttagaaagatctcaaactaacaacctaatattacacttagaggaactagaaaaacaagaacaaataaaatccaaggwctaatgcaatcaccagggaccatgataagtgattcacatatgtcttcatatcttattaaattctcacaaccaggctgtgaggtaggtactactattatgttaatcattttctagataaggaaggaacctaagacatcagcgatttattttactttctcaagacatcacaggcagtaagtgctaaagtcaaacttcaaacacaggctgagtccagggtctgcactctaaatctgttctgggctgtttccccttactcccttgatawtgacattgtgctcctcaaaaaccttcagtggcttcccctttgctgggaacaatggcttccattgttcatatgaggtgtcaatgtattacaaactgtaacagctaacattttcatagctactctgcaccaagtgtgtcatatatttcatttaatccttccaacaaccgtgtgatgtagttagtatttttctcttatttgaaagatgaggacacagaggcacagaagtaagcatatgcccaagggcatccagaaactaagtggaagagttgawtgtatccattgcatgaacgaaggaacagatgaactawttcctttctgacagtgctccaagagttcctgaagacagacattctctcttctccactggcctgggcatcaaacttgtggacaatctgctttatgacttccaggccaggctattccttaaacggaagcccagcaaagacttgtcctccctctctccctccctccctctggagtaccgatattaactttggaactttgatgccctctggtttgtcctgcacaagatgcagccttaacacagtcagtgagggtgttttcaaaatgttcctcctgattacaggcaggttattgatgggcctgaaaggaagccaggcttagaaatggttgtggttggagcatgctgtacacccacaccatgcacacattttaagcatggagagagtgccatcataaaatgtgtggataatatctttccatagtgaactgagcactcagaaaaccttgataacactaaccatgtgactttcagtgaggggtccttcaggctctgcgatcagaagtgcatggtctattactttccagctgggtggccatacatacatcattaatcttgaagcttcactttccacatctgcgaaatggggacagtaacagcatctacctcagggatgaaatggcat

SEQ ID NO: 277794 - DNA, 655 bp, Homo sapiens
tgtatccattgcatgaacgaaggaacagatgaactatttcctttctgacagtgctccaagagttcctgaagacagacrttctctcttctccactggcctgggcatcaaacttgtggacaatctgctttatgacttccaggccaggctattccttaaacggaagcccagcaaagacttgtcctccctctctccctccctccctctggagtaccgatattaactttggaactttgatgccctctggtttgtcctgcacaagatgcagccttaacacagtcagtgagggtgttttcaaaatgttcctcctgattacaggcaggttattgatgggcctgaaaggaagccaggcttagaaatggttgtggttggagcatgctgtacacccacaccatgcacacattttaagcatggagagagtgccatcataaaatgtgtggataatatctttccatagtgaactgagcactcagaaaaccttgataacactaaccatgtgactttcagtgaggggtccttcaggctctgcgatcagaagtgcatggtctattactttccagctgggtggccatacatacatcattaatcttgaagcttcactttccacatctgcgaaatggggacagtaacagcatctacctcagggatgaaatggcat

SEQ ID NO: 277795 - DNA, 634 bp, Homo sapiens
gggcagcttccttgaagaggaagaatggaagggccttcccaagaatacatggatggcaggccaccaacaacgttccctatgggacagcagtggctggactgtcaccagaggatgcaccctttttactttagccataacaactactgaccccacagcaatcagatcctttgtaaagggaaggcttgtcgtggaggagcgagatgtgttgtaccagggaccaggtagacaatgtctgagggcgatagggcctaaagtcctggatggtgggcatggggtgaatgcatgaggctttgggcaccaacctctgtagcccactcatgagcactgatttcagcttgatgctggcacagagggagaggccctggggggastggagtgaggcgtcgggggccaggaagcccagggcaccatctgaaatgctttggctcagagacaggaatggagaggacagggctgaggcagtagcatcctcgatgtgcagagatgaacaggtgaaggggtgagctgacgctagccttgctgacttgacattctgcccagcaccagctgggggtcacctcttgcctccaccggtggggagttggacagacagggcctgaggcaacgttgccaggaaaaccccatgagtaggacc

SEQ ID NO: 277796 - DNA, 592 bp, Homo sapiens
tgccagaaaggcaatgcccctaattgtgcctggagcctggcaaaggcacccattaaagccctttgtgtatgggggtggagagagaaaagatggggaaatttgaatagatagcaaactcttttctcctttgcattggtttctgtattttggaaggagccaggcagacctgggtccatgattagtgtgaaatcttggggcaccctcatagccctcctgagcctttgtttctccccctgcaaagttggaatgatgatgttgaagctaatgtcaacaacataatgcctgtaaacaccttttttycccccatatatgacctgttcttatcaaagaagcaatattgaaaaatgagagatttgctgtagcagactggtccaagggtggtagttgggggtggggcaggaggaactaggtgttcctcctgatggggttacctccctgcttgtcctgggcaaccaagcctaagattggactttttggcttctggcttattgatcttgacagaaattgttcagagatagagcagagaactcatttttccatttagccaaactaatgccagcttattcaagaccacagagcaggtcaaggtcaa

SEQ ID NO: 277797 - DNA, 573 bp, Homo sapiens
gacccaaatcccagaagttgcaggaagaactataaattgctaagcaaataaaatagactgtttcttgctgtttatccttgtatcataggaagagtgaagtctctgcaaaggaaacagggtctgagttatgtcttgcctacccaaagctttactggctgtggaccttgcagaagctgtctaagctttctttgcctcagtttccttcctgcactatagggatgaaatttcctacctcgtatattgctgagagatttgatgagagaattcatttgtaaagtgtgtggtactcggagatcacgccacaaataccagctccccctccctttacattaccatctgctcagccaagaaggaaatttgacaagtacttccttgacaacatcagccaacaccagggcatcctttcctcaaaagtcactactgaatgaaattracagcccagcctctctaacagactcccctgcagcagcaggaggaaggatgctctctccctgtcacagcacctcaagcccccacctgagtgctgaatccaacataccaatgccagcctggccaggagggtcttaagaggct

SEQ ID NO: 277798 - DNA, 572 bp, Homo sapiens
caaaccttaaacacatttatttgaggttatccaaaggatcaagtgagatttaagaggagggaggggagagaaaaagaaaaagttgaatcattcaaaatcattgtggagcaccgaatatgtaccagacactggggataccgcagcgggacaagacaaacatgggccctggtattgggaattgtggtaagtcaagrttagtgcttcgaggagacggacaatgtcctgtgagctgcagagtgtgcggaaatgctcaccacggggccggacacatggtagatgctcaatgaaactgtgtccttttcccctcgatcctggaccattctcagcatcagcacatgaacccaggcagtaccaccctctcccctactggggcccatttcctggtctctttcccttctcatctggtgctgcttgaaacccacaccaagccttgtttcattgcccacatgagcagggtgtcctcttgggtcctcaagtctgcaccagaccccctacctactgcaagcacaaattcaaatccacagcaaggacccgagcaccaaaaaacacctcgggattcaaagccctttttc

SEQ ID NO: 277799 - DNA, 572 bp, Homo sapiens
caaaccttaaacacatttatttgaggttatccaaaggatcaagtgagatttaagaggagggaggggagagaaaaagaaaaagttgaatcattcaaaatcattgtggagcaccgaatatgtaccagacactggggataccgcagcgggacaagacaaacatgggccctggtattgggaattgtggtaagtcaagattagtgcttcgaggagacrgacaatgtcctgtgagctgcagagtgtgcggaaatgctcaccacggggccggacacatggtagatgctcaatgaaactgtgtccttttcccctcgatcctggaccattctcagcatcagcacatgaacccaggcagtaccaccctctcccctactggggcccatttcctggtctctttcccttctcatctggtgctgcttgaaacccacaccaagccttgtttcattgcccacatgagcagggtgtcctcttgggtcctcaagtctgcaccagaccccctacctactgcaagcacaaattcaaatccacagcaaggacccgagcaccaaaaaacacctcgggattcaaagccctttttc

SEQ ID NO: 277800 - DNA, 572 bp, Homo sapiens
caaaccttaaacacatttatttgaggttatccaaaggatcaagtgagatttaagaggagggaggggagagaaaaagaaaaagttgaatcattcaaaatcattgtggagcaccgaatatgtaccagacactggggataccgcagcgggacaagacaaacatgggccctggtattgggaattgtggtaagtcaagattagtgcttcgaggagacggacaatgtcctgtgagctgcagagtgtgcggaaatgctcaccacggggccggacacatggtagatgctcaatgaaactgtgtccttttcccctcgatcctggaccattctcagcatcagcacatgaacccaggcagtaccaccctctcccctactggggcccatttcctggtctctttcccttctcatctggtgctgcttgaaacccacaccaagccttgtttcattgcccacatgagcagggtgtcctcttgggtcctcaagtctgcaccagaccccctacctactgcaagcacraattcaaatccacagcaaggacccgagcaccaaaaaacacctcgggattcaaagccctttttc

SEQ ID NO: 277801 - DNA, 572 bp, Homo sapiens
caaaccttaaacacatttatttgaggttatccaaaggatcaagtgagatttaagaggagggaggggagagaaaaagaaaaagttgaatcattcaaaatcattgtggagcaccgaatatgtaccagacactggggataccgcagcgggacaagacaaacatgggccctggtattgggaattgtggtaagtcaagattagtgcttcgaggagacggacaatgtcctgtgagctgcagagtgtgcggaaatgctcaccacggggccggacacatggtagatgctcaatgaaactgtgtccttttcccctcgatcctggaccattctcagcatcagcacatgaacccaggcagtaccaccctctcccctactggggcccatttcctggtctctttcccttctcatctggtgctgcttgaaacccacaccaagccttgtttcattgcccacatgagcagggtgtcctcttgggtcctcaagtctgcaccagaccccctacctactgcaagcacaarttcaaatccacagcaaggacccgagcaccaaaaaacacctcgggattcaaagccctttttc

SEQ ID NO: 277802 - DNA, 488 bp, Homo sapiens
aacaacgtaagtcccctaagcaaccagcagacatctgatcatggcatttctttgcttaactcctctccatgtaccccattgcctctggggtctgtgcaaactccctaattgggcaaacctgccctctgcaatctggcccctgactgcctcttccagcctcaaacatgttgccttccccttaccttctgagtcagtccagcagaactgccttcagggcctccaactttgccatcacattgcatggagtcacttgtcatttcttccagtagccttccctaaccctccttccaccaccaccactaaaatctgacttargcacctttccaaggtctccctgtactttcctgagcagaccaaggataagaaaatactgtaattgcttactttcttgtctcatcctgcattcagaatcaccttggagctttgaaaaatatatagattcagattcgttggcctggaatggggcttgggtactgatgcttttgcca

SEQ ID NO: 277803 - DNA, 566 bp, Homo sapiens
agcgcttccttagactgaatcaaagtctcctctgaggccaatcgttctgcagtcattggccctcacccctttccctgtctattccctttccctggggcaaccttgccacagtggaagggggtggcctccctaggccaccagctgagggaagcagttggaaaggctggcatggaagcagtggctcgagagtgccaggccagaaaccagcagaaatgggctcgaggccagtgtctgtcacttatgagtcctgtgaacttgcacctgtcacctgtcttcctagggccacaccagcaaagcaggaastgcaaactcctgagccactggccccatccagaaaatggggctgacaactctcaaagtactatcaggtgagatgacatacaataaaggactgtgcagacctcaaagggctgtgcataaggatcataaagcttggaggagaggcttggtccagacattcacctcatctcttcctgggctttagcctgagcttgcttcccctaatctctccatttctataaaaacagctgctctttttggccttccccatgggatactaaccagag

SEQ ID NO: 277804 - DNA, 556 bp, Homo sapiens
cattagccacccctcccactctgcctggcaggcactgtggaagcattaggtgtggccaatatcacttayttattactgagcacttagggagctgttccaggctcccacccagcatgccctccttcttcttcccttgtctccttacccaggatgcagctcagccagtctggccttgagctgcccaagccacctagagggtgagctcagagggcagtcctgtcagagccccactgcagcacggggctgggattagcatgattaccccaccattccagggacgcagactgcctttcagagtgggtgagagtcttgctcaagggcacacagctggtgagtggcagagccaggacttgatccttgtcaagtttaccaaatgactaatgacctgctgagtccctgtgcagcctcccagcctccgggagccgtgctggggagcaggctggaggatttggtgtggtcctactttggaagccagcgtcgcacatgaatgatggagactgcaggtctggtctgggattctggaacgggctctgctcattgctggctgtgtggcctt

SEQ ID NO: 277805 - DNA, 487 bp, Homo sapiens
tcataccaccttccacacagctcttcagagaggtactatgggagtttttgcttctgattccagctgagaaactcttaacagaccacacctgccacagataatagctgtgaactctgaacaaaatatttaaaaaatcgttctcagaaggagagtaacttaaagtgggcagattccagaagggttcgcgtgggtgtttattggcacttgggagaagggaagggcactgagtaaatttcrctttcttaataagtttagccggagggcaaaccccagtactcctcatgctaggtgtcttagatgggtcgaaacctcgtcatactgatttgaagagccagggaatagatttcaaggcaactatggtagctgaaaagtaaaggaggaaaccttgaaagaggcaaaccagggtggggaacctcagactctgtgtacaacctctatcaaatatctggcttacccctgaaccaatgcatatgcaggacagacacca

SEQ ID NO: 277806 - DNA, 413 bp, Homo sapiens
acctgcctgctgcctgtgtttctgcagaggcctgcctgacttcctgtccgtctgtcagtctgcagcaatctgccttcctattgctttgattgcagctgactctcttgcacctgggctccattttatgatgtgcgagtgacagagaggtgacaaatgagagtgaaggagaatgacagatgggagcacacatatgggggatggaacrtgtgcgcatgcatagggctgacagttgggttgtcctctttgagacagggtcactcaagttcttcccaatcctagggggatgcctggagcaccgctcatcccactgcaaagcactgtctgtctgcacccatgaccactgacagtggtgtccctcatggaggctctgggaggagtagcaggagaagggacagtacccatgacaacagatg

SEQ ID NO: 277807 - DNA, 801 bp, Homo sapiens
attgtacatcaaacacattccaaggttaagctgctaatccagacctaccytttgagaattactgttctagtcaccaggtacaataccaggtgcacaccaggtgtcaggggctgagcggatcttctctaataaagataccacatccagaacaactcctgaaatggcattaattcctgattgtgtttatgaaaatctgtaggacccacctggcttttgcataagccagacaggtgacttaaatagtgatgtgattagaaccacctgtcctgcatctctcaagtctttgaagggggcacaattcaattgccctgaagatgcagaattgcttttggtttactattttgtcacaaagaggcagttccaagggcttccatggggccacttctacaataatagccctwattgtacatcaaacacattccaaggttaagctgctaatccagacctaccttttgagaattactgttctagtcaccaggtacaataccaggtgcacaccaggtgtcaggggctgagcggatcttctctaataaagataccacatccagaacaactcctgaaatggcattaattcctgattgtgtttatgaaaatctgtaggacccacctggcttttgcataagccagacaggtgacttaaatagtgatgtgattagaaccacctgtcctgcatctctcaagtctttgawgggggcacaattcaattgccctgaagatgcagaattgcttttggtttactattttgtcacaaagaggcagttccaagggcttccatggggccacttctacaataatagccct

SEQ ID NO: 277808 - DNA, 403 bp, Homo sapiens
cggtgcatcagcttggattttctaacaggttcytttccagaacttttgctgcgggcacggagactcttaccaaattcggctccataatacattccccaaaacattagaacccaggataggtctacgcctccactgatacggaaaaatatatgaaagcgtggattagggtttttgccacagatgagaacaaaatccaacggagacttgacatttctttagaaaggctgccaccagcagaactttccccagaagttacatccgtgctgaccttcatcagttacattgagaaaaaatctgttctatgtgactgtcagccacaggagagggaattttaggcactgaacgtgacgagaaggactttctaactttgattcagtttcaactcacactccccaaacccctc

SEQ ID NO: 277809 - DNA, 403 bp, Homo sapiens
cggtgcatcagcttggattttctaacaggttcttttccagaacttttgctgcgggcacggagactcttaccaaattcggctccataatacattccccaaaacattagaacccaggataggtctacgcctccactgatacggaaaaatatatgaaagcgtggattagggtttttgccacagatgagaacaaaatccaacggagacttgacatttctttagaaaggctgccaccagcagaactttccccagaagttacatccgtgctgaccttcatcagttacattgagaaaaaatctgttctatgtgactgtcagccacaggagagggaattttaggcactgaacktgacgagaaggactttctaactttgattcagtttcaactcacactccccaaacccctc

SEQ ID NO: 277810 - DNA, 580 bp, Homo sapiens
aatgttatgacatttattcagcaagtcatgagactttcatatcagataaagaaaccaagacacagaggagtaagtgacatcaccaggttacagcagtaacagatgtggaaccttacccaagatccaggctctccagcagsggggtggcattgaaggggtagccctgactggactggaagctccttgagggcaggggccctgtcctatctattgctggagcagcggccatgacagtgcctgacacatagaggtatatgctgactgagataatgagtgaatgaaggaggacgtggtcccttccaggttcagtgactcagttaagccagtgactcagtgcctctggtgggggcagagatgagagtgaagggaagtctgtgttgtctgttgaatccactccaggctgcattgtcactgatgctagtggccatctgcccatcctcctactgactccatgtaccaggcagcattggtcccttcacggcactgattaggagcaagcctgctgtttgtaaggtaggtttgcttccacctttagaggcttgagagaaggaagtttgcattctccttctgtataatatga

SEQ ID NO: 277811 - DNA, 999 bp, Homo sapiens
atacactgcagagtgagcctagattcacacctccctaacatcctgattgccatcagaccccaagggcagttgacatgaatatcaccacccaccatcccagctctccctctgctgtatcccataccacygctgtatccacccacttccttctccactacgtcaggatgctgaaaaaaaaatcacagggaagtacagagctttttgtaacagatacccatgtacctgccacttatttaatgactactaacatttcgtcttatttctcttaatttttacttctttaaaaaaaatgcagtaagtacactgacatccttgccttcacaacatttgtgtttcatctgattcatatttttaataggtaaaagtcatatcgtacaagacttaaagagtatgagaatttgcccctttgtcatgtcccgattgtgtcatctgatgctgtgagcatagttcagctgttctgtaatggggaaggggaagaggcagtgagacaccatgccgccagaaatccccagattcwtctatctatctatctatctatctatttatctatctatctatattagaattctacaactttgtttttcacatttaggtttwtaatccatctgagatagtttttttcatgtggggggtttatatttatgtctccctatagggataaacaattgtctcatccctatttattgacgaatctgtcttctcccagggatttgtaatgccacttctagtttccatctacatgagttcatttctgggctctctatccttttgaatttgtttattgtctatctctgccaataccatactgtgttaaattgcattaagtggctttataatacatcttgttatatgctactccaacttctccaccttgtagtttttattccagagtgccttgactccttacacttttatatattaggatcaccttgttgagttcatgaaaaactctgttagggtgttgattgcgattacattgcatttatgatttaattaata

SEQ ID NO: 277812 - DNA, 467 bp, Homo sapiens
taaaacactgatgtaaaagacccagaaaccctgaaacctgtcccttccagccccagtcagggtgcggggccgggcgggagggttgtgggaaagaaacaggagccaggtgagtggggatatcaggtggcaggatcttgtttcccagccttacccagctcagggtcatacaccttacaggctttcaaaatgtaggttgagtgtcctttacctgaagtgcttgggaccaggagtgttcagattttgaaatgtttgcattatactgactagctaagcatcgctaatctgaaaatccaaaatgttccaatgagccttttctttgagtatcatgtcagtactcaaaaaagtttcagattttgaacccggcaccgtggctcacgcctgtaatcccagcactttcrggggccgaggcaggtggatcacgaggtcaggagttcaagaccagcctgcccaagatggtgaaaccccgt

SEQ ID NO: 277813 - DNA, 527 bp, Homo sapiens
aggtgcctataaaggactttcaatctgttataggaaacagaggcacattttttttaatgtcaaaggtactgtgaacacactacttgtgtaccagttgtttgcttgatttgcttttctttgtagcatttgaaaaaaatgctagaattcaagagtcagaggaaacatagaaaatgatgtactttacaaaacagaaataaattttgaacagcatctgctaygtgcactcaataaaactcaataaaccatgatccctatgaataagatatgaagagaagactagttaataggcaaagagcaaagagatggggaaaaaatcctgctcatgtggcaggatttcagaatggtgaatttattactcttttccttctcttcactctttacatcccactgaaattaccaaagaaataaaaaatagattcaaaagtctgtagcagtcatggaaaacaagtcagggcattctcaatgcagcagacgggtataggaatttcaggaagatataaagcagatggggccagattgacaatcaa

SEQ ID NO: 277814 - DNA, 566 bp, Homo sapiens
caacagctccaattcatgaatctgctgaggatgattctccagctgaacaaatgtgggcacagagacacctttcatctaaaaaatccccacgaagcagccagggtggctcaaaggagagaatggatgccatgttgctactcatggacctcagtagatagtgctgatctagggtgccagaaactggatctcaaaggaagctgatagacaaaaagattggaacattgcttaagacaacaacaaaagcaaaaacaaagcacacctcacataagatatgctgcctggggctagtttctaaactttgtaaagagtcattatgyctcaaaggctactctctgagagaagagacaatgctcattggtaaaagaccctttgctccatatagtccttgctctcttaggagagagtcccttatatgaaatggatcatggattctggacaactgacatagtctaactgcctctgaaggaactgaaaccatgttttttttgtttgtttgtttgtttttgtttctccagcaacattccttctcttagacggccattggtacttggctctagcaacataat

SEQ ID NO: 277815 - DNA, 646 bp, Homo sapiens
ggctaggccaggaaaaagggttcctttatgggacttcctatatagagaggtcaccctgctctcacttctgaaacctaccaccctggccacacaactaggttttatggagcccagaaagatattcagaaactggagccttattcagcgtgtaaaaagctctcatgcctgttggccttgttgctgctccacaacaggggactgtggcttattcaagtgctcagccatcacaatgaccccaccacctctttcacgacaaccccaccacctcttggccctgcagccccagcttcagacactgctgaccaactgactcttcccatgccttgaatggaaactcacaggcaggatcccggcaatttgcttatgcaccacgaagtgccaggtatctctgtggggcggcacccgtgggctggctgcttttcaggtgcaagatggatggcagaattttggcraagtgctcagccctggctatcttggcaaggcagagcacagaagcctgttgctgagagaccggaattcccagactcagagatgactagacaaggactctggctttgattatcagctcatggaattggtggaaggcaaatagacaggaagccttcaggtttttaaggaatttggttcagtccaagaaacccaagcc

SEQ ID NO: 277816 - DNA, 406 bp, Homo sapiens
atgaaaacacacacctgcaggaggatgaagggaaggagaaggtagatgggctttcatgcccccatcacagctgatgcaccaagcttcaggtgctgggagatccgaggtcttagaagtttccaaatatttgtggtaggcccactatgtgctaggcattgtgctgaaactaaggttataaaactagatcagatagagtccccgtgcctgaggagtttatatttgcccctgagaagttggggaaatctgtagcttgtcaggggaaggaaaaactcatggaarcaacttgggaaaaaaagaggaagcaggttaggaaaggaggtgaggggaattgaaggtggaattcagctcctcccagggctctgtggaggcaccacagcagtggcatctgcccaggcaaaggtaaagc

SEQ ID NO: 277817 - DNA, 519 bp, Homo sapiens
tttagagtgagcctgttccatacctgctagatggaagtagcagtaccttcctgtccctccacattgtgacaatcaaaaatactgccaaatgttggagggtatagggccaaaaatcaccccaacagtggttctcaaacttctgtgtgtatgccctggagagcttattaagacagaagtttctgggccccactgccataattcmttactcaccagttctggagtaggacctgaaaatatgcctttccagtgagctccctggactgctggtccaggacccttttcaaaaaccactggcctgggttgttatgctctttagcccaccttgctcaccaccacatggcattctcattcccaggaaggggaacagacaagagaggacaaatgatatgttttaaggctataaaggagaagtggcacgtttgacttttgttcatatccctttgttgtgaatttggattcatggccacatctaatgtcaagaagtctaggaaatgtggtgtctagctgggtggccatgtg

SEQ ID NO: 277818 - DNA, 594 bp, Homo sapiens
aatgatatgttttaaggctataaaggagaagtggcacgtttgacttttgttcatatccctttgttgtgaatttggattcatggccacatctaatgtcaagaagtctaggaaatgtggtgtctagctgggtggccatgtgcttggttgaaaatcaggagttctgttactaaagggaggattgggagattagataatgaggggaaaattgcaggtttttccacaggagtgggtaacattatttagctatatcagactatgaaaaactccatccagaaactgacctagaagaagacacatcagctgcaaatccagaatctggaactcaaaatgagagctgcttgtgattccagtaggcatgaacttttgaagatgtacataaggaaagaaaggagtgtgagacatgggaagaagacagaggagtggatttgtcagtggaatgtcttcccccmattccttcccccattcctaataagacaagaaactccccagattcgtgattttcgcaattttaactccacttctccagctccagagattggccctgattggtctaagccaatcaaggaatcagatttccctagtcacactgatagg

SEQ ID NO: 277819 - DNA, 584 bp, Homo sapiens
tacaggcacctgccatcacgcccaggtaacttttgtatttttagtagacatggggtttcaccgtgttagccaggatggtctcgatctcatgaccacatgatccrccctcctaggcttcccaaaatgctgggattacaggtgtgagccactgcgcccagccaaccctgctacttctatagctaacgtctttaactcttccttggatttcccttgaggatcaagaatcttgagaacaaattcccattcttggttaaaatggtttgagtttgatatctagatttgcaaacaatcaatttctgacttataaaatcaggtttatcaggtctgactacaaattagttaccagtctttatttttatgaaacagaaagctatattatttctcttggtcattgagtcttttctgtcatctatttcttatagttttcttttttactctacttggggttaaaaaaatccttctttcaaaatggcctcttacaaacagcgattgctctgagagtttatctacataggactgttcccacatgcacaatgcttgataactgcagtaaaatatccagcggttgtgccttctactgccaa

SEQ ID NO: 277820 - DNA, 525 bp, Homo sapiens
tcaataatggcttcaataaaatctgagctgaagtgagcatgattattttatatgacattgaaaaaactcaatgtcaaatatggctgctgtttttaggcttaaaacagaaaagaagctcatgtgtggagatagatgtgtagccactcacagtctagarcaagaggaatgttgacactaaagttctggcagttttaaattgtttctgatgatggagatttcagtggcattttctcaaaatataacagtaggctaaaatattcatttccacaccaactgaatgactactatgtgtaggcaaagcattatgaaggaagaaagatcaaaaagtacttctcttttctccataagcttatggtttggtgcaatgatttctggatttttaaaattgtacacccacatttaattatacacccatgagctagagtatgacctaatcctaaaaaataaattcaaaatgatgaaaattgagtgaattcaaatcagttaattaatagtatcatttgactataattgttttgcaagctt

SEQ ID NO: 277821 - DNA, 610 bp, Homo sapiens
ttcattcgacatagtttatcctaaagaggacggcatgccttcctcctcaaactactctctgttggcagcatgactgctgtatcaaaggaggacattgtctgtgtggtaggtagggtatgaaacaaatgtggaaaactgttccattttcttccttttgaatgtactgttctgtaagactgattaattacatggttaactatagggtaccattatgtaaatataaatgaagtcaagtgtttattcattgcctcaggttataattgagactgttagttttaagaatttcagctggtacataaaaggaaaccatcatagattcaaattctggtgccagattctgaagacttagagtatagattttgaggaaatatgcagaaatactcaactaatgagtggaaygatgggtccaagacactttgagttttaaactctgtcttaacttggagtctataattcaagctggcattgagccagcattttctaaatttcttcttgcttaatcatagattaaccatatataatatagacaattacaaattgagatggcacagaattctttacctcgcatatgtgtatgaattttgtatctccatgttgcaaccaatctgtg

SEQ ID NO: 277822 - DNA, 576 bp, Homo sapiens
atcgatgcctaaagatgtttattattagtgtgttattttcctttttttaaaagacagggtctcactccttcacccaggctggagtgcagtgacttgatcatagttcactagcatgatacttataaaagtcgaaaagtgctatcaatctaaatgcttaaacattggagattaagtaaattatgaaaatccacattatggatgtaatggaactattaaaatgatggttatagtttttttaatatcattgaggtctgatattttaaaaggaaaaaagcaagctagcaamatttaatattcaatataaattctcagccatataaaataatatgcagtatacatagaaatgggaaatagattaaaaattatatctctgagtgataagggtctctgatttttattccattatgtttacttttttaaatattctgtttctcaagtttctataataggcaaataacctataatctaaaaaagaaatgcatacatgtgtgtgtatttctacataaacaggcatgcacacacacatatatatatttggtgtcttgacagggaaacagctccacctgtatatgatgt

SEQ ID NO: 277823 - DNA, 576 bp, Homo sapiens
atcgatgcctaaagatgtttattattagtgtgttattttcctttttttaaaagacagggtctcactccttcacccaggctggagtgcagtgacttgatcatagttcactagcatgatacttataaaagtcgaaaagtgctatcaatctaaatgcttaaacattggagattaagtaaattatgaaaatccacattatggatgtaatggaactattaaaatgatggttatagtttttttaatatcattgaggtctgatattttaaaaggaaaaaagcaagctagcaaaatttaatattcaatataaattctcagccatataaaataatatgcagtatacatagaaatgggaaatagattaaaaattatatctctgagtgataagggtctctgatttttattccattatgtttacttttttaaatattctgtttctcaagtttctataatargcaaataacctataatctaaaaaagaaatgcatacatgtgtgtgtatttctacataaacaggcatgcacacacacatatatatatttggtgtcttgacagggaaacagctccacctgtatatgatgt

SEQ ID NO: 277824 - DNA, 1047 bp, Homo sapiens
atcgatgcctaaagatgtttattattagtgtgttattttcctttttttaaaagacagggtctcactccttcacccaggctggagtgcagtgacttgatcatagttcactagcatgatacttataaaagtcgaaaagtgctatcaatctaaatgcttaaacattggagattaagtaaattatgaaaatccacattatggatgtaatggaactattaaaatgatggttatagtttttttaatatcattgaggtctgatattttaaaaggaaaaaagcaagctagcaaaatttaatattcaatataaattctcagccatataaaataatatgcagtatacatagaaatgggaaatagattaaaaattatatctctgagtgataagggtctctgatttttattccattatgtttacttttttaaatattctgtttctcaagtttctataataggcaaataacctataatctaaaaaagaaatgcatacrtgtgtgtgtatttctacataaacaggcatgcacacacacatatatatatttggtgtcttgacagggaaacagctccacctgtatatgatgtwttcttgggttctttttaaaaaggggaaactcaaaaattattctttgttcaataataaaggcttgacaatgcatctgtttctaagtgcatgcagtatctactcaaatctgtattggaaaattacwctgtaaatgctttgtaggctttttttttttcttactcattttcagtctctcacagtctctcacttcttaatcaattcctattttctcaacacagactgcattgccaccaagctatcaagtaataacttttttagaactcagaatgaaaagaaaaagcccaaccaaacaaacaaacaagaatgaagcttcaggaacccttttctcctgtaccggtacacgaagtcatccatctctgccacagtggtggttgaattcagataggcacctgatatgctgattgaaattttttagttcaaggttttttaagaatctaaaataaatttccttttccttgtcttcaggaaag

SEQ ID NO: 277825 - DNA, 596 bp, Homo sapiens
gcaaatcagaaaatctttgaatctacccatgactcacaaggccccacttcaagataatctctcccttttaggccaaaaccagtgtgtaacctccatgtattgatttatgatttyacctataacatccgctgtcctgaaattttcccctgccttgaaaaacacttgcctgcaagccactggggaggtcaggattttagtgttagctgcctggtcctcattgcttggtgccctgcaaataaatgcctggctttcttttgctgctatcctgatgtcagtgtttgtctttgctgtgccgggcaagcggatcccagtttgtttttataacattgccagccacatctgctatatggtgaatgatcgcagatccttttggagttcagatatggataaagtaaaggaaaaagagaaggcttggggaacttggtgtgggataaagaggacaagggattagaataagggtgctgagaatcttagatgggggaaacatcttcccactactctcttttgccaacaattggccctggacaccagcctttatatgtggaagccaggataaatattctgctatgttgctcccattcccttgtcagttagca

SEQ ID NO: 277826 - DNA, 549 bp, Homo sapiens
cttggggaacttggtgtgggataaagaggacaagggattagaataagggtgctgagaatcttagatgggggaaacatcttcccactactctcttttgccaacaattggccctggacaccagcctttatatgtggaagccaggataaatattctgctatgttgctcccattcccttgtcagttagcaagtaagggcagtcagcccaacaggctaggccaagttctccattcctcttrgattctcagggcacaaactgaggccccctcagtcaaaacaccattacctgagtagactcggacaccttgctgatgtggagatgtgagagtggtttaagaaacagtaacagggtttgtcctgccctacttcgtcatatgctccataagtgatagatgcatagggcatctgactaggaataagcctgttattccactccagggtagggatgttccactccaggggagggatgctggtgtatatcttctctgcacactctgggccccagaatttttattgcaaaaaagagttgaggggggacctcctttgtagtag

SEQ ID NO: 277827 - DNA, 549 bp, Homo sapiens
cttggggaacttggtgtgggataaagaggacaagggattagaataagggtgctgagaatcttagatgggggaaacatcttcccactactctcttttgccaacaattggccctggacaccagcctttatatgtggaagccaggataaatattctgctatgttgctcccattcccttgtcagttagcaagtaagggcagtcagcccaacaggctaggccaagttctccattcctcttggattctcagggcacaaactgaggccccctcagtcaaaacaccattacctgagtagactcggacaccttgctgatrtggagatgtgagagtggtttaagaaacagtaacagggtttgtcctgccctacttcgtcatatgctccataagtgatagatgcatagggcatctgactaggaataagcctgttattccactccagggtagggatgttccactccaggggagggatgctggtgtatatcttctctgcacactctgggccccagaatttttattgcaaaaaagagttgaggggggacctcctttgtagtag

SEQ ID NO: 277828 - DNA, 549 bp, Homo sapiens
cttggggaacttggtgtgggataaagaggacaagggattagaataagggtgctgagaatcttagatgggggaaacatcttcccactactctcttttgccaacaattggccctggacaccagcctttatatgtggaagccaggataaatattctgctatgttgctcccattcccttgtcagttagcaagtaagggcagtcagcccaacaggctaggccaagttctccattcctcttggattctcagggcacaaactgaggccccctcagtcaaaacaccattacctgagtagactcggacaccttgctgatgtggagatgtgagagtggtttaagaaacagtaacaggrtttgtcctgccctacttcgtcatatgctccataagtgatagatgcatagggcatctgactaggaataagcctgttattccactccagggtagggatgttccactccaggggagggatgctggtgtatatcttctctgcacactctgggccccagaatttttattgcaaaaaagagttgaggggggacctcctttgtagtag

SEQ ID NO: 277829 - DNA, 549 bp, Homo sapiens
cttggggaacttggtgtgggataaagaggacaagggattagaataagggtgctgagaatcttagatgggggaaacatcttcccactactctcttttgccaacaattggccctggacaccagcctttatatgtggaagccaggataaatattctgctatgttgctcccattcccttgtcagttagcaagtaagggcagtcagcccaacaggctaggccaagttctccattcctcttggattctcagggcacaaactgaggccccctcagtcaaaacaccattacctgagtagactcggacaccttgctgatgtggagatgtgagagtggtttaagaaacagtaacagggtttgtcctgccctacttcgtcatatgctccataagtgatagatgcatagggcatctgactaggaataagcctgttattccactccagggtagggatgttccactccaggggagggatgctggtgtatatcttctctgcacactctgggccccasaatttttattgcaaaaaagagttgaggggggacctcctttgtagtag

SEQ ID NO: 277830 - DNA, 1039 bp, Homo sapiens
ttgggatccaattataaaggccaaattgctattttactcactaagataaatagctatggtctccttgatcttgtcctttctaatttaccttatctcatggattcctcacaataactccatggaaagtatttgttctagtcagggatctgttggttgtggtaacagaagctcaattcagctcaagaaaacagaakaataggggttggggagatgactgtacagttatagcgtagtctcacagaatctaggaaaagctgactgaaccatcaggcttcaggacagacaaagttgccatggttctctccttccaccacacctcccttgagtcaagtgcctaccttggtctcagcagcctccatttggaggcaggatcacatggttaaagcaagaggtgtccaattatcagggccaaagtgaaggtcatattgctgaagaagagggcagaagcaaaggattacccccaaacaattcaaatacagcaatatgatwgatagaatagaaagaatggaaaaaaacattacagacattgactacacagtcagaagatctaatacatgcataaccgaagtcccagaacgagagaaaagagggactawagaagaaattgttgcagagaaaacaacagaattttccaaaacaaatcgaggatatcaacccacagatccaagaacagggaatatcaataagaataaaaacaatgaaaaccctatttaggcacataatattcaaagtgctaaaaattaaagacaaagaaaaaatatgagacaaatcaaagcagaggtggaggaagggggacacattactttcaaagtaacaacaaaattgatggatgatttttcagtagaaactatggaagccagaagacaatgtcttaacatctttaaagagataaaagaaaaatattgccaacttagaattttataccaagtaaaaatatactcaaaagttaagtcaaaataaatatattttcagacaaataaaccttgagcaagtttaaacttttttccacttttgtgtttcagttcaggcatttttaaaa

SEQ ID NO: 277831 - DNA, 550 bp, Homo sapiens
gatagaatagaaagaatggaaaaaaacattacagacattgactacacagtcagaagatctaatacatgcataaccgaagtcccagaacgagagaaaagagggactatagaagaaattgttgcagagaaaacaacagaattttcyaaaacaaatcgaggatatcaacccacagatccaagaacagggaatatcaataagaataaaaacaatgaaaaccctatttaggcacataatattcaaagtgctaaaaattaaagacaaagaaaaaatatgagacaaatcaaagcagaggtggaggaagggggacacattactttcaaagtaacaacaaaattgatggatgatttttcagtagaaactatggaagccagaagacaatgtcttaacatctttaaagagataaaagaaaaatattgccaacttagaattttataccaagtaaaaatatactcaaaagttaagtcaaaataaatatattttcagacaaataaaccttgagcaagtttaaacttttttccacttttgtgtttcagttcaggcatttttaaaa

SEQ ID NO: 277832 - DNA, 550 bp, Homo sapiens
gatagaatagaaagaatggaaaaaaacattacagacattgactacacagtcagaagatctaatacatgcataaccgaagtcccagaacgagagaaaagagggactatagaagaaattgttgcagagaaaacaacagaattttccaaaacaaatcgaggatatcaacccacagatccaagaacagggaatatcaakaagaataaaaacaatgaaaaccctatttaggcacataatattcaaagtgctaaaaattaaagacaaagaaaaaatatgagacaaatcaaagcagaggtggaggaagggggacacattactttcaaagtaacaacaaaattgatggatgatttttcagtagaaactatggaagccagaagacaatgtcttaacatctttaaagagataaaagaaaaatattgccaacttagaattttataccaagtaaaaatatactcaaaagttaagtcaaaataaatatattttcagacaaataaaccttgagcaagtttaaacttttttccacttttgtgtttcagttcaggcatttttaaaa

SEQ ID NO: 277833 - DNA, 1187 bp, Homo sapiens
gcttgtaaatttcaaatctgcttatgacttcaaattattaaggtagggaattacagtctatcatagttttgcttgccgccttttgggaccacagcacatcaggatgggggtatagggtaaagtaaatgagagggaaagggagacagaagacaaagaaagatgcctyccctgaaattctccagccctagaactcagcacgtgaacaaactttcctctgggattcagtgaaacatattaataggagtcaatgtttatcaggcacttgctatgtcccaggcattgtactaaccgttttatatttgttacttcattaaatcctcaagacaacctattggttagattatattattatccatattttagagttgaaaaaaactgaggcaagttagttgcacaaagtcgattagctagaaagggacaaaaccaagattcaaacctcagtagagactgacccagagccttgctccacatcaccatgtcgagtgtcttgacgacatacctcccttggcaaagtcttaaactctctgcatctctaagcaaaggagggtgcgtgtgaagagagatggccactttcaaataaggcctatctaggctgaaatggaaaawaagaaattcatgaacaaagatatatcctaaatagtactgaaatactatcctaaatagtactgaaatagtctgtgcctatggagcacagacatttcattttttttttctattacctggcatcctagaaagctagccttggcataaaatgtaactaattttatggggcagcaagaaaagagagagctgctgaagagcaaataatttttttaatgttgagataaaatttacataacatgaaattcaccatttcaccacttcaaagggtgtagaatacagtggtttctagtatgttcataatattgttcaataatcaacattatgtaattccagagcattttcattacctcaaaaggaaaccccatatgcattgagcagtcatctgccactcttcctcccccaagcatctggcaaccactaatctactttctaactctatggatttgtctatactggatgtgtcatataaatggaattatacaatatgtgawctttgaatttggtttctctcacctagcataacatttccaaggttcatccacaaggcatgtataagaactttattcctttctgtgcctaaatat

SEQ ID NO: 277834 - DNA, 645 bp, Homo sapiens
aatctactttctaactctatggatttgtctatactggatgtgtcatataaatggaattatacaatatgtgaactttgaatttggtttctctcacctagcataacatttccaaggttcatccacaaggcatgtataagaactttattcctttctgtgcctaaatattttactatatgcatatatcacattttgtttatcaattcatccgttgatttggggtattttcactttcttggctattatgaataatgctgccatgaagatttgtgtatatgtttttgaacatctcttttcrgttctcttgggtatatacctaggagtggaactgctgggtcatatagtagtaactcttatgtttagatttttgggaaactaacaaactgtcctctacagcacaaagatttttcttggatttccattgttagcaaggcccccaaatggcaaccagcaaagccttctgtcaactaacataccaccactccactcaatcacactgaatgtatgtctcctaaagcagcctgagaaacctcaacttctccatgtgcttattcataaagtcaaactttccatcgcaagacaaaaaaacaaaattcttcccaactctgtagaggcaacttttaaagaaagctgttttctagtggagaa

SEQ ID NO: 277835 - DNA, 470 bp, Homo sapiens
ttttttggtggtcacattgacactgaaggttgaagtcagtttcttttgacatactggatcagggagaataaaagcatggcaagcgcaccgccactaacccatggcaggcatcagtaactgtctggcactctgcctacatgcagagtttgcactccaggcagccattaacaatacatcaaaatcagkgctgaggaagatgaagctcatcgatgaatccttcaccagagactaacagtgataggaaatgtgttgattcgacacaaatataggacagttgcttctcaatcagaaaatatcctacctacatcctgatctggtaaaggtctcaagagacttccttttcagcagactatatgtcttctcacattctattttagccttttcttctgaaattttatctctggatggataataagaggataagaaattaaaagtggtttgggatgtgaggggaaaaaagagttctaaac

SEQ ID NO: 277836 - DNA, 470 bp, Homo sapiens
ttttttggtggtcacattgacactgaaggttgaagtcagtttcttttgacatactggatcagggagaataaaagcatggcaagcgcaccgccactaacccatggcaggcatcagtaactgtctggcactctgcctacatgcagagtttgcactccaggcagccattaacaatacatcaaaatcagtgctgaggaagatgaagctcatcgatgaatccttcaccagagactaacagtgataggaaatgtgttgattcgacacaaatataggacagttgcttctcaatcagaaaatatcctacctacatcctgatctggtaaaggtctcaagagacttccttttcagcagactatatgtcttctcacattctattttagccttttcttctgaaattttatctctggatkgataataagaggataagaaattaaaagtggtttgggatgtgaggggaaaaaagagttctaaac

SEQ ID NO: 277837 - DNA, 519 bp, Homo sapiens
cagtcacccagtcctctcttctggtttgtttttctgtctttccctcacctcctcactcctgccttgggaccagttgtgcttttgctcaattcattcagcaaacaattagcaacaaagctgcaggctctggcagtgatcaaaacrctggctgaatctgccaaggtcttccaagcacttagaagaaaggccaggatccgcaaagccaggcagatttcgggtgtcacctatgcagggcttcataagtctctgtattttctggctcagggaactaccccatggggtcactcacaaacgtgtatgccttccctctgtcttctatctgagtgcggcttaagggtataagcactaaggaaaaagcttaagccatcacagcatatctgagcataaaggaaagatagataaagtccttatacaagaaaactgaggcctagagttggcaagctatacccagaaagttagcaggaagggccacagaatgtactcgaacaaaagcaagaatgacatggcccatttcccagt

SEQ ID NO: 277838 - DNA, 519 bp, Homo sapiens
cagtcacccagtcctctcttctggtttgtttttctgtctttccctcacctcctcactcctgccttgggaccagttgtgcttttgctcaattcattcagcaaacaattagcaacaaagctgcaggctctggcagtgatcaaaacactggctgaatctgccaaggtcttccaagcacttagaagaaaggccaggatccgcaaagccaggcagatttcgggtgtcacctatgcagggcttcataagtctctgtmttttctggctcagggaactaccccatggggtcactcacaaacgtgtatgccttccctctgtcttctatctgagtgcggcttaagggtataagcactaaggaaaaagcttaagccatcacagcatatctgagcataaaggaaagatagataaagtccttatacaagaaaactgaggcctagagttggcaagctatacccagaaagttagcaggaagggccacagaatgtactcgaacaaaagcaagaatgacatggcccatttcccagt

SEQ ID NO: 277839 - DNA, 608 bp, Homo sapiens
tactttattctgcataacttgttttttacactgcctaatttaatggttgccccatatgagaacaactaaggaggaattcttttgacacacaagagaagcagaaaaacaaaacaagatgacagtgtaagttctggagttaaactatgtgaagtcatatcctggctttaccccatgctacagcgaggactctgagcaagtcactacacctctctaagcctctgttttttcagccttaaaaccaggggaatgataggatttgcccaatattgcccttgtcacaagtgaatgacacaatccacataaagcatagagtgcctagtatgaagtcagtgctgttttaatggtatttgggatttgttttaatcaggtaccataagacacacagatctggaaatgactgtcatgaaggaagaagtttgttacacagtagtccccccttagcctcatggggatgcctgaaactgcgaaccttttagatacygttttctcccatacatccagacctgtgataaagttgaacttataaattaggcacaatgagagattaacaacaataataataatacagaacaattattaaaatatactgtaataaaagttatgtgaat

SEQ ID NO: 277840 - DNA, 596 bp, Homo sapiens
gacgacctctttttaaaagatattcaagggttgggaattagaatggagtttgaaacttaaaaaaatacgaggattactaaaaatgtcataacaattgttgactcacaaaccaaatttcacttaaatttaatattgagccaaacagcaaataaatcagctttaagttaaaaattttttttcctttacttcctgccaagcaaacttttaaaattcagtatcccttccacagttacatttctgataaccatgaaaaacaacgagttaaacttttgaatctggaatagaatgtctcattccaattaagaaaataactacaacctttgaccttcccactagcctgatgggaaattcactggcaccattatgggtttagccgtccatgtgcaagtaaccactagagggcagccttatctcatatctgacatgcggcagaaaaayacctgaaatgcttctaatgttcctttaattatttttgtagtatctttgattttcctggatacttaataatcaacttcaaatggaactaaaagtattcctaaacagttcaaaagtccactttcacaaacaatgatatcacaaagactggtggtgagagg

SEQ ID NO: 277841 - DNA, 575 bp, Homo sapiens
ctgtggtactacactaaaactcaacaagtggtagtttcttaaagattagttagaatatggaacctgaagccatatcactgactttttgtactttgttaaattaaaatacaccggtatattttgcactttgagtggatcatttacctacatatatttttataatatcatccatgggtcacttggaaactactggttcactgggttttgtatatcttccagattttgacacatttcattattagatgtggttatatcaaggaattatgttgattaatatcactacccataccatcagaaaagtttttaagtattgggaagctgtcagattcctggggttggatacaagttttccaaaattcagatttttgcctgaatgtatgggcagtaaatactgtgaactgtttttcaggagataacagaytcaaagttcatttttgagaaaatatatgaaacatatccacatctgaataattatagtctgttattctatttaagtggcattccattcaaaaaacagctagttcagctcttaactcaaacaatgacacaagtacttttccctggagacaaacatg

SEQ ID NO: 277842 - DNA, 579 bp, Homo sapiens
cttttttttcttctagaaaagaaatgagacggattgaaaagaattaagaaaatgaaatgtgtacactgagggttaatgctatctgatgttgggtgtcggaaccaatctcccagaggagctgcgcacttcaggaaataatgttgaaagaatgaatccataaaggaaagggagcacccacgggtgcataggaactgtggtttgagagggggagtgagcctgggacacccaggagccctggtgcagagccctgtggagctgagggccaaggaagggtgcttcccacacacctgcaaagaacacagccttctcctcctgtggggcctcgtataccgcatcaatcttttccgggagctcaggccagaatgtggccaccagcaggggccccatgggcttgtcacgtggcgtcacagtccgccaaatgaacctggcaggaggcaagggggcacaggaaaccacatcttcagtcaccctgcagctcgaaccacacacccccccaaacmcacccagaaacatcccagagatgattccatgatgggagtgggaggcaggatcaaaggaggttggagaaggactggagaa

SEQ ID NO: 277843 - DNA, 1035 bp, Homo sapiens
acatcaagtcactgaccctctctctgcccctgcaggcagctctacccctggactttgtaccaaatgaaagcaatttctctctactgtttaggctggattgagtttgcagagggatggtctctgttatttgcagaaaaacatcctagcgtaggaaggtgtcacaatttttatttagcaaatgaagctcagagaggttaggattcaaattacttagttatcactacatcaatgactaaataaattagttattaccaagattcatatccagatctgactccaaagtctgagtttaatcaycctgcaatactgtccttcatgacccccaccctcaccagtgcctagcagcaatttttgctcatggttgaagtttaatatttactggttaatcaaataaacccattaaacactcatcacgttccttttgaaagaaaactgtgatgtggtaggccagggatgwgacataacaataataataatataatagaataatggctagtgcttattgagtacttaccatgtgctaggtaagcacctaagattacctctcttttaaccctgagataggaaatttcccagtttgcagatgaagaaactgagaagtcacttgccwaacatcatcactaggccagctggttggttcatgcactctttgatttgaagccaagcggtctaagtccagagttatcttcttaagcccccactgcattgcctctggacaacacagacttccatttgtcagaggtgttcaaaccaggcacctccatcttgagtggggggctgggtaagatgaggctgagacctgctgtgcttcattcccaggagggcaggcatgcattcttagtcacagaatgagacaggaggttggtaggactgatttcaccatatacaggtcgggtcacaaagacccctatgataaaacaggatgcagtaaagaagctggagaaagcccacccaaaccaagactgcaatgaaagtgacctctagtcgtcctcactgctcattatatgctaattataatgtattagcatgttaaat

SEQ ID NO: 277844 - DNA, 578 bp, Homo sapiens
gacataacaataataataatataatagaataatggctagtgcttattgagtacttaccatgtgctaggtaagcacctaagattacctctcttttaaccctgagataggaaatttcccagtttgcagatgaagaaactgagaagtcacttgccaaacatcatcactaggccagctggttggttcatgcactctttgatttgaagccaagcggtctaagtccagagttatcttcttaagcccccactgcattgcctctggacaacacagacttccatttgtcagaggtgttcaaaccaggcacctccatcttgagtggggggctgggtaagatgaggctgagacctgctgtgcttcattcccaggagggcaggcatgcattcttagtcacagaatgagacaggaggttggtaggactgatttcaccatatacagktcgggtcacaaagacccctatgataaaacaggatgcagtaaagaagctggagaaagcccacccaaaccaagactgcaatgaaagtgacctctagtcgtcctcactgctcattatatgctaattataatgtattagcatgttaaat

SEQ ID NO: 277845 - DNA, 1095 bp, Homo sapiens
acgtccttgcctccttttgctggtagagggcacttaacagtcagatgcttaaagggaaaacatgaatatattttmtgtgcatttgaaatagatattaactgaatgctgcaggtgatatggcagctgggaatgcaggagaaaaatactgaaaactgctgccatttattgagtgcctattctctgcctggctcctggaataatgataacaatatttaacatataatacagcatgagcatcatccagttggagtggatgccagccgaaaacacaactggtaagctttagtggtgcaccagccaagttttcagccctgcttgcttctggaacaggaaatgctacgtttaagtttgtttaatgctcaattaaaggagctgcattcgcccgggctgctaatgcatttgattatttcttttctctttttttgtactcttaacgttttttaagtcttaaaacatcttggctttttttgtttgtttggttggttggtttttgcaagccacttcaaaccttttgagaagcagtcagggtatccattttaaataaatawacgtccttgcctccttttgctggtagagggcacttaacagtcagatgcttaaagggaaaacatgaatatattttatgtgcatttgaaatagatattaactgaatgctgcaggtgatatggcwgctgggaatgcaggagaaaaatactgaaaactgctgccatttattgagtgcctattctctgcctggctcctggaataatgataacaatatttaacatataatacagcatgagcatcatccagttggagtggatgccagccgaaaacacaactggtaagctttagtggtgcaccagccaagttttcagccctgcttgcttctggaacaggaaatgctacgtttaagtttgtttaatgctcaattaaaggagctgcattcgcccgggctgctaatgcatttgattatttcttttctctttttttgtactcttaacgttttttaagtcttaaaacatcttggctttttttgtttgtttggttggttggtttttgcaagccacttcaaaccttttgagaagcagtcagggtatccattttaaataaata

SEQ ID NO: 277846 - DNA, 1174 bp, Homo sapiens
cacttagcagtaggatttgtgggcaagggtgaccacaagagaacaatggagttagcgtgcttatttaaagcacccaagagtgtagaccctttgtgggggactggttgaaaggtgcagaggcccccgtgtctgtgtatgaacaggtgagactgagacaacccactgtggaaacaaagaagcatggatgaagrcagacagcctcccactccaacacacacacatatgcacatgcacacacacacacacacacacacatacccttggttgctgatgtttcatatgcaccagtatctcagataaaagagtctagagctgggctggaagatagcaagctatccaagtcagccccatcaccctcattttatgtttgttattgaacttttgtagtcattcggtgctggacatgtctactacaaaagaggaagaagatgaggaggaaaaggacaatatggagaagggagagaaggcatgctgggtactatctggtggctgggatagggacaacaggcaaatgtcctgaggtgtcatgtaagtaatccagccctaggctttcaccattagagggtgtcgggggaaaacttgcaatttcagtcatgctactacwggttggaaaggcttctaatgcttatttatcccaagctccccattttatggattcgaaaaggaaagtatctgagtcaggggcatctggggttaatgccacagcacctctccaatcccttgacctggggtttaccctccactaggttggccctttgctcccatcatttccaatatccttcggcatctctatgagccccagcatccagcctgcttcctctccccctcctgaccttcctccgcacccaccactgctgtgcctgcgaggacgactcgaactacaaattaagtgaaggggaaaactgaattgatatgatctgagcaagagaagcacaaaggcaccaatttcctctccacattatacaggaagatctgggccgcgtggggagccggtgcagtgccttttgatgtttgccttcctgcaagtaacaagcaggaggacatgagaaggcttcacctcctccatgcaaactcacaacagcaggtttccaatcacggtwgaaacaaatccagagatgaaaaacaaagaaaagaaacgaagaaggaagagaaagagatgattgttgtttagaga

SEQ ID NO: 277847 - DNA, 607 bp, Homo sapiens
ctcacattcagtttattcctcctagaatccttatcaatcagccaagtcacctcccttggggcagagcaaggtaaggggaatagagacatggagatcctccggatgcccctgtgcatggaggaggggtcaggagtggtgaaatcctcaatgcttctcacacctgtcatcatattatgataatctattgcatggatgcatccctcaggtcccttttacttattctgtgtgctcacccccagcctctacacacattttcccctactcctccttctctttctccttctccttctccttttttgggacagagtttctctcttgttgcccaggctggagtgcagtggaatgatstcagttcgctacaacctctgccttccgggttcaagttattctcctgcctcagcctcccaagtagctgggattataggcatgcaccacaacacctggttaatttttatatttttagtagagatggagtttcactatgttggccaggctggtcttgaattcctgacctcaggtgatccaccaccctcggcctcccaaaatgctgggttacagccgtgagccaccacacctggccctacgtattttacttctaaaaggttca

SEQ ID NO: 277848 - DNA, 645 bp, Homo sapiens
catgcatgcatacacatgtacatttagtaaaatgcttctaaactaggactccagttctatcccagatctcccaggaaaacctggaaaaccttagctaaatgttttttcgggagtgcttggctttcttatctgtggttggagatgattcccttctaatctcactcacagggttgttttccggttttgttttttgttttttaaaaatcaaatgaggtgaatgagaaaccagtctataaactggaaagagctatgcacattaataattatgagggttttatgccttttgctgaattcaggctctggctcttattaaaaatgccaactcccttggtccttctgcttggccattcatactcactctgcttaatcatttgcacctcaaggtaaattaacagattaggccaaggagagtgtggaagagagtaattcakagtatgagaaataataattacaacaataataatggcgacatttattgggtgctaactctgcgctggactcagtagagacctctccagagatgagggatgtataagagaagaaaagataaattgtggttactctggcacaagcttgctaataagagtgctgtgatctttttgctcataaggcttatgtgcttgtgtgtgcgtgtgcgcatgcgcg

SEQ ID NO: 277849 - DNA, 588 bp, Homo sapiens
aagtcaggaaatctggagacattggacaggctcctcttcccaattmgccacactccccaccatgccccaagacttccccaataccaggggatgtgttgttatgtaataccatgcttgcactgttgcttttttcttatatagaggaccacagttgtatggctgtggctttaacagacatggaagcaaaatgaacctagaattagactcatgtttggagaagaatgagaaggaacacattttttggtggaagtgacaattattcctatgtgctatctttaaggtacaaaggactccttacttcactcattttcacatgcactctctttgctgtaactcctgtgaccaagtccccaggcattgagactcatcccatagagaagcagtagggcacaggggttaggagcatggcccttctgggttttctttggctaagttagcttgggtaaagttagcaagttttgttgggctggggttaagctccttaacttctctttccttcagtgtcctcatcttcaaaagggggtgatgatgataataacacctatcttgtaggtgattgtgaagatggaatgaaacaagaaatgtaaa

SEQ ID NO: 277850 - DNA, 588 bp, Homo sapiens
aagtcaggaaatctggagacattggacaggctcctcttcccaattagccacactccccaccatgccccaagacttccccaataccaggggatgtgttgttatgtaataccatgcttgcactgttgcttttttcttatatagaggaccacagttgtatggctgtggctttaacagacatggaagcaaaatgaacctagaattagactcatgtttggagaagaatgagaaggaacacattttttggtggaagtgacaattattcctatgtgctatctttaaggtacaaaggactccttacttcactcattttcacatgcactctctttgctgtaactcctgtgaccaagtccccaggcattgagactcatcccatagagaagcagtagggcacaggggttaggagcatggcccttctgggttttctttggctaagttagcttgggtaaagttagcaagttttgttgggctggggttaagctccttaacttctctttccttcagtgtcctcatcttcaaaagggggtgatgatgataataacacctatctygtaggtgattgtgaagatggaatgaaacaagaaatgtaaa

SEQ ID NO: 277851 - DNA, 596 bp, Homo sapiens
agcctctgtctagcctgtcttccactctacaaattcagtaagatcagaaccagtgaatttttctttaacaaaacaagggacttattgaactcctcagaggaacaagatgtcttatttgagttaaaagagcagcatcataaaaatgtttacagaaattactgtaaagatattttggattcctccctctgttgtaactagattgtaattagatgttgcacgtgaacccaggctcacatctaagcgaatactttctgagattcatttgtactactttaaactactttaaaagtaaaaatattagtaaatccatttatataatagcacatataatagtgatttctataacagcaaaaatgtatagcaaagcaaaggtctaacaatacggaccatttaagtaartgatggttatatataaccatttcaacaatgcaaaaatacttgtgataaaattaaataaaaaataaggtataaaactatatgcatccttaatcacaacatgaaaatgcaaacaaaatttccaaagtccaacaccaaatcataaatgtgaaaaagctagaaaaaaaaaaccctgcaccatttctgtgactcactatatt

SEQ ID NO: 277852 - DNA, 520 bp, Homo sapiens
aggttgctggttttcattatgactgtaggccgttggtttttaaggctactacagagctgaggatgaggaattagaataaaattaaactgtaacgaagcctactattctaactaagagtcagcactcttaaataaatgctccttggattgttgaaagcctttggttaattttcagagctaagacaaagttgattctgattttttttttttgttttcattgcttttatagagaagataattttcagaggcctttacttcatcagttttgctgatgtctcatctcagtttttttcattctgctttttagactgaataatttctagtgacctatcttcaagttcactaacaccttcttctaccatcttcaatgtgttgttgagcccatccagtgaatttttcatttcmgatataacagttttcagttttgaatgcccatttggttctcttttacattttctatttctctgctaagctccttccaactattcattcattatgccattctttacttttaagtcctt

SEQ ID NO: 277853 - DNA, 517 bp, Homo sapiens
ttcctggctcaaggaactctctctaccgaggtgygatctcctaactcctggcactcatttacctacccatggttggtagtcagcctccaagatgcctgcagtcatccctgcctcctgggattcatatcctcctccacattgtgccaggattgggctctgtggccaaaaagaaaacagcagatgagaggacgtgtctcttctcagaagggttagaaaagactgtggcttccattttagatgactttctctctctctctctctctctctctctctctctctctctctctctctctctctctctcccctcttttccttcttctcttccttggatctcttgctctgaggaaagcaaactactatgttgtgagcagcccaatggagaggcccacaagacaacgaactgaagcctccagcaacaaccctgtgaagtcagtttggaagtggattttctagccccaattgagcttaagatgacttcagcttcagcagacagcttgactgcagcctttctagagag

SEQ ID NO: 277854 - DNA, 539 bp, Homo sapiens
ctgcagtgagctatgatcatgccattgcactccagcctgggtgacagagaaagacactgtctcaaaaaagaaaaaaaaaagaagaagaagaaacaaaaagaatctgagtcaaggggacaggccatgggaggataaaagatagaaaagatggggccgagagtggtggctcacaccaataatcctagcactttgggaggccgagatgggtggattgcctgatctcaggagttcgagaccagcctgggcaacacggtgatacctgtctctaccaaaatacaaaacaaattagctgggtatggtggcgtgcacctgtaatyccagctacttgggaggctgaggcaggagaatcacttaaacctgggaggcagaggttacagtgagccgagattgcgccattgcactccagcctgggtgacagagtgagactccatctcaaaaacagaaaaaagagatagaaacaatgacatcaggctcactgaggaggtcacctgtagagttcactccttacgcaccttcctcaccagccccatcataagagg

SEQ ID NO: 277855 - DNA, 517 bp, Homo sapiens
ttcctggctcaaggaactctctctaccgaggtgcgatctcctaactcctggcactcatttacctacccatggttggtagtcagcctccaagatgcctgcagtcatccctgcctcctgggattcatatcctcctccacattgtgccaggattgggctctgtggccaaaaagaaaacagcagatgagaggacgtgtctcttctcagaagggttagaaaagactgtggcttccattttagatgactttctctctctctctctctctctctctctctctctctctctctctctctctctctctctcccctcttttccttcttctcttccttggatctcttgctctgaggaaagcaaactactatgttgtgagcagcccaatggagaggcccacaagacaacgaactgaagcctccagcaacaaccctgtgargtcagtttggaagtggattttctagccccaattgagcttaagatgacttcagcttcagcagacagcttgactgcagcctttctagagag

SEQ ID NO: 277856 - DNA, 592 bp, Homo sapiens
tagatgactttctctctctctctctctctctctctctctctctctctctctctctctctctctctctcccctcttttccttcttctcttccttggatctcttgctctgaggaaagcaaactactatgttgtgagcagcccaatggagaggcccacaagacaacgaactgaagcctccagcaacaaccctgtgaagtcagtttggaagtggattttctagccccaattgagcttaagatgacttcagcttcagcagacagcttgactgcagcctttctagagagcaagcaccacccagctctgctgcttctagacccctgacctcagaaattgcacgagataacatgtttgctgtttcaggctgccaaatttaggggtaagctgttatgtagcaataaataccagcacaycatgtgagctcgtctctcgagggactctctgaggctcctgatgttcctggttggctccctcaatctatgtgcttgttgtcccttaatatgtattttcagttcttccttcataagaaacacccttagcttttaagtggatccttggctgcctggaataaacactacattgccccaggttttttg

SEQ ID NO: 277857 - DNA, 534 bp, Homo sapiens
tcaaagttctgatattacgtacataaacattaagtgctgctaagttttcccactgacygtttaaagaaatgttcctctttatatctgatatcatgacatgtcttgaagtctactttatctgatattaatacagtcatatcagcttcttacacttacattatttccacattatcttttctcccttcttatctttgtatttacatttatagtgcatgtattgtggattaatgtatagctgggtcttattcttttgtctagtctgaaaatctttgcctttaagttagaatgttaattaatgtatactaaatgtaattattgatgtatttgggtataaatctattgttttgctatttcttttctatatatcccatcagttttgtttctgtttctccttttctgttttcttccttgagttcatgaaatttttctttagtgatccatttaaatttcttttatggctcctttgctataccttcttgtacttttagtcagcagttggtctgaagattacaatgtgtgcttagcataagacaa

SEQ ID NO: 277858 - DNA, 536 bp, Homo sapiens
gctatttcatcggcagatcagccccaaaagctgctggttgcccatttttatggttatttcttgattatatgctaaacaaggggtaaattattcatgcttctgccttttargccgtataggataacttcctgacgttgccatggcatatgtaaacagtcgtggcgctggtgggagtgtggcagtaaggctgaccagaggtttttctcatcatcatcttggttttggtgggtcttggccagcttctttactgcaacctgttttatcagcaaggtctttatgacctgtatcttgtgccagcctcctatctcatttcgtgattaggattgccttaatttactggtaatgcaggccagcaggtcttagtctaacccctattcaagatggagttgctctggttccaatgcctctgacatagtcattgctgggcacagaagcctctctctcactgagtgctgcttctgcagccattgccatctctgaatgggcaccaagccccacactggaaaccgatacccttggaatgccaaaaccacaga

SEQ ID NO: 277859 - DNA, 447 bp, Homo sapiens
tttccattcctggaagcatttggcagtcatacttcagacaggcatcacatccaaaaggcaagaaacggggactacaaactaagcatctttcttctctccctgttttatttttatcaaggaggaacctctttgccagaaactctcatcatactttcccacaggtttgactagcagaactagatcayattcctctaaactgaccattggcaaatgggagtgttgttaacgaaagtaacagcatatgttaatgtttgctcaatatcttttcttacctttctgttcatcttctcagtgagaaaacttttggcggagtacatgatgacctagaataaagagtatgtttcccagactccccttgcaacaagttttgaccctgtgactaagttctagccaatgggttgtaaaagacaaattaagtggaaccttctagaagcttttcttaaaaga

SEQ ID NO: 277860 - DNA, 544 bp, Homo sapiens
aacaaaagatatttatatacttattaccactttcaaaaataagtataagagaaagataatatcaaacagatttttatttatttatttatttacttattttttagacagagtctctctctgttgtccaggctggagtgcaatggcacaatyttggctcactgcaacctccacctcctgggttcaagtgactcttgtgcctcaccctcctgagtacctgggattacaggcttatgccaccatgcctggctaatttttatatttttagtagagatggggtttttccgtgttggacaggctggtcttgaactcctgatctcaagtgatccgccagcctcagcctcccaaaatgctgagattacaggtgtgagccacaatgcctggctagatttatatttatttatctaaatagtggtatttactttttaaagttcttttgtaccagcacaagaatggctataaaaatcatttatatgtaaaataataataaaattccattttaatgaaaaattaagacaataaactaaaagctccacacatttagcag

SEQ ID NO: 277861 - DNA, 1068 bp, Homo sapiens
aacaaaagatatttatatacttattaccactttcaaaaataagtataagagaaagataatatcaaacagatttttatttatttatttatttacttattttttagacagagtctctctctgttgtccaggctggagtgcaatggcacaattttggctcactgcaacctccacctcctgggttcaagtgactcttgtgcctcaccctccygagtacctgggattacaggcttatgccaccatgcctggctaatttttatatttttagtagagatggggtttttccgtgttggacaggctggtcttgaactcctgatctcaagtgatccgccagcctcagcctcccaaaatgctgagattacaggtgtgagccacaatgcctggctagatttatatttatttatctaaatagtggtatttactttttaaagttcttttgtaccagcacaagaatggctataaaaatcatttatatgtaaaataataataaaattccattttaatgaaaaattaagacaataaactaaaagctccacacatttagcagwgcttatctccgccgtcctcttcttcctgagtgaagtgtacgcwgaaggcatggcttctcagctgttcctctaagcagcggctctttccacccatctggagatttagattctagagttcggtatcacatttgcctgcagatgtaagtcacatctttcagcctcgttctgtcagtaataaaggtaatattttggcttctcccaaccctattccttgtcttatctttcagttgttaagaatgcaggcagggaagacggattctgttcaatgacccccttcaagactccagtgaagttcaggatctggcagaggggatggatttatatagaagtatgtttaaaacagtgtacatttcatagtcataacataattcccactctaaaaagcttgtgtgtctctttgcagtatgttatcttttttgtttttttctgcatttttttatatttattcttttgatttcagaaatagcaactttatccatatggcaaaatttgacattttataatgaacaacaaaaaaaaacaa

SEQ ID NO: 277862 - DNA, 591 bp, Homo sapiens
cacgagaattacttcttttcactttttcacaagatggctggctttgtgcaccacatcaaacttcatacaattttaacttactgagcattcaagtttgtccccaaatggcctaaacatatagtttagccacttcaaaaatattgaccaggtttttgctttccacagggagaaaaaaaaaaaaaaggtcaagttggaacttttcagttgcaaaaaaaaaaaattaacaaaaattggagtttattacagcataaaaaattcatttgtatcatctagttttgaaggacccaagctacttttggcaaaatacttaccaaccatttatcaaccattccattttcctaaatgattcagtttagctggtcatccaagtaaggtgttagtaggttcagataataaatgtattaccctttaatattgattcagctagtacctgtgagggcttaatgatgtgccaaaaactgttcttcrtatgtgggcataaataacttgacacccaacaaacacagcccctataccacggagtttactgtcttgtggcaatgacagacatgggtagttgcctggcatagcctgagaaacagttataatgcg

SEQ ID NO: 277863 - DNA, 613 bp, Homo sapiens
ttccattgatttagtttattgctttatgtcaacatgagttctgaacatctattaatgaaaattatgttcaattaaatgactccattaatatctgtaactcaaatctggtcctacaattttattttacaggcaccagagccaaagacacaaacctgctaacttgtaacatgtctacccatgyttctctttcaaatgaatatgttggttgaggccaataactctttcctttccatatggaaatcaatcaacaagtagcattgttatcttctttctaagctggtgttctgtctttgaatttttctttttcctagttagcaatgaaggtaaaagtttttacataagtataattattcatacgactccccctgaggtaagagaactgaacaaagactggttcatcaaacccagaagtcagacaaatttagactgaaatgagacatttaggcctagactagtgtgtaagagattaaaaaaacaagcaaacagtttttcctggtcttatattcaatacaacacagaacacttcacatctggttaccaaaatgtatgtagatttctttccaccaacaatcaattctctaggagaccccaagtaggtgtcatctaatttaat

SEQ ID NO: 277864 - DNA, 581 bp, Homo sapiens
tttgtctttgacctcagtttttgacacagttcctgaatcccttggaatttcttgaattacagaagcatcttttattctaatgaagtgacgcttggtgagcttctcaggatgagagctcgttgtcaggaatcaaccatatgattagtgagttggaactttctttttttgtttgtttgtttgtttgtttgttttgagacggagtctcactctgyagcccaggctggcgtgcactggcactatctctgctcactgcaagctccacctcccaggttcacaccattttcctgcctcagcctctcaattagctgggactacaggaacccaccaccacacctggctaagttttttgtatttttagtagagacggggtttcatcatgttagttaggatggtctcgatctcctgacctcgtgatctgcccgcctcggcctcccaaagtgctgagattacaggtgtgagccaccgtgcccggcaagagttggaactttcaacatcccctccccacctctgataaagggagagatgctgaaagttggtttggtcactaatggcctacaatgtaatcaatcatgcctatctaa

SEQ ID NO: 277865 - DNA, 581 bp, Homo sapiens
tttgtctttgacctcagtttttgacacagttcctgaatcccttggaatttcttgaattacagaagcatcttttattctaatgaagtgacgcttggtgagcttctcaggatgagagctcgttgtcaggaatcaaccatatgattagtgagttggaactttctttttttgtttgtttgtttgtttgtttgttttgagacggagtctcactctgtagcccaggctggcgtgcactggcactatctctgctcactgcaagctccacctcccaggttcacaccattttcctgcctcagcctctcaattagctgggactacaggaacccaccaccacacctggctaagttttttgtatttttagtagagacggggtttcatcatgttagytaggatggtctcgatctcctgacctcgtgatctgcccgcctcggcctcccaaagtgctgagattacaggtgtgagccaccgtgcccggcaagagttggaactttcaacatcccctccccacctctgataaagggagagatgctgaaagttggtttggtcactaatggcctacaatgtaatcaatcatgcctatctaa

SEQ ID NO: 277866 - DNA, 581 bp, Homo sapiens
tttgtctttgacctcagtttttgacacagttcctgaatcccttggaatttcttgaattacagaagcatcttttattctaatgaagtgacgcttggtgagcttctcaggatgagagctcgttgtcaggaatcaaccatatgattagtgagttggaactttctttttttgtttgtttgtttgtttgtttgttttgagacggagtctcactctgtagcccaggctggcgtgcactggcactatctctgctcactgcaagctccacctcccaggttcacaccattttcctgcctcagcctctcaattagctgggactacaggaacccaccaccacacctggctaagttttttgtatttttagtagagacggggtttcatcatgttagttaggatggtctcgatctcctgacctcgtgatctgcccgcctcggcctcccaaagtgctgagattacaggtgtgagccaccgtgccyggcaagagttggaactttcaacatcccctccccacctctgataaagggagagatgctgaaagttggtttggtcactaatggcctacaatgtaatcaatcatgcctatctaa

SEQ ID NO: 277867 - DNA, 1223 bp, Homo sapiens
ctccatgctacatacaacagccttaatatacaaggattggcttgatgtgattcagtgtatattctggaattaatatgctgagagcttttcatccaaaattaagaaaaccccagaagatccaatgcagaggtatgttgtgtatattcttgactatatatagaatcaaattctaggctataaggtttctcagggtcctggattcagcatggactaaaatatgtactgacaggatggcattatagaaggccagcatcctgtaagcctcatcagtcactcttgagagatttcagtttcacaraaagaatcagccactaccgaaaacattgctgcttacagttcaggcttaagcaactgtctaaacatcacaaattaagacatatctcaggtcatgatggagtcatagatacagagttcatgataaagtcattcaacattgctaattgagtgaacaaaatgtggcatttagagaatacacccaatagactattgatattgtttggctttgtatccccacctaaatctcatcatgaattgtaatccccaggtgttgagggaagagcctggtgggaggtgattwtgttctcgtgatagtaagtgagttctcacgagatatgaaggttttwtaagtgtttggcaagttcctcgtttgcttgcttctctctcctgccacctcgggaagatgtgcctgctttcccttctgccatgattgtaaattttctgaggcctccccaggcacacagaactgtgagtcaattaaatctcttttcttcataaatttcccagtctcgggtagcagtgtgagaacggactaatacaactgtatattagtaaacttttattcacaaatgtctcccaacttgaactagtttagaaaaaatgggaatttgatggttaatagaattcaactgcagtttataaagccaagccacaagaagattggggatctgggtgggccttcgaaatagctaaaataaggtcttgggtgcttacagtgttcatgaggtatgcttctcaattcataacagctttatctatggtctataacgttttctttcacaaggagacattattccctctcccaggttcttagcttcccatttccaccactcccgccacttacaattcctagggaaaagcactgattacattgagtcaagggtccacacctggaccaaccaggtgtggtgagaggaagcatggagtaacagtttagagcaggaaac

SEQ ID NO: 277868 - DNA, 608 bp, Homo sapiens
ctgaatcctcaccaattttcccctctttactctccactcccctgcctagatgacagtgtgtactctgtcaaaggctagacttgaaaatggcaccttcctgtagacacttaggtgtcagaaagtgtgtgagacctagtgagagctctctccttggagtagttccatcccgtagtctcctggctactccctatgttagttccagggatcrggagggctgagaagctctcttgtggccaggattacatgattccatggtagggatgtgggctgctggaagtctcttacttaccatttagccacattgggaagtcttcctggctttcatctgaacctggccagaaggcttcttgcagagccctacagtcatccctctcctgattctgtttacttaagccaacatttaccagaaacatgcaagtcctggaatctgcatgggacaaagaaaaaggctcttttcaatatctgtatatattgggatatgacatcccaaacctttttatattaatttatattaattcatattaattacttgaaatgaaagcaccctactctgattaattgagcgacaacccaataaaactaaagagacatttatgggtggagacagt

SEQ ID NO: 277869 - DNA, 597 bp, Homo sapiens
taacacacaagccatttgcagatggcaaatctaaaagagctttgtaacacacgcctacttgagcttggggagttgcagtcaccctcccctagatgctgggctggagcccaaaagcgctcttcacctgcccatctgcatgctccccctaggggtttgagctgtgggtgaccaagcaggcgaatcacacccctattgcacgtcctgtgtggggaatcagggatctctcctgtttcagaaggatatattttctgtggggaaaataactggatggytgggggacagtggtgtattattgcatactttgtgaagtgtgaatcaagtgaatggattagttattaaacaataaaatttttaaaattctccttcccataaaagaagaaattagaatcaaccttgcgtttttttaaacatgaatattttatgcatctagcatatttttgctgataatattgatgaagggagagctctgcatttgtgcagatcttgattggttcagttgactttagatatgttccattctagatcctgaattattgccctcaatttatagaggagaaatgcactatgaagaaaacagcaaagctgtgagcaggacat

SEQ ID NO: 277870 - DNA, 513 bp, Homo sapiens
gattggttcagttgactttagatatgttccattctagatcctgaattattgccctcaatttatagaggagaaatgcactatgaagaaaacagcaaagctgtgagcaggacatgaatcttttcctctagcctctttatcgcttaccattttgactgccccttagtgcaggaatcttgggyaagtttcctagcattctccctaaaaaaaaattgttgttgttattttcttcttaaattaggataataaaaatttttttctaagggcttttaataagattaatttagatgatagatataaaatggataacagaatactctcattaggtagtggatcttatctgcttatgcagataaggaagggtcagcttttatactgggacatcagcttttggaaagattctttcaacaaatatttattagacatctactttgaggtaggtactatcctaggctcagaggatacagctttgaataaaacagacaaacactcatggaatgtaattccttgatataa

SEQ ID NO: 277871 - DNA, 643 bp, Homo sapiens
cacagtacatttgtgtccactgtatgtgccacaccagtggtccccaacctttttggtatcaggaaccagttttgtggaagacaatttttccatggacctggaagaggggaatgatrgttgcagcatgaacctgttcctgtttcaccctcagatcatcaggcattagagtctcataagaagggcacaacctagatccctcacatgctcagctcacactagggttcatactcctaggagcatctaatatgctgctgatctgacaggaggcagagctccggtggtaatgctcgctcacctgccactcatctcctgctgtgcggcccagttcctaacaggccacggactggtattggcccgtggtcaggggggtggggaaccctgagctacacaattaagttctaataattacagaaagttacggggctggctttactgtgaccagagctagactatggtttggtggcatgggttttatagatttcaggtatgttggtctacctgaagaaatacaactcacttgctagtgtgaatcacctgttgtgctttcaaagctcatctttatgacacaggcatgagaagtcacacggaaaccagaggctgtaatgcaagcagtacttgagatacaagcaacaatttttttaaa

SEQ ID NO: 277872 - DNA, 583 bp, Homo sapiens
ttgtaaactgtccaaggatgcactgctggtgagtagcagaaatggaatttaagagtcttcctaaaaggtggatagctttggtggggcagggagcttgaagaagagctggttgtgcttagatggtcagaggaaggagatgacagtaagtagaaagaaaaggaaggaaggtataaagatttttaaaaaataagatggtaggaaagaagtttggctagaccgctaaggccacctgagtgaggtaaggccagatggcaaattctgaaagcaagggagaagcatttagaactgaagtatctaacaactgtcagcatagaaactgcaggctggagccaccagaactgaatgtgattaagtgtagaaatgctaatcgttatgctactrtttgttttaaaggaacaatggctgggagatgaaggcctaggatcctaacttcccagggagctccaagatgcttgctacgttgcagaacagtggtgattttagagaaaccaagtccagaagagagagagaacccaagagtggaaggtgctgcacagtcgccttgctgaactagtaataagaggaaaaattaatggcacaggag

SEQ ID NO: 277873 - DNA, 608 bp, Homo sapiens
gatggcaaattctgaaagcaagggagaagcatttagaactgaagtatctaacaactgtcagcatagaaactgcaggctggagccaccagaactgaatgtgattaagtgtagaaatgctaatcgttatgctactatttgttttaaaggaacaatggctgggagatgaaggcctaggatcctaacttcccagggagctccaagatgcttgctacgttgcagaacagtggtgattttagagaaaccaagtccagaagagagagagaacccaagagtggaaggtgctgcacagtcgccttgctgaactagtaataagaggaaaaattaatggcacaggagggagattatcaggaatgggctgatccygatccagaaaactaaggcatgctgctttgctcatggaataaaggaacaattactgagactcctctgatggctgggagatcagagtgttgataggctgatgaagcaacagaacaggacactagctacagtcgagacggcaaccttctcagatcaaagaagccaataacccaactggagctacagagaaatggctgataaatttgcaggcagtgaccaggacttaaagggccagcccaggaaggaga

SEQ ID NO: 277874 - DNA, 535 bp, Homo sapiens
ttcaaactttgagaccattggaaccacccgggggcacttgttataaaggcgcattcccatgtcccggccctattcaaccccttattctgtagctcagggatgggacccaggggtctttgatttttataagaagcccctgatagcccacgttctgcaggaatgagtgttaattctaatgtcctgaagaaatgccagtttargcagttccattcaaaatcttcactgataaacaagtcaaccctaacacccctcagccctgggtatactcacaccctccttctttctctttccaacccatcttggaagcccccagtgctccatatgcctgtttgcacaggctattcctcagccaggagcacgtcccccaccttcacatcacagctgtgcacatgcccatgtagccaccgtgagtgctcttaagtcttagacttctggtttttcaaatagtcttccaaaaacccacgtccatcattggagaaataggatattctgtgttgccaaatgtccgggcacactgagagatggtacaaattag

SEQ ID NO: 277875 - DNA, 535 bp, Homo sapiens
ttcaaactttgagaccattggaaccacccgggggcacttgttataaaggcgcattcccatgtcccggccctattcaaccccttattctgtagctcagggatgggacccaggggtctttgatttttataagaagcccctgatagcccacgttctgcaggaatgagtgttaattctaatgtcctgaagaaatgccagtttaggcagttccattcaaaatcttcactgataaacaagtcaaccctaacacccctcagccctgggtatactcacaccctccttctttctctttccaacccatcttggaagcccccagtgctccatatgcctgtttgcacaggctattcctcagccaggagcacgtcccccaccttcacatcacagctgtgcacatgcccatgtagccaccgtgagtgctcttaagtcttagacttctggtttttcaaatagtcttccaaaaacccacgtccatcattggagaaatargatattctgtgttgccaaatgtccgggcacactgagagatggtacaaattag

SEQ ID NO: 277876 - DNA, 1062 bp, Homo sapiens
ttcatgctgggaatactctcttaaaaaaagcaagtgggattagacacagcttggggttcaggaggtaaacagatcaggttgccaatgaaataagtcaggcatctatcatttcacagagtgcctctatcatataagaactgcatgacctcaggaaagccaaataaccaccatgaggtttaggttcctcctctacaaaatgaagatgaagatacctacctgatgggacctgaatgggatgcctggtgctcattcagggcattattttcyctcccaggctgatgggatgctaagaccaaagattaggctcagttttatagtcctcctcggccaaaagttgtgttgttcaatatatagatttttctgccacctcctttactatctggttcctcgttttgttttttctactgtgtcaattctattatccttattattcctatgatttttattgtaaagtctttataatccaaccaggatggttgattgaaaggacaggttgaaaccacagtggatttwggaggcttgcctcgtgaactttagacccagaacaacttcaggaataaawcaggaaagccaagagaacccacacaccctctgaaggaagtggattgctcctgcaggctccaagaaacacccccacatactgtgagtgcccaaactgtggaggtgggaaagggggaatcttccatccccaaacacacaccctcagtcaggaacctgaaggtctagaacacgggagaagattctgaccttacctggagctgagtgaacttagaaagccaaccgaaatacaggagtagaggaagcagtgagaaaagccctgtggacttgctgggtcccctaggaagccatttctgccttgccttacaggggtccttggggagtgctggcagaggcagtgggaaaaggccagtgagagagaagaaaacctccagctgaactttgtaataatttgaactgatcgagaagtctcctggccagaactcaagagagggcgtgaatctggtgtgcagactccagaggagggggaagcacgaataccctatttgctttcacagctgggag

SEQ ID NO: 277877 - DNA, 549 bp, Homo sapiens
ggaggcttgcctcgtgaactttagacccagaacaacttcaggaataaaacaggaaagccaagagaacccacacaccctctgaaggaagtggattgctcctgcaggctccaagaaacacccccacatactgtgagtgcccaaactgtggaggtgggaaagggggaatcttccayccccaaacacacaccctcagtcaggaacctgaaggtctagaacacgggagaagattctgaccttacctggagctgagtgaacttagaaagccaaccgaaatacaggagtagaggaagcagtgagaaaagccctgtggacttgctgggtcccctaggaagccatttctgccttgccttacaggggtccttggggagtgctggcagaggcagtgggaaaaggccagtgagagagaagaaaacctccagctgaactttgtaataatttgaactgatcgagaagtctcctggccagaactcaagagagggcgtgaatctggtgtgcagactccagaggagggggaagcacgaataccctatttgctttcacagctgggag

SEQ ID NO: 277878 - DNA, 549 bp, Homo sapiens
ggaggcttgcctcgtgaactttagacccagaacaacttcaggaataaaacaggaaagccaagagaacccacacaccctctgaaggaagtggattgctcctgcaggctccaagaaacacccccacatactgtgagtgcccaaactgtggaggtgggaaagggggaatcttccatccccaaacacacaccctcagtcaggaacctgaaggtctagaacacgggagaagattctgaccttacctrgagctgagtgaacttagaaagccaaccgaaatacaggagtagaggaagcagtgagaaaagccctgtggacttgctgggtcccctaggaagccatttctgccttgccttacaggggtccttggggagtgctggcagaggcagtgggaaaaggccagtgagagagaagaaaacctccagctgaactttgtaataatttgaactgatcgagaagtctcctggccagaactcaagagagggcgtgaatctggtgtgcagactccagaggagggggaagcacgaataccctatttgctttcacagctgggag

SEQ ID NO: 277879 - DNA, 549 bp, Homo sapiens
ggaggcttgcctcgtgaactttagacccagaacaacttcaggaataaaacaggaaagccaagagaacccacacaccctctgaaggaagtggattgctcctgcaggctccaagaaacacccccacatactgtgagtgcccaaactgtggaggtgggaaagggggaatcttccatccccaaacacacaccctcagtcaggaacctgaaggtctagaacacgggagaagattctgaccttacctggagctgagtgaacttagaaagccaaccgaaatacaggagtagaggaagcagtgagaaaagccctgtggacttgctgggtcccctaggaagccatttctgccttgcctyacaggggtccttggggagtgctggcagaggcagtgggaaaaggccagtgagagagaagaaaacctccagctgaactttgtaataatttgaactgatcgagaagtctcctggccagaactcaagagagggcgtgaatctggtgtgcagactccagaggagggggaagcacgaataccctatttgctttcacagctgggag

SEQ ID NO: 277880 - DNA, 500 bp, Homo sapiens
cctccttaaataaaacaattatcagccaagaattttgtatccagtaaaactaagattcataaatgaagaaaaggttacagtctttttcagacaaacaaatgcagayagaatttgccactaccaagccagcaccacaagaactgctagaaggcgctcaaaatcttgaaataaatcctgaaaacacatcaaaacacatcgtctttaaagcgtaaatctcacaggacctataaaacaaaaatacaatttaaaaaatcaaggtaaacaggtaacacagcatgatgaatggaatggtacttcatatctcaatactaatgttgaatgtaaatggcctaaatgctccacttaaaagatacagaattgcagaatggagaagaattcaccaaccaactatctgctgccttcaagactcgtctaacacataaggactcacatgaacttaaggtaaagtggtagaaaaagacattccatgcaaacggacaccaaaagtgagcaggagtagc

SEQ ID NO: 277881 - DNA, 500 bp, Homo sapiens
cctccttaaataaaacaattatcagccaagaattttgtatccagtaaaactaagattcataaatgaagaaaaggttacagtctttttcagacaaacaaatgcagatagaatttgccactaccaagccagcaccacaagaactgctagaaggmgctcaaaatcttgaaataaatcctgaaaacacatcaaaacacatcgtctttaaagcgtaaatctcacaggacctataaaacaaaaatacaatttaaaaaatcaaggtaaacaggtaacacagcatgatgaatggaatggtacttcatatctcaatactaatgttgaatgtaaatggcctaaatgctccacttaaaagatacagaattgcagaatggagaagaattcaccaaccaactatctgctgccttcaagactcgtctaacacataaggactcacatgaacttaaggtaaagtggtagaaaaagacattccatgcaaacggacaccaaaagtgagcaggagtagc

SEQ ID NO: 277882 - DNA, 493 bp, Homo sapiens
aaaagctggttctttgaaaatataaataaaatggatagactattagcaaaattagccaagaaaagcagagagaaaatycaaataagctcaattagaaacaaaatgggagctattacaactgataccagagaaatacaaaagatcattcaaagctactatgaacacctctacatgcctaaactagaaaacctacaggaaatcgataaattcctgggaagatatagccctcctagcttaaatcacaaagaattaggtaccctgagcagattaaaaacaagcagcaagattgaaatggtaactaaaaaattaccgacaaaaaaacctcaggaccagatggattcacagcagaattctatcagacattcaaagaagaattggtaccaatcctattgacactattccacaagatagtgaaggagagaatgctcccaaaatcattctatgaagccagtatcaccctaataccaaaactaggaaaggacataaccaaaaa

SEQ ID NO: 277883 - DNA, 660 bp, Homo sapiens
gtctgtgtcctccaaaaatacacatgttgaaaccctaatccccaatgtgactgtatttggagatagggcctttaaaaaggtaattgaggtaaatgaggtcataagagtgggaacataatccaataggactggtgtccttataagaagaggaagagacatcaagaatgtgcatgtgcaaaagaaaggccatgtaaggacacagtaagaagagggccatgtgcaagccaaggagagcagcctcaggagaaaccaactctgcagacaccttgaccttsgacttccaggctccagaactgtgggaaatacatttctgttctttaagcaaccctgtttgtggtattttgttatggtagccctagcagactaatatacctactttgtaatattagaatcatttatttgcattataataactatatttttattttccataacttctttctgttccatgattgtccctttttcatttgattctgatcttgtttgctggctttgatatgtctcaaaatcattcgaagaataataattataagttttaaaaagttttttctgcaacaaggatttcattttaaaggaataaaaaaaagaacggtaagtaaataaatgtttttcttttctccagctattttcttggtttattttcatgtctctcttttctat

SEQ ID NO: 277884 - DNA, 537 bp, Homo sapiens
gagttgccttataaggcaactcagagccttataagggtctttttcagcccagttaatggtgtaattctcctcaatctgcagccccagacactggcccatgctgtgtaaacaatccttatagtccatctatagagcacagccttggttttcctactgatctcatttaagataagaaacaaactcagtgctagtgaaatttgcgtgcacaatttcctgagccattctagctccatttcattaaaggagaacatattctttaacagctttgtgtcaaggactcctkttgtgccatctgccatctggtctcagagatcaaccacctgcaccataaagataacaatcatgtgttctccattgcatagaaacacactcttgcaacatcagaggaagagtggctagaattgggaagctgcagcatcaaacataagcaagaaacctgtatgtaggtaggctgatatttctcagccaatgggattttataagacagaaaatttcaaacatatttttaaaagaaatagtagaaccaatgtattaata

SEQ ID NO: 277885 - DNA, 573 bp, Homo sapiens
ggctagaattgggaagctgcagcatcaaacataagcaagaaacctgtatgtaggtaggctgatatttctcagccaatgggattttataagacagaaaatttcaaacatatttttaaaagaaatagtagaaccaatgtattaatataagtgcaaacttttaattgcaaaatgagatcgtttaacaaacatataygcacaccttaatattaactctcgccatcataaaaggaaagacatgttaatggaaaaaaaaaaggaacagtataattgcagcagttctttaagtggaagtgttcttatttttcttttttactgggtttggccctgtggttgatggcttagtcttggctgttgcctctggaagcctcctgcctcatcctcttcagtaacacgctcagaaggcttctagtggtggttgcacagctacttctgttcagtcctgggtagtaaacagtagaaacatttaggtttttttcctgcttcttgaagtaactgttacaggccaggtccaggtcagttctgcctgtgtgcagtaaatcaatcattgtgatataggttttgcaaaagagaaaa

SEQ ID NO: 277886 - DNA, 588 bp, Homo sapiens
aatttaaccagagtagctctgatttagacatgaagcttatcagaattcacttaaagagatgattctactactaaagaaagcttaaacatcactgtcgatgccatttcttcatttaaagatgttaaaattatttctatgttcataaaatgagcagagaagtgatgctgagctagagccctggccatcctactgagagcctttgctctgggcagatcgatttgaaaaaaggcactccctctgcatggtggcatcccactggcttgaccagcaaaaggtgcctttgtgtgacaaaataagtcacccttttctttaaaaattgtagcccttgctagggcacaaggcagacaagtaaaaacaagctagacctcatccctcctcaygcctcttccacttaggagcctttgtgcaaagtcagaaacacacagtggatctttgaccctacactgatgtaccccagggtcccaaataaggcatttaatatgaccatatctgcttagtaaaattaaatctattcactttatctctttctgctaatgagttgatattgagttatataacactatcctaatagattgacttacagagatt

SEQ ID NO: 277887 - DNA, 1161 bp, Homo sapiens
ttggtctcgcctataatggttgatttttacagctctcagtttcatttaaaaacttcttcctttccccttctcaagccctcctgtaccctttttggcacctgtagcttctgtgaaccgactatatgtgtggctttttacttattaaataatcatctgcttagctagttttggtggcactaatagggaaaatattttcattataaattctatcaatattttagaataagctattggaaaacatctgcaattttctatcacaattttcaacttattctctctgaaacagaaagtaatgaagagaaaaatggaaatactgaaataaacatttggggtgtcaatttccttgaaaatattttattctcccttcagtgtgttgctgaagcagtacacagatgtgctcttctggaatctatgtgtttaatgatttgtgtgatgagctgtatctattaagaagctgacaatggtagtttaatcttcaacgatactgctctctctgtctcatctctcattctgcatgttgtaaaaaaaggagargtgatttggagaattttcgaggcttattatgtatttcaagtgatacwttggtctcgcctataatggttgatttttacagctctcagtttcatttaaaaacttcttcctttccccttctcaagccctcctgtaccctttttggcacctgtagcttctgtgaaccgactatatgtgtggctttttacttattaaataatcatctgcttagctagttttggtggcactaatagggaaaatattttcattataaattctatcaatattttagaataagctattggaaaacatctgcaattttctatcacaattttcaacttattctctctgaaacagaaagtaatgaagagaaaaatggaaatactgaaataaacatttggggtgtcaatttccttgaaaatattttattctcccttcagtgtgttgctgaagcagtacacagatgtgctcttctggaatctatgtgtttaatgatttgtgtgatgagctgtatctattaagaagctgacaatggtagtttaatcttcaacgatactgctctctctgtctcatctctcattctgcatgttgtaaaaaaaggagaagtgatttggagaattttcgaggcttawtatgtatttcaagtgatac

SEQ ID NO: 277888 - DNA, 608 bp, Homo sapiens
ttgtgttgtggccataaacaagacatttataagtccatttatgatgtggctctcagtagcacatccaatagagaaggtaaatccatatgcagaatacatgtctattctagttagggcaaaacactgccttctctgtcacataggggatataatataaccgatttactactagttagtccgttggccctcccaggaagtggtatcctatcaggaatctggggttgctcaccattgcrtgcaaaatgggttctcagcaatggcaaaggccacgtcatcctggtgaggggaaatccttgttactgtgcttattcatgtgtcatctccattcctgccaatacaatcatgtagttcataaatcattgagtaagcactgaaataaattgacctccactgggcaggaaattatatccacctggtcttttaaagcctcttctgcctattctgggtaattttttggtggacaagaggatatatctttcaatgttctgaccccaggaggactaggctctaccatttggaattctgaccttgtataatatgatataaatgttgaagagaatttaggaaagcttttagatgtgttggtcatggtctttcaagaagttgat

SEQ ID NO: 277889 - DNA, 608 bp, Homo sapiens
ttgtgttgtggccataaacaagacatttataagtccatttatgatgtggctctcagtagcacatccaatagagaaggtaaatccatatgcagaatacatgtctattctagttagggcaaaacactgccttctctgtcacataggggatataatataaccgatttactactagttagtccgttggccctcccaggaagtggtatcctatcaggaatctggggttgctcaccattgcgtgcaaaatgggttctcagcaatggcaaaggccacgtcatcctggtgagggsaaatccttgttactgtgcttattcatgtgtcatctccattcctgccaatacaatcatgtagttcataaatcattgagtaagcactgaaataaattgacctccactgggcaggaaattatatccacctggtcttttaaagcctcttctgcctattctgggtaattttttggtggacaagaggatatatctttcaatgttctgaccccaggaggactaggctctaccatttggaattctgaccttgtataatatgatataaatgttgaagagaatttaggaaagcttttagatgtgttggtcatggtctttcaagaagttgat

SEQ ID NO: 277890 - DNA, 555 bp, Homo sapiens
gttattttatgtaagtcagaggcctaaaaggtgaagaaaacacaatccttgctttcaaagactccagtctagagcagagttcattccttatgacaacccacattaagaaaaaatacaaaaattagctgrgtgtggtggtgcacacctgtaattccacctactcaggaggctgaggcaggagaattgcttaaacccaggaggtggagattgcgccactgcactccagcctgggcaacagagcaagaccccatcttaaaaaaaaaaaaaagaaaaaaaaagacacttacattgcagttcagcacatgtataaatgtgagtgtaatatattaaaccaatatttaaaagcacaaatatgcaaaatgttccaatcagtttataattattaactcaattaattataactattttaggaaacaggtcctattatcattatttttttcagattaggtaactgaagtacagaaaggttaagtaacttccccaaagtcaaccatttactttgttaatgagagtaaatctgggactggagaccagagagtatggtttaaaaattca

SEQ ID NO: 277891 - DNA, 608 bp, Homo sapiens
gtcctttctacactaactctgatggttctatggaaaggatattgayccctctagaacagactggcacaaggagaccacttaagacacgtgtagttctccagactgagatgatggtagtgtcagctgaagaaaagaggctggatttaagagacactgttgggggacttagattagcagaatagagcttcaactaaaaatttctgccaatgaccacctcattatcctacctcttcaatactctctatcctgaggtgggcagttccaatgtaacatgctgggaatcccacgcctccttctgaggaaaaggaactcagttcataggcatttaataagacacataaaaaaaagatcattcctcttccctcttacctgtgagctttgtgaagacaaacaccatgcccctatccaactgtttctcccagtacctgaaagaatattgaagatgacacactcttcttaatgtttgaatgaatgaatgaatgaatctgaatgagtgacaaaactgggatgcaaaaactctccacagattggaaaaaagcattgcatttgtttaaaatgttcttagagtgtaaagactactttattttattgtgaggtgggggaagtga

SEQ ID NO: 277892 - DNA, 608 bp, Homo sapiens
gtcctttctacactaactctgatggttctatggaaaggatattgacccctctagaacagactggcacaaggagaccacttaagacacgtgtagttctccagactgagatgatggtagtgtcagctgaagaaaagaggctggatttaagagacactgttgggggacttagattagcagaatagagcttcaactaaaaatttctgmcaatgaccacctcattatcctacctcttcaatactctctatcctgaggtgggcagttccaatgtaacatgctgggaatcccacgcctccttctgaggaaaaggaactcagttcataggcatttaataagacacataaaaaaaagatcattcctcttccctcttacctgtgagctttgtgaagacaaacaccatgcccctatccaactgtttctcccagtacctgaaagaatattgaagatgacacactcttcttaatgtttgaatgaatgaatgaatgaatctgaatgagtgacaaaactgggatgcaaaaactctccacagattggaaaaaagcattgcatttgtttaaaatgttcttagagtgtaaagactactttattttattgtgaggtgggggaagtga

SEQ ID NO: 277893 - DNA, 654 bp, Homo sapiens
ttttcagcttatttcagagagtacagtgccatagaactaaaataaaacaaacaagtaagaaaccataatgtaagagtgattgatagttggaaaacatgtcaatggtatttacagaaaacccatggtgggcagagccctttgccagctaccatgaaaaggtaaaaataaaatggaaaatagattttcttccttcaaagtgcctatagtcaaatagaagaaatacatataaacaaatgtatgtgaatgtacaaagagcacatacatttcaaaaagtcagagcatgcaaaaccaattacaatcaaacacaggagtttatgcagaggcatccgactgacagggtgacttcatttgaaatggtcccaaaacttccattgccaggcacacaagcacagctgaatgacaatattgtccacaacagaaacttgttcattttctgtcaaagcatttatttgttgtgagataggacaggagttaacatagtttgatcacatgataaaaggtttcatcaaattaatcccataattgattarctcaccattctgttgattgttttacaaaggctatgggttttatttcaacttaaaaaaaaagatagtttatagacttttaactcttaatattttaaaaaagaacctgaaagatttttttaagttt

SEQ ID NO: 277894 - DNA, 549 bp, Homo sapiens
gaaagatccccagccatggaggcagggacccagtttaaggtcaggcaaagrcgttttgtgagtcaaagtttcaccgtctgttcaaggcggaagctctctacagctccaagtgctaactttataattacttgggtcagacaaaaatctttccctggcacatattcacatgtctttcaggtagagcagagactgaagatcttaaaaccaagatgaacatacatgacaaagtcacgggggcattactcagtgaggggtcttcaggaagttgaaaagaatttctgagattggagtactaagagtcaattctggcatcttgttcccttcctcattttatgtgctcaaaataacgagcagatgtaatgtaaaataatgtaaaataatttttatgttgtaaaactaatgcataaaaattgcattgttttaacttcgaacatgttaatatgttaatttctacaagtcagaatttatttgcacacatgcttacaaatcctgacacatgactaatttttcatgttcgactagacatttgttatgtaatctgttttttat

SEQ ID NO: 277895 - DNA, 549 bp, Homo sapiens
gaaagatccccagccatggaggcagggacccagtttaaggtcaggcaaagacgttttgtgagtcaaagtttcacygtctgttcaaggcggaagctctctacagctccaagtgctaactttataattacttgggtcagacaaaaatctttccctggcacatattcacatgtctttcaggtagagcagagactgaagatcttaaaaccaagatgaacatacatgacaaagtcacgggggcattactcagtgaggggtcttcaggaagttgaaaagaatttctgagattggagtactaagagtcaattctggcatcttgttcccttcctcattttatgtgctcaaaataacgagcagatgtaatgtaaaataatgtaaaataatttttatgttgtaaaactaatgcataaaaattgcattgttttaacttcgaacatgttaatatgttaatttctacaagtcagaatttatttgcacacatgcttacaaatcctgacacatgactaatttttcatgttcgactagacatttgttatgtaatctgttttttat

SEQ ID NO: 277896 - DNA, 240 bp, Homo sapiens
gcatcgttttgttgttttttaaatttactgtatcagaagcttgtggagaayggtgattctaaagcttttttctaacttaatattttacttggcattctcatgacataaatggcagggtggaagtaaaaaaaagtgaaagagagaatgaaggaagagagggtaacagggaggaagaaagagaaaaaaagaaaagaagagacagataaaataagaacatggaccctttgttgcaaaggagaa

SEQ ID NO: 277897 - DNA, 550 bp, Homo sapiens
aatgccaaaagcaatgaaggaattctggaatcctgcagggcatcagtgacagaaagaaaaacgatgaaagtacaaccaaaacattgttttttcagtgctaaagtttatatcaatgtaacaatttcttttaatgataagagttttctcaagatttcctttttaaagttcacttctcactgctgcttatcaacatgtataacaatccaaatgagattgatacagctgatgtcacaagtctcttgttaaaatttttacagatttaggaggtatttttaatggaaaagattgcacagaagtaaatttatggtttttcctagagccatayacatagaaggacaaaacacataaaatgacctatattcaatgcatatatctacatatacagaatgcaaatgcagaattcaaattgcatgtaccaatccattaaacattctttgctatgttgtattttcccatacaagaaatgaaacatgtagtagacaggataatggccacctaatgatgggcatgtgctaatcttcagaacctgggatatattatgttatctaac

SEQ ID NO: 277898 - DNA, 648 bp, Homo sapiens
ttgcatgtggttttatagggtcttagagttctcagatacatatctgccactcttatatagatttggagatttcttaaatccatcaatcaagaaacaatctagaacatcagagtcatttactaatcaggtacttgcaatctcatgggaggtgataagccacataaacatgaaatcataaacaaaccacaatttgtcatgtttgtgtaaataaatacatcagaattgttaaactaaagcagcagagccaaaattgagctatgcaataaaaatgggcaaataaaaaagtcaacagtgtagtatagcaaactccattcctattgtcactgctyattatctctcattagattatggtaaaatcctcttggctccctgccttcagtgctcccgtcactaagatatattcttttctttactactaaattaatcataatgaggcagagttctgtcttgcacaatgcttggcacagaatagggtctccagaaacgcttgttaaatgaacaaatcaatcagtgattcctatctatcctacacaaaaatgtcagtgtctcattatttcctatttatctttctaacattaaatctcattgtatctcattattgcttattatgctcatatgctccagccctgctcccattcttatctctta

SEQ ID NO: 277899 - DNA, 588 bp, Homo sapiens
cactgcttattatctctcattagattatsgtaaaatcctcttggctccctgccttcagtgctcccgtcactaagatatattcttttctttactactaaattaatcataatgaggcagagttctgtcttgcacaatgcttggcacagaatagggtctccagaaacgcttgttaaatgaacaaatcaatcagtgattcctatctatcctacacaaaaatgtcagtgtctcattatttcctatttatctttctaacattaaatctcattgtatctcattattgcttattatgctcatatgctccagccctgctcccattcttatctcttactctattctattccttcatttggtatatccttttccccattccagcaagtttaccttatccatatttcaaagcctttctcaaataccaatagccctttctctctgaacatccaagcaagaaataataacttttcctcccattcttcatacaaatttatctttaccttcctattgcttactgtttacttgatattcaagcaatttgtgctcatatctcccaattgtatagtaaaggtcagggtcctttgaggcagacaacag

SEQ ID NO: 277900 - DNA, 600 bp, Homo sapiens
gaaatcagtgtagtgtggggcagcagaagggaagtgacaggtcaaagaaaataggagagaaaaggagagagagctacccaagtaaacaggaaaaggggaggaaatacagggcaaaagcagagagcaggggaattggcatgacaagaaagtggtgaaacacagaggattccaccagacaacagagagcccggtagagaagagtgggctaggataaagagacaggaaacaaatggattaagacatagagtagccattgtcagttacctgggtaagaaaagattggtggtctaaataaaatgcagattgttcatttacaattctgactgtttaaattatttatggtacaccttggtgcttcacttaatcatrttaagttacagttgtaatcttattaattacttgcaaccagctttctcaatgtaccatgtatagaggacagcttgtcaaggggtagaagtactatagcttcacttttaatccagtatcatccagtacacaaattagccttacactgttagaatcttcctgatgatgactggctgaactaagcattagtcttgacaatacaagtactgctgtgcccatttacagaaagggaag

SEQ ID NO: 277901 - DNA, 574 bp, Homo sapiens
gcaaatgaaccccaaagccagcagaagataagaaaaaaacaaaatgagaggtgacttgaagaaaattgaaatatgaaaaaccataaaaaagatccacaagtccaggggttggttatttgaaagaataaatagatagattgctgggtagactaataaagaaaaaacatagattcaaataaatacaatcagaaagacaaatttttttccaatttttattttaggtttagagggtatatgtgcaggtttgttacatgggtataaatcattctaccataaagacacagtcaattttgttttaaagaaattaagatrcaagcagaaaacttttctgttttacccacatattcctcatttctggtgtttttcactccttcctgtagatccatgctcccgttgggtatcatggttttccacccaaaaaactttatcatttattgtaattcaagtcagctgttgatgaaagttcttagcatttgcttatttgaaaatgtccttattttgctttcatttttaaagagtattttctttgcatttagaattctaatttgacaggtcttttctttcagtgcttcaa

SEQ ID NO: 277902 - DNA, 501 bp, Homo sapiens
aaagagttctattaataactatcaggacaacataaactgagctgttccagaaaataatttgtaagatcactcttgttaggtagagagagggtgggctacagagaaatacacatcaaaataagtgtgtataactgagaaacagttatgaatgaggaaacaatggtgtgacargaaagttaagatgaaatgctagtacagtcacaaggtcacagaagtccacaggtgaagagagtcaattgagctgctcagagacagaggaagaattgactggaagctaaaatgcttaaccttcaagacaccttccaagattttagcaatttgttcacatgattctatatctcataaagtaaggaaaagtggtcgggcatggtggttcatgcctgtaatctcagcactttgggaagtggagatgggaggattgcttgagcccaggagttcaaggccaagagctatgattgtaccactgcactccagcctgggtgacagactgagactctgttt

SEQ ID NO: 277903 - DNA, 569 bp, Homo sapiens
aaaaggaagattagtagcattttgggagcttggtgaatcaaayagattaagtatgaaaaaaacccatttgaataggcatgattaaaagtcagtcatattaattcgctaactcacataatttaagtaaatatgatactactttggggtcagtctgtgtgattagaaaaattagactagaatccatataacctttattcagatggcagagaaagctaggggagggggctgagcccctgacatgttgagcaggcaaagctcaaaatatgtgtgactgggcacagggaattatggggtcagaaagtggagtcttctatgtggcatgttttggatttttcttcctccttctgtgtctaaaattctttatccacaagatctatccttatatttgtagcactggctcaatttttaggcataggttaaaagctcatgactacaggagaaagaagaaagatgggtgaaggggattgtttctcctattgaagatgaaacatttttctcatagtttaaatatacaaccttcctatgtgtcttctctttaatgccaagttagcacaggtcaaagaaacaaa

SEQ ID NO: 277904 - DNA, 569 bp, Homo sapiens
aaaaggaagattagtagcattttgggagcttggtgaatcaaatagattaagtatgaaaaaaacccatttgaataggcatgattaaaagtcagtcatattaattcgctaactcacataatttaagtaaatatgatactactttggggtcagtctgtgtgattagaaaaattagactagaatccatataacctttattcagatggcagagaaagctaggggagggggctgagcccctgacatgttgagcaggcaaagctcaaaatatgtgtgactgggcacagggaattatggggtcagaaagtggagtcttctatgtggcatgttttggatttytcttcctccttctgtgtctaaaattctttatccacaagatctatccttatatttgtagcactggctcaatttttaggcataggttaaaagctcatgactacaggagaaagaagaaagatgggtgaaggggattgtttctcctattgaagatgaaacatttttctcatagtttaaatatacaaccttcctatgtgtcttctctttaatgccaagttagcacaggtcaaagaaacaaa

SEQ ID NO: 277905 - DNA, 555 bp, Homo sapiens
tcacctgtgctcaagcaatcctcttacctcatccttctgagtaactgggactaaaggcatgggccactatgccaagctaattatttttatttttatttttgtagagaccaggtctccctatttagcccaagctggtctcaaactcctggcctcaagtgatcctcccatttcagcctcccaaagcattgggattataggcatgagcctcagcacccagcccatcttaaccatttttaagtgtagagtccaattgtatatagtatattgagattgttgtgcaacagctctccagaactttttatcttcaaaactgaaatcttatacccattaaataacaactccccatttctgtctcccctcagttgctgacaaccaccattctatttctgtctaaatctgactactttacatgcttcatgtaagtggaatcatacaaaatttgtctttacgacattgacttatttcacttagtgtaatgtcctcaaagkccatccatcttgtaacatgtgaaaggctttccctcctttttaaggaagaaaattattccattttata

SEQ ID NO: 277906 - DNA, 555 bp, Homo sapiens
tcacctgtgctcaagcaatcctcttacctcatccttctgagtaactgggactaaaggcatgggccactatgccaagctaattatttttatttttatttttgtagagaccaggtctccctatttagcccaagctggtctcaaactcctggcctcaagtgatcctcccatttcagcctcccaaagcattgggattataggcatgagcctcagcacccagcccatcttaaccatttttaagtgtagagtccaattgtatatagtatattgagattgttgtgcaacagctctccagaactttttatcttcaaaactgaaatcttatacccattaaataacaactccccatttctgtctcccctcagttgctgacaaccaccattctatttctgtctaaatctgactactttacatgcttcatgtaagtggaatcatacaaaatttgtctttacgacattgacttatttcacttagtgtaatgtcctcaaaggycatccatcttgtaacatgtgaaaggctttccctcctttttaaggaagaaaattattccattttata

SEQ ID NO: 277907 - DNA, 546 bp, Homo sapiens
aatacctgttatgaacataaacacaaaaatcctcaataaaataccagcaaactgaatccagcaacctatcacattaagacataatgattaaagaggatttatcctgggaatgtaagattgggttaatatttaaagagaatttaatacagtacatcattcagtagaacaacaaaagctgcatgatcatgtcaaaacacacagaaaaagcattagacaaaatccagcacactttcaagataaaaagaccaagaaagtagaaataaaagggaacttccacgacctgataagtggcatctatgaaaaagccagagctaacatcatgtttaatgctgaaagattggatgctttccccacaagatcaagaacaagacaaggctatccatattcaccactctgattcaactactgttcaatagaacatttagacaaaatataaaaaaaagatattcagattggaaaaaaggagcaaaattatctttattctcagatgacatgatcttgtrtatagaaaatcctgaagaatacatatgtgcacacacacagaca

SEQ ID NO: 277908 - DNA, 1157 bp, Homo sapiens
ggtcaatgtgtacataaaatgatattcaccatcatcaatcaccagggaaatgcaaatcaaaagcacaatgagaaagtacttcaaacaccctaagatggctaaactcaaatagatagatagataataacaagtgttgatgagaatgtggagaaactggaatcctcatacattgctgatggaattataaaatggtccagccgcattggaaaacagtttgacaattcttcaaaaagccaaacagtaagttagcatatttgaactcctagccatatacctaagagaaatgaaaakgaaattttttatacaaatgttcatagcagcaatatccaaattgtgaaaacaacccaaatgttcatcaagtgatgaatgaatgaataaacaaaatgtggtatgttgatacaactaaatattattcaaccataaaaagcaatgaaatttgaaacatgctcccacatggatatcccttgaaaacgttattttaagcaaaagaagccagacacaaaaagccacatattgtatgattccatttatatgaaatagccagaataggcaaawatgaaatttgaaacatgctcccacatggatatcccttgaaaacgttattttaagcaaaagaagccagacacaaaaagccacatattgtatgattccatttatatgaaatagccagaataggcaaatctacaaaaacagaaagtagactatcgattgccagggactgaaggaaaggccaaggagaaaatgactgctaatgtgtacgaagttttttgggggagtgatgaaaatattctagaattagatagcaatgaacaatttactgaatatactaaaaatcaccacattttatgttttaaggaagwgaattttacggtatatgaattatttctcaataaagctgttatttaaaaacaatgaataacttcacattaatttggaaggcataatataaaagacagacaataacagtgttgtaaggatatggataaattggaaccctcgaacactgatggtggtactgtaaattggtgcaactgttttggaaaatactttgatagttcctcaaaatgttaaacatagaattaccacatggcctagcaattccactcctaggtatatatccaagagaaatgaaaatacatgtccccacaaaaaacttg

SEQ ID NO: 277909 - DNA, 602 bp, Homo sapiens
atgaaatttgaaacatgctcccacatggatatcccttgaaaacgttattttaagcaaaagaagccagacacaaaaagccacatattgtatgattccatttatatgaaatagccagaataggcaaatctacaaaaacagaaagtagactatcgattgccagggactgaaggaaaggccaaggagaaaatgactgctaatgtgtacgaagttttttgggggagtgatgaaaatattctagaattagatagcaatgaacaatttactgaatatactaaaaatcaccacattttatgttttaaggaagtgaattttayggtatatgaattatttctcaataaagctgttatttaaaaacaatgaataacttcacattaatttggaaggcataatataaaagacagacaataacagtgttgtaaggatatggataaattggaaccctcgaacactgatggtggtactgtaaattggtgcaactgttttggaaaatactttgatagttcctcaaaatgttaaacatagaattaccacatggcctagcaattccactcctaggtatatatccaagagaaatgaaaatacatgtccccacaaaaaacttg

SEQ ID NO: 277910 - DNA, 528 bp, Homo sapiens
aaccaaggttttcagtgtttgtggatggatatatagacatctgtccctctttgagtcattgggaatttgacatcgtttcccagagccaataactgtttgtcctgttgggaagcctctgtcttgcaccatcagccacatagcaatctcctctgctcagcagtcacgctccctttcatccactcctgatgaggtcatttcctgcctggctgaaccaggggcttagttgagagtgagctggccaagattcaatcagggtaagsctgaagctgtgtgcttgaactggggaaacgcttcaggagtcacaggagcgatctcttccatgtgcggatgggatgcatttaacccttgccattgacagtgacagctttaggtcaggatggaagcaaggcttgaggacacaactgtgggctagaaaccagaacacctgggtgccagtgctggcttccacgataaatacctggggctgttaggaggatcaaagctttgggcaggaggcaggtgtggggattctgagggaagttttatttt

SEQ ID NO: 277911 - DNA, 528 bp, Homo sapiens
aaccaaggttttcagtgtttgtggatggatatatagacatctgtccctctttgagtcattgggaatttgacatcgtttcccagagccaataactgtttgtcctgttgggaagcctctgtcttgcaccatcagccacatagcaatctcctctgctcagcagtcacgctccctttcatccactcctgatgaggtcatttcctgcctggctgaaccaggggcttagttgagagtgagctggccaagattcaatcagggtaaggctgaagctgtgtgcttgaactggggaaacgcttcaggagtcacaggagcgatctcttccatgtgcggatgggatgcatttaacccttgccattgacagtgacagstttaggtcaggatggaagcaaggcttgaggacacaactgtgggctagaaaccagaacacctgggtgccagtgctggcttccacgataaatacctggggctgttaggaggatcaaagctttgggcaggaggcaggtgtggggattctgagggaagttttatttt

SEQ ID NO: 277912 - DNA, 617 bp, Homo sapiens
caaaggaatgtttatttcatccatgcaacggaattgtatctagccgttgaaaatcaagttgcaaaaaatattcagargcatgggaacatgtttaccatatttgttcaatgcaaaaaggaagctaaatatctcttctatattttatctcagttttattttaaaaatgaatcttacaatacagaaaaagatccatataaataaatatacatacatacccatgtactcatgtatgtatatgaaacaaatacacttttatatctatgtggtagaaatgctagtgatttaatattttctttgtctttattttctgaaattcttactatttatgtgtatcattttaatcagaaaaaaaatacaacaaatactattttaatagaccccgatgtcactttcctccttatctcatattactttccaagctattacttttatgtcaagttggaaatcaagaaggccagtaaatcacccagttgagggtcttatatgcaccctacctaaggcccaagtgcctctccggagagtctctctctggtgttaagttgttgtttaacccatacgatcatgctgactacctcctccactttcttctccttcccctccttttcagggagtagatg

SEQ ID NO: 277913 - DNA, 632 bp, Homo sapiens
aagggtttgtgatgtagacaatctagggtatttggattttcttctttcacgagcgggaaataatggaaacttttaaatcagaagagcaatatgaccttagcaaagtgtcgcttagtgaagtatctctagcagcagtattgaagaaagacaaatgagaggaggacactggtaactcctgaaaagttcagcaaagaggatgaggaatggatccaagataccacgaccgaagtggagatactggtttcatgcatgagygcatgactgtgtgtatgtgctcaaatgtgaaaggagagagagaggaactagtgagaagtcctggatttttttgctaagggaattattgggattcaagcactgccaacccagtatccactcacctatcttctttcttttttgatttacttacttcttcaatttatttttaattgacaaataaaaattgtacatacctgtcatgtagattatgttttgatatatgtatagattgtggaatgactacatcaagctaattaatatatacattatctcacatacttatttttgtggtgagaacacttaaaagtaactcagcaatttttaagaatacaatacattgttagcaacaatggtattgtcagttagttatactcacc

SEQ ID NO: 277914 - DNA, 575 bp, Homo sapiens
tgactctggctccttcgtgttttctgttaagttggggcctaagtttttctgccagcctttgcggaggaaatgcagcttccctggcacactgcccggtcaagggacgttgaatccattgcaatcagcagttgaagatccacactacaggccatgttcttaaaataagtggctccaggacttccaagaggcagaaggggcttcagctggccatgggcaggatccaagtggagcttcatccctgcagagcaatgcctggctctcagcggaggcagtctggagcagggcttctacccttttcagctcatagattactttggaatctgatgaacactgggagccttctccttagaagaacatacatatgcacgagaatgagacaattacataacattccttggstttcacagatgctgaagccaatgacttgcttgaagcctggaagagggtgttgacctggagaatcctaaaggccaaaatttagagaaaatggtgccagtaaatgaattcacaaggagaaatgcttccttgccaactcacttctccagattattgagtgcatctatctgtttgctttt

SEQ ID NO: 277915 - DNA, 573 bp, Homo sapiens
gggctattttcactggggaaggactggtggtgaggagtggttgggaaacagcgagcagagaacggcagcatgtctgtgacattccatcaggagcgcctggagctgcacagcagatgaaacaggcaatgatgggtgcttctgtgatggcccccacgcccaccsccgaccagcagaagcctgcccttctgcagaaggcttccagctcactgccccatctttgctcccaagtcactaggtgtaaaaatggacatttcttgaacaactacgtcttgccaagctctgggctgaatgcttcatatacatcattccactcaattatataattataaaatacatacatatatgcattatattgcataattataattgttatatatacgttatgaacatgtaatgtattatatacatcacctcacccaattctgatatataattaaacttagtatatatacaatatgtctataatgtattatatatatcaccccatccaattctcatgtgtaattaaaattagattttatatacattatatatatgtatataatgtattatatattaccccacccaatgctg

SEQ ID NO: 277916 - DNA, 573 bp, Homo sapiens
gggctattttcactggggaaggactggtggtgaggagtggttgggaaacagcgagcagagaacggcagcatgtctgtgacattccatcaggagcgcctggagctgcacagcagatgaaacaggcaatgatgggtgcttctgtgatggcccccacgcccacccccgaccagcagaagcctgcccttctgcagaaggcttccagctcactgccccatctttgctcccaagtcactaggtgtaaaaatggacatttcttgaacaactacrtcttgccaagctctgggctgaatgcttcatatacatcattccactcaattatataattataaaatacatacatatatgcattatattgcataattataattgttatatatacgttatgaacatgtaatgtattatatacatcacctcacccaattctgatatataattaaacttagtatatatacaatatgtctataatgtattatatatatcaccccatccaattctcatgtgtaattaaaattagattttatatacattatatatatgtatataatgtattatatattaccccacccaatgctg

SEQ ID NO: 277917 - DNA, 299 bp, Homo sapiens
cttccgctgggctttttctytggaggggctgcaagtgttgggtggactatggggcggagagggaggagttgggtgggtgtcgccttcggttcgacgttgagactttggggtgagtgtgtgcaggggccgcggttccaccctcgggtgcccgagcacgccgggcttagaaggctttcctgccggagagaagcagcatgcgcatctgctgctcgttaaagagcccaggaggggttcttcactggcggtcccaggtcccgcgcgggcgtcttcggggcacggaaatggtgccggatgatgtg

SEQ ID NO: 277918 - DNA, 524 bp, Homo sapiens
caaaaagcgacggagccgctagtaggtgggagctcacctttgatgtttattttattactttccaccatttgtgttgaaaacgtacacaatcctctcttatctttattcagggagttttgaagccattcacaatggggcgggcaacatgacagccccagccacagctctgttatttttgtatttggggaaggatcgcgttcggagattagactgactttattaagtatgcgcctcgggagccaggtggggaatggctkctttttgggagatgagcctttctggaggggtctgctcagctctagccttggagttgatggttcactagacctggagagggaagtgggatgagacaaatatgtatatctatatatatatagcgaggtaaagaggcttggatttggccagggataaaaggcgttcgtaatgaatgtttttctctcttgaactctggggttgggcagggcaggagggcacatgactatttgatggggaaggtaaagccaaggaggcttgaggtgggaccc

SEQ ID NO: 277919 - DNA, 524 bp, Homo sapiens
caaaaagcgacggagccgctagtaggtgggagctcacctttgatgtttattttattactttccaccatttgtgttgaaaacgtacacaatcctctcttatctttattcagggagttttgaagccattcacaatggggcgggcaacatgacagccccagccacagctctgttatttttgtatttggggaaggatcgcgttcggagattagactgactttattaagtatgcgcctcgggagccaggtggggaatggctgctttttgggagaygagcctttctggaggggtctgctcagctctagccttggagttgatggttcactagacctggagagggaagtgggatgagacaaatatgtatatctatatatatatagcgaggtaaagaggcttggatttggccagggataaaaggcgttcgtaatgaatgtttttctctcttgaactctggggttgggcagggcaggagggcacatgactatttgatggggaaggtaaagccaaggaggcttgaggtgggaccc

SEQ ID NO: 277920 - DNA, 524 bp, Homo sapiens
caaaaagcgacggagccgctagtaggtgggagctcacctttgatgtttattttattactttccaccatttgtgttgaaaacgtacacaatcctctcttatctttattcagggagttttgaagccattcacaatggggcgggcaacatgacagccccagccacagctctgttatttttgtatttggggaaggatcgcgttcggagattagactgactttattaagtatgcgcctcgggagccaggtggggaatggctgctttttgggagatgagcctttctggaggggtctgctcagctctagccttggagttgatggttcactagacctggagagggaagtgggatgrgacaaatatgtatatctatatatatatagcgaggtaaagaggcttggatttggccagggataaaaggcgttcgtaatgaatgtttttctctcttgaactctggggttgggcagggcaggagggcacatgactatttgatggggaaggtaaagccaaggaggcttgaggtgggaccc

SEQ ID NO: 277921 - DNA, 524 bp, Homo sapiens
caaaaagcgacggagccgctagtaggtgggagctcacctttgatgtttattttattactttccaccatttgtgttgaaaacgtacacaatcctctcttatctttattcagggagttttgaagccattcacaatggggcgggcaacatgacagccccagccacagctctgttatttttgtatttggggaaggatcgcgttcggagattagactgactttattaagtatgcgcctcgggagccaggtggggaatggctgctttttgggagatgagcctttctggaggggtctgctcagctctagccttggagttgatggttcactagacctggagagggaagtgggatgagacaaatatgtatatctatatatatatagcgaggtaaagaggcttggatttggccagggataaaaggcgttcgtaatgaatgtttttctctcttgaactctggggttgggcrgggcaggagggcacatgactatttgatggggaaggtaaagccaaggaggcttgaggtgggaccc

SEQ ID NO: 277922 - DNA, 1154 bp, Homo sapiens
gtttagaagctgggcctctgccgccaccggtgtctttagagatggggacatccaagtcctctagggctttcactggagaaatgcgaaacactgctaggactcagctaccctgctactaaactagcacttcagttgacgtktctccaagattgtcccaagagacacttccagagctaaacggcaggacagcaagacatttcctcgctccagttgccctcttctcctctgtgtgggcaccaaagcccttcacctgctgcctcatcctagaatccacaattccttgcctcagtgactattgttgaaatatctgtcgtccccaaaccctctatctttggcttggattacacaggatatagttatactacagagttatagtataaatgaagcaataccaggattcattcagagaagattccccagaacatcagaactcattggaagtaatagatgagaaaggcaatcctcctaatttcctacaaagaccaaaacaatccctcctttgctgatgccggctagttagttcccagccatccctctccacccccagcacgccwcattagaactgggactctgtggaaccaaggtgaaggtctgcccaccagaactggaatataaagtcatatcwgccaactccagggtgacgtgacctcgagtcacagagtgtcgacttcacccgtattttaagtcagaaattccaaacactcccaatacatttgatgaaaacatacccgaccatttttgcctaatgaattaacagagaaagactgattttcattgaaatgatttacgacattcgagtatcccttgtgctgtacagtttgtagcacagctttattcaatccctgcaaacactcagagacacaagagtgtacaaataaagaactggaaactcaaactcagctcgtcaatgactccaacatgcatgtttttttgtgacagacacactctgaattcaaccatttctgaacatgacacatgtctctttccacttacattttaatctcccagagggcgggattgtgtctaaaacagaagagcagtcctggtaatggccagtctagttttgactgtaaagtaggcctaatcaatgcatgttaattgactaatatatttgaccttaagggtaccaactccaccccccgggctgttgaaaa

SEQ ID NO: 277923 - DNA, 526 bp, Homo sapiens
aataaatttctttgggttatcatgtatggaatcctctcagcttcttgaatcttcttggtttatgtctttttttttttttaacaaactggaactttttcaggctttttgaaaaaagtaatttatcagtcccatgttctgtcttttctcttccagtgagtcgaatgacaaaaatgttagaccttttgttgtagtttcacaggcccttgaatttctgctctttttaaatgtctatcttttcttttgaaatgtctatctttgtgagtgatattaggtaatctctcttgttctgtttctaatccaatgattctttcttctgtcctctccattctattgtcggttctcagccactggggttttctattacatttatcacctttttcaattcttacatttccattttttttttttttttagtattttttgtttctttgctaaaaccttctattttaaaatstatttcaagcatatttataattgcttatttgtgacttttataatgtggctttaaaattcttgccagataatt

SEQ ID NO: 277924 - DNA, 1174 bp, Homo sapiens
agcagtgattgagacaggtggatgactgttataccagagttgatagagcagaagcaacatttaagaagtattttcaaagtgtcatttgttaaaggcttggacacaggctaatttgccctcaagtaaartttaaaatttgccctcaagtaaagttcaaagtgagtaaaaaataactatgaacatgcacaatatataaacatatgtagctatataaacatatattgttatcattatgagaaaacttggaccatgtgtctaataatgaaataagtagtctgaaagaaacccacaattttatacaatagaacaagcatgaatttctctgggttatccaaagaatttaagctgagaaaataaaaaaatggaattttgatgtattcagaaatgaaaaaattatggaaattggagttagttaatctgtacatattagcattatcttagaggattttataataagcaagaagatgaatgataaatgtgctaatttttcacaatatgaatattaattgtatgccagttgatattttagcactagcttttgwctgtaaaaccaaaagaaaaaagctaagtaaggcatgwctggagatggataaacctatctggcttaggcaatgctatatttagtgtctaaatttggaaggcattaagtggaaggctaagagctcaatatttctcttttaggaagtagggagccattaaaattttaaacagagaggtggaataatgcatgcagtgctctagaaagcttctctgcttgtgtacacagtatatattaaaggtgtaaggacggtagtatcagttaagaaataattctgtcaatagtccaggtttcaggaaaaagcctctcttgcattgtcaaagtttcaatcaaaagtcttgaagatacatttggattttagctgatattcaggatgtgctaatatgaaaacataaccaaaatgcacctctattagtttttctaataaggaagtttctatctaattgtaactttttacctgttgaccaaatctcacgatctccccattctcaccacactgcctagcctccggtaaccactaatctaccctctacttccataagatcagctcctttggctcccacatatgagtgagatgatgcaatattagtctttctgtgcttggcttatttcacctaacaaaatgttctctagttt

SEQ ID NO: 277925 - DNA, 587 bp, Homo sapiens
tattagtctttctgtgcttggcttatttcacctaacaaaatgttctctagtttcatccacgttgctgaaaatggcaaattacattttttaatggccagatagtatttcattatgtatgtataccatttaaaaaacttatttaacctttgagagaaaaaaaatttggtattctattatgctgcaatgtgactatggttaaaagaattgtattatatatttcaaaatagctagaagacaggattttgaatgctctcactataaaaaataataaatatataagatcataaatacagctaaataccttgatttcatgattatgcartatatgtttgtattaaaacatcacactgtatcccatgaatatgtacaattgttatgtcaattagaaacaaaataaaaatcatgaagtccctgagaagtaaataaatcctgttcttttggtattagttaagcttacgaataacccttaaaggtaaaataaataagaaagcacacacattcaaaactgtgtaaaatgataaaacaggcaacaacagtaaatagaaaagaaagataaggtatattacattactatgatatgctgtgaa

SEQ ID NO: 277926 - DNA, 478 bp, Homo sapiens
ctttccattttcccactcagcattccatgtcttttctcctcatctgtttcctgtttttgaatgcaatttattttttaagtacccagaagagatacttcaacatttgttgatactaactagttctgatctttcccgcccccatccagaagctctgtggaaaaactccaattgcaaaatagcaaatgaaaacgttatgaaatctctcaggagagctaaataaatgattagatgctcaggcggcaaaytaaattaccagaatcctctcaggcatatgtctgaatttgacaatcttcctgcttctctgactctcctattgaactgacctctggacaccaattccaatgtataagtcttttcacactgaaccagtatatacattattataactggaagtcctagacttggattaccaaaaaaaaaaaaaaaaaaaactgaaaataaaagcagtgtttatcactccattacaagtttaagtgct

SEQ ID NO: 277927 - DNA, 478 bp, Homo sapiens
ctttccattttcccactcagcattccatgtcttttctcctcatctgtttcctgtttttgaatgcaatttattttttaagtacccagaagagatacttcaacatttgttgatactaactagttctgatctttcccgcccccatccagaagctctgtggaaaaactccaattgcaaaatagcaaatgaaaacgttatgaaatctctcaggagagctaaataaatgattagatgctcaggcggcaaactaaattaccagaatcctctcaggcatatgtctgaatttgacaatcttcctgcttctctgactctcctattgaactgacctctggacaccaattccaatgtataagtcttttcacactgaaccagtatatacattattataactggaagtyctagacttggattaccaaaaaaaaaaaaaaaaaaaactgaaaataaaagcagtgtttatcactccattacaagtttaagtgct

SEQ ID NO: 277928 - DNA, 478 bp, Homo sapiens
ctttccattttcccactcagcattccatgtcttttctcctcatctgtttcctgtttttgaatgcaatttattttttaagtacccagaagagatacttcaacatttgttgatactaactagttctgatctttcccgcccccatccagaagctctgtggaaaaactccaattgcaaaatagcaaatgaaaacgttatgaaatctctcaggagagctaaataaatgattagatgctcaggcggcaaactaaattaccagaatcctctcaggcatatgtctgaatttgacaatcttcctgcttctctgactctcctattgaactgacctctggacaccaattccaatgtataagtcttttcacactgaaccagtatatacattattataactggaagtccyagacttggattaccaaaaaaaaaaaaaaaaaaaactgaaaataaaagcagtgtttatcactccattacaagtttaagtgct

SEQ ID NO: 277929 - DNA, 633 bp, Homo sapiens
aaaaataaataaactcctactcagagcagatgtaagttctctgtagggagaaaaatagtcacaaaatgtttgtggaatataaaattccaaataaaaatccttttaatttgttttggatgttgaagtagggggagtgcagcaagcagagtttgtgtgctttgcaagcaatttctgaaaatgacaatgccaagcctatttagctcttataattacctgtcatcgtgcttccaggaagtggctggagacaagggagctacacgcctggcagtgcagtgctgcctgggagataaaaaaatggggacatgcctggggcttgctcatcctgattgtgttgtgtgggaagataagcccactgactcagtcctccactgtaggtaaagcagttatgtggccccaagcaactgcacctctgctccagggtgaaaaaaaaaagcgtcagacaagtttgactgcactaccaaractagaaatcagagatacttctatttttagatgcactcaatttttttgaaaaagtataaatcttataaattgagttatttgatttgttaattcctgctaatatctgcctttttgatgtaatatttagtttgactttaaactttgagaccttcctgccatcctatgtctcct

SEQ ID NO: 277930 - DNA, 633 bp, Homo sapiens
cttttctttctacagtatctatccttttgctggcacctcctgttcattttgggaaagactttttttcacctgctgaattatattcttctgtgactattctctttattgcagttgcttgttttcaattcaccacaaatgggaagtcatcatgctgataggtgggtattactttgctcaagaagagggttactgtgtgrggaggatagagcaaagagaatgcagcactaagaaggaaaaaccttttctatgtatgtttacgtatgttttcattttcctctgcagattactttcaaagcctttgagctcacattatgaccttttgtttagacatggttttgtggttctgcattgatcgagccactgctgcatttggttgacttttcttccagctgagaagcaggtaaggcacagcagtacaatagaacagaattggaattaggcagcatgcaaattgtataagtcaggcccatggccagacaatagcccttcactctggctgtagttgataacctagtgaaggaaagctgtcccttgattggatgaagcctgctattgcacatgcacaaaagaccaaaattaaaaagaattgactgtgaaacaaaaggaggatttctgaaaataaccagagaaaag

SEQ ID NO: 277931 - DNA, 1193 bp, Homo sapiens
cttttctttctacagtatctatccttttgctggcacctcctgttcattttgggaaagactttttttcacctgctgaattatattcttctgtgactattctctttattgcagttgcttgttttcaattcaccacaaatgggaagtcatcatgctgataggtgggtattactttgctcaagaagagggttactgtgtggggaggatagagcaaagagaatgcagcactaagaaggaaaaacsttttctatgtatgtttacgtatgttttcattttcctctgcagattactttcaaagcctttgagctcacattatgaccttttgtttagacatggttttgtggttctgcattgatcgagccactgctgcatttggttgacttttcttccagctgagaagcaggtaaggcacagcagtacaatagaacagaattggaattaggcagcatgcaaattgtataagtcaggcccatggccagacaatagcccttcactctggctgtagttgataacctagtgaaggaaagctgtcccttgattggatgaagcctgctattgcacatgcacaaaagaccaaaattaaaaagaattgactgtgaaacaaaaggaggatttctgaaaataaccagagaaaagwtgccctgttctgtctccaaggagaaacacagtaaaaacctgagatagtgcawgcattatgcatgctcaattcactcagctgcaatttgggggaaattataattgtattccagtcatagagcatattaactcacttttacaaattattatatttgctgtgtttctgtgtgtgtgtgtgtatacacatacaggcatgcatgtgtatgtgcagtattggaaaatgaaagaaatcacttttttctttttttattaacaagtatcaattgtatatacttatggtggacaacatattttgatatatgtatcaattgtggaatggccaaattaaactaattagcatgtgcatttcctcacatagttttttttttttttttttttgtggtgaaagctcttaaaatcgactctcttagcaatgtttaagtgtacaatatattgttattaaatgcagttaccataacatatattagatctcttgaccttatacctcttgtctagctgaaattttgtatcctttgacaacctctcccatcctcccacccccagcctctggtaaacaccat

SEQ ID NO: 277932 - DNA, 559 bp, Homo sapiens
tgccctgttctgtctccaaggagaaacacagtaaaaacctgagatagtgcaagcattatgcatgctcaattcactcagctgcaatttgggggaaattataattgtattccagtcatagagcatattaactcacttttacaaattattatatttgctgtgtttctgtgtgtgtgtgtgtatacacatacaggcatgcatgtgtatgtgcagtattggaaaatgaaagaaatcacttttttctttttttattaacaagtatcaattgtatatacttatggtggacaacatattttgatatatgtatcaattgtggaatggccaaattaaactaattagcatgtgcatttcctcacatagttttttttttttttttttttgtggtgaaagctcttaaaatcgactctcttagcaatgtttaagtgtacaatatattgttattaaatgcagttamcataacatatattagatctcttgaccttatacctcttgtctagctgaaattttgtatcctttgacaacctctcccatcctcccacccccagcctctggtaaacaccat

SEQ ID NO: 277933 - DNA, 611 bp, Homo sapiens
aaagtgttttggtcatgggggtgaacccctcatgaatggcttggtgccgttctagaggtaatgagtgacttcttgctctataatttcccttgaaagctggttgttaaaaagaacctgctacgtcctcctctttcttgcttcctctctctccatgtgacatgcctcttctaacataattggaagcttctgggttatgtaccagaagcagatgatggtcccacgcttcttatacaggctgcagaactgtgagccaaataatttttttaaataaattactcaggttcaggtactgctttatagcagcatgaatggactaagayaatggactgagattgattctcagctattgtgatagtgccacaatagacataagagtgcagatgtctctttgacatactgatttcatgtcttttggacttatacccagaaggaggatttctggatcctgtggaagttctatttttaattttttgaggaacctccatactgttttccaaaactgttgtactaatttacatgactaccagcagtgtacaagagttcccttttctccacatctttgccaacacttatcttcgtttttttgatagcaggcattgtagcaagtgtga

SEQ ID NO: 277934 - DNA, 611 bp, Homo sapiens
aaagtgttttggtcatgggggtgaacccctcatgaatggcttggtgccgttctagaggtaatgagtgacttcttgctctataatttcccttgaaagctggttgttaaaaagaacctgctacgtcctcctctttcttgcttcctctctctccatgtgacatgcctcttctaacataattggaagcttctgggttatgtaccagaagcagatgatggtcccacgcttcttatacaggctgcagaactgtgagccaaataatttttttaaataaattactcaggttcaggtactgctttatagcagcatgaatggactaagataatggactgagattgattctcagctattgtgatagtgccacaatagacataagagtgcagatgtctctttgacatactgatttcatgtcttttggacttatacccagaaggaggatttctggatcctgtggaagttctatttttaattttttgaggaacctccatactgttttccaaaactgttgtactaatttacrtgactaccagcagtgtacaagagttcccttttctccacatctttgccaacacttatcttcgtttttttgatagcaggcattgtagcaagtgtga

SEQ ID NO: 277935 - DNA, 592 bp, Homo sapiens
atcagagtgattacaagggagaaaaacacattcctttaatggttgactccagactcaagtgattgaaaaataagtcttttgaatggtcagccattcaaattattttcttacatgcctgactcacttgcttagatttggcacaaattcaaccaaattaaaaataartgtattcattaatgcatgtttttcccaaaaggaaaaactcagggaaaaaaaccctattttatttatatgattgtgaaattaacatgatcttgtctgcaaaagagaaaaagatgttgatttattatttcctctcctagtgtcaattttatatttttggtttgctcatttgttattttatttttaatttttatctctaaatagtaggtatatatacttatggaatacatgtgatgttttgatgcaggcatacaaagtataatagtgatatcagggtaaatggggtatccatcacctcaagcatttatatttctttgtgatagaaacattccaattctattcttttattattttaaaatgtacaataaattattgctaactatattccaccctattgtgccatcaaatactagatcatattcattctatc

SEQ ID NO: 277936 - DNA, 578 bp, Homo sapiens
atggaacaattatgtgaactcttttattgttccaggttctcactrtaaaaattgtgaaaagatcaactaaataataaataagaaaagactgtgagatgctgaggaaaagtgctgcatttatagaaagtgccatgttatgatatttttttccctacaaaacgctctgcactgccataaaatacccgaagactttagtaaaagtgttagttatttctgtacacctctctgggaatatttgtaggtgtttcaccccttttatttttctcttttctcccacaccattttctttcttcttagtctgttttagttccatccttcggaactctcattataagaaatttcttcctagattgcagtttaatatctaagtcaatcagacactctctaaggttaggaaagaaattagaggtcacctaaagtagagaaaatgaagcaaaaatagatgaatccttgaaataacattttattgtcaaattatttattattcatactgggacaaaacattaaaagagtcagaaataaatactcaaggtctaggtatatatacttagaaagcaaaatatggcacacacagctgg

SEQ ID NO: 277937 - DNA, 578 bp, Homo sapiens
atggaacaattatgtgaactcttttattgttccaggttctcactataaaaattgtgaaaagatcaactaaataayaaataagaaaagactgtgagatgctgaggaaaagtgctgcatttatagaaagtgccatgttatgatatttttttccctacaaaacgctctgcactgccataaaatacccgaagactttagtaaaagtgttagttatttctgtacacctctctgggaatatttgtaggtgtttcaccccttttatttttctcttttctcccacaccattttctttcttcttagtctgttttagttccatccttcggaactctcattataagaaatttcttcctagattgcagtttaatatctaagtcaatcagacactctctaaggttaggaaagaaattagaggtcacctaaagtagagaaaatgaagcaaaaatagatgaatccttgaaataacattttattgtcaaattatttattattcatactgggacaaaacattaaaagagtcagaaataaatactcaaggtctaggtatatatacttagaaagcaaaatatggcacacacagctgg

SEQ ID NO: 277938 - DNA, 578 bp, Homo sapiens
atggaacaattatgtgaactcttttattgttccaggttctcactataaaaattgtgaaaagatcaactaaataataaataagaaaagactgtgagatgctgaggaaaagtgctgcatttatagaaagtgccatgttatgatatttttttccctacaaaacgctctgcactgccataaaatacccgaagactttagtaaaagtgttagttatttctgtacacctctctgggaatatttgtaggtgtttcaccccttttatttttctcttttctcccacaccattttctttcttcttagtctgttttagttccatccttcggaactctcattataagaaatttcttcctagattgcagtttaayatctaagtcaatcagacactctctaaggttaggaaagaaattagaggtcacctaaagtagagaaaatgaagcaaaaatagatgaatccttgaaataacattttattgtcaaattatttattattcatactgggacaaaacattaaaagagtcagaaataaatactcaaggtctaggtatatatacttagaaagcaaaatatggcacacacagctgg

SEQ ID NO: 277939 - DNA, 605 bp, Homo sapiens
aaacaatgaagtgctaagcattattgacatcaaaatatagggtatgtgaagtaattactgtatgtcatcacaaaatggagagatcaacatgaaacataaaaatcaactttaatatttgtttcttagaaaggatcacatcctacttgctctttttatcttgttcctaatgtgattgtcatacttctgaccactataaatactaaagtagaaattcactaccttgaaattcctacctgaaatatgaaaaggttactgaagttttataaagagttcttagtctatcaagtttttgacattattttccaaaaaatctttagaatattcaaacgttcattttcagatctgaattaacatttttcccgtcatgcccaatttgatatttaaattagcagaaagcatcgcagtaatgaaactgtaagtcacgttttataaaccaaataatatatatagtattmtaaatatatttagaaggctttacattgtattcaaatatgaatattaatgatttggcagtgggttatgtttgcagtccccaggttaacattatcacactcacccatatattttgaatctcaccaacattattataaataatatctttttta

SEQ ID NO: 277940 - DNA, 571 bp, Homo sapiens
aaggataaagaaatagggaaaatattatgaatggttcaacaaaattctgtgatgtttacaaaaaatactattttagagtgtgtagcctctatctctagacagagagcattacgagatttgcagttattaaaataattgtaaaaggttgaagctgataatcgggggaaaattgaggtgattaaaataaatggtgtagcatgagtagaaatttatgcgagagagccttgagtcaaagaattgaagttaagcataaaacacctaagcccaaaatctaataaacctgtgcttctatgggtggttgggtgagaaaggagtcagggaatcaatggagctgagattatgtttgaagggctgctttagcagtcagaacatttttatttcaggtcatggtctgcaggcaccatagctgacactcagatatctggccctgtgtgaggaaaaggatggaaccactgaatggctgaaaccaagatgatcacaggcagartgcaaagacaaagatgccttgttttctccgtccaaattatatcttacagtcaagcaacaaaactgtcttacataagcaccattc

SEQ ID NO: 277941 - DNA, 455 bp, Homo sapiens
tgtttcagtggctcacaacatgtttatgcgattttcatggactctgtcagtagtcttgctattggtactgtgtgtgtgcagaaactggrgggcatgaggtgtttgtcaggaggtcttctgaatttaaaaggaagaggaatcttgatttaaactgtgtatcagagactgtaaaatgacaagtgaaggtgacttacagaagcaattagggtttcccaatgtctaaaacaaaactaaaactaaacaaacaaaagtagagaattaattgtgaacatttgaaatcagatttcacccccacagttggctagaacctagtgacagccattaccttcaaaaaggtacatgttctccagccctgttgtttctgtcatctcttggtctctagacatatgagtttgccactatcaatattagttttgggaatgactctaacaaatattattaaaggagtgatttat

SEQ ID NO: 277942 - DNA, 631 bp, Homo sapiens
ctgattaaactttttttttttttgctaaaaggaacagttttcccacccccagtagtggaaacatcccctccccaacccatgctgccatcagtctttctacctttgcctgaggagataaaccctgtgctgcctgaggcaacattgatggcctcccctgacacatagtcgccatgcaaaataatgttgattcttttcaggagccacccccaacacccctgttttcttctagacctatagctagactaaagtccaagcaggcccctagaggtgaggctgagagtgtgacccatgaggaggtacrctgcacttgaaaagaattgcttgagttctctatataaataaaaatctggagaacaggcatgggaatggatattaagagtgtgggatgatgatggaaggaacatagagttggatcaagctgaatttattgatttgggcccactaagtagggactgtttttaatgttgcagctctgggagctaaaaatggttctaatagtttatttgcttggtcagcggaaatatggattaaaagatggcccactgtgagcaagctgtaaatgcctgatcttccttggtttaatgtagaggaagggatcaaaaggcttagggagactgggatggtggagtgg

SEQ ID NO: 277943 - DNA, 532 bp, Homo sapiens
ttggctgtgtctccacccaaatctcatcttgaatttagctcccataatccctacgtgtcctgggagggacctgagggcaggtaattgaatcatggggttcgggtttttcctgtgctgttctcgtgatagtgaataagtctcacgagatataacggttttagaaagggcagttcctctgcacctgctctcttgcctgcccccatgtaactagaaatctctgcctactttacactttttgggtcaatctgctaatgaattaaattctgatgttaaaacaagatttgcttcctgccactgtatgcttctatacatctttgtgctttctatgtccatatctttttctacacacacacaattatgcaaaaagagatatatatrtagcgagagagagagaggagagaggctggagaactagatggacaaaaatgtcttttcaagtaagaaagtaagtaatgggggctggaaacacattcttgaataacataagaacataactgaaaaagtagagtaatggagtaacctgcaggaaaat

SEQ ID NO: 277944 - DNA, 423 bp, Homo sapiens
tttctcttagcttctggtgttgctggcaatcttgggcatttcatgacattcaccactccaatctctgcctccactgtcatgtggtttgctccccgtgccaagctgtctctctccacttataaggacactagccatattggattagaacccaccctaatgatttcatcttaacttaattacatctacaaagaccttaattaccaaatacgcttccattcacaggttcttggaattaggaattcaacatattttggggtagagggacaaaattccacccacaccarggtcttagagttaatttttactatggtagatttttatttttaaccgtctatattgattttggacttcaattcctgtttagaatgtgactctacaggacgtaaaagtaaaggtaccagaaatatttcacaaaaaaagttg

SEQ ID NO: 277945 - DNA, 554 bp, Homo sapiens
cagttttgcaacttcataaagaaataaaggatgcttaaacataaggtgatatatatggggggttggattttgtggtctgtgttcttggcttgaaaacatacatataagtagacattcttattcaaaactatgtccttagttttgaagatttcaacagaaattccaaatctaggcatattttaggggaaaacaacatgccatagatgttgtcttagcatcttcacctctacataattctatctctctatgaacattccatcttacaacctcaccaaatgtaatttattcctctggctatttgcttctattcccatgcagttcaataactyaacttatgttcagactgtctaatagtccagactgctttattctccagcttggcatttataaagcattttgtaccctttaacactatcaagaatgcagcctagttgtaggcagtgaagataatattttcaatatattaacttatttgttcactcaacatagactgacagtaaggacttttatgtattaatatataagtacactcatatcctgtttggtttgattga

SEQ ID NO: 277946 - DNA, 554 bp, Homo sapiens
cagttttgcaacttcataaagaaataaaggatgcttaaacataaggtgatatatatggggggttggattttgtggtctgtgttcttggcttgaaaacatacatataagtagacattcttattcaaaactatgtccttagttttgaagatttcaacagaaattccaaatctaggcatattttaggggaaaacaacatgccatagatgttgtcttagcatcttcacctctacataattctatctctctatgaacattccatcttacaacctcaccaaatgtaatttattcctctggctatttgcttctattcccatgcagttcaataacttaacttatgttcagactgtctaatagtccagactgctttattytccagcttggcatttataaagcattttgtaccctttaacactatcaagaatgcagcctagttgtaggcagtgaagataatattttcaatatattaacttatttgttcactcaacatagactgacagtaaggacttttatgtattaatatataagtacactcatatcctgtttggtttgattga

SEQ ID NO: 277947 - DNA, 570 bp, Homo sapiens
tgatttaatatagaaataaaagagctttcttaataatatgtggtgctattatctattaaaaataaaaaattagtcaaaagtcatgaaataggtatagttaattataaataaattaaaatatgaacttcataggaattaatggtggtttacaaaacttrtttttaattttttctttctttctcattattttttctaaaataaactctctgaggctcctcacaaaaacaaatttagctttcattttcatactttccaaacctataataacaaaacaaaattgagcttttgtttttagagcagcagccttaattcactgtatacctttagcagaagttaaaaataattttcagttaaatattaagattgctgagattattttaaagtctgaaatcacatagacatttgcatagtactgtgttttgacacaacgatactgctcctttctaggtgcaggaaggaattggagttcactggagaataagaagagttacaaaagccatgtaatagagagttagatgagttcttggagattatcaatttcagtcaccccttcctgctgaagaggtcata

SEQ ID NO: 277948 - DNA, 594 bp, Homo sapiens
ctgttttagtgactcaggagtcaaagcccaggacagaagcaaggaagtaagtacagagatgagaggaaggattcaccagacagtttactcaggagaatcyacggaacagaattctttgtaaaaacaaagaagggaataaaaagaaagtttcataattctgtctcaggcattcaatgagtgaggcttccatcaaataaaataaggcaaaaaggtaaaagatgctgattttaagtttgaatgttgtgaaatggaaacccacacttagagctcaagagattggtcctggggggaaccatagtacagtatttgaaagttttgcctatgatgcctggcaaaataaggagaaaaagcatgaaagaccaacatcaacatttaacaagtgtaaaagaagagaccttaaatgatcttgagaaagtgtgaataaagaattaagatgcaagagaggagtttgttcatgatgttgccaattgagtgatggatagtgtccaagtcaacaaagcatataaaacacaaatcaagaggtgttcaatgtatggatcatctttgtcaccatagtttcagtagtgtgggcagggctgaagtacagttttaggg

SEQ ID NO: 277949 - DNA, 594 bp, Homo sapiens
ctgttttagtgactcaggagtcaaagcccaggacagaagcaaggaagtaagtacagagatgagaggaaggattcaccagacagtttactcaggagaatccacggaacagaattctttgtaaaaacaaagaagggaataaaaagaaagtttcataattctgtctcaggcattcaatgagtgaggcttccatcaaataaaataaggcaaaaaggtaaaagatgctgattttaagtttgaatgttgtgaaatggaaacccacacttagagctcaagagattggtcctggggggaaccatagtacagtatttgaaagttttgcctatgatgcctrgcaaaataaggagaaaaagcatgaaagaccaacatcaacatttaacaagtgtaaaagaagagaccttaaatgatcttgagaaagtgtgaataaagaattaagatgcaagagaggagtttgttcatgatgttgccaattgagtgatggatagtgtccaagtcaacaaagcatataaaacacaaatcaagaggtgttcaatgtatggatcatctttgtcaccatagtttcagtagtgtgggcagggctgaagtacagttttaggg

SEQ ID NO: 277950 - DNA, 599 bp, Homo sapiens
aaagcatgaaagaccaacatcaacatttaacaagtgtaaaagaagagaccttaaatgatcttgagaaagtgtgaataaagaattaagatgcaagagaggagtttgttcatgatgttgccaattgagtgatggatagtgtccaagtcaacaaagcatataaaacacaaatcaagaggtgttcaatgtatggatcatctttgtcaccayagtttcagtagtgtgggcagggctgaagtacagttttaggggatcgatgtatgaatgtctgcatgcaaaagaaaagatatgcaagataggccattctttgcaagataggccattctttgaaagcttggttgtgaggagaaggttgatttagagtccagtgcctagcacatacttgagtatttactcattagatattttttgaagagacagataaatacctaggctccaggcaagatcgtggcagcatttttactaagtgatgaaagagacataagcataaacatatttatatatcaaaggacatggggccagtggagaagaaaaaagtagatatatatctttttaatacatatacataatgccctataaagtgattataaaaaaaggactat

SEQ ID NO: 277951 - DNA, 599 bp, Homo sapiens
aaagcatgaaagaccaacatcaacatttaacaagtgtaaaagaagagaccttaaatgatcttgagaaagtgtgaataaagaattaagatgcaagagaggagtttgttcatgatgttgccaattgagtgatggatagtgtccaagtcaacaaagcatataaaacacaaatcaagaggtgttcaatgtatggatcatctttgtcaccatagtttcagtagtgtgggcagggctgaagtacagttttaggggatcgatgtatgaatgtctgcatgcaaaagaaaagatatgcaagataggccattctttgcaagataggccattctttgaaagcttggttgtgaggagaaggttgatttagagtccagtgcctagcacatacttgagtatttactcattagatattttttgaagagacagataaatacctaggctccaggcaagatcrtggcagcatttttactaagtgatgaaagagacataagcataaacatatttatatatcaaaggacatggggccagtggagaagaaaaaagtagatatatatctttttaatacatatacataatgccctataaagtgattataaaaaaaggactat

SEQ ID NO: 277952 - DNA, 611 bp, Homo sapiens
gggccagtggagaagaaaaaagtagatatatatctttttaatacatatacataatgccctataaagtgattataaaaaaaggactatattgcacatagacaaaaccattttccttgcatagacaatgtcagggataaagatagatgtaaagcaaaattaaatgttgatgtatttgtaaacaaggccaggaagttgagaacattyatatgatagtacctattctctctgtaactgtgggggatcatgctaagagtaagaatggcaaggcaggcaaggaacttaaaagaatgagatgagtgattagaatgattttgagttaatggtaaacggagctggttatggacaacttgagtgaccaacaacacagaccacctagatggttttagagatcaaaagtctcagtagggtaaactgctcagtttctttgcttttcttcagcagtacaagtagagtcacagaaggaggactgatgggttgataatttcctggggtttttaggtctagatcaatggaaggacaaaggtaaagggaaatgaatggtactggcaaggcaggggtttactactgggccctcacttgagagaaaagaaaataaaactagaagtttgttg

SEQ ID NO: 277953 - DNA, 611 bp, Homo sapiens
gggccagtggagaagaaaaaagtagatatatatctttttaatacatatacataatgccctataaagtgattataaaaaaaggactatattgcacatagacaaaaccattttccttgcatagacaatgtcagggataaagatagatgtaaagcaaaattaaatgttgatgtatttgtaaacaaggccaggaagttgagaacatttatatgatagtacctattctctctgtaactgtgggggatcatgctaagagtaagaatggcaaggcaggcaaggaacttaaaagaatgagatgagtgattagaatgattttgagttaatggtaaacggagctggttatggacaacttgagtgaccaacaacacagaccacctagatggttttagagatcaaaagtctcagtagggtaaaytgctcagtttctttgcttttcttcagcagtacaagtagagtcacagaaggaggactgatgggttgataatttcctggggtttttaggtctagatcaatggaaggacaaaggtaaagggaaatgaatggtactggcaaggcaggggtttactactgggccctcacttgagagaaaagaaaataaaactagaagtttgttg

SEQ ID NO: 277954 - DNA, 1243 bp, Homo sapiens
gggccagtggagaagaaaaaagtagatatatatctttttaatacatatacataatgccctataaagtgattataaaaaaaggactatattgcacatagacaaaaccattttccttgcatagacaatgtcagggataaagatagatgtaaagcaaaattaaatgttgatgtatttgtaaacaaggccaggaagttgagaacatttatatgatagtacctattctctctgtaactgtgggggatcatgctaagagtaagaatggcaaggcaggcaaggaacttaaaagaatgagatgagtgattagaatgattttgagttaatggtaaacggagctggttatggacaacttgagtgaccaacaacacagaccacctagatggttttagagatcaaaagtctcagtagggtaaactgctcagtttctttgcttttcttcagcagyacaagtagagtcacagaaggaggactgatgggttgataatttcctggggtttttaggtctagatcaatggaaggacaaaggtaaagggaaatgaatggtactggcaaggcaggggtttactactgggccctcacttgagagaaaagaaaataaaactagaagtttgttgwctttgttctaaagcattgccgattttacctgaggcaggcattttactgcatttaaaaggtcaccaaggatgctaaagaatcttaggtgaatctgaaggccwggtggagataataagaactaaagtttttgttttgtgaagttttctgaaggctttctcccaggcattgaaatgtaacttccattttcttagtctaacttcaccaggtagtgctggcagaaattttaaaaagagaaatagctggtggatgtaataaactaaaaaacagggctctctcctcactcacctgctgttctgctgaagaaactgtggtagaaaatattgttaatccagttaaaaatacatgccaacatctgtaaaaatgagagacgggtattctatttggaatttacttgggtaacttattttgctagttagctctaggaaaaattacgaagcaggtattcaccagtgtctatttttttttcctcctgtttcaaactttttcctttcttgcccaatgagtccaccatttttgtctaaatcagttggataaaccaattcactctgtggtgctagtgccttactgcatggcacttctcagaaatattttctgcttgtcttgctttatatatgtgaaactttttatgatt

SEQ ID NO: 277955 - DNA, 465 bp, Homo sapiens
ttcaacaggtgagtgcagaaacgtattttattcttcttatgacccttatatcagttgcaaaagtccctgagtcacagtaggtcttcttttctgaaattttattttttatgtttgaatttatatttgtgaaatggaaatacgtttgaaagtccaggagactctcctcttcccaagcattttctctctagctttttattgttgcataaaacccatccrataggcctctattaagtaggattgagtatgattgtctatttatatacaaatatctccaaagaaggtggtgagtttggtaatagatttagctattaaatcttttcatacattaaccaaagccaaagttataagttttcatattaaccggttcaaatgttcatctatgagcattgttctaatgcctgaaacgagcactacttcaagtacttctttgtcactaaaagctattcaattctactgaaggtcagt

SEQ ID NO: 277956 - DNA, 601 bp, Homo sapiens
tcaaattctagagtttccactcattatgtgtgatcctaaacaagttatttaaacttctctcaatttcttcatctgtaaagtggagataataatggtaccaaccttatagagttattatgaggttaaaattagttaatatttataaagtgcttagaagtasgtcacagagaagcccacataagcagtcattaattaaatagaccataatgatctaagacctcatcagcacaattgtacatgcttttatttggagagttttataagaactataattttcctactttactaatgggaaaactgaagcctggagaaatattagtgatttgtctaagttaacactgttaattaatcacagaactggacttctggactaatcacagaagtcctaaatcttctgatccttgacacagcttttactcctgtgcacctgtaccaacaaagttaaaatttttacaaccaaataggtctgtagtttcaaatgatagtaatacacatttcaggatccacaggttaaataaaaggaggggaaaggcaacattgcagctatcagaccaggaccgcatatggctccaggctatgattgccaaatatatttcaggac

SEQ ID NO: 277957 - DNA, 513 bp, Homo sapiens
acattcccagcatttctgatttaactggtctggagtacagcctaggcaccagaatttgaaggcctcccagttgattctagtggacagctaagactgagaattcttggaatcagaatcaagaacaaagagcacatcaatsagtagtggaacagagaggaatcttgtggaggccttaatggtctaattctcttctggtagaattgggagtaacctgatccccttttttcttcccctcctgcttgtgtcttcccctccttcttttgctttttcatatatcgagtcctccttactacgtgtctaactcagactatacatgggatcctcaaacatatgctttaggcaattacaattcttctgtttagcacataggaaaatgggtcaccagacagatttagtaatgggcccaatgttgcatagtcacgatagttcctgtattcaacaggtgagcgcagaaacacattttattcttcttatgacccttgtatcagttgcaaaagtccctgagtcacagta

SEQ ID NO: 277958 - DNA, 580 bp, Homo sapiens
ggggtacaatgcaatgttttgatatatgtgtacaatgtgcgatgattaaatcaagctaattaacatatccatcacttcacttaccttttttagtggttacacaatttgaaatttaatctagttattttaaaatatacaatacaatattgttaactgtatgtcctttcagaaccaayaaaaatcaaaataaaataataaaataaatatttttgactatatctactgtgcaatagctatcaaaacctattcgtccttggagtgggtaaacctttttgtaaagaaaaaaataataaataaataaaaccaaaaatttattcctcctatctatctaaacttttatttgctcaacagcttcccattccttcccttctcatcccccaagccttgggtatccatcattctattctctacttctatgagttcaactgtttaaaaattggagatcatgcaatatttgtctttctgtgcctggcttacttgactgaggcatttccttatttattcatccattgatagacactcaggttaattacatatcttggctattgtgaatagtgcagcaatgaacatgggagggcag

SEQ ID NO: 277959 - DNA, 1161 bp, Homo sapiens
ggggtacaatgcaatgttttgatatatgtgtacaatgtgcgatgattaaatcaagctaattaacatatccatcacttcacttaccttttttagtggttacacaatttgaaatttaatctagttattttaaaatatacaatacaatattgttaactgtatgtcctttcagaaccaacaaaaatcaaaataaaataataaaataaatatttttgactatatctactgtgcaatagctatcaaaacctattcgtccttggagtgggtaaacctttttgtaaagaaaaaaataataaataaataaaaccaaaaatttattcctcctrtctatctaaacttttatttgctcaacagcttcccattccttcccttctcatcccccaagccttgggtatccatcattctattctctacttctatgagttcaactgtttaaaaattggagatcatgcaatatttgtctttctgtgcctggcttacttgactgaggcatttccttatttattcatccattgatagacactcaggttaattacatatcttggctattgtgaatagtgcagcaatgaacatgggagggcagwggggtacaatgcaatgttttgatatatgtgtacaatgtgcgatgattaaatcaagctaattaacatatccatcacttcacttaccttttttagtggttacacaatttgaaatttaatctagttattttaaaatatacaatacaatattgttaactgtatgtcctttcagaaccaacaaaaatcaaaataaaataataaaataaatatttttgactatatctactgtgcaatagctatcaaaacctattcgtccttggagtgggtaaacctttttgtaaagaaaaaaataataaataaataaaaccaaaaatttattcctcctatctatctaaacttttatttgctcaacagcttcccattccttcccttctcatcccccaagccttgggtatccawcattctattctctacttctatgagttcaactgtttaaaaattggagatcatgcaatatttgtctttctgtgcctggcttacttgactgaggcatttccttatttattcatccattgatagacactcaggttaattacatatcttggctattgtgaatagtgcagcaatgaacatgggagggcag

SEQ ID NO: 277960 - DNA, 580 bp, Homo sapiens
ttattgtctatgtgtaaaatgccaaggagcctacaaaaaactcttctaattaataaatgaactcaatagagtcacaaagtacaagattaataccaaaaatatcaaacatattcctgtacattaacaatgaacaagtagaaaccaatatttaagacataatgtcatttacaatkgctattaggaaaattaaatacttaggtatacacttaacaaaacaaatataggatctgttttctgaaaattacaaaatgctcataaaataaatgtttatgggttggaccgctcatcacagtaaagatgccaattcttaccaaattagcctataggtttaatgcaatttctatcaaaattctagcaagttttttttcacagacataaaaaagattattctacagtgcatatgggaaggcacaggacttaaaattgttacaacaatattggcaaggaagaataagacaggagtaatcactccactgattttaaggctttgtatatagctgcagcaatcaaaacaatatagtattgtcagaaggatgtgcaaatagatcaatggaacagaatatagtacctagaaatagac

SEQ ID NO: 277961 - DNA, 1141 bp, Homo sapiens
ttattgtctatgtgtaaaatgccaaggagcctacaaaaaactcttctaattaataaatgaactcaatagagtcacaaagtacaagattaataccaaaaatatcaaacatattcctgtacattaacaatgaacaagtagaaaccaatatttaagacataatgtcatttacaattgctattaggaaaattaaatacttaggtatacacttaacaaaacaaatataggatctgttttctgaaaattacaaaatgctcataaaataaatgtttatgggttggaccgctcatcacagtaaagatgccaattcttaccaaattagcctataggtttaatgcaatttctatcaaaattctagcaagttttttttcacagacataaaaaagattattctacagtgcatatgggaaggcacaggacttaaaattgttacaacaatattggcaaggaagaataaracaggagtaatcactccactgattttaaggctttgtatatagctgcagcaatcaaaacaatatagtattgtcagaaggatgtgcaaatagatcaatggaacagaatatagtacctagaaatagacwaccagggatgtggatactcggaccacataaaggatccttgggattttggagctattcagtatctcgactgtggtgtataatgaacttatacaaaatttttttagaactaaatacacacacatgagtataagtaaaactggacaaatctggataagattgctggtttgtgtccataaggatattcggttgtgatgttatacagtagttttgcaaaatggtataactatgggaaattgaataatgtaaaatgatctttaagaattattttctaattgtatgtgaatcttcagttatttctgtacaatttcaaataawcatagtatgaaagattaacaatgattgctaataaactgttgccacaaataagaaaaaagaagcctgcagaatgtaggaacctctgaaggctgtagactttggcatcagcagtcagtacgggcacaataatcaaagtctatgaaggatcagactctgcctcagcagatgccagtgcagaagggtgagcagctcagatcaagcaggaagagacacctcaatgagaccaggaagaactaatgtatact

SEQ ID NO: 277962 - DNA, 560 bp, Homo sapiens
accagggatgtggatactcggaccacataaaggatccttgggattttggagctattcagtatctcgactgtggtgtataatgaacttatacaaaatttttttagaactaaatacacacacatgagtataagtaaaactggacaaatctggataagattgctggtttgtgtccataaggatattcggttgtgatgttatacagtagttttgcaaaatggtataactatgggaaattgaataatgtaaaatgatctttaagaattattttctaattgtatgtgaatcttcagttatttctgtacaatttcaaataatcatagtatgaaagattaacaatgattgctaataaactgttgccacaaataagaaaaaagaagcctgcagaatgtaggaacctctgaaggctgtagactttggcatcagcagtcagtacgggcacaataatcaaagtctatgaaggatcrgactctgcctcagcagatgccagtgcagaagggtgagcagctcagatcaagcaggaagagacacctcaatgagaccaggaagaactaatgtatact

SEQ ID NO: 277963 - DNA, 591 bp, Homo sapiens
ataaggagacaaatggttgatgcccagaaatttcctgcctgcgaattcctgaagctcagttgaggacaatgcaaatccttcctcataaattagaatgacaatctgtattccaaataacctgtgtagaactacccagtagcagagctgtggctggatgagcaaagtagaattttgagctgccttgagatatgtaacctaaatacaaagarcattttctggattgtataacaaaattttctactgagatttcttcctcactgtctcaagggatccagaatcctttatcagctcctgctaaataatgtaatacgagctttactcctttataatattttaatcatcagcttgaatttttagctattagaaaaagtgtctagtccagttgttcctaattgttccccgttttgttattttcccctctgacctcatataataagctgtctatttccctatgtataatttttagagccacacataactaagtatgcaacaaagtgtcaaatagcaattgttcaatttccattaggctttcaaaaattgctgggcctggtttttaaagcttccttaccacagtttttagattccttgcat

SEQ ID NO: 277964 - DNA, 644 bp, Homo sapiens
tctgttaattgtttcctttgttatgcagaagatttttagtttgatgtgttcttgcttgtctattattgcttgtttcctatgcttttggtgtcatatgcaaaaaatcactgccaagaccaatgttgtaaagctttttcctaatattttctttgaggagttttactgtttcaagtatttatgtttaagcctccaatcaatttgaagtttatttttgtgtatgatataaggtaagagtccaatttcattattttgcatgttggatatacattttttccaaaacaatttgttgargagactatcctcttcccattgtgcattcgaagcaactttgtagaagttcagttaattgtatatgcatgggtttattttgcagctctctattctgttccataggcttatatgtctgtcattgtgccagtaacacactgttttaattactgtggctttacttatactttgtatttatttatatttatctttatttatattttgagatctggaagtatgatgtctccagctgtatggttcttaagattgttttggctatttgtggttctttgtggttccacatgaattttagaatttttttttttatatttttggaaaaaaatactatcagaattttgataagaattgcattgaat

SEQ ID NO: 277965 - DNA, 615 bp, Homo sapiens
ccttctcagctcagagcagagcgagtgggtaataaactacagctcccagcttttcctggaggagagaaggaattggattacacatatagcacccctatgtttctggctgtaacttgtgaaaatgttttctatcttgcctatcctggagcattgagggaacttggtatactcaggtctccagaggactgctaagaacaagacatcagtttcgatgagcacagtggtttgagaggcacttagaatctctcgctgtgctatttggtgggggtcaccttctatctgaagccagtctgtgaagactggatagtgtctgatatatctaatctgcaggatccaacacagagagtcaaagaaaatgagtaaatagagaaatatkttccaactaaaagaataaagtaaaactctagaaactggatctaatggcatagttatgttatttattgaacatagaatccaaaataatgaccataatgatgttaactgaggccaacagaggaaagcatgaacaaagtgagaatgtcatcaaaaagatagaaagtatggaaaagtaccaaagagaaattataaatgtgaagaatacagcaaataagttgaaaaattcaatagaaggtttca

SEQ ID NO: 277966 - DNA, 630 bp, Homo sapiens
cctggttatgttaatataatttaaagatgaccataaaattttgttccctggagctaaccctttgaaagctagttgctttttaaattaatatgaataatacatgaaatgtagatggagattttttcagtctcattctattgcatcattataagacatggcaaataaatrccaaaaaaagaagttcaaaaataaaactggatagcatgtattatgcattcatattattgctgcacatcaatttttttgactaactttggcagtagaggactactgaaaatcattgaaaatattgattgtaaaatgtacgccgtgctttgaaaaatggagaaaatccataactattcagcctgatttggcagtaggatgttcatccattatgtagaaagttctcacatattatttgccatgtttaacaattaaaataatatcaaaaaatgttttaagacaaagtattttgagctcaattaaatctttctctgatacgttagaaaacattttggatacttcatttatcttcattctaccaatatttattgtaatacatgaaatttaggtaaaattaattccaggtttttaaatgtttttgtacaataaactactgtagtttagtgtacattaataatatatagc

SEQ ID NO: 277967 - DNA, 630 bp, Homo sapiens
cctggttatgttaatataatttaaagatgaccataaaattttgttccctggagctaaccctttgaaagctagttgctttttaaattaatatgaataatacatgaaatgtagatggagattttttcagtctcattctattgcatcattataagacatggcaaataaatgccaaaaaaagaagttcaaaaataaaactggatagcatgtattatgcattcatattattgctgcacatcaatttttttgactaactttggcagtagaggactactgaaaatcattgaaaatattgattgtaaaatgtacgccgtgctttgaaaaatggagaaaatccataactattcagcctgatttggcagtaggatgttcatccattatgtagaaagttctcacatattatttgccatgtttaacaattaaaatartatcaaaaaatgttttaagacaaagtattttgagctcaattaaatctttctctgatacgttagaaaacattttggatacttcatttatcttcattctaccaatatttattgtaatacatgaaatttaggtaaaattaattccaggtttttaaatgtttttgtacaataaactactgtagtttagtgtacattaataatatatagc

SEQ ID NO: 277968 - DNA, 630 bp, Homo sapiens
cctggttatgttaatataatttaaagatgaccataaaattttgttccctggagctaaccctttgaaagctagttgctttttaaattaatatgaataatacatgaaatgtagatggagattttttcagtctcattctattgcatcattataagacatggcaaataaatgccaaaaaaagaagttcaaaaataaaactggatagcatgtattatgcattcatattattgctgcacatcaatttttttgactaactttggcagtagaggactactgaaaatcattgaaaatattgattgtaaaatgtacgccgtgctttgaaaaatggagaaaatccataactattcagcctgatttggcagtaggatgttcatccattatgtagaaagttctcacatattatttgccatgtttaacaattaaaataatatcaaaaaatgttttaagacaaagtattttgagctcaattaaatctttctctgatacgttagaaaacattttggatacttcatttatcttyattctaccaatatttattgtaatacatgaaatttaggtaaaattaattccaggtttttaaatgtttttgtacaataaactactgtagtttagtgtacattaataatatatagc

SEQ ID NO: 277969 - DNA, 538 bp, Homo sapiens
tcattaacaatgccccaggtcacccaagagtctgacctgacctatcagtactcctggctcactggcttcccctaacccaccaagttgcccttaacaactctgatccccaaatgcttggggagactgatttgaatagtaataaaactccggtctcctgcacagatggcttgacatgaattactatttctctattgcaattcccctgtcttgataaattggctctgtctaggcagtgagcaaagtgagcctattgggcagttacactcagaagaaagaayttaactgaagggcataaggcagaggaagaaaccaacttaagttttagagcaagagtgaaattttattaaaaagttctagagcaggaaagaaaggaagttaaagtacttggaagagggccaagcaggtgatttgagagattcaagtgcatggtttgacctttgccttggagttttatatgttggcatgcttctgaggtcttgcatctcttattccctgattctttccttggggtgggctatccacatgtgcagtgtgttta

SEQ ID NO: 277970 - DNA, 590 bp, Homo sapiens
tgtttcctgggctggagtgcaatggcatgatctcggctcaatgcaagctctgcctcccaggattctcctgccctagcctcccgagtagctggaattataggcctgcaccaccaaacctagctaatttktgtatttttagaagagattgggtttttccatgttgaccaggctggtctcaaactgctgacctcaggtgatctgcctgccttggcctcccaaagtgctggaattacaggtgtgagccactgtgcccagtcctttgccagttttttaatggggttaatttgtttcttccttgttgatttgtttaagttctttatagattctgaatactagacttttattggatgtacagttttagaatgttttatcccatcttgtaggctgtctgtttgctctattgatagttcttttgcggtgcaagagctctttagtttaattaagccccacttgtcaatttttggttttgttgcaattgcttgtgggatatagccaaaaatttttgctaaggccaatgttgagaagggtatttctgagattttcttacaggattttaatagtttgaggtcttacacttaaatatttaataa

SEQ ID NO: 277971 - DNA, 547 bp, Homo sapiens
taatatattgttaatgtatacaaataacatataatatataattaatatgtatataatatcttatactgaaaattgactgacttatgtcagcagaaactgttgtaacaaccttctgctacagccactgggttaagttgaaagataatcctataccctggttcttgtatttaaaaaggragagagagaggatagcattgcttggggttttccaaattcccactaaaagcagaaggaaatagatattttcctaagagttattttctcttcaactatattttaatcacagaaagttacacattaaatgacaatttgcttatatcataagaagaatcaagtgagttcctgtgaagagttatacctaaattatttgtaaaatttgctgcaagctcaagaatcatccttctctcctgtgatggaggagagcacaatcagttgactcttctaatcacatcctgcccaaacctgagcagaaagaaacatactcctctgcaagaaaactacatgaatcccctgttatcctttagatagtgacagcagaagaaaacta

SEQ ID NO: 277972 - DNA, 548 bp, Homo sapiens
gaaagacttacattctagtggagggagatagacaataagtataacaaatgaatatatattatgtaccatgtagaatgtaaagaaatattacagaggaaaaaaagaaaatggaacaaggtaagggagtgtggtaggcaaaattgtaaaatgacccctcagagacccctatgtttgtctaataccttcttcttgagtgtgagaaagaaccttgagtgtgataagatatcactttcattktatgacaagagggattcaacagatgtaattaagattcccaattagtggtagtgaaagtactaattgaaggtagtgaaagggaagatgatcctgggtgtgccagatctaatcatgtgaggcgtttaaaatataatgaagcatcagtcattctcctcctggcacaggagataaagcaaactaccaggtagtgagacaaagagaccatgtagcgaggaattgaaggtgttcccaggagttgatagtagcctctgactggcagacaataagaaagaaatcttaaccctccaaccacaaacagatatttgcctata

SEQ ID NO: 277973 - DNA, 1189 bp, Homo sapiens
  misc_feature (1)...(1189): n = A,T,C or G
gaaagacttacattctagtggagggagatagacaataagtataacaaatgaatatatattatgtaccatgtagaatgtaaagaaatattacagaggaaaaaaagaaaatggaacaaggtaagggagtgtggtaggcaaaattgtaaaatgacccctcagagacccctatgtttgtctaataccttcttcttgagtgtgagaaagaaccttgagtgtgataagatatcactttcattgtatgacaagagggattcaacagatgtaattaagattcccaattagtggtagtgaaagtactaattgaaggtagtgaaagggaagatgatcctgggtgtgccagatctaatcatgtgaggcgtttaaaatataatgaagcatcagtcattctcctcctggcacaggagataaagcaaactaccaggtagtgagacaaagagaccatgtagcgaggaattgaaggtgttcccaggagttgatagtagcctctgactggcagacaataagaaagaaatyttaaccctccaaccacaaacagatatttgcctatawatagatggcagagtttcagttccaatgatgctgattatcagcataacacatatggttcagcatgacatcaacttgtccttgaagactacggcaagtccagctggaattggctaagataaagcaattatgaatgaaagtgcccattttctaaagwtactttaccaacccatctaagaaggcacattttaaaatctgtcttcaaagctgtgatcacttaatttaaaaaaaaatcacttttaaagaaaacattcatgttaactcgcattgtccatatccaaataaattctgaattaatgaaaccacattcttcaaaatcaatcaaataaattgcagagttttgccatttacttgttatgaatcagttggtnagatggtaaaaataagcaactatttgtggacaatggtatataatgttccacaccctaaggattcctttcttactattgtgaccaagcggaattccaaagaagtgctttcttatgaaataattgacacctttgtctttttctcatttcttaaacgctgcctttatcttttctaatttcttgatagcaatccccactgttctcaagatataggttttataatttggtcttatatacacccactgaaaataccctcaatattacctgaacagatc

SEQ ID NO: 277974 - DNA, 640 bp, Homo sapiens
  misc_feature (1)...(640): n = A,T,C or G
atagatggcagagtttcagttccaatgatgctgattatcagcataacacatatggttcagcatgacatcaacttgtccttgaagactacggcaagtccagctggaattggctaagataaagcaattatgaatgaaagtgcccattttctaaagatactttaccaacccatctaagaaggcacattttaaaatctgtcttcaaagctgtgatcacttaatttaaaaaaaaatcacttttaaagaaaacattcatgttaactcgcattgkccatatccaaataaattctgaattaatgaaaccacattcttcaaaatcaatcaaataaattgcagagttttgccatttacttgttatgaatcagttggtnagatggtaaaaataagcaactatttgtggacaatggtatataatgttccacaccctaaggattcctttcttactattgtgaccaagcggaattccaaagaagtgctttcttatgaaataattgacacctttgtctttttctcatttcttaaacgctgcctttatcttttctaatttcttgatagcaatccccactgttctcaagatataggttttataatttggtcttatatacacccactgaaaataccctcaatattacctgaacagatc

SEQ ID NO: 277975 - DNA, 640 bp, Homo sapiens
  misc_feature (1)...(640): n = A,T,C or G
atagatggcagagtttcagttccaatgatgctgattatcagcataacacatatggttcagcatgacatcaacttgtccttgaagactacggcaagtccagctggaattggctaagataaagcaattatgaatgaaagtgcccattttctaaagatactttaccaacccatctaagaaggcacattttaaaatctgtcttcaaagctgtgatcacttaatttaaaaaaaaatcacttttaaagaaaacattcatgttaactcgcattgtccatatccaaataaattctgaattaatgaaaccacattcttcaaaatcaatcaaataaattgcagagttttgccatttacttgttatgaatcagttggtnagatggtaaaaataagcaactatttgtggacaatggtatataatgttccacaccctaaggattcctttcttactattgtgaccaagcrgaattccaaagaagtgctttcttatgaaataattgacacctttgtctttttctcatttcttaaacgctgcctttatcttttctaatttcttgatagcaatccccactgttctcaagatataggttttataatttggtcttatatacacccactgaaaataccctcaatattacctgaacagatc

SEQ ID NO: 277976 - DNA, 640 bp, Homo sapiens
  misc_feature (1)...(640): n = A,T,C or G
atagatggcagagtttcagttccaatgatgctgattatcagcataacacatatggttcagcatgacatcaacttgtccttgaagactacggcaagtccagctggaattggctaagataaagcaattatgaatgaaagtgcccattttctaaagatactttaccaacccatctaagaaggcacattttaaaatctgtcttcaaagctgtgatcacttaatttaaaaaaaaatcacttttaaagaaaacattcatgttaactcgcattgtccatatccaaataaattctgaattaatgaaaccacattcttcaaaatcaatcaaataaattgcagagttttgccatttacttgttatgaatcagttggtnagatggtaaaaataagcaactatttgtggacaatggtatataatgttccacaccctaaggattcctttcttactattgtgaccaagcggaattccaaagaagtgctttcttatgaaataattkacacctttgtctttttctcatttcttaaacgctgcctttatcttttctaatttcttgatagcaatccccactgttctcaagatataggttttataatttggtcttatatacacccactgaaaataccctcaatattacctgaacagatc

SEQ ID NO: 277977 - DNA, 524 bp, Homo sapiens
aatttgtttcattctgatatagcaaagatttcccccttcccctttcccaggctgatcaaatagaatacaatttaaaagctatagtgagtcatgctgtaacagaaaaagcagaaaaagtcacgacagatggtccctgactttcgatggtttgacttctcaaattttcagcttcacagtgagtttatcaaaatgtaatcccatcctaaatagaggagcatctgtagctggttagaaatttccttgcaagaatatgcacagggggtgttgaaatcaatgtcttaagtcatgtttgaatcactcatcttttctttatccaactatcaattgtgcatattgcattatccttttgggatgctcttgagcttcttaatttttttctaattatgtcttactttcctccayctttacagtttatttttcattctttaagaaacatattacagtactctccttttcactgatgctcactagtatattgtaatcatctcctattgcattagtctgttctcatgctgctataaacg

SEQ ID NO: 277978 - DNA, 1185 bp, Homo sapiens
agtgacatttcttttaatttaccaaagtagcctgtggcaataggcactaaaactaaagacttcttaatcttaatctattgttctacccacatatttcaatgcttctcttataaaattttagaaaatgtgactgtgctttatctcacatttattataaatattgtaaagcatatatccactatataaaaatgtagttatcatataacatatacaaaagaggtatatagctaatattttttatatatttgtatgaaattcttaaactggttatttacctttttagactattgacaggaktttagtggtgtaattgtggtgacccatttcagctacgagagttatccagaaacatttgactggaccattgatttttcctgtcaataaaatttctcattgacagtagagatattctaaaacatttaattagttaattattattagagtggtggttattatgattgtaaaatgaccattttattatactgacagttgaaggtatccctaaggatttaaagaggaattaaaaaaagtgaatttggatttgaccgcataacatatagtcwgcaatctgctgcctgacaaattgaagatgaagagtaataatccttgaaaggattttgaaggatgagcaggtatttggtaaaactagcatgtattctaatttagaatactctgattttacatctggtttgtgatctagaattgggtaataactagttcattttaaaaagaaaaaagtatactaatttgaaaatccttataactgacacaggaaaaaaaaattacccatgcaaagccactaatgtaaggagattatttaatgggctaaaatttgttattttgaagaagaaacaaggaaaagagatcttgaggggaaaaaatcttagctattctttagagaaaagtaatagcagataataggttaagtaccttaagaaccacacctatatgggcccatcaatcctcagagaggccctgtgggttatatctctccatttcacagatgacgaccttggagaacagaaacatattaaataattgccccaaggtcacgcattaagaggcagagccaaaatctggtttacctggaatgctttccttacatcagatttctataacttttcacactgtgctgcagcaatwtgacacaggttggcagtctgactcactatccaacctgcccac

SEQ ID NO: 277979 - DNA, 547 bp, Homo sapiens
ttaaattgcttagctgggctcaaggctcttcctgatccatctattgcttacgttttcagttttatctattgagataatgcccacatcatcatagttgtcttacatggaggtcctcaratagattctgcttttcacaactccatgctttgagagtacggttcctactgctagaattggccttccttcttttctgcctgcctaaaatcaaatcagtgttctagtcttattgtgatagttcagactactatcaagtgtttcttgaatataccactataagaatattagtttttccacttctgtgatgtatgtacataattattatagaacctataatgtttaattgcacttattactgtatatacctgcctttattagactataatctcactgagtttagtgactatgtcttcttcatctttatagtctcatacctatcataatatttggtctatgataggcacttagtatttgttgactgattaaataactaaggtggttggcaattagatcttgaaattaaaaaaaattaacctttattaagtgctta

SEQ ID NO: 277980 - DNA, 547 bp, Homo sapiens
ttaaattgcttagctgggctcaaggctcttcctgatccatctattgcttacgttttcagttttatctattgagataatgcccacatcatcatagttgtcttacatggaggtcctcaaatagattctgcttttcacaactccatgctttgagagtacggttcctactgctagaattggccttccttcttttctgcctgcctaaaatcaaatcagtgttctagtcttattgtgatagttcagactactatcaagtgtttcttgaatataccactataagaatattagtttttccacttctgtgatgtatgtacataattattatagaacctataatgtttaattgcacttattactktatatacctgcctttattagactataatctcactgagtttagtgactatgtcttcttcatctttatagtctcatacctatcataatatttggtctatgataggcacttagtatttgttgactgattaaataactaaggtggttggcaattagatcttgaaattaaaaaaaattaacctttattaagtgctta

SEQ ID NO: 277981 - DNA, 615 bp, Homo sapiens
tcttagtagggaacacctaycttaaaatctcatttctttttagtttccatagaagccctactgttttgagtcatcatgatagagtatttgctgtcctatcaatatatctgaactagccacgtctttaatctagttttaaaattcagttagaagaactgttgtaattgctccattttactcgttgatcctctcttgctgagccacatgcaatctccaggaaaaaaaaaaattgtgctgtgcacaatattatccacagatcagtactacctatcatagtatgcttcaggaaatagaaagctacactctgtacatatgagaacattacagatttctataatattagcccatatatttaatagttataaaaattaaagaaaaaaattacatcatgcctaagcccgactcttatacaaatggactatttttatttctgtatctccttctctcccaatagagaaatactttcaactttcacaaaaatctaaatgctgtaatcatcaggtaacatcagaaaacttatttgtaagacacacacatacacaatgcagtgctccatgtacagctgcacagttgaacaggttatacactgtacaattccagaattatgtcattctc

SEQ ID NO: 277982 - DNA, 494 bp, Homo sapiens
tcaattgttaaaatgtttaggtcccagaaatatgtgagaaaatgtgaagcttgtctttttgcgcctgccttatttcacttaacctaataattgccagttccatccatgytgcaaatgacaggatctcattctctctttatggctgaatagtactccatggtgtataagtgccacatgttctttatcaactcatctgttgatggacactgaggttgcttccaaatcttggccattttaaatagtgttgtaataaacacaggcgtgcagttatctcttcagtatactgatttccctttttttttttttttttttttttttttttagtatatatctaggagtaggattactagacattactggagaatatggtagctctaattttagtttttttgaggagcctccaaactgttctataaagtggttctacaaatttacattcctaccaatagtgtacaagcattcccttttctccacttccttgccagcatttgtta

SEQ ID NO: 277983 - DNA, 488 bp, Homo sapiens
aatgttattacttgttactggtctgttcaatagcaagcaacaacactaaagccgtaataaaatgttctggttttggagtttctcatggctcaatcttggtatgttgcacgtgtctaggaatttctgcattttttctagatttctccaatttgttggcataaagttgatcatagtgcccactaaggatccttttagtttctgtggtgtcagttgtaatgcctcttttttcatcttttaatttatttatttargttttgtctctttttttcttagtctggctaaagctttgtcagttttgtttatttttccaataaaccaactttttgtttgattctttatattgttttatttcaatttcatttatttctactctgatctttattatttcttttcttctatttattttcagtttagtttgctctggcttttctagttttttaagatgcctcattatttatttggagtttttcttctgtcctgatttaggc

SEQ ID NO: 277984 - DNA, 608 bp, Homo sapiens
gcatgagaggatactaaggagaatagaactgagtcagattaaagaagaatggagtctatgaagagagctctggtccatatacatatgtatgtaacagggaaatggttaactaaatgaggctctaaattatgaacctcctgtgaggtatggctttacttgctgtaaaatatcctggggattgaaggtgataataatgcctggatgcttgaaacacccatcactatctgaaccaggaagtagttaggtgatacttttcactgctataaagatatgaaatggagcttcyctgcaacagcaggatcttgaactagtaaccggaaggaagctaagcattggcaaactaaagaccagtttagcaaatcaatagccagtgagtgctcagtgaggggatgataatgtctttatggtttttactgattctgaggagcagctatacatgtctggtatatttctcagtagagatatatagtgttaattaccaatttccagagcgaagcaccatctcctttcatggaatccccaaatgtataacaacttgaggaggtcttcattgggaacttcttttctctaactttgatgttcacactcaggccaagggaaagataccc

SEQ ID NO: 277985 - DNA, 486 bp, Homo sapiens
aaagatgatgatgatgatgaagaagatgttaatgacctttttcttcatctgatttcttaaagcgttttcccacaaatctcataaaataaaatgttctctttttagctctctgagcgactattttctttcactttcataattttgttctttggaagttggtctctgacctattttaccatacaaaaaacacctcaagactgaggaatattgcctaattgtagtttttggcttgtcttgtgatacttaaatattaaattattcagctagaaaaatgctgcagtgagttacagcaccartacgccattcccactgggttctttaccaacatgatgtacttgccagacatgattgaaagatgcttttaatgccataggtacagattgtttttttgaagtatatctcttaaaagtgtcttcaaattttctagaggatagaattttagactgaattctctcatcttctaagtaatagtaatggattttacca

SEQ ID NO: 277986 - DNA, 525 bp, Homo sapiens
aatccaacattaaataggtctcggtgagctctttcaataaatatcaaataaaaattctaagtgatatgaaagcattaggccataacttaattgacagttttgcccgagcaatatggaaaataatactatatcttacactcaatggtatcctagatttgatttaatatggtacatatttccttactctccctcaacttccctccgcctgataccagcrgcataaatttcagtaaatatgcattgcaaacacatatatctttaaaatctacagatgtagggtataagagtagtcttttccatactcaaactatagctatttcgtgacaactcattttattttatcctattatatttttattaagttaaccaccaacagcatgctcatcaccatcactgtcataattatttttcacattaagttgcttgagcatactttgtatttggcctcagacttggtgctgtagaatcaacgatgtagaagccagtctttgtcttaaaggatccaatagactagttgtgtctaca

SEQ ID NO: 277987 - DNA, 572 bp, Homo sapiens
agatgactatatagtttttctcctttagtattttgatatggtgaattatattgagtgatttttaatattgaaacaatccaatatttccagtatcaacatcacttggtcatgttacaatgttatgcattttatatccttttgtattaaattcactaatatttggttgatgatttctaggtctctttcattagggataatatcaagtgctggtaaagatgcaaaacaactggaactctcacacattgctagtaggaatacaaaatggtacagctattttagaaaactgtatggaagtttctcataaatttatgtattttcttacatgacctataaattccactcctagaarttcaatcaagagaaaagcaaacttatgttaacacaaaatctgttcatgaaattatatagcagctgtattcatagtcgcaccaaactggaaacaacccaaatgcttttcaaccagtgaatgtatcagaaaactgtgatacagctacacaatagaatacaattcatcaatacaaagaattagctactgatatatgcaatcacatagattaatctcaaatgcatta

SEQ ID NO: 277988 - DNA, 542 bp, Homo sapiens
ttagggataatatcaagtgctggtaaagatgcaaaacaactggaactctcacacattgctagtaggaatacaaaatggtacagctattttagaaaactgtatggaagtttctcataaatttatgtattttcttacatgacctataaattccactcctagaagttcaatcaagagaaaagcaaacttatgttaacacaaaatctgttcatgaaattatatagcagctgtattcatagtcgcaccaaactggaaacaacccaaatgcttttcaaccagtgaatgtatcagaaaactgtgatacagctayacaatagaatacaattcatcaatacaaagaattagctactgatatatgcaatcacatagattaatctcaaatgcattatgctgtgtgaaagaagccagacaccaaaggctacccattgtatgaatccacttagtgtcatactagaaaaaataaaataataaggacaaaatacagatcagtgtcagggatcaaaggtcgaggaaggagttgactacaaatagaaaaaaaaacaact

SEQ ID NO: 277989 - DNA, 542 bp, Homo sapiens
ttagggataatatcaagtgctggtaaagatgcaaaacaactggaactctcacacattgctagtaggaatacaaaatggtacagctattttagaaaactgtatggaagtttctcataaatttatgtattttcttacatgacctataaattccactcctagaagttcaatcaagagaaaagcaaacttatgttaacacaaaatctgttcatgaaattatatagcagctgtattcatagtcgcaccaaactggaaacaacccaaatgcttttcaaccagtgaatgtatcagaaaactgtgatacagctacacaatagaatacaattcatcaatacaaagaattagctaytgatatatgcaatcacatagattaatctcaaatgcattatgctgtgtgaaagaagccagacaccaaaggctacccattgtatgaatccacttagtgtcatactagaaaaaataaaataataaggacaaaatacagatcagtgtcagggatcaaaggtcgaggaaggagttgactacaaatagaaaaaaaaacaact

SEQ ID NO: 277990 - DNA, 1573 bp, Homo sapiens
tgctacagtaaacttgacatacatcagtaaattttctgaaccccatctttttaaatggtataaaattgctagtaagtgaagttctgtttttttaaaaagtaatcttttaattatttttgatatttttatstctatcaagaatataatttttactaaagcaattctgaagcattttggctaaaaaattcctgacaccacaagcaataaagtgtcttaaacaaaaaacttacatgaaaaatagtaaaaagagagaattgcattcacaaagaaatttagaaaattatgaaattgtactaaaacatatacatatatagatgagtacagtatttgttcacctttataaatgccaaagacaaaaactgaaaaaccacttttttccaactttttcagtgctctatttatatggattgagctatatacacacacacacaacctgggaatgtatttcaaaagagtagataagtatttaaaaactttttcttactattttgttcataataaacatcatgtacatttcaaattaaatatatcttttaacatttttgctggattgttaacttattaaccaaacaattagagatcagactttagtagtgccwgcagaatgggagtggcaacttcaggcatcctttgtaatgagagatttttcttacatcacagtatatcagtatggtttagaaaatcgagttactatctaaactgatatagccagctcattggcaaatgaacaaagcwagttaggccgatgtaaccccctgccagagtttctgtttttgcaccagggtttctgttatatgcatcctcagcaatatcactgtgggaggtgctaaactcaggatgtgtgatttagggattaaatgactctagttgatattgctagctgcaggattcatttcagaaagctcaagacagggattggtatgtgggagttgaatgaaaggacttcaaaattaaaaatactatccctctaaaactcaaagaatgagccgawaaagcataataaaattcaatataattttagcctaatttatgttctaaatatttgaaagatgaagatgactgaaaaagcagttggaagtcaaacttttgccttcaagctatgtattgaaattcattgatacagcaattcttgtaaaagcataaatcaaacttataaagtaggaaggaatatagctaaataataatggaagagwttttctcttgcattactatgtttaccttgtgaaagacttgtaaccttttcaaaattaaagtcttccaagtatttacaagagtagataatgcttttaatatctccatattttatgtttattcagctatcagaaatcctatagaaaatttacatttcaatcagtctttttatactggaggaaataatattttcataataaattttcatagcttgtttaaaaataagtcagctgactggtgtttattctatcctaaaatagatatttatgaggcagaaaaccctgctggcttaaaatttaaatgtgtactaaattaaacaacctttatcaaggaagttttctaagttatgatgagaaaaacaaaatttccatcactaattagt

SEQ ID NO: 277991 - DNA, 607 bp, Homo sapiens
ctccatattttatgtttattcagctatcagaaatcctatagaaaatttacatttcaatcagtctttttatactggaggaaataatattttcataataaattttcatagcttgtttaaaaataagtcagctgactggtgtttattctatcctaaaatagatatttatgaggcagaaaaccctgctggcttaaaatttaaatgtgtactaaattaaacaacctttatcaaggaagttttytaagttatgatgagaaaaacaaaatttccatcactaattagtcattgataaaagagaagaaaatgatctattatctcagattaaatttggcttttaaagatcttgagctgtttattatgagtgttgtttctctaaacaatttcccttatatatacaatatacaataaagcaatagcaatacatatttgctacaaagtgatagctacactctaaaggatataaatcatgtatgtgtttaaaattgatgtgtatagattgtttttctccttattatagattgtttttctccttatctacatatgcagaatggagtttgtttgtgttttgtgtagccatgccattagtggacacaggatagtgttttgaggc

SEQ ID NO: 277992 - DNA, 510 bp, Homo sapiens
tccacaatggttgaactaatttacactaccaccaaccatgtaaaagtgttcctatttctccatatcttctccaacatctgttgtttcctgattttttaatgattgccattctaactagcatgagatggtatgtcattgtggctttgatttgcatttctctgttcttgaatactctggggcagttttaatccttttaagccgctagcaaaggttgtggaaccacatctttggctttctagtctaaagcacatcctcctgccaatgtatctcccaattttagcatcttttacaatcaagacaagctgataatttaacagatcataaagtattggttccttgttaataaacagttcttccctaaatttatttctttccttttgcattttrcaataggcaacaagaggaagccaggcccacctttaaccctttgcttgaacatctcctcagctaaatacccaagttcactgctgacaagttttgttaccgcttataaccatagggcacaattca

SEQ ID NO: 277993 - DNA, 640 bp, Homo sapiens
acaatttatattgttaccgttttggggacagttttatattatccctctaggaaatctcagttaaaaatagcctgctatataaaccacctatgtatttttcaaccagatattccatttcaaattcagtttttaaaaacattagttataggagtcaaakgaaaaaaaatttcagtatttcaagatgattacttaaaaatatatccactttattgagttccttgaatcagaagctaaacatgttgtatatatgtgtgtttttcatttatcctatttaatgcttcatcccacacttctgagatagtcagattaatcttattttaaatgttttcctattatatgaaacatagtgttttacactgtaattaaaacaaggagcttatggaaatgtgaaggcggtttcacttacatgcctaaggaagaagatcaaagctagtaccatgtatatctttttataataatagattcttgcaatcaaaaaacatgaaaagattaggacaagcatagcctacacagtttactcagtttggattcaccctggcatgagaaaagcttagtataattacccttctgcacttacatgaaaacatctaattatgtattttaataaaaatttataataaatatttttgaaagtttgata

SEQ ID NO: 277994 - DNA, 577 bp, Homo sapiens
ttacccttctgcacttacatgaaaacatctaattatgtattttaataraaatttataataaatatttttgaaagtttgatatagccatagctgaaaaaaatgtatatatatgagctgtcacagactagctaatttatattttctcattttaaaatcaagatgaactgctaattttgatcttttcagaaaacagaaactatgtcaaatactaaaactatcatcaataggggtctactgcacaactatgtagcccccagctctttgaatattttaccatgattaatttacaaaaattttatgccatttttcctaaaagttcacttgttatactaatgttgtacatactaatattaccttaataaattgcctattgaatgtataaaaggacactatagaaaaactttaaggaaatataaatgattcattctgatagctaattacaaattaaatgtaaaggagggatagcttgcattaaacagcaatatccccagggactcagataataaggtttaaaaatacttttaaagaataggtaaattaaaggatagatacaatcttctgaacagctaagtattag

SEQ ID NO: 277995 - DNA, 605 bp, Homo sapiens
ttttttattttaagagcagtttcttgtgtgtgcttttaaattgtttcaaattaacttttatatttagaacatggtcatctctgttccaacattttcaaacaccacaataaacagcaatctttgtaacggattaaaaygggctttataaatttagaaaaatctaaattacagattatgacttttcccaatatacattaatcacagtgaaaatgaaatttagctggtattttatatgtaatagaggactataatttgtttttatactagtactagtcttgacctaagtatttacaaatcaatactaattttatatttaatggcatctataaatgtctttatgcaggaagtttaattttctgtgctgtagttacaaatgcatttttaagtacacggagaattttaaatgggcagaagagaatttaaaggtgctatttacataaatgtaaaagcccctaaagtggagaaatctctcataaggaatttcaaacatttgcttgactctggaggcctggcatactaaggaattaggattcctcctaagaattacacatctgaaggctgtcctgaaagactttccatactcgatgatgctcttttgggtacca

SEQ ID NO: 277996 - DNA, 605 bp, Homo sapiens
ttttttattttaagagcagtttcttgtgtgtgcttttaaattgtttcaaattaacttttatatttagaacatggtcatctctgttccaacattttcaaacaccacaataaacagcaatctttgtaacggattaaaacgggctttataaatttagaaaaatctaaattacagattatgacttttcccaatatacattaatcacagtgaaaatgaaatttagctggtattttatatgtaatagaggactataatttgtttttatacyagtactagtcttgacctaagtatttacaaatcaatactaattttatatttaatggcatctataaatgtctttatgcaggaagtttaattttctgtgctgtagttacaaatgcatttttaagtacacggagaattttaaatgggcagaagagaatttaaaggtgctatttacataaatgtaaaagcccctaaagtggagaaatctctcataaggaatttcaaacatttgcttgactctggaggcctggcatactaaggaattaggattcctcctaagaattacacatctgaaggctgtcctgaaagactttccatactcgatgatgctcttttgggtacca

SEQ ID NO: 277997 - DNA, 605 bp, Homo sapiens
ttttttattttaagagcagtttcttgtgtgtgcttttaaattgtttcaaattaacttttatatttagaacatggtcatctctgttccaacattttcaaacaccacaataaacagcaatctttgtaacggattaaaacgggctttataaatttagaaaaatctaaattacagattatgacttttcccaatatacattaatcacagtgaaaatgaaatttagctggtattttatatgtaatagaggactataatttgtttttatactagtactagtcttgacctaagtatttacaaatcaatactaattttatatttaatggcatctataaatgtctttatgcaggaagtttaattttctgtgctgtagttacaaatgcatttttaagtacacggagaattttaaatgggcagaagagaatttaaaggtgytatttacataaatgtaaaagcccctaaagtggagaaatctctcataaggaatttcaaacatttgcttgactctggaggcctggcatactaaggaattaggattcctcctaagaattacacatctgaaggctgtcctgaaagactttccatactcgatgatgctcttttgggtacca

SEQ ID NO: 277998 - DNA, 643 bp, Homo sapiens
agttttgaagtcagtttagaaggagcactttcaacagttaacaatctcaatgcaatcccatctatttattgctgtttcttggcatgttattcaataacttttagttttagtttcttgaaagttcatttagccttactggttagttactatttatatcaagaccaagacagaattgcaatgtaataggaagctcaggtaggtcagtaaatatgtaatagggttccaactcaacaactagctgattattaagttttagataagtcattttgcttctataagcttcattttgcccactcataaaaggttaatgagaactataacaatatttgtcaagcatttttattaataaatctctaatggtgtaggagactcaaaatgattttggaggggaggagaagggtaaagactagacataaatagatagaatgtatccaccaacaatgcattggataaagaaaatgtggtacatataccccatggaatactacacagctgtaaaaaatgaagycatgtcttttgtagccacatggatgcacctggagatgattataaaataattaacacaggaacagaaaaccaaatactgcatattttcacttatgcaaaggataacaattttcacttatgcaaagagggtaaccat

SEQ ID NO: 277999 - DNA, 387 bp, Homo sapiens
gccaacatggtgaaaccccatctctattaaaaatacaaaaattagrtgggcatggtggtgggcacctgtaatcacggctgctcaggacgctaaggcacgagaatcgcttgaacctgggaggtggaggttgcagtgagccaagatggcgccactgcactacagcttggttgacagagtgagactccatcttggggggaaaaaatggtctgaagagtctcagtcccttcatgcagaagggccctgcggttagatatctttggtgcataatttagagcacattagtacaactaatttacactaagctgattgttatgtgtctgtgttaatttattggtgatctttcctattttctatgtagaataataaatgtttgctgtaactgataaa

SEQ ID NO: 278000 - DNA, 389 bp, Homo sapiens
caaggttgacagtatcttttcataggctttctcatattgtttcttttktttttttcactgtgaactcccattaatattattttctgctgttttattgaggtatttatatcttaaaaattcagtttatgaggctttaatataatttaatatatattaatttaatatagttgaaagaaaagaaaaattatagttgcctcacatgttgtacagatgcaaatttacttaattctttgggttcattagggtatagctatagaactgcataaataacattcttcagaaaaatatataaatattgttacaactaaaatgaagtatttattcataagcatcagagaatgaagagaaaaggcagggcatttatattttgaggtaactgtatatgttgc

SEQ ID NO: 278001 - DNA, 601 bp, Homo sapiens
attataagtagatggcaaaaaaaaaaaaggatttttaggagagcactaagcaattggttttataattaccccattaatatgtaatactaacaattggcctgacagtcaggaattaaatgaagtatgagaaaaagaatattctatgaatacagtagttctattttggttcagctctaataatattccctttacaaaatatacctctgctgaamaagtggaaaactttccctcaactttcatataactaggctccattcccatgttggaaaaagactgaatgattaggaaacttttcgagtacatgtgtacttttaaaatgataaatataattgaatacaacctacttaggcatttggggatagaagggttttcttacataacttagttgattggataacatatttagtggaatatggaacaaaagaactgcttatctgtgtcttagcataatgttagactctttgaaatacaaagaatattgagagactttttgtatctagaaatctcttccttgtttaagattcataatgtgaataacaataaacttgactttaccatgctcctctgttatattttgcaaatagattcagtgtttggtgca

SEQ ID NO: 278002 - DNA, 375 bp, Homo sapiens
tggtgtgtataggatatcagaacttctagctgaaagctacttgttgatctccttgaaagtttttttcttttaccttttcctctcatccccctcaataatttttttcctttaaatgatacctattacaatttcttccctatgaaatgagataatttgactatctgcttgagtctgatgtaaaaatagaatcacaccagaggaaataaattagcatttggcaaggatacattttcatttgtggtactgtatttaaggcagttgctaggtgggtttgtggatgatggaacattctagaacttcgtttaaacytttttcaattaatagaaaggatgggagcagaaggcaaaatgaatgtatgtttcagcgtatgtggaa

SEQ ID NO: 278003 - DNA, 599 bp, Homo sapiens
tcatgcttagaaccttctctgagaaacagtcacaataagtattcaatatccaaaaacaactctgtaattattgtaagcttcaagaatacatggtggcccaaacaattgtagcaaagattcttaagagaaagtgtgacagtgttgtagaatgtaccatttttataaaagaaaaaaaagaaaatactgtaaaccacaactkctgtaaatgtgcacctgcttctctatgcttcacatttgttgaatttttagtcctcattgattgattgatctaagcctccatcaaacacattaatatactcaggttgcttaggcaccgcgatctgagtgtaatacacagccacagaatcaagattacctgatgctatgaaaaccacctcgtatagcttgaactttattctgattcacagtgtagtctcagtggttcattcctttgcaacacctgtatactagaatatgttagtggagcttccaaaatttaactaagaattgatacatctaactggatctgtagatattataggacacacatttacagtgttctattggccttgatgccaggagcactctgcctgtgttttgtgcagaattcatattagagt

SEQ ID NO: 278004 - DNA, 641 bp, Homo sapiens
ttctgttattttgtctggcaatccttgctacatgtttacagacttttttcattttacttttatagatatatataaacctgtggagttatgcattagtttggacactagttacagtagacataatattgagaaatagaaccatatacattggaataaaacccaataaattaaataaacaaagatactttggttttgacaagagaaattgttggaaataatgttttacaaggttgaccaatctcactttagcttcctttctccattgtaaagtccgrcatggataagatttgaacgattaatattatttaaatgtatactcaatggctgttgaaggtgcctacctcttaaacaatgttcagactaatgatgacagcaatagacatccgtgtagttggaatgtggaggaaaaatgaacaaacatatcaagaaatagtctcttaaactataaattaagtagaatgagagatatttaagataaattcgggattagtgggaaaacagcacaaatctaaaagatattgagggttatattctatagcctggttttcaaatgggctttttttcaaactgattcactagatgtttttcttcatttcggtgtgcttcccacaacttcattgtattcttcaaatatgttctaa

SEQ ID NO: 278005 - DNA, 602 bp, Homo sapiens
tttcctcgctagtaatttatggtcatccttttacaarttggtggtgacagtgattacagcaaaaggcaactgagaatcctagttccttccacagattcctatagaagttggatattcctctgccttgggttcattaactaatgaaagttctatttatttcaacttcaaacaaatgttttatgacgtttaggtgcaagacaaggtcaatcattttttattactcaattattcacttattctttcatttattgaacattcattgaacatacagggaaacatagtttctcccatgtttccctaattatagacagagttataaataagcattactttgagaaaaataaaaactaagtgccatgagaacatctataaaaatacgtggtcatttacatgaccacctgtttttgatctgtctctctatccagaaagtaagtcaggatgccactacaatagtctatcagtaagaatgaaactatagaaacagcagtgaaagtggcaaggatattgtgccggatatgttttggtgtgttgagcttacctgatcctcctgtccttagtctctgctgctgaatatatggacctagatggctaaatgtcaccct

SEQ ID NO: 278006 - DNA, 465 bp, Homo sapiens
tccagccctggcctttaagaaatatatcaccttgctcaacctctctcttagatgccaactctctgtggaaaagaagaccaggaaagattactgggtgatgagatactatacagagagagacagagacagaggtagagatcacatggagcagtattgaggtgccagatgtgttaaggcgctctcttgaaccttctagcccaaggcagctgctagttaaatgcagccaagccaatgaccccagctaatgccaagtggggcagaagaacctctctgttgaactttacttgaaytgttaacagaaaggtcataagaaatgacaacttattcttcttttaaatttggggtgtttttttatacagcattagcaactgaaactgtggcccattagacgttgtcaccatctcttcaaaaaaaaaaaaaagaaacaaaaattacatagaaatttagacaaccttcacaaggtca

SEQ ID NO: 278007 - DNA, 386 bp, Homo sapiens
ctgtggttcccctctagctagggctgctttaaatgctacctccatgggtgggcatcaactgactttgttctgatttttgtttctacactagcaggacagcactgagttcaatgcctcacaaatgctgtgctcttcttacctcagtacccagagacactttccacactaggcagctgctgctgggtggggggtggggsggatgtaggggaggggtggtgtcagctattccaggctatttttttctgtctctttagtgcctctttcagtgaaacaatgttaaaaccagattatatgagggttcacctgattttttgttttatgaggtgtttcttctgtatagacagttgttaagttggtgtccttgcaggaattggggggtggggatg

SEQ ID NO: 278008 - DNA, 600 bp, Homo sapiens
aggtgctcaacatcatgagtcatcagagaaatgcaaataaaaactacaataagacatgttaccccagctaaaatggcttatatccaaaatataggcaataacgaatgctagtgtaggtgtggagaaaagggaacactcttacactgttgttgggtatgtaagttaataaaaccactagggagaacagttcrgaggttcctcaaaaaaactaaaaattgagctaccgtatgactcagcaattccactgctgggtatatacccaaaagaaaggaaatcagtatattgaagagatatttgcactcccgtgtttgttgcagcactgttcacaatagccaagatttggaagcaacccaagtgtccatcaacagacgaatgtgtaaatattttatccattttctttattcattgatccattgatatccattggtacatatacacaatgaaatactattggtacaatggtatccattggtgcatatacacaatggacgatgggatatagagtatggaaggattgttaccagaggatgggggttggggggagaaggtggggatggctaatgggtaccaaaaaaggtaattaaaagtgttaataagccc

SEQ ID NO: 278009 - DNA, 516 bp, Homo sapiens
cctctcccttcagcccaaggtctgcaccctccctccatctactctcaatgcccttcttctgaagatctgctcagagtgggctagtcttctcgagggyctggtctctcagtggaggaagctcttcttggctgcatcaagtcagccatcttggctcagccgcaggatgctcttggtggacctttactctcagccattatctctgcatattttctaggcccatcctttcctactttccgagtactctagtgacatgaatgtcattttgttatagtcccacagatccctgatactgtttttaacaattataattgtaggtatttatggggtacacagtgatgctttgatacatacaatgtatgtatccgatcagggtaattagcatatccattatctcaaacatttatcatttctttgtattgggggcattcaatatccttctggctatatgaaactatacattgtccatttttattcagcctattttatctgttgttcaggtcgtatcatttctattct

SEQ ID NO: 278010 - DNA, 623 bp, Homo sapiens
ggactttgcagggcagggtattgtagaaacagagaaagtgctctggaagtttccactgggtttttcctggttaatataccaaaaacatctgagagaaatttgtcattagcagtcagackacaaaaatgtttttttaaaaaaaatcacattaaataaaatataagccagtaaaaactcaggtcctcacaaaggaaagaaaacattagaagtgatatagatgtgagtaaatataggtttttctattgtttaaaaataacataactgattatttgactacttaaagcaaaaataacaatgcattgaggggtttatcatatgtagaaaatcatatgtgatcataggacaacgtatgggaaaaataaataaatacctaataagtttcttagatcatgtgagaagtggcataatgttaaaggtagagtatgttaagttaaaggcttattttgtaaaccctgcgaaaccatcaaaaattgttaaaggagtatagtaaataagcttgtagaagagacgtggaatactaaaaatgatcaatttttaaaaaggcaagagataattcaaaataaacacgagacaaatagaatgtaattataaatccaaatcatggtaggcttaaacaaaagcac

SEQ ID NO: 278011 - DNA, 623 bp, Homo sapiens
ggactttgcagggcagggtattgtagaaacagagaaagtgctctggaagtttccactgggtttttcctggttaatataccaaaaacatctgagagaaatttgtcattagcagtcagactacaaaaatgtttttttaaaaaaaatcacattaaataaaatataagccagtaaaaactcaggtcctcacaaaggaaagaaaacattagaagtgatatagatgtgagtaaatataggtttttctattgtttaaaaataacataactgattatttgactacttaaagcaaaaataacaatgcattgaggggtttatcatatgtagaaaatcatatgtgatcataggacaacgtatgggaaaaataaataaatacctaataagtttcttagatcatgtgagaagtggcataatgttaaaggtagagtatgttaagttaaaggcttattttgtaaaccctgcgaaaccaycaaaaattgttaaaggagtatagtaaataagcttgtagaagagacgtggaatactaaaaatgatcaatttttaaaaaggcaagagataattcaaaataaacacgagacaaatagaatgtaattataaatccaaatcatggtaggcttaaacaaaagcac

SEQ ID NO: 278012 - DNA, 534 bp, Homo sapiens
tgggagtccagtattttgtatcttaagtgtatcaatgactgtatctcatctgatactgtattagtttttcaagatgtcaccattgagggaaactctaaagggtataccagatttctctgtattatttcttataactgcatatgaatctataattatctaaaaaattttaaattatgaaaaaaatcttgatgaagcatagctattatacttagaaagccatgatattgaggtaacatacagaatttttgtgttgttaagacagggtctcactctattgcctaggctggagtgcagtggtgcaatcacagctcactgcagccttgatttcccagactcaagtgatcctcttgccttagccttctgagtagctgagactacargcatgtgccatcacacccagttgatttttaaatttttatttttagtagagatcaggtctcgctatgttgctcaggcgggtcttgaactcctgagctcaagcaatcctcccacctcaactggacaaagggttgggattacaggaatgagccacca

SEQ ID NO: 278013 - DNA, 534 bp, Homo sapiens
tgggagtccagtattttgtatcttaagtgtatcaatgactgtatctcatctgatactgtattagtttttcaagatgtcaccattgagggaaactctaaagggtataccagatttctctgtattatttcttataactgcatatgaatctataattatctaaaaaattttaaattatgaaaaaaatcttgatgaagcatagctattatacttagaaagccatgatattgaggtaacatacagaatttttgtgttgttaagacagggtctcactctattgcctaggctggagtgcagtggtgcaatcacagctcactgcagccttgatttcccagactcaagtgatcctcttgccttagccttctgagtagctgagactacaagcatgtgccatcacacccagttgatttttaaatttttatttttagtagagatcrggtctcgctatgttgctcaggcgggtcttgaactcctgagctcaagcaatcctcccacctcaactggacaaagggttgggattacaggaatgagccacca

SEQ ID NO: 278014 - DNA, 394 bp, Homo sapiens
tgaacatgcttaaggaattggagagtctggctgaacacaagacatgggagaagagagcagaaactgggtgtggaaagagaagccggggctagattaagaaacgtctttataatgtatcttatgggcataaaggagctatcaaagcagtttaggaagaaaaatgtcatgatgagaattgtgttttagtgatatgaagctggtattagtatgctggatgacttagcagacagattatacycagaaagtatatcagatgtttctcctgggaaagccaggaaaaggaaaaataggtgtgcagacagaaaataaaagacgagccaaggtctagcaaaagattaggggtgaagggtgtcatggaatccagaagcaaagaggcaaaggaatgaggtgacaa

SEQ ID NO: 278015 - DNA, 394 bp, Homo sapiens
tgaacatgcttaaggaattggagagtctggctgaacacaagacatgggagaagagagcagaaactgggtgtggaaagagaagccggggctagattaagaaacgtctttataatgtatcttatgggcataaaggagctatcaaagcagtttaggaagaaaaatgtcatgatgagaattgtgttttagtgatatgaagctggtattagtatgctggatgacttagcagacagattatactcagaaagtatatcagatgtttctcctgggaaagccaggaaaaggaaaaataggtgtgcagacagaaaataaaagacragccaaggtctagcaaaagattaggggtgaagggtgtcatggaatccagaagcaaagaggcaaaggaatgaggtgacaa

SEQ ID NO: 278016 - DNA, 576 bp, Homo sapiens
ggttgtaagttgaatggggaccataaaggaaagaaagtatttcagatggagagagatgactatatttmtatgttgagtcaaggatactcccttttctttaagttggcaggttaattagaatcaaatcatctatgtaggaggcctctcatacaccctaaattttggcaaattgtcacctttaattctattctttcttaattgccacatatgggaggtagaaaatgggagtctcaatgcttgttttgaacttagaacccagagaatgaatctagcattaccagtcctaattgctaagcagaatgataaaagtcactttataatcaccgtgaaaccatgaaatggcaatgaagaaagctgccacatgattaagcgaggcagaaaccagagtagagttaatcctagccagaagattagtcacagaaagggaatgaacaagagaaggaggcatcagtgggcatgataagggataataattacatctgtagattgaacaccacagaattttgacatcatttagtgacattcacatcttagagagctgctgcagtgggcaagtcattgtattttttccccaaa

SEQ ID NO: 278017 - DNA, 1141 bp, Homo sapiens
ggttgtaagttgaatggggaccataaaggaaagaaagtatttcagatggagagagatgactatatttctatgttgagtcaaggatactcccttttctttaagttggcaggttaattagaatcaaatcatctatgtaggaggcctctcatacaccctaaattttggcaaattgtcacytttaattctattctttcttaattgccacatatgggaggtagaaaatgggagtctcaatgcttgttttgaacttagaacccagagaatgaatctagcattaccagtcctaattgctaagcagaatgataaaagtcactttataatcaccgtgaaaccatgaaatggcaatgaagaaagctgccacatgattaagcgaggcagaaaccagagtagagttaatcctagccagaagattagtcacagaaagggaatgaacaagagaaggaggcatcagtgggcatgataagggataataattacatctgtagattgaacaccacagaattttgacatcatttagtgacattcacatcttagagagctgctgcagtgggcaagtcattgtattttttccccaaawctctcatacaccctaaattttggcaaattgtcacctttaattctattctttcttaattgccacatatgggaggtagaaaatgggagtctcaatgcttgttttgaacttagaacccagagaatgaatctagcattaccagtcctaattgctaagcagaatgataaaagtcactttataatcaccgtgaaaccatgaaatggcaatgaagaaagctgccacatgattaagcgaggcagaaaccagagtagagttaatcctagccagaagattagtcacagaaagggaatgaacaagagaaggaggcatcagtgggcatgataagggataataattacawctgtagattgaacaccacagaattttgacatcatttagtgacattcacatcttagagagctgctgcagtgggcaagtcattgtattttttccccaaaatttagccttttgcttcaggtacttgccttctttgagaatgtactcgattaagagagaagcaatcaaggctctataacataatgtctcaaggcatttagaatactttttcacccaatgaacagtgcaagc

SEQ ID NO: 278018 - DNA, 576 bp, Homo sapiens
ggttgtaagttgaatggggaccataaaggaaagaaagtatttcagatggagagagatgactatatttctatgttgagtcaaggatactcccttttctttaagttggcaggttaattagaatcaaatcatctatgtaggaggcctctcatacaccctaaattttggcaaattgtcacctttaattctattctttcttaattgccacatatgggaggtagaaaatgggagtctcaatgcttgttttgaacttagaacccagagaatgaatctagcattaccagtcctaattgctaagcagaatgataaaagtcactttataatcaccgtgaaaccatgaaatggcaatgaagaaagctgccacatgattaagcgaggcagaaaccagagtagagttaatcctagccagaagattagtcacagaaagggaatgaacaagagaaggaggcatcagtgggcatgataagggataataattacatctgtagattgaacaccacagaattttgacatcatttagtgacattcacatcttagagrgctgctgcagtgggcaagtcattgtattttttccccaaa

SEQ ID NO: 278019 - DNA, 597 bp, Homo sapiens
caagcaataagtgctatgagttcacacagagagaaaggaccactgaataacagacatgtacaaatgacttatctatatatgcaaatccattgaacaatccattgagtgtgagaaggaggcaatgtcctcattttgtatataaaattcattaaagtcttatggtatccattgctttgaagactcccacaacttgtatacagactcagaaaactgtgaacagctttatgtttttttttttttttttaaccagccaaccccattaattacctaagagtgctacatgctgagcacaatatcaggtacaatatagccagccttgaaagtccatggtgttttttattttgctgatatttctaaaatgyttcaaataactgtgatacacaaagaaataaccataggcttgagcttggaaggtgttaacagagtgatttcaaaataaaaggtttttctccatataagtgatttttacctccaatcctcccaaagaaaaaataagcatagagcatcataatgtgataattataacacattacttagtattagtcctcaatttttgatgacatccctgaagctcagatatttattggaaaagttagg

SEQ ID NO: 278020 - DNA, 544 bp, Homo sapiens
ctgtcctctttgtgagtttcaaatatctatgttgaaattttgaaagtgaagaattattttgttctctctgctttattttctctctttgctgggatattacttggaaaactctggcaaaataaatgggaaataggtaaaataagaaaaaatggagagagaagacacacacatttataaaaccatattataccccactataagtagatagaagtcaaaacatcgatatacaaatraacactcatatataccaggtatgtatttgtgatgaggtaactagacatagacttttcaagagacctaaatttaaatgttttgaacagtttctatagataaagaaagcaagttactttgaaatatacctttttgttttgttttggaatagccaacagaatcactatgtagtcactcaaatatatgacacatattttattcattgttcatggtgaagactctacatggtggaatgatgccaaatatgaatccttcagtctagaatgttaactattctttttataaatataaaggactcctcagtgatgaaagc

SEQ ID NO: 278021 - DNA, 542 bp, Homo sapiens
ataataatatttagtttgcaaagtaattgttaatactccaatgagaacaatataaaatgcctggcacacagtagyttcaataaatgatatttaatattattactaccactatggaagtactttcttaaaaatatgtaaagtgtcacaaatagcaactgttataattttaaaagtttttgtagatttcaaatcagggatggggtcagcaaaagtatgtgcatgactaataggctttaattccagccaatactgtgtcttacaattactatgttctctctttagaaatagaacatcaaatgagaagatatttttgttttctcccatcaccaatgacagcagtcattttcaggatttcgactgataagtttcagagttgctttgcctaaggatcatgtccctgatctgcacctgtgccctgcccaccctcaccctttttctgcccaaataaatcagtctgggattaatctttgcagcttcattcctcactgctcccctcagtgaataaaatttgggccagagtgggggaattcctgaatgtgcca

SEQ ID NO: 278022 - DNA, 542 bp, Homo sapiens
ataataatatttagtttgcaaagtaattgttaatactccaatgagaacaatataaaatgcctggcacacagtagcttcaataaatgatatttaatattattactaccactatggaagtactttcttaaaaatatgtaaagtgtcacaaatagcaactgttataattttaaaagtttttgtagatttcaaatcagggatgggktcagcaaaagtatgtgcatgactaataggctttaattccagccaatactgtgtcttacaattactatgttctctctttagaaatagaacatcaaatgagaagatatttttgttttctcccatcaccaatgacagcagtcattttcaggatttcgactgataagtttcagagttgctttgcctaaggatcatgtccctgatctgcacctgtgccctgcccaccctcaccctttttctgcccaaataaatcagtctgggattaatctttgcagcttcattcctcactgctcccctcagtgaataaaatttgggccagagtgggggaattcctgaatgtgcca

SEQ ID NO: 278023 - DNA, 581 bp, Homo sapiens
caataattcctaatatggggctgaaatcagacacacacacacacacacgtgtgtgtgtgtatatatgtgtgtatgtatatatatatatatatatatatatatatatatatatatatatattctctctgtgatctaaaatttaaattttattgtcgaccagataaataactcccaatgtaaagagcagtcatcttggaatcagaagactcaagtttttctctcaattctgccattctcattataccaaattaccatctaaggagaaccaaactgtctttgtctgtgaaataaattaaatatcacctaccttaaagggtgggtgagagggtcraattagttaaatgatgtacatatgcctggtacagtgtgaactactccaataatatcagttatttgttcttcatcatttaacatcatattctaaattattgcagagtcagaaggatttaaagaaaaccagtcagtatggagtcaagcacactcgtcttcctatcatctcctcagatcagcactggtgatgtgctttctttttactgatgttttatgcacccaaggttcacagaaaaccctggcctattaat

SEQ ID NO: 278024 - DNA, 546 bp, Homo sapiens
tgacataaagctctgaggactcttctggcttctattgtctgacaagtcatcttagaagttcattgcttaaccgttttttactgtaagactatgtgctttccacactagaacaaccaatrtgaaataacaattatcagtgaaacaggcatccgtattacttctacttggtattacctaggcaatcattgttctcattaagagactcttttgcccctctaggggtagttggattgggtgttaacagaaaaataatttgcaaacttgactcccaattttattatcaatgactcctaatatgaaactgaaatatgggtaccctaacctccactcatcataacctcagtctatttatcatcttatttttactcatatatcttacctgataaaggaagccattagctgcaagattcctatcctgaaaattagcagtgataactttactctttttaggtgctcatatttgtataaaaagcatagatattaaacatatatgtaagacacaatttaaatgtattgatgtcttatacacacacacatacccacatt

SEQ ID NO: 278025 - DNA, 546 bp, Homo sapiens
tgacataaagctctgaggactcttctggcttctattgtctgacaagtcatcttagaagttcattgcttaaccgttttttactgtaagactatgtgctttccacactagaacaaccaatatsaaataacaattatcagtgaaacaggcatccgtattacttctacttggtattacctaggcaatcattgttctcattaagagactcttttgcccctctaggggtagttggattgggtgttaacagaaaaataatttgcaaacttgactcccaattttattatcaatgactcctaatatgaaactgaaatatgggtaccctaacctccactcatcataacctcagtctatttatcatcttatttttactcatatatcttacctgataaaggaagccattagctgcaagattcctatcctgaaaattagcagtgataactttactctttttaggtgctcatatttgtataaaaagcatagatattaaacatatatgtaagacacaatttaaatgtattgatgtcttatacacacacacatacccacatt

SEQ ID NO: 278026 - DNA, 551 bp, Homo sapiens
ctaggtgacataaagctctgaggactcttctggcttctattgtctgacaagtcatcttagaagttcattgcttaaccgttttttactgtaagactatgtgctttccacactagaacaaccaatatgaaataacaattatcagtgaaacaggcatccgtattacttctacttggtattacctaggcaatcattkttctcattaagagactcttttgcccctctaggggtagttggattgggtgttaacagaaaaataatttgcaaacttgactcccaattttattatcaatgactcctaatatgaaactgaaatatgggtaccctaacctccactcatcataacctcagtctatttatcatcttatttttactcatatatcttacctgataaaggaagccattagctgcaagattcctatcctgaaaattagcagtgataactttactctttttaggtgctcatatttgtataaaaagcatagatattaaacatatatgtaagacacaatttaaatgtattgatgtcttatacacacacacatacccacatt

SEQ ID NO: 278027 - DNA, 546 bp, Homo sapiens
tgacataaagctctgaggactcttctggcttctattgtctgacaagtcatcttagaagttcattgcttaaccgttttttactgtaagactatgtgctttccacactagaacaaccaatatgaaataacaattatcagtgaaacaggcatccgtattacttctacttggtattacctaggcaatcattgttctcattaagagactcttttgcccctctaggggtagttggattgggtgttaacagaaaaataatttgcaaacttgactcccaattttattatcaatgactcctaatatgaaactgaaatatgggtaccctaacctccactcatcataacctcagtctatttatcatcttatttttactcatatatcttacctgataaaggaakccattagctgcaagattcctatcctgaaaattagcagtgataactttactctttttaggtgctcatatttgtataaaaagcatagatattaaacatatatgtaagacacaatttaaatgtattgatgtcttatacacacacacatacccacatt

SEQ ID NO: 278028 - DNA, 543 bp, Homo sapiens
caggccgccactacctcttgtattcagatgcatacattatttcaccgtgtacatttccctggtaattccagaggttttgttgacatatctttcaaagcaaaattcaggyacatatttgtttccattgctcaaagaaaacccccttaaaagacagattgtgtggtgccattggctaagcagcttggaagatgcagttcttgcaaatatctattagttacatctgccagatctgtagaagaaaacaattctccatcctgagtcacccaggtgataacataagaggaattgttacctgggtgtttttctcctgtatgactcagaaaggagatttacttttttttccatcaaaattaaccctcatttcttattgtctgatattatctaatcattgttaaggtgtaaatcaccagaagggtgctgaaacagttacatttctcatacttcttagtacagtttaatcttagctgatcctcaaaggatctctaaatgatgacattttagatatgatggaaagccagtggaaaatgtatttgccaggagtac

SEQ ID NO: 278029 - DNA, 328 bp, Homo sapiens
tagagaaaggctggttggaacaatctcrgttatctaatacctgaagaatgtcaagtcaaaccaactttgaataatcaatctgagcatgacacaaatactttgaaaataccttgccaggaaaaaccattcgggttttttatggtagctgaccacagaactacttttactgcttagccaagcaactcctccacactgctacagagagagcaggcaattctaatgcagaaaagattattccaaactcaagttgcttttttgtctctttgagatatggattttgatatacagttaaagtataaatgccaaaatataagtaaggttaaagtag

SEQ ID NO: 278030 - DNA, 581 bp, Homo sapiens
aaataacaggatgaagatggaattttagaaactgccactgtctttgactcagttctaaaaataatgcaaaacgtattactattttccaccattccagaagggagatcacatataggataggcaaaataatataccccaaatcatttctatttatttagaaatacatttacatttaagtattacttgaatttggggcaattgacatatttcaagaccaataaagaaaataaaaataattggctgagccaagaactggctgttacctcaaatgggaaagttttctctctttggggtttaggytactatagaaaagactggccaggaatgaaatattatgaagatcatgctacagtggccctatacaatgctacttctgctggtgctcctatatccaggaatcttccaggtttcctactttggaactaaccttttcaactacaatggaaaatagagttactgcagaccaaacattattttatatatctatcgttttccccaatgtgagaaggaagatacattagcacattccctcagcaagagtgaaaaaaaaattaattcaaagtacaaagcaaacagaaaat

SEQ ID NO: 278031 - DNA, 574 bp, Homo sapiens
aatttcattcttcttcctttcttgccgagtagtgaaaaaaagaggatggctggtttatctcaagtaatcagacatttaataataatayagaaaatacactttataaaatcacaaaatagagtaattattcttccacaacacatctgacacagtgaataaaacatattattgcttaaggaaatgaataatttgtggtaacattttttaaacttggtatatgtggctctgaaagacatgctgaacaaatggagagcccaaggaatatcaaggaaaactagttataatcttggtaattggtgtgatctcacttacattctcaaacaatgcataggactggttgtctgtcatactttggcaccaaatcagaaggtggtacttctaagagacatctcaagatttctatcccaataacaaattattgcattgtacagtagggcacattctgctataaataaaaccagaagcattctagttatataaaaatattaaagaatagtagcaatgacaacaggctacccttgcactttctctgcctaagtttcacaagcagatagaaggtagacactatcctata

SEQ ID NO: 278032 - DNA, 630 bp, Homo sapiens
gcttaattatccaggtgggactgctatggtttgaatgtgtgggttcctccataattcacatgttgtcactttaatctccaacatggtggtattaagaggtggggccctgaggaggtgattagttcatgagagcttcaccctcatggatggattagtggtgttctaaagggtcttgagagatagattttgtctcttttttgcctttctgcctcttccatcatgtgaggacacagcaagaaagcaccatcttggaagcagasagcagccttcaccagaccctgagtctgctggcatcttgatattggacttcccagcctccagaattgtgagaaataaatttctattatttataaattacccagtctaaggtgttttttttttttgttgttgtttttttttttttttggtgacagcaacaacaaaaaacaaatggaccattgtaatcacaaggattcttataagagggagacaagagggcaaagtcagagacagaagatacgatgccagaagcagcatttagacgataaaaggaggagctgtatgccaaggaatacaggcagcctctagaaattggaaaaggcaaggaaccagagtgtcccttagcggttccagaagggacacagctctgta

SEQ ID NO: 278033 - DNA, 598 bp, Homo sapiens
catggtgttaatacactaggtggtcaataaatgctgaaaacatgagtgaatgtggtcacgatgatgggaagggtgctgctctttgagagtagtaattattcttgaggatttttttttttaccagtggtaataatggtcacagccatccttaatcttttcttaattctccttgtaataaaaagctacttcccaagacagcattctgtccaaaaatttagaccatggggaccctctagatattttgtgcctataaaccagcaacaccaacaccaacttaacatgaggattctccactctggcaatatttgagtcaatcatttatttatttatttataagaaagcaacatatagctcttagaaagagcccattaacatatattaatgctcaaatttattactgcaaatgcaaatgattagaaagtatggagcaaagacaaatgctcagaacagactaatactaacttaggaaacactttgtaaagaagttagttgtcaggaaagcattaaaaattttatttgacctaattttatgtaaaatrgaaaggatattggagagatggtataatcatagattcttaagttgcgaggatcctggaaa

SEQ ID NO: 278034 - DNA, 561 bp, Homo sapiens
atcttattattataattctatttagtagaggatgtgaatgagatacaaaaatgtcacgttgcttactcggccaggaagaaatagcccaaacttagagccccaatcttacttatcatagggctctgaagtttagtgggttcaaaatataactgttgaactttattctttaaacttgatcccctcctgtcttctccatttctttaaaaagatcctagttgatcatccttgactcatctctttcttccacaatcaacattgaatctgttggtcaagactagttcattctcttttttgaaaaaattaacaacttgactcctttaaaccacctccacttcttctgccctattttaagmcattagcatctctttcctggacaataattggcccccactcctaacttatccctctattcaagtgttgctcccctcccctttcattttctcctcacagccagaatattctttaaaaagtcataaaatgacatggatcagattatgtcactccttttctcaatacatccaataactcattagacattttcataccctgaaaggcagtaat

SEQ ID NO: 278035 - DNA, 564 bp, Homo sapiens
tgtgcttctgtgtcaactaagtttatgcaacactttaaaatcttttgttgttggttgggagtggtggctcatgcctgtaatcccagcactttgaaaagccaaggtgggtggatcacttgaggtcaggagttcgaaaccagcctggccaatatggtgaaaccccgtctctagtaaaaatacaaaaattagccatgcatagtggcagacacctgtaatcccagatactagggaggccgaggcaggagaattgcttgaacctgggaggcggaggttgcagtgagccaagatcacaccaccacactccagtctgggcaacagggtgaggctccatctcaaaaaaaaaaaaaaattaaaatcttttgttgttatttcarcaatgtgatgttcacagcatcttccctacaaaagtttctatctcaacaaataaaccatttattttttgctcatcaataagaagcaactcatttattcaagttttatcacgagattgcagcaagttagtcacatcatcaggctccatctctaactctagttctcttactgtttctaccacttctgcagtct

SEQ ID NO: 278036 - DNA, 558 bp, Homo sapiens
acatatttacagcatcaattttgtatagtaacaattcccacctctatgctatcttttttgttcccattttttctattttattccaagattttaaaaagcaacggaattttctctgccgcaagaaactaaaagcatttctgctttatgtacatactgtacattaaattcaataaaattatctaatacaaagttattttttccagatcttggatttatttttaatacccacatttacatattttaaatggattaaagcaggtgaatgtattaatgattagagatrattatattaatttggattcttaattgtgatagaaacttaatctagccaactttgaaaagaaaggtaagagtagtagcagttgacaatcacgtaatctaaaggaaggttgttgttatttgaaaattgacaaactaaaccagcaacgaaacaggatctacaatagtgatttttataccaaacagtctgccattgaatcacatggtcttcaaatttgatttccatcctttgctcaaatttcaaagctctagaggaacgcatttgactggccaatcttg

SEQ ID NO: 278037 - DNA, 572 bp, Homo sapiens
gattcgatatatgctggattctctgttgtcaatttgtcctgattgccagcttcttcttagatatttctgcatatcaaggaagaagctgggaactacattttccagattccccttctccacctggtttcaagttagagtcagctaatgagagacacttgcatgaaatctagaaagtgaaagacaaggatagaccattaattcacagaaacagatttggacagatatgtgtgctggtgtcagaggtaacgtttgaagcaaatttcaggttaatttcttaagaactagctgcttaggtgctgcaggatagggttgctggtaatagccttcctaatytttgttccctgggtgcttccagtcatggcataattctttatttcttctaattttacattcaaatataaacctgtatatttgaaatacatggaggtttttcttgatgcctgactgcaaagaaagtttcccattcaattaaatggaggagctgactgttgatctgagtctgttgtataatttcacaagtggaaaaccatactaaacaaaaaagaaacaagcaaacaaaaattgctgccaaa

SEQ ID NO: 278038 - DNA, 551 bp, Homo sapiens
gtgtgtctcattgtggttattggtttaaaatgttcacagtaaatcaatgcaataggataaagtatgaaaatccaccagtgaaataaaatatgcaaaattcaggatagtgtttgacttaggatgggatatggtagaaaaggagatgtgattagggagaaggattttcaactttcataaagttttatttctcaagctggactgaggattggtacatggattttgtcataacatttatccaattttgagtgtctgaaatattttataattttaaaaatctcatactctctcaaaccccctttccctatttcatttttccaaaagtttcaggagttttaaaaaatgaagatagtaaatctctttttaaaaatatttgttccaatcattcatttttttgctctgattgaatccatttgtttactcatggtttcagctacttctgaacccatttgatgacttttgacataaatgtattagtacacaagtataagtacatttcttgttgactatcaagaamatttctttattttgatacagtgaaattaagagacaag

SEQ ID NO: 278039 - DNA, 573 bp, Homo sapiens
cacatccgtagaataaaattggtcatggtgagmgtacttacaccaacccttacaaatctgggtttatttggaaacctatttgttaaacatttactattataacactgttcaatgggcacttttcacttggactaggctgagaaaagtcgtatttagtagataaatgtaaaaccattcccttgaatattgtaatactgtcattttccttaacattctgtaatatctaataccactgcacaattgaaaggctgagctgtagctagaaatggggaaaagggcaatgaagggacatgaagctcttggtaaccaatagtaagagactaaaggaaactgttcatgtatcatattcattctggtgtattatctggatgcttcaatgctggcatgaataaataaaccctaaggcaagctgcagagagtcctttactcccaggcctcttctcccaccagctatcagtgtctgctgtttcagggtacacaaggaaagagacacatatgaaaaagaaatacatttttctgctccttagagttcttggtcatgaaaaccaagacagtcattatgtgctccactgc

SEQ ID NO: 278040 - DNA, 602 bp, Homo sapiens
ctactcttttctttttgtagtcttgttcttgagatctctctctctcttttctcctctctcctacctctgcctcttttcctctctctgcctctggctcttttctctctccctgcttgttgattttaaccacctctctgtatttttaatccccccctacaagatctaggtcttttgtttctcaagtatttttaaatgtcaaatgggtacttccaaagcaaaatatcctcactaaactaatgtttttccttttgaaactagcttatcttccttacagtyctattaaaaacagatactatttgaatgtctcatgcccaagatatcagcccctcaacccccaaacaacacatacctgctgtattggattggacttctgagaagcaaaggctgagccaggaatttgatattgtgacttactggaggagagcttgtcaggaaatacctgtaaagatgtgagagaagggaaaggagtgtagtaagaatgtgatactaggtaaagaggaggaagggatatggttttggagcataaactaaaccatagaattgttttccctttaacacaagactggtcatttgtgccttattaactattaactgactatagg

SEQ ID NO: 278041 - DNA, 585 bp, Homo sapiens
atgccttatccaccatcaccgtattctacaaagctttgctgctgtccaaggcacttactttatggctaaagaagtgcagcagtaggctcatgctcatggaattcactggtcttaccatgttccccattgtcctgaagcagctggattgacagaatggcgaaatggccttttgaagtcacaattgcaatgccaactaggtaataatacttttcagggctgggtcaaagttcttcaaaaggctgtgtattctcagaatcagtgtccaatatatggtactgtttctcccatagccaggattcatgggtccagtaatcaaggggtgaaagtggaagtggcagcaatcaycatcacccctagtgattcactagcaaaatttttgcttcctgtttctgcgacattacattctgctggcctagaagtcttagttccagagggaggaacactgccactaggagacacaacaatgtttacattaaactgaaagttaagattgccacctggacactttggattcttcccacctttaagacaacagactaagaagggagttacagtgttggctgggatgattgacccagactgtca

SEQ ID NO: 278042 - DNA, 585 bp, Homo sapiens
atgccttatccaccatcaccgtattctacaaagctttgctgctgtccaaggcacttactttatggctaaagaagtgcagcagtaggctcatgctcatggaattcactggtcttaccatgttccccattgtcctgaagcagctggattgacagaatggcgaaatggccttttgaagtcacaattgcaatgccaactaggtaataatacttttcagggctgggtcaaagttcttcaaaaggctgtgtattctcagaatcagtgtccaatatatggtactgtttctcccatagccaggattcatgggtccagtaatcaaggggtgaaagtggaagtggcagcaatcatcatcacccctagtgattcactagcaaaatttttgcttcctgtttctgcgacattacattctgctggcctagaagtcttagttccagagggaggaacactgccactaggagacacaacaatgtttacattaaactgaaagttaagattgccacctggacactttggattcttcccamctttaagacaacagactaagaagggagttacagtgttggctgggatgattgacccagactgtca

SEQ ID NO: 278043 - DNA, 563 bp, Homo sapiens
agcctacctctttctcccatgctggatgcttcctgccctcaaacatcagactgcaagttcttcagctttgggacttggactggcttccttgctcctcagcttgcagaaggcctattatgggaccttgcgattatgtgaattaatactacgtaagaaactcatatataygtatgagtattaagtgtgtgtatatataaattataaatttatatatacaaattataaaaactcatacatatatgagtttcttatgtacatatatacacacacttactaaactcatatatatagatagatagatagatagatagatagatagatagatagatatctcctattagctctgtctctctagagaaccctgagtaataaagctaccttcaataagcttctttgctctatggggatatttgtctatcaagtcctggatgcctgataagccctctagcttttctagttattctaggtagaagcattaatttaatatgttacagtgtcataatcagaagctaaagcctacacattggattttagttggtgctttccctgtacttactgaaata

SEQ ID NO: 278044 - DNA, 584 bp, Homo sapiens
cttctgttccctaaagctacttctgactatcctgttcttaaaatcgggttctttggcaatacactaactatattagtccattttcacactgctataaagaaatacctgagactgggtgatttataaaggaaagaggtttaattcacttacagttccactgagatggttggggaggcctcaggaaacttaaaatcatagtggaaacgggaggaaacacatctctcttcacaaggaagcaagagaaagaartgcaaagcaaaggcggaagagccccttataaaactatcagatctcgtgagaactcactcactagcacaagaagagcatggggaaccacccccatgatccaatcacttcccaagaggttcctcccccaaattacaatccccaattgtaattggggattacaattcaagaggagactagggcggagacacagagccagatgataccactaatgtaaatttcctaagtatgcaaggttggcaatctttcacagtaagtatttgatttatctataacagggcctaatctctttattgccattcttaccatgtcagttctagagtaaatcgtttatttct

SEQ ID NO: 278045 - DNA, 1040 bp, Homo sapiens
tgggtgatttataaaggaaagaggtttaattcacttacagttccactgagatggttggggaggcctcaggaaacttaaaatcatagtggaaacgggaggaaacacatctctcttcacaaggaagcaagagaaagaaatgcaaagcaaaggcggaagagccccttataaaactatcagatctcgtgagaactcactcactagcacaagaagagcatggggaaccacccccatgatccaatcacttcccaagaggttcctcccccaaattacaatccccaattgtaattggggattacaattcaagaggagactagggcggagacacagagccagatgataccactaatgtaaatttcctaagtatgcaaggttggcaatctttcacastaagtatttgatttatctataacagggcctaatcwtctttttgtctctctagttctttttgtctctctagttctttttgtctctctagttctttttctctctgcccattcttttaattctgatcaccaaacgcgtagggccaggactgcttagagaatgaggaaaagcagatgtaaattggtaattacatatttcaccgtagatgctggagacataggaaccaagaatctcttttgttaacattcatatattgttcattttttcacaataattatgctagcattattttcctgaactatttttttctctccttctaacattagtgtttttcgatcatgacaattacctattcataaagctctgcctatgaattaaaatccaatccaactctgtctgcaccagattgtcaagtgaccttgtcttcactgaaagtgacaaatttatctctgtcataatttaagactcatgcatcaggcaatatggtatccttgtagcagcataaggcagataggacatggaaaggaatcaaaacctggacagagacccatcagcagagcaaaacagtagtgaaaaaaaaawtctcgttaaatggcatacaggtagcttcatcattatatatgggacacagtagtaatcaatacgtgtttaataaa

SEQ ID NO: 278046 - DNA, 586 bp, Homo sapiens
ttgtgtctctttctagtggtttgttaacattattagtgttttcaaagaaaaaataactttgttttaatcctctttattaatttttgcctattaatgtaactttctttactttatttgattctataaattattatttcctaacctcttatatggatgcttagctcacctactttaatcttttcttcctttccaattcacaaataaggctataaattctttctaagagctactttgttatattccataattttgctgagaggtattttcattatcattcaattctaagggtaattaccattgagaattttttcttcagcctattaggtatttagaggattttttgtttgtctttttagtatgaggtatatagttttaaaaataccctttctggtattgatttctaaatgaatagcatcgtgctcagagaatgtgtccatatcatacggggtcatgaaaaatttttgaaacttgatttataactagaatgtgatcagtttttgaaatgttccatamgtgcttgaaaagttgttgggtggtaatgttagttagatgtcttatttgaataagcttgttatatgcattgttc

SEQ ID NO: 278047 - DNA, 365 bp, Homo sapiens
aatttgtagtctttcatcccaagtccccaaagttcattgtatcattcttatgcctttgtgtcctcatagcttagctcccacttatgagtgagaatatacaatgtttggttttccattcttgagttacttcacttagaataatggtctaccaattcataccaggtcgctgcaaatgccattattttgttcctttttatggctgagtagcattccatggtgkgggtgtgtgtgtgtgtgtgtgtgtgtgtgtgtgtgtgtgtgtgtgtgtatatcaatttgtttatccactcattgatttatgggcatttgggctagttccatattttgcaattgcaaattgtgccaccataaacatgtgtgtgcaa

SEQ ID NO: 278048 - DNA, 365 bp, Homo sapiens
aatttgtagtctttcatcccaagtccccaaagttcattgtatcattcttatgcctttgtgtcctcatagcttagctcccacttatgagtgagaatatacaatgtttggttttccattcttgagttacttcacttagaataatggtctaccaattcataccaggtcgctgcaaatgccattattttgttcctttttatggctgagtagcattccatggtgggkgtgtgtgtgtgtgtgtgtgtgtgtgtgtgtgtgtgtgtgtgtgtgtatatcaatttgtttatccactcattgatttatgggcatttgggctagttccatattttgcaattgcaaattgtgccaccataaacatgtgtgtgcaa

SEQ ID NO: 278049 - DNA, 493 bp, Homo sapiens
acattaaatataaatggcctaaacaccctaattaaaaagcagagatcatcagattaggaaaacaaagagaagatccaaatacatactgtctacagaatccaaccttaactgtaaaggcacaaatacatttaaagtaaaagggagtaataagaaaatactgtgctagctctaattaaaaaaaaactggattgactatattaatctcacagaaaatagtcttcagaccaaagaacattagcaggtataaacagggtaatgttataacaacattataatgacagaggtaaacttatcaaaaagacatataatttcaartggttatgtttccaataataaagtttccaaacaaataaagcaaatctgatagaactaaaaggagaaaaagataaatccacaagtataatttaaagtatgtttaaagttaaaagatggaacaagatatactatgattgtggatttgcctcttcctttatttttcagtcactctcaataa

SEQ ID NO: 278050 - DNA, 558 bp, Homo sapiens
ccacaaacaagacaacttgagagaaaagcatcaacgcttatatttttcttttagatattgcataatagttagcgtatttctgaggaaatgggattttgtttcttgttttatcttgtacaatttccttacttgaaaaagccttcaaaaatcttttcattttaactacttacaaaaattacaatcacctataatctttgcccctgttcttctcataaggttaagttcagttcaaactatttatataagccaagtcagtatttcattgtccagcttttgcctataaaatcgacctgtgtgagtcccttttgtaatgcatgtcagaagaaaaatactatgcccaagttgttactttcaataagcacactgtttaaaaaacatcttcattttgctttgcaaaacttcagtttgtatttaaggtatttctatttgaaggaagaattaccrtattaacatgtacttatttgagcctaaaactcccttgagtattgtctatccctctaccctccacatcttggtaaagccattgcctggactgtgcaatggacaccaagaggattg

SEQ ID NO: 278051 - DNA, 535 bp, Homo sapiens
cttttacctcccctgctgacacacacacatacacacacactgcctaaaggatggagtaaaaacttcttagcatggcacaaaatgtacttttcgccacatttcctatcactacctcagagacaagtctacgctcaaactgatctgcttattcttccccaaatacagctggcattttcgtatcatgtctttatctgtttacatttcctgaaaggtcctttttaatttatgcatagctttctctctgaaagtttcacaaccaccaggaggcagtatagtgtgccctttcctatcatctctaattrcatttgctgatacatgattgcattggtcatagatgtttttatatcaaaacatttgttgcatctccctgatgagatggttctggaaagacttcctattctagtgatgacaggttgggccatgagatctgcttcatctaacaaaatgaaactggcatgggcacttaacacttccaatcagaagatctggcagaaggcaaaggtatttttctagttctcaatttccccatcagtaa

SEQ ID NO: 278052 - DNA, 553 bp, Homo sapiens
tttgttgatgagcgaaatgccacaktgtagattaatttccctgatttatccccaacattttggtgggtatatatctatctatatatatatgcatatggttgggaagaatgtgaacaaaatcacacattttctttttctcgtgttcttttgctgtcatcctccttttgccttgtcccccaaaacaacgtatgattccctttgtacacacaatctgtgcatgaaatgactcctctttacaatagacaggacagcctaagggctgtgaatgtctgtggagttttctgcagccagaggctaaagaagcagcatctcaatggggcatagaataactaatgatgcttggaatatatcaaacacagatacaattaatatcagatttattgatttttactactaataaagatttctagcttaaagttggtgattttatttattcttcttagttcttttgtatttctgatcaagcgctttagtgctagtggtttgaataatataattgcaaacaggagaatacaggcatataatcaaagatgtaatacagagatttaagtgt

SEQ ID NO: 278053 - DNA, 477 bp, Homo sapiens
caacatcaatattattgcaattatgaaggatgcctatctgagaragatagaatgaagaatgagaagtaatgctggaacagaaaaaaataaaataaaatatagttttaagtaaagtcataccaaaatgactaaggttttgtatgtcatatcagttgtctggctttaattgtcaaaatgatgtagaaccaactaaaggaatttaagaattgagtgacaggtgcagactgcagtttagaaaaatctctctttctcccacagtatcatagaggatggactcattagaacttgaagcagggacctcttagggagctattgctataatttagttgaaatatgaggaagccacaataaaaatcagcagtcgaggttaagacaaggagagcagcactcccagatatgtagagaacatataataaagcagtgtgtagggatcaatagggtgatagatgtgagtacaaaggagaaataaatgcaagc

SEQ ID NO: 278054 - DNA, 520 bp, Homo sapiens
gatgttcttcagtagccgaatgggtaaactgtgaaatatccagacaataaaatactattcaatgataaaaaagaaatgaactatcaagccatgaaaagacaaggaggaatcttaaatacatattactaagtgaaagaagtcaatccgaaaaggctacatattgtttaactatatgacattctggaaagggcaaaactgtggagacaataaaagaacaagtgattgacaggagtaggggattgggagatggaggaataggaagagcacaaaggatttttagggcagtgaaaatattccctatggtgctgtaaaggtgtttacatgccactatacatttgcctaaacccatacaatgtacaacaccaagagtgaactctaacataaactatggactttgggcagttaggatgtgataacayagattcatcagttgtaacaaatgtacccctttggtgggggatgttgttaatggggaaggttatgcatgtgttggagtagtgggtatatgggaaatcattgt

SEQ ID NO: 278055 - DNA, 497 bp, Homo sapiens
aaagttcacagccttgaatgactacatcaaaaagtttgaaagagcacaaatagacaatgtaaggtcacacctcagggaactagagaaacaaatcaaacccaaacccagcagaagaaaagaaataacaaagatcagaatagaactaagtgaaattgaaacaaacaaaaaatacagaatataaataaaatagaaaggtgactttttgaaaagatagataaaattgatagaccattagcaagattaaccaagagaagagagaagrtccaaataatctcaattagaaacaaaatgggagatattacaactgataccatagaaatacaaaagatcattcaatgctactatgaacacctttacacacataaactagaaaacctagaggagatggataaattcctgaaaatatacaatcttccaataacaagcagtgagactgaaatggcaatttaaaaaatgccaacaaaaaaaagtccaggaccaaatggattcacagctaa

SEQ ID NO: 278056 - DNA, 567 bp, Homo sapiens
cacatatacagttggaatattatcactatagagttgtatagctcacatttctcacttaatatttttataataatatttctattaaatgcctgatttaggcactgtcaaatttagctgttacttcctttgaggggtgaattgtggcttaatttttattttattttttaaatataactgaaaggaaagtttctggtgaccaaaagacacagaccagtaaaattacataagaagcactctgaatattttgattacatataacatactctgtcagagatgaaattctttgataacccaaacattctccaaacactagaacagtaggactacacgttcagcccacagacaagatccttcaaagacaacctcgccaatagtcaagctttattaccttccttacagaagaaattgtgcgtcatgtgacatctatgaatttttttaagttattgatctacaagggaaccagttttaactcaatttacttataaagtcataaaaatggaaataayaagcaaggcagatttctaaacaaaggaacattaaacagtagttgcaaattctcctatggca

SEQ ID NO: 278057 - DNA, 582 bp, Homo sapiens
aaaggtaataaactgggaggacataaataagatctgtttgttcagactctttgtgttcccatgtgacacttctttcctctaggtataggaaggacccctctggaatgagcatcttatgactcactttacaggaaggtcagataattcttttatggcctgcttgagggaataagggtgggggaaagtcagactttcctgtttctgctggttttccaaatgctgaggtaccatatttcgaagtggtgtgtcctgaacatcaacattctcctgtctgaaacttccctaagaaattttatagtccagaagctgagttggtggattgtcccaaaagccattcaaccagtttctcagaccccagaatagatcattccagttaaacagttaaacgttatgtctcagttcaggaaatgatgttgcaggttggcttccacctaagttaggcctctatatggtatgatcagccagttactaaataagtggcatttctattaaaacaaaaggaaaacaaatgttgatggttagaacaaactacaaattcaggggkttttttttgtttttttttttttagtctagaaagcagcc

SEQ ID NO: 278058 - DNA, 1147 bp, Homo sapiens
atttactgtggtcagaaaactgtagaaatcaaactctttcaaattctagtataccaaaatacaacaagttctgactttctgtttatatgttaaggaaaccacagaaagccctcagagataatgtatctggtttgtaagaattatgatgcatactgccatagtgtcataasaattcccatatctggctgggcgccatggctcatgcctgtaatcccagcactttgggaggccgaggtgggcagatcacaaggtcaggagactgagaccatcctggccaacaaggtgaaacccagtctctactaaatatacaaaaattagctgggtgtggtggcacaagcctgtaatcccagctacttgggaggctgaggcaggagaatcacttgaacctgggaggcagaggttgcagtgagccaagatcacaccactaaactccagcctggtgacagagtgagactccatctcaaaaaagagagagagaaaagaaaaaagaattcccatatctaagagaacctaatggtgagaagaacgtatcatggatctttttgctggaatgacagtggggtgatccaggtawatttactgtggtcagaaaactgtagaaatcaaactctttcaaattctagtataccaaaatacaacaagttctgactttctgtttatatgttaaggaaaccacagaaagccctcagagataatgtatctggtttgtaagaattatgatgcatactgccatagtgtcataagaattcccatatctggcwgggcgccatggctcatgcctgtaatcccagcactttgggaggccgaggtgggcagatcacaaggtcaggagactgagaccatcctggccaacaaggtgaaacccagtctctactaaatatacaaaaattagctgggtgtggtggcacaagcctgtaatcccagctacttgggaggctgaggcaggagaatcacttgaacctgggaggcagaggttgcagtgagccaagatcacaccactaaactccagcctggtgacagagtgagactccatctcaaaaaagagagagagaaaagaaaaaagaattcccatatctaagagaacctaatggtgagaagaacgtatcatggatctttttgctggaatgacagtggggtgatccaggta

SEQ ID NO: 278059 - DNA, 573 bp, Homo sapiens
atttactgtggtcagaaaactgtagaaatcaaactctttcaaattctagtataccaaaatacaacaagttctgactttctgtttatatgttaaggaaaccacagaaagccctcagagataatgtatctggtttgtaagaattatgatgcatactgccatagtgtcataagaattcccatatctggctgggcgccatggctcatgcctgtaatcccagcactttgggaggccgaggtgggcagatcacaaggtcaggagactgagaccatcctggccaacaaggtgaaacccagtctctactaaatatacaaaaattagctgggtgtggtggcacaagcctgtaatcccagctacttgggaggctgaggcaggagaatcacttgaacctgggaggcagaggttgcagtgagccaagatcacaccactaaactccagcctggygacagagtgagactccatctcaaaaaagagagagagaaaagaaaaaagaattcccatatctaagagaacctaatggtgagaagaacgtatcatggatctttttgctggaatgacagtggggtgatccaggta

SEQ ID NO: 278060 - DNA, 569 bp, Homo sapiens
aaccaagtgacatagtccaggaatgcaaggttggttcaacatataaaaatcagtcaatgtattaaagtatataaaagtatattaatagattaaagtatattaaagtatattaaagtattaatagattaaaacccatatgaccatctcaatacatgtagaaaagcctttgacaaaaatcacacatccttttgtgcttaaaaacactcaacaaactaggaacagcaggaaacttccttaacctgataaagggcatctatgaaaaaccaacagataatatcayactcaacagtgaatgacaaagctttcctttcaagatgagaaacaaaccaaagatgtctactcactccactactatttaacattctcctggaggtcctagccaggccaatcgggcaagaaaaaaaaattaaaagcaaccagattggaaaggaaaaagcaaaactatctctattcacagatgacataatcatgtgtatatatataaaatcctaaaaaatacacacacaactattagaactcatgaatacactcagcgaggtcacaggatacaaaatcaatatataaaaaag

SEQ ID NO: 278061 - DNA, 486 bp, Homo sapiens
ggggaaacctctccagaggcctctgattttttctgtggttggtkaaggaagaccagagtgacctactcaaggaagttaatttcagaggtcaagcaatgactttcccagagtctgcctcttcaaactcatgccactggagattaataaacgttggttattgttatttggccccaaggaggctttgaatgcggagaattgcgacctgcatgcctaggtcaaccccatagccttagatcgagccactgtgacaccagaaggtgaaatgggacacaagggtagaaattacaaagaggctgccttcagtttgaaataaaggactttcaagtaattagaactctttcaaaaaggaatggccctgtcaaaaggtttcgttgccagaagtagttaaagagttgttgactacatgtctaagtgtgctgggaagggagaggatggttagaatagatgacctctaaggtctcagcacggagatatttaatttgtata

SEQ ID NO: 278062 - DNA, 602 bp, Homo sapiens
cttatcaatggaatttagactcttcttcaagcatgcttttagctaaaatttttgttgtcgttgttgctgtttagacagggtggagttataaaaaatatttaccagaaaattctgacctttcagggaacagactgatcactcagaaaggattcttttaatttacttcagatgcactttgagaggggcacatgtgtgcacacatgtgtacactcacatctgtatgcttggtccatttgttctcaggaaggaaacagataagaggcactttcccttgtagattatcctgctccttcctttggctgtatattggactggaaaaaataagctttctaagtcctgggacgaaaggggtttaggattatctgtctgtcttttgaactacaccctccccccacctttttttttttttttttaactatgtggaagcatgaacagatcttaaagtgtgctaggtaagggggaatgaattatgggtaagatggtttagatgaagatacaagtccacgaattgcagttcacatcatcrtgagtgcatttccttcagggcataaccctggagttgaagatatgaatcaagtgacattttctgcaggttgtgtttg

SEQ ID NO: 278063 - DNA, 1112 bp, Homo sapiens
atgtcaatggtaacaacagaataaaccaagtgaggggtatccagggggtgaggggtatacaagggttctctgcactatctttgtaaagtttttgtacccctaaatgtaaaactatttaaaattctatttaagtagaatttttaaatatttttaaataaaaataaatatttaaatcatttatctaatagctcagagagctgatatatatctatagtgttacctgtatttcagcaacacctgtgaccatctttcagaagggatgagaaattgtggtggaaaagrtagcccggttaagcaggcggcgcttagcacagtggttaaggcatagcctttggagccaaaatgactgggtttgaagccctattttgttccttctagctttgtgaccttaggcaagttgacattcctgtgcctcagtatctcttcctgtaagatgatcaccctgtgttgagtgactaatgaggtaacacatgtaaagcttatctggcataggctacatctctgttgtagcaccaggactttcactgtatttttccaacttcttcaagtgactataaaggtgacaagtttgtggataawtcaggtcttgaagactcacagcctagagaagtattgattgcatttaagggtccattacttaggtaaaccaaataatgtaactgatcttggctttaattgatcaaatctctcccatagtgttggaaagattgtaatctaattactctggttcctggtttctaaggtgaaggttacattttgctgaaacttagcctgcttcagtaacctccctttatctgggctgtcccttcttgaaacacacacacacagtgtatgttgtacatctgtgaacacacagaggcggacacttacaagtcatctgtccatgtagagaccccctgagttttaatttaaactcwatattaacagtagataagaaatgtgagccatgctggtttttttcatcttaactttttacagcttgggaaaggggactagcaagatgctcctgtctaatcaggttcaataccagcttctcttgtttctcctaacaagcttggcctcatcctaattcttccttttctggagacagaatatctattttcagcctcaga

SEQ ID NO: 278064 - DNA, 551 bp, Homo sapiens
tatatcagcaagcacaaatatccttgttgagttcaacagttcatcagttgatgaagaaattgaggtcagggaaaagaagttgcatggtcaaggtcacttcacacgcttgttctttttcaggccttggaagtatgactcttttaaggtgtatgtttcaaagcatccccagatgtctcaatacaaataygatgacacacctccctttgtttcccagaaaggcttttctctaactggagtgttttaatagaagcaggcaagaaaccccaatatcatagaaaaactaattagcaagagtggaggtgatccttcaatcccatctgttgtccccagtgccagagtcctaaacagggtggggcaccccaggttttgtgtcagggctacaagatacagaaggtgcaaagattccaaatctcattgttaatgcaactgattgaacaatgtgcagttcctgcctcagcagcacccccaactcaatgcacacctcatcagactcaaggcaggcctgctcctggtcccccagctagccagaggagaaggacagaggggtgacc

SEQ ID NO: 278065 - DNA, 551 bp, Homo sapiens
tatatcagcaagcacaaatatccttgttgagttcaacagttcatcagttgatgaagaaattgaggtcagggaaaagaagttgcatggtcaaggtcacttcacacgcttgttctttttcaggccttggaagtatgactcttttaaggtgtatgtttcaaagcatccccagatgtctcaatacaaatacgatgacacacctccctttgtttcccagaaaggcttttctctaactggagtgttttaatagaagcaggcaagaaaccccaatatcatagaaaaactaattagcaagagtggaggtgatccttcaatcccatctgttgtccccagtgccagagtcctaaacagggtggggcaccccaggttttgtgtcagggctacaagatacagaaggtgcaaagattccaaatctcattgytaatgcaactgattgaacaatgtgcagttcctgcctcagcagcacccccaactcaatgcacacctcatcagactcaaggcaggcctgctcctggtcccccagctagccagaggagaaggacagaggggtgacc

SEQ ID NO: 278066 - DNA, 499 bp, Homo sapiens
aaatgtccttcctgcctgcattttcaactttagtatgtgtgcctgcctttttctttttaaaatgtrgtaagcttcacccaccagcctttagtaccggctgtataaggagcaactaacaccaagacatacatgcttatgccccatccactttattttaaagcactcttcaatttgtcaatactttaattctctaagcagtgttatagtggctgaccacttttgaaattatctttgttttgtttggtacttgaagggtatgaaaaactttcctctacttccttcccctctcccggagctcattttcccctctcttttctctgccctgcttgccctctgaccctgccgagctctgctggtttccacagacttctgaatctaattaatgtcatagtgactatataagtgaattatgtaggcaggaggatgcgggaaactttggggaaggtgcattccttagggaaaaacctggttttgttaaaaaaaaaaaaaaaaaaaaaaa

SEQ ID NO: 278067 - DNA, 499 bp, Homo sapiens
aaatgtccttcctgcctgcattttcaactttagtatgtgtgcctgcctttttctttttaaaatgtggtaagcttcacccaccagcctttagtaccggctgtataaggagcaactaacaccaagacatacatgcttatgccccatccactttattttaaagcactcttcaatttgtcaatactttaattctctaagcagtgttatagtggctgaccacttttgaaattatctttgttttgtttggtacttgaagggtatgaaaaactttcctctacttccttcccctctcccggrgctcattttcccctctcttttctctgccctgcttgccctctgaccctgccgagctctgctggtttccacagacttctgaatctaattaatgtcatagtgactatataagtgaattatgtaggcaggaggatgcgggaaactttggggaaggtgcattccttagggaaaaacctggttttgttaaaaaaaaaaaaaaaaaaaaaaa

SEQ ID NO: 278068 - DNA, 1171 bp, Homo sapiens
acaggctaactgttgctttcatttaattcgtttaacaaatatttrttgatcatctcttaagtagaagaccttgtgctggtttctgtgggagatgcaaggatgagtaaggcgtaggttgtacatattagtgttattgtcaagtgaggaaattaagacaagaacacacatgaaaaaggaagttttcaacactggtgattcagaaaagagaccatatttgggacttgggtggaggatggaaagaggaaaaattgagttaaaaaacaaaggcttccatgaaataggtggcctttgaactaagtcttggaagacagatggtgtgggtgggggtattgagagtacatggagacatcttgggcaaagaaaacttgaacaagggctttcatggtgtctctaaaagatcattttatgcatcatggtggaattacctatactgtctcttttaaagatgcagaactttgtagtcatgaggtagtttcagtgaatgagaaaagttttccaaaatgaacttgtatttcatcttccttaaatgttaacacattttaatcattggagagaaagtctatcaacatacaacagtataataaatawtgtgcaccttaatgtgtggataggtttttaaccaaatgtatctggatgacgwtgaagatgagtattgtgtgtggggaaatgattccttcctgtgttccagattctcttttgtgaaaatgtaggagggttttaaaatgctaagaatctattttgggagaatgtccttgttaactacaatgggtctaatcaatgacacttgagcaacttgaacgaagacctttggcttaatacagattaataggcaaattaagaaaaaaaaacctctcaatatggaatgcaagattttgtgtgtaagtggaatttttaacctggaatagatttgcctgtttgattttttttttattttaatttttgggaataaagccttggtggcaaaatcgaggccccataaaagacgattttaatatcatttaatggtaacataatttttttgttgttgttttatttcaaagtgaaatccataaaacttattttcaatgttggctgttcccttttgtcttggaatttaattgaggtttctgaattcagctggccccaaccttgctttctgtttggccctgggcagctcatgatttttctcatt

SEQ ID NO: 278069 - DNA, 583 bp, Homo sapiens
tgtgcaccttaatgtgtggataggtttttaaccaaatgtatctggatgacgatgaagatgagtattgtgtgtggggaaatgattccttcctgtgttccagattctcttttgtgaaaatgtaggagggttttaaaatgctaagaatctattttgggagaatgtccttgttaacyacaatgggtctaatcaatgacacttgagcaacttgaacgaagacctttggcttaatacagattaataggcaaattaagaaaaaaaaacctctcaatatggaatgcaagattttgtgtgtaagtggaatttttaacctggaatagatttgcctgtttgattttttttttattttaatttttgggaataaagccttggtggcaaaatcgaggccccataaaagacgattttaatatcatttaatggtaacataatttttttgttgttgttttatttcaaagtgaaatccataaaacttattttcaatgttggctgttcccttttgtcttggaatttaattgaggtttctgaattcagctggccccaaccttgctttctgtttggccctgggcagctcatgatttttctcatt

SEQ ID NO: 278070 - DNA, 583 bp, Homo sapiens
tgtgcaccttaatgtgtggataggtttttaaccaaatgtatctggatgacgatgaagatgagtattgtgtgtggggaaatgattccttcctgtgttccagattctcttttgtgaaaatgtaggagggttttaaaatgctaagaatctattttgggagaatgtccttgttaactacaatgggtctaatcaatgacacttgagcaacttgaacraagacctttggcttaatacagattaataggcaaattaagaaaaaaaaacctctcaatatggaatgcaagattttgtgtgtaagtggaatttttaacctggaatagatttgcctgtttgattttttttttattttaatttttgggaataaagccttggtggcaaaatcgaggccccataaaagacgattttaatatcatttaatggtaacataatttttttgttgttgttttatttcaaagtgaaatccataaaacttattttcaatgttggctgttcccttttgtcttggaatttaattgaggtttctgaattcagctggccccaaccttgctttctgtttggccctgggcagctcatgatttttctcatt

SEQ ID NO: 278071 - DNA, 583 bp, Homo sapiens
tgtgcaccttaatgtgtggataggtttttaaccaaatgtatctggatgacgatgaagatgagtattgtgtgtggggaaatgattccttcctgtgttccagattctcttttgtgaaaatgtaggagggttttaaaatgctaagaatctattttgggagaatgtccttgttaactacaatgggtctaatcaatgacacttgagcaacttgaacgaagacctttggcttaatacagattaataggcaaattaagaaaaaaaaacctctcaatatggaatgcaagattttgtgtgtaagtggaatttttaacctggaatagatttgcctgtttgattttttttttattttaatttttgggaataaagccttggtggcaaaatcgaggccccrtaaaagacgattttaatatcatttaatggtaacataatttttttgttgttgttttatttcaaagtgaaatccataaaacttattttcaatgttggctgttcccttttgtcttggaatttaattgaggtttctgaattcagctggccccaaccttgctttctgtttggccctgggcagctcatgatttttctcatt

SEQ ID NO: 278072 - DNA, 485 bp, Homo sapiens
atattggtccggggcctgttaggacctgggctgcagagtgggaggtgagtggakggcgagcaagagaagcttcatctgtatttacagctgctccccattgctaacattactgcctgatctccgcctcccgtcagattagcactggcattatattctcacagaagcatgaaccctatagtgaaccgagcatgtgtgggatctaggtttctccttatgagaatctaatgcctgatgatctgtaactgtctcccatcacccccagatgggactctctagttgcaggaaaacaaactcagggctcccactgattctacattatggtgagttgtataattattttattatagattacaatgtaataatagaaatgaagtctacaataaatgtaatgcacttgaaccatcctgaaaccatctctccacccctggtccatggaaaaaaagtcgtctacaaaactggtccctggtgccaaagaggttgaggac

SEQ ID NO: 278073 - DNA, 971 bp, Homo sapiens
atattggtccggggcctgttaggacctgggctgcagagtgggaggtgagtggatggcgagcaagagaagcttcatctgtatttacagctgctccccattgctaacattactgcctgatctccgcctcccgtcagattagcacyggcattatattctcacagaagcatgaaccctatagtgaaccgagcatgtgtgggatctaggtttctccttatgagaatctaatgcctgatgatctgtaactgtctcccatcacccccagatgggactctctagttgcaggaaaacaaactcagggctcccactgattctacattatggtgagttgtataattattttattatagattacaatgtaataatagaaatgaagtctacaataaatgtaatgcacttgaaccatcctgaaaccatctctccacccctggtccatggaaaaaaagtcgtctacaaaactggtccctggtgccaaagaggttgaggacwatattggtccggggcctgttaggacctgggctgcagagtgggaggtgagtggatggcgagcaagagaagcttcatctgtatttacagctgctccccattgctaacattactgcctgatctccgcctcccgtcagattagcactggcattatattctcacagaagcatgaaccctatwgtgaaccgagcatgtgtgggatctaggtttctccttatgagaatctaatgcctgatgatctgtaactgtctcccatcacccccagatgggactctctagttgcaggaaaacaaactcagggctcccactgattctacattatggtgagttgtataattattttattatagattacaatgtaataatagaaatgaagtctacaataaatgtaatgcacttgaaccatcctgaaaccatctctccacccctggtccatggaaaaaaagtcgtctacaaaactggtccctggtgccaaagaggttgaggac

SEQ ID NO: 278074 - DNA, 485 bp, Homo sapiens
atattggtccggggcctgttaggacctgggctgcagagtgggaggtgagtggatggcgagcaagagaagcttcatctgtatttacagctgctccccattgctaacattactgcctgatctccgcctcccgtcagattagcactggcattatattctcacagaagcatgaaccctatagtgaaccgagcatgtgtgggatctaggtttctccttatgagaatctaatgcctgatgatctgtaactgtctcccatcacccccagatgggactctctagttgcaggaaaacaaactcagggctcccactgattctacattatggtgagttgtataattattttattatagattacaatgtaataatagaaatraagtctacaataaatgtaatgcacttgaaccatcctgaaaccatctctccacccctggtccatggaaaaaaagtcgtctacaaaactggtccctggtgccaaagaggttgaggac

SEQ ID NO: 278075 - DNA, 571 bp, Homo sapiens
tagctggtggcagagcaggggatcagaactcagactatctggttcacagtctgtgttcttaatcattacagttcctgccttcaaccaacccacacaacaaggagaaatgtaacagtaccaaaaagcactgcttgtgtttgacagttcgacagtkaaatgaacacaaccagacttgatcattacacgtcgtatgcatgtaacaaaatattatattatacgtaccctataaaaatgtgcacgtattatgcatcgtttaaaaataagttaaatcatagagttaaatttcttagaaaaagaaaatgaacacaaccataaaatatgcataggtataaaatagttttttcataaaaggggaattctgtttgatgtcttattatacacattggagaaataaaatttattatgaaggatttatatagattgtccaatttcgtgtatctttataatatcaaaagttccataaagagaattcactttgagaataaaattattttcaaaaagaatagcttatagatgttaagtgttttcattggttgtccatagtacacctctttatccaaatatattagca

SEQ ID NO: 278076 - DNA, 541 bp, Homo sapiens
gtggattttagcttcccaaagaataaggctatcatttaattttgayttttggaagtgtatatatacatatgtatgtgtgtatatatagacatatatatgtattgtatgttttgggttgaatttattttaaatgaaggtgattagcaaccatttgtattatattacaaatgaaaatgtatagaatttgaagtactagtttatcatttctagaatttggtgatagaagttgatagaagtgaaaaattacttttagaaatttttcaagagtccaaattaaataagtattttctttatcaaagtgttgatgttaatcaaaatcagtgtcaaagaaaagggttacagaaagaagaattctttgattcggagagggaacttgtttctgctctttaagagctttcagagttgaacttttccccacctgattgttctgttttaaaagacactggcggtgttaagtgaaagatggatcctttgaacttaggagaggtctaaagacaaaattctcatgttgtcctgcttttcagtaactaaactgacaaaa

SEQ ID NO: 278077 - DNA, 541 bp, Homo sapiens
gtggattttagcttcccaaagaataaggctatcatttaattttgacttttggaagtgtatatatacatatgtatgtgtgtatatatagacatatatatgtattgtatgttttgggttgaatttattttaaatgaaggtgattagcaaccatttgtattatattacaaatgaaaatgtatagaatttgaagtrctagtttatcatttctagaatttggtgatagaagttgatagaagtgaaaaattacttttagaaatttttcaagagtccaaattaaataagtattttctttatcaaagtgttgatgttaatcaaaatcagtgtcaaagaaaagggttacagaaagaagaattctttgattcggagagggaacttgtttctgctctttaagagctttcagagttgaacttttccccacctgattgttctgttttaaaagacactggcggtgttaagtgaaagatggatcctttgaacttaggagaggtctaaagacaaaattctcatgttgtcctgcttttcagtaactaaactgacaaaa

SEQ ID NO: 278078 - DNA, 545 bp, Homo sapiens
gggctgtagtgaggaagtatcctgatgatgaatattacatcatataccgaaatgtttttgataaggtatcataaagcttttaagacaattaagttttcatgaggatagcaatgatctatgttgacaaccaatattcctgccttagtaacaccactgtttgaatgataacattccatttgytgattttgagaagttcatccaatttctcagaaaggcatgaatgggaaaaatgcaattctggatttgtatttcctgactgtgaatgagtgtttcagttattttagcttgagagcagattataagtttcctttatatattttttaaagagagagtctcactgtatcacccaggctggagtgcagtggcacactcatatctcactgcagcctcaaactcctgggttcaagttatcctcttgcctcagcctcctgtatagctgggactacagacttgtgccaccactcctgactaatttttaaaattttttgtagagacaaggtctctgtgttgcctaggctggtcttgcactcctggcctcaagcaat

SEQ ID NO: 278079 - DNA, 603 bp, Homo sapiens
caattaagttttcatgaggatagcaatgatctatgttgacaaccaatattcctgccttagtaacaccactgtttgaatgataacattccatttgctgattttgagaagttcatccaatttctcagaaaggcatgaatgggaaaaatgcaattctggatttgtatttcctgactgtgaatgagtgtttcagttattttagcttgagagcagattataagtttcctttatatattttttaaagagagagtctcactgtatcacccaggctggagtgcagtggcacactcatatctcactgcagcctcaaactcctgggttcaagttatcctcttgcctcagcctcctgtayagctgggactacagacttgtgccaccactcctgactaatttttaaaattttttgtagagacaaggtctctgtgttgcctaggctggtcttgcactcctggcctcaagcaatcctcctatcttggcctcccaaagtgctgggattacaagcatgaactaccagtgcctagcccagactatcagtttttgatcaactacctggctgtatgtaccctctgataataattttcaccttttcatctaaaagtatcatct

SEQ ID NO: 278080 - DNA, 541 bp, Homo sapiens
atatttctactttagtgtattttctgtgcattcttaaaggttcccatgagtgctcttctgaaatctgttttttctaacaaacagacttgggagctgatcatgataccactacatatttattacctactcattaatatayctgagttgtcttggattgttggagcatatcagaggagttcatgaagtagatggccaggagcaacagggtacttaatttggaaagccgcagattgatgacctctattttattaaggattcttgatttgggtggataggtagtaaggtcatgtctaaaagaccacaagtatcacccactcaaatatcctctcctggcacttgccaggagatcaataatctccttatatcatttgctcatagaccagatgccttcctagataattttttctagatattgcctaggtaaagaaagccagtgggggataccagaggctagagatgtagcaggaatagaaagcataattgcagctttctgagaaaattaggaattgagcctgtctattctctgtattcttcaatccct

SEQ ID NO: 278081 - DNA, 524 bp, Homo sapiens
catgaatgtatagtgatgaggggttttttacagttgcacatgactgggaatagaaatgcaattagatattgagaatattgatgagccaataggagctgatgggttagaaaaataaggaggtgaagagaatccaggattttaaggtttaartgaagttagagactagatttggagcgagtaagagaagatacagaattctatttaaaagattcagaactgggaaaattagaactagcattagttttaactgaaatcatataatgcatgtgttcataccaagtagaacaaaaatggcctttttttctctcatatttaaactccacattatctactgtaatgttccacaaagagcacatgtttagtaaatattgcctttagtgtccaattatgtttgagcttgctgtagagtttagatttctaattgctaatcatgtttcatttttaaaataatctataatgttatttgcaagaatttcaatccatagcctcctagaaaaaaaatcaataccataggcagaaaaata

SEQ ID NO: 278082 - DNA, 1104 bp, Homo sapiens
catgaatgtatagtgatgaggggttttttacagttgcacatgactgggaatagaaatgcaattagatattgagaatattgatgagccaataggagctgatgggttagaaaaataaggaggtgaagagaatccaggattttaaggtttaagtgaagttagagactagatttggagcgagtaagagaagatacagaattctatttaaaagattcagaactgggaaaattagaactagcattagttttaactgaaatcatataatgcatgtgttcataccaagtagaacaaaaatggcctttttttctctcatatttaaactccacattatctactgtaatgttccacaaagagcacatrtttagtaaatattgcctttagtgtccaattatgtttgagcttgctgtagagtttagatttctaattgctaatcatgtttcatttttaaaataatctataatgttatttgcaagaatttcaatccatagcctcctagaaaaaaaatcaataccataggcagaaaaatawggaagggaaaagcattattatcttgttaagtgtcatttgctaagtagcccatgcatgaactgttgaatgaaagttaagaatgacaactaaatatgatagttaagatgtttttgaccagtgaattgtttttgatatggcagtacaattcttagacctagtggatcatgttgatgtgtttagtttgctaatatgtagaatactgaaagtgattctgtgtgtatttctagactatcatagaactctctgaagagcgggatggtctccattttctaccccatgcctcttcatctgcacagtcaccctgtggttctccaggcatgaagcgaacagaaagtcgacaacatctgtcggtggaactggcagatgctaaagccaagataagaaggcttaggcaggaattgtaagttgctgatttttgaggttcattgaawttatatggtcccaaaggtgacctaaacaatatttttaagcttatggaaatattgctagcttgtgtcagtgttttcacaagtaaatgagaaaaataaggaggttggcataaggttttcctattgttaaatcttaacagtttaaaggatg

SEQ ID NO: 278083 - DNA, 579 bp, Homo sapiens
ggaagggaaaagcattattatcttgttaagtgtcatttgctaagtagcccatgcatgaactgttgaatgaaagttaagaatgacaactaaatatgatagttaagatgtttttgaccagtgaattgtttttgatatggcagtacaattcttagacctagtggatcatgttgatgtgtttagtttgctaatatgtagaatactgaaagtgattctgtgtgtatttctagactatcatagaactctctgaagagcgggatggtctccattttctaccccatgcctcttcatctgcacagtcaccctgtggttctccaggcatgaagcgaacagaaagtcgacaacatctgtcggtggaactggcagatgctaaagccaagataagaaggcttaggcaggaattgtaagttgctgatttttgaggttcattgaatttatatggtcccaaaggtgacctaaacaatatttttaagcttatggaartattgctagcttgtgtcagtgttttcacaagtaaatgagaaaaataaggaggttggcataaggttttcctattgttaaatcttaacagtttaaaggatg

SEQ ID NO: 278084 - DNA, 555 bp, Homo sapiens
atccttgttgttagtgaatcataacattctaagttgctttccaaaaattattataatgtataattagcaatgtatgaattaatctattttactatatttttgcccaaatttacagtatatattttttaatttgcaaatttattggacaaatttaatgtacctcatttaatgtgcatttccctgattatgaaggccctggacacttttccatgtttattattttatttccccatttgtgaattagcttgttcatcatctcttggctcatttagccactgaatgaatatcagtggtttttaccttcctatacaagctcttcatataatgaaattatgagctttttgtcatatatccttcagttggttttagttccrttttatgtacaaaagttacccaattttacataactaaatgtcattctttttattctgatctaaatttagaaagttaacctctaacaatagaatattcagtcttttctttttcttaacaatattcaattccttatttaaaatttactttggtttttaaggtgtggtaggctcagttttttca

SEQ ID NO: 278085 - DNA, 610 bp, Homo sapiens
tttgttggtaattttgctgtttaaaatggctcctaaatgtggtactgaattcctatctagtgttcctaagcccaagaaggctgtgatatgccttacagagaaaatatgcatctcagataagcttgttctggcatgagttatagtgcaattggccatgagttcaatgttaatgaatcaaatatatatatatataatatatgtatttatatataaatattttacatatttgatttatatatatatattatayataatatatcatattgagatatataaatatatattatatataatactatatataaatatatatatagtatctttaaacagaaatgcataaaacaaaattatgtgttgatcagttgatgaaatgtgactaaaggcttgcaggaacccaactctatatttcccctcagaacagtggttcaatatttgctaattcaatagttttggtgactttatagaacataattattgcaaataatggcaattgattgtatatacacacacacattcgtgtatacatgacatttgtgaccttaaatttttagagaaatagactacaatcaattattataaatactaaatttatcttaatgttttattgatg

SEQ ID NO: 278086 - DNA, 550 bp, Homo sapiens
attgctgccaccctgcccagcatttattcagctttgcattttttgccagtgcaataggccttgaattctagctaygcaataccttgtgaaaacaccccaggaacttttaaataaaaccaatgcccaagccccacccagaatatttagatttaaatttctcagggtagggcctgggtgttaggttttaaaaaatctttccaggtgattgattctaatgcacagccaaggtagggattctggtgtaaagtgctgccttggtgttttaatttgcttttttctctgattactcatggttttggatatctcttcttatgcttgttaacttctggggtttcttcttgagtaaattacctgttccccagcatatttacatgattgggtgcaagtttaaatgataatgtatatgtttgaaggggaaaaacatcacacagaccaagagagatgaaaccacatgaggaaggggcagtctggctcccttagcctcagtgatcatgggattaggaaatctacctcattgtatgaggctgtggtctttggaagtcacttcctc

SEQ ID NO: 278087 - DNA, 570 bp, Homo sapiens
tgctgcatgcatagtttgtgaatattttctcccattctgtgggttacctgttycctctgccgattatttcttttacgatgcagaaggcttttagtttaattaggtcccatctatttatttttggttttgttgcatttgcttttgagttcttcgtcatgaactctttgcctaagccaatgtctagaagagttttcccaatgttattttctagagtttttatggtttcaggtcttagatttaagtctttgatccatcttgagtacatttttgtaaaaggtaagagatgaagatccagtttcattcttctacatgtagcttgccaattatcccagcaccatttgttgaatagggtgtcctttccccactttatgtttttgtttactttgttgtggatcagttggctgtgggtatttggctttatttctgggttctctattctgttccattgatctacgtgcctgtttttatactagtcccatggtgtttggtaactagagccttgtagaatagtttgaagttgggtaatgtggtgcctccagatttattctttttgcttagttttgctttggc

SEQ ID NO: 278088 - DNA, 560 bp, Homo sapiens
ggtctgcttttaataattaattaaattgacaagtaataattgtatatatttatggggtactatgtgatgtttggatatgtgtataaattctagaaagattamatcaaactaattaacatatcaatcaccttaccaacttaccatttgtttgtgtgatgagcaggtataaaatctcttttggcaactttgaaatataaaatacattattattaactattgtactgtgtaactatttcatgctgtgaaacggatcactaaaatgaattcctcctgtttaactgaaaagtaccctttgaccatcatctccccgtgtttcatccccctcgctgctcagcctttggaactgtttctctactctctgtttctatgggatccgcttttgtagattccacataaaattgagattgtatagtatttgtcattttgtgttggcaggaaagtaaattagtgcagctattttggaaaacagaatgaaagttctacaaaaaactaaaaatagaattaacatatgatccagcaatcccacttgtgggtatatattcaaagtaattgaaatcagt

SEQ ID NO: 278089 - DNA, 560 bp, Homo sapiens
ggtctgcttttaataattaattaaattgacaagtaataattgtatatatttatggggtactatgtgatgtttggatatgtgtataaattctagaaagattacatcaarctaattaacatatcaatcaccttaccaacttaccatttgtttgtgtgatgagcaggtataaaatctcttttggcaactttgaaatataaaatacattattattaactattgtactgtgtaactatttcatgctgtgaaacggatcactaaaatgaattcctcctgtttaactgaaaagtaccctttgaccatcatctccccgtgtttcatccccctcgctgctcagcctttggaactgtttctctactctctgtttctatgggatccgcttttgtagattccacataaaattgagattgtatagtatttgtcattttgtgttggcaggaaagtaaattagtgcagctattttggaaaacagaatgaaagttctacaaaaaactaaaaatagaattaacatatgatccagcaatcccacttgtgggtatatattcaaagtaattgaaatcagt

SEQ ID NO: 278090 - DNA, 539 bp, Homo sapiens
ggatggtctacaaaatctctcacaccctttcaagtgtgttaaggtcacgaaaaaagaggaaaggctgaggaactgtcacagattagaagccaagaataagtgacaattaaatgcaaagtggggaaactggatcagaaaaaggatcctggaacagaaaaaagacattaagcagaaaaacgggtgaaattcaaatactgtgtgcactttatagtggtatactagcactaattgattcattttgatcattatactacagccatacaagacrttaacaaaagaggaagctgggtaaagtgtattcatgaattctgcactattttgcaactcttaggtaagtccaaaattacttcaaattttaaaatgaaaatgtaatcgtggtatattgggtaattatctcaccttagagtgatcaagaaatagaaaagaaacctgggaatctccttttctagcaggaaaggaaacagtcataagactgtgtcagtgactaaaaaggacaagcatgaaccaatacccatcagtccagcccaggactgcgctag

SEQ ID NO: 278091 - DNA, 590 bp, Homo sapiens
acccagaaacatggttggaaaaggaaaagtgtgcaaggacaaggcagtaaagatggaaaggagggcacccacgtctaagaaatagttaaagtgaaactggaacaatcagcgactgattggagggacagggtgagcaagaggaggagtcagctggtggtacccagctttctgatttaagcagtaggagtacagggtgttattarctagaaggagggagttggggtagggggaggagcaaagcattattgggatacagatttggttgtttaaacaaagaccaaaacaaaacatacacacacacgcacacacacacacacaacacacacatgcacaaagtgacttagacaacattattttctgcctaaatgttaaagcttaagcagcttacaaccaaggtggtggctccatggttttgggatgccagcgccttgtactactgtattagtccgttttgatgctgctgataaagacatacctgagactgggaagaaaaagaggtttaattggatttacagttccacatggctggggaggcctcagaatcatggcaggaggcgaaagacacttcttacatggcagcggcaagagag

SEQ ID NO: 278092 - DNA, 659 bp, Homo sapiens
tggaacttggacaagtggatatacatgtgcaaaagaaggaagctggatcactacctcacatgacataggaaataaattcagaatggatcatagccctaaatgtaacaactaaaactataaaactctcagtaggaaagagaaatacatctttgtgaccttagattacagaatggtttgtaactatgacatcaaaagcacaagtgacaaaaataaataaataaattggacttcatcaaaactaacacttttatgctttaaaggacaccatcaagaaagtaaaaagacaatctaaagaatgggaaaagatcatatgtctgataaagatctctagccataatatataaagaactcttacaaatcaataataaagacaatctgattgaaaatgggcaaaggattgcaacrgacatttctaaatatcttcttaagaagatgtacaggttgagtatccctaatgtaaaaacataaaatctgaaatcttccaaaattcagctttttgagtgccaacatgatgctacaagtggaaaatttcacacatgactatatgtaatgggttgcagtcaaaactttcttcatgcacaaaattaaaaatattgtgcagttaccttcaggctatgtgtatgaggtgtatataaaatataagtaaattttgtgtttag

SEQ ID NO: 278093 - DNA, 563 bp, Homo sapiens
cctgtagctgttggatacaaatacttgagaagctccttagasgggaagttggttgcataatgttttctggagctcctctcaactgcaataggcctctagctcggacattcactctcaggacatgggtgtcttgttataccctttcctacagaggcctggccaaatcaccaggggataattggcaggtggactgaagaacagggagctgcagatggattcccaaggagctgtgatatctaagacaaaggaaaaggatcccacagtggagagtggatgtagccaggtggttgcgggggaatgaaaggagtgaagggtgacaaggcagtctctccacaagggagcagtggcaccaagtgtcagatgccacaaagaggtcagttaagcaagacctgaatccttgagaaattgggaggctgctgatgagctctgcaagagcagttctagtgaagtggtggaggtggcagccaggttgcagtgaataacacagagagtgaatggcaagggtgatggctgcacaacaatggaattttcttaatgctgctgaaatgtacacctaaaaatgg

SEQ ID NO: 278094 - DNA, 563 bp, Homo sapiens
cctgtagctgttggatacaaatacttgagaagctccttagaggggaagttggttgcataatgttttctggagctcctctcaactgcaataggcctctagctcggacattcactctcaggacatgggtgtcttgttataccctttcctacagaggcctggccaaatcaccaggggataattggcaggtggactgaagaacagggagctgcagatggattcccaaggagctgtgatatytaagacaaaggaaaaggatcccacagtggagagtggatgtagccaggtggttgcgggggaatgaaaggagtgaagggtgacaaggcagtctctccacaagggagcagtggcaccaagtgtcagatgccacaaagaggtcagttaagcaagacctgaatccttgagaaattgggaggctgctgatgagctctgcaagagcagttctagtgaagtggtggaggtggcagccaggttgcagtgaataacacagagagtgaatggcaagggtgatggctgcacaacaatggaattttcttaatgctgctgaaatgtacacctaaaaatgg

SEQ ID NO: 278095 - DNA, 563 bp, Homo sapiens
cctgtagctgttggatacaaatacttgagaagctccttagaggggaagttggttgcataatgttttctggagctcctctcaactgcaataggcctctagctcggacattcactctcaggacatgggtgtcttgttataccctttcctacagaggcctggccaaatcaccaggggataattggcaggtggactgaagaacagggagctgcagatggattcccaaggagctgtgatatctaagacaaaggaaaaggatcccacagtggagagtggatgtagccaggtggttgcrggggaatgaaaggagtgaagggtgacaaggcagtctctccacaagggagcagtggcaccaagtgtcagatgccacaaagaggtcagttaagcaagacctgaatccttgagaaattgggaggctgctgatgagctctgcaagagcagttctagtgaagtggtggaggtggcagccaggttgcagtgaataacacagagagtgaatggcaagggtgatggctgcacaacaatggaattttcttaatgctgctgaaatgtacacctaaaaatgg

SEQ ID NO: 278096 - DNA, 576 bp, Homo sapiens
ttcccaactctgctctttcagaccatttcttccaagttgatgtcacttgtgtaggaatacgaatgtagtgaaatcatgaggatcattatcaagtttgccttttarcttttatattgattaagtcactagactggcagattccaccagcttcaaatctactctgaaaggaagagtatttggaattggccctcagatcttttcataggtgtttggatgtactctaggtgtatgcttttgcttcctagacatggcaagaaattattttttaagtccagaaagggtaaagatgtcttttggtatctggattacttggagaatccacctgtatccacaaagttaaaatgctttcacctgaatgcgcgcgcgcacacacacacacacacacacacacacacacacacacccctacatacaggcacaaaatttctgtgctttatggtccacacttattatccctgaagagtaaaagatgaaaaataacagaaacacaaagtttatctctggaaagaaaaactaaccataatggtatgtataactggtgatgttatgcatgtcataggcattagaatactaaga

SEQ ID NO: 278097 - DNA, 630 bp, Homo sapiens
tatttggctatcagaaggccagattagagccaagggattaaaagatcagaaaaggaaaggatgtaagaaataggaggactgtgctccaaaaatttgtttgctagtttgttatttagaacagagatgaagacatgtagctgaatgttcagtctgatttacaaaatgtatttcatatatcagggttgtgtgagaaaggaagcccagggttcttcaagcaacaatgtagtataaaactctggttgccttggattggggagggaaatatgtcttatgcctaaactgtcttgctccctgctgcctaaacttcagtctcctggaagatgcagtaggaggtcaattattgcaattaaaaggaagagtcctttctttcaagtgcagcttttggagcctacttctcctgaagtgtatataactctgatgcagaaaaagtggaaaatacctttacataatttcctgytttaattaaaaacattaagcacttgattatatgttatatgtgacatattatgtatttagtaaatataccgttaagaataatttgtcatagctagacttttcatatataaatttaaaaaatgtataaaatttatatcccatgtcctgatttgagtttagaaaatatttctaaag

SEQ ID NO: 278098 - DNA, 564 bp, Homo sapiens
gattaattcagttaataccaaactagaagaatgtaccacacagattccagactggttatgtaacccatagtacataaggaacttcagattgatcaaatcagctggcagaaacaggaaacaatccattacttttataaacgatcctttactgtgacccatgttaagcaaaactgcatgtaagggaaactctaaaaatatataagcaaccacagggttatatttgattgatctatatcaataacaaattgagaattaaaatgcagtctgaaataatgggaatggaccaaaacaataaggaagttctaatatgtacattgaatgygtcactgccttgtaaaaatataagaagaccaaagaccttatcacaactaatacttagttgatgagactggttttcctctcttgcctttggagaacaacaattattacctgctgggtgacacttttcctagatattgtaatgataatttcaatgaaatttgcagtccaaatttgataaatcacagtaataaaaatttttcattcttcatattggtaaaaaaaaaaatcacctaagtcaaggaa

SEQ ID NO: 278099 - DNA, 589 bp, Homo sapiens
gaacctgccttgatgttatcactgctctagtcatttcattttattattctctccagctaaacctccctaacctagttagccactccctgcccttttcctttaaactcccacgatgattctaccatacttcatacaaggtttggytttgttttgttttcacaggacatttatgtgttccaaataactttttcctttttaactaaatcaagcagcaaagcacctggagggtcattggtttgggatgttctctcttcacaaattcagaacataataacctaagatcataaggattatgatcagttacataatgtcccatttgaaattagaagtggaaccagacggatgaactgtagatagagcctgtcttctctagcacttacactgagctctcctgggtggcttgactaccatgatacaaagaaagccctctggaagtataagggaaggaaacattactatagtctaaggagatattgaaaaacaggaaagataggagatgaagctggacctttcaggctacgtaagatttcaaagggagaaaggccctccaaggagatcaacacctcaagcaagatgctatagtcaaaaa

SEQ ID NO: 278100 - DNA, 589 bp, Homo sapiens
gaacctgccttgatgttatcactgctctagtcatttcattttattattctctccagctaaacctccctaacctagttagccactccctgcccttttcctttaaactcccacgatgattctaccatacttcatacaaggtttggctttgttttgttttcacaggacatttatgtgttccaaataactttttcctttttaactaaatcaagcagcaaagcacctggagggtcattggtttgggatgttctctcttcacaaattcagaacataataacctaagatcataaggattatgatcagttayataatgtcccatttgaaattagaagtggaaccagacggatgaactgtagatagagcctgtcttctctagcacttacactgagctctcctgggtggcttgactaccatgatacaaagaaagccctctggaagtataagggaaggaaacattactatagtctaaggagatattgaaaaacaggaaagataggagatgaagctggacctttcaggctacgtaagatttcaaagggagaaaggccctccaaggagatcaacacctcaagcaagatgctatagtcaaaaa

SEQ ID NO: 278101 - DNA, 585 bp, Homo sapiens
ttgtaacaacctatgaaattaaacttttttctttttctttcttcttatgctttgttttcttttctcctgatgttagaatgagaaagagcacttgatgaagagtctagaagtctgtgtttcagtccaaaacctgccaataatgctggaaaaccttagaaggtcaacaaaccctcctgaggttaaaattcttcacccctcaaaaagacagggactttctgagcctcctgccccataagattgtcgtcagtttcagacaagaaccaagtyggtaaatgcagtttaaaacctaccatgagccagagcaaaggaaggaagtttccaattttctatagatatttcacatcagacatcatgcagtttcagtatacttagtttcctttgatattatccatagccttggccctcaaatatttcacattcttagattaatttaataatagcctggtgttgctgcttatgtatcctaccatatccacagccaactatgaagacaataactttctcacctgagaactaaagacttacctggctatagctccatattataatctacttaaattataaattatatggtatcagaccatc

SEQ ID NO: 278102 - DNA, 623 bp, Homo sapiens
tattcaacttatgattgtgataatgtggtctactagaatattatttccaactgttcataattttaacatgtgctaatatgaaggaaaacatactttcaacatttgatgtgtggtaatagcttatgccctttttctcaatgattacatatttttcacgccattattttgcatgccagaaaatcagtaccttaggacaaycttggacagcaaataatatatctgtgttgcctatccaaagccactatagcatacatttgcaaacataacctccaatgtgtacaacagatgagagcagaactgttctagctgaatggggggctggtccaaggcccagagccctacttagccttcacagaacttttgagctactcagatacagaaagtcacaaacctaaaaggtggagactggcaagcaattctaactctttgtatacccttgtagcatgacagttaataacctagtaggttgtcaataagtccttgatgataatgagttgccctctcaccctctccagaaaccacagcttcctttggcgctatggtggccctttgggctaatgcctctagatggcactattctcattaggtagcaaagaacccagactaattactaagttattaac

SEQ ID NO: 278103 - DNA, 593 bp, Homo sapiens
aatctgttaatggtatacaatgtataaagatgtaacctgcgataataactatataaaatggaggcattgtataggaatacagtatayacttttgaaactaagttcatattattcaaactagtttgttataagtttaagatattaattgtaatcaccaggacaactactaagaaaataagtaataatcccagcactttgggaggccaaggcgggcaggtcacttgaggacaggagttctgaccaacatggtgaaaccctgtctctactaaaaatacaaaacattagctgggcgtggtggcaggcacctgtaatcccagctacttgggaggctgaggcagaagaatcacttgaacccaggaagtggatgttgcagtgagccaacattgcactattgcactccagcctgggtgatagagtgagactccatctcaaaaaaaaaaagaaaagaaaagaagaagaagaagtaatacacatcagtatatacaagcataaaatgctttacagaaataaaagggactatttgtaaagaaacagcagggaattaaaatgaaacagtagaaaatatttaacatcaaagaaggcagtgatagaag

SEQ ID NO: 278104 - DNA, 593 bp, Homo sapiens
aatctgttaatggtatacaatgtataaagatgtaacctgcgataataactatataaaatggaggcattgtataggaatacagtatacacttttgaaactaagttcatattattcaaactagtttgttataagtttaagatattaattgtaatcaccaggacaactactaagaaaataagtaataatcccagcactttgggaggccaaggcgggcaggtcacttgaggacaggagttctgaccaacatggtgaaaccctgtctctactaaaaatacaaaacattagctgggcrtggtggcaggcacctgtaatcccagctacttgggaggctgaggcagaagaatcacttgaacccaggaagtggatgttgcagtgagccaacattgcactattgcactccagcctgggtgatagagtgagactccatctcaaaaaaaaaaagaaaagaaaagaagaagaagaagtaatacacatcagtatatacaagcataaaatgctttacagaaataaaagggactatttgtaaagaaacagcagggaattaaaatgaaacagtagaaaatatttaacatcaaagaaggcagtgatagaag

SEQ ID NO: 278105 - DNA, 579 bp, Homo sapiens
tttagtccttaagagaataaaagcaatttgcagctgygttgttggattaaaaaagagtttcgattagagcatcattagaaggaatagataacttttagcaggctcagagcttcttctgcctctagggacaagctgggacagtttcatttcttccaaagcgtccaaccttgcactttctgagaatcagattgatttgtatatgctacccccacaccctatccttaaagtgctgtcttcctaggacaatgcacagtttgtcctatcccactcactagcagcttacccttgcctgtgaacagccagaagaagatgacagggacatgcttgggtcctggggcagtggccctactgtatagagattcttctaattgagaaatcactttgttgtatttagccccacatctccaatgtctgtgttatctctaggaaaacagttccaccaggaattcttcgtctcgcttttagacttaaagtttccctgaatatgggtcacaggaaccagctgaatctcctcatggctagttatttttattaaataacaaaaacagcctcttaaaggaggagaaatgctagcactca

SEQ ID NO: 278106 - DNA, 567 bp, Homo sapiens
tattatctgtgatggctgataagctgttttctgtgaaatcttataaactgttgagctagaaggtatttcagagatcacctaggccaacattatcatcgtcagtgtccctttaacagttcaacaaatattattatgtgcccagagtaagctctaaaaagtatgaataagtttctgccttttccctrtggggttaatggcttaatagggacggcaggcatctttcaggatggtgtataattttaacaacagaggtgttttaacaactatagaaccactgaagatgaatcttaattaatcagggaaggcttcctggaagaataattatctcatcttaaaagtaaagaagtaggaattagatgtgatgagaggaaagtaagactgtattagtcaaagttctccagaggaacagaactaataggatataagtatatgtgaaagggagtttattagaaagaattggctcacatgatcacagggtgaagtcccatgataggccatctgcaagctggggaagaaagaagacaatagtggctcagttaagtccaagagcctcaaaaacagggaagc

SEQ ID NO: 278107 - DNA, 567 bp, Homo sapiens
tattatctgtgatggctgataagctgttttctgtgaaatcttataaactgttgagctagaaggtatttcagagatcacctaggccaacattatcatcgtcagtgtccctttaacagttcaacaaatattattatgtgcccagagtaagctctaaaaagtatgaataagtttctgccttttccctgtggggttaatggcttaatagggacggcaggcatctttcaggatggtgtataattttaacaacagaggtgttttaacaactatagaaccactgaagatgaatcttaattaatcagggaaggcttcctggaagaataattatctcatcttaaaagtaaagaagtaggaattagatgtgatgagaggaaagtaagactgtattagtcaaagttctccagaggaacagaactaataggatataagtatatgtgaaagggagtttattagaaagaattggctcacatgatcacagggygaagtcccatgataggccatctgcaagctggggaagaaagaagacaatagtggctcagttaagtccaagagcctcaaaaacagggaagc

SEQ ID NO: 278108 - DNA, 555 bp, Homo sapiens
ttaatggttgccaggtgtttggcatggtggagaggaggaggtgtcaccgtaagggacagaacaaggagaactttgtgttggtgaaatagttctgtacttgattacagtaatggttacaaaaatgtacatatgatcaaatgacatagaactataaatatgcgtgtcgcatcaatattaaatttctggttttgatattttagtaaaattacataagatgtaagctttggagaatactgggtgaagggaacctggggcttttcttacactattttctacttcttttgaatctataattattttaaaacaaaataattgaaaaggaatgaactatttatacatgtaacgatatcgatgaatataaaaaacagtatgttgataaaaaagtatatactgtaacatgtaatcctaagaagtctaagaatagtcaagasgtatatgaagtatgtgaacagagaaagctaatttgtggtgacagatattggaacagtgatttcctgggggtggatagtgggtgtttttttgactagcaaggggcacaaatgaacttggtttgtc

SEQ ID NO: 278109 - DNA, 573 bp, Homo sapiens
aagtgaggatcatgtaacagtcacttaacatccgactcatgtttacgttttagsttgaaattttgagcatcaaaaatgtgtaatggaacagaaggaagaaatatgttcttacctgaaacagtatctctctaaaaatattcctaatgtaagatcattctttccataaaattccattgttacaatcctaaagaagagaccacctcttagaaacataagaattaccatgccccagagacatttcatgagaccacaaattatgattacctattaaatgtatggtacttacaatgaagtatgaaaggaggtaatgttctttgttgttatgaaacaggttttaataaaacaagtttagacttgccacactaaagcatctttttcactcccaatccactagtgtcttatgaaactaatgaggatgcataaactataatattaatttagtaaaactgatctgagttaagaagaggtaaaggtttcctttacaaaggcttaagccctgtcagcacaaggtgggactctggtctcctactctcttgtccatgcctttactgagcatggaaaacagcagttctt

SEQ ID NO: 278110 - DNA, 506 bp, Homo sapiens
cccagtttcattacaattctgcttcatacatattagagtaacacataagccagcagactcaagacaaaaacaaaaatagcataggagaagaaatatttcacaaatctgcatgcagtctgccaaactgatttttttagcctgcctttgaggagtcattcaacacatcctaaatgcacaggagcatcagaaagtggtctggctcacctttgttgaccacacagcatcactcagaataagccctctctcttcatcaccctcrtttttgcttcctgattggccacttgaagtacttgatgcatcctttgaatgagcaaaagggtctgaatttttgggctgaattcttcctcctctggctcgataatcggccagcattctacccaagctctggctatcgcccagatgctcagcaattctagtgctcactagctcatgtgagggtaagacttgaatagacttggcctgaatacttccattcatgccctgaagtccagagagatccctgagca

SEQ ID NO: 278111 - DNA, 506 bp, Homo sapiens
cccagtttcattacaattctgcttcatacatattagagtaacacataagccagcagactcaagacaaaaacaaaaatagcataggagaagaaatatttcacaaatctgcatgcagtctgccaaactgatttttttagcctgcctttgaggagtcattcaacacatcctaaatgcacaggagcatcagaaagtggtctggctcacctttgttgaccacacagcatcactcagaataagccctctctcttcatcaccctcatttttgcttcctgattkgccacttgaagtacttgatgcatcctttgaatgagcaaaagggtctgaatttttgggctgaattcttcctcctctggctcgataatcggccagcattctacccaagctctggctatcgcccagatgctcagcaattctagtgctcactagctcatgtgagggtaagacttgaatagacttggcctgaatacttccattcatgccctgaagtccagagagatccctgagca

SEQ ID NO: 278112 - DNA, 568 bp, Homo sapiens
ctttgaaaggccagattagaaaacattgagtctcaaatataagacatgaatatgaaccccattcatcctttgaagatatttaaaatctgttctctccccagagtgttgtcatatggcgctatataggtcagataacacccaagaaaacccacaaaaactttatctatagaaaagctgaattttatgtgaagttgaatcaggcaattttgaaatcatctcagagaagtggcaacacagtttatgtttacaggcaaaattaaatataaaatgacccttcatccaattatcccagatctgggcactgtagaattcaagattttattctgataagttaggaagaaagtgraatattttgcaaggtggtcacatgatataactaattgaatgaatgagtcaaaattctgcttcagtctagcggtaagctttgagaatgtgtcctgatgtctctggatcacattttacttatctctaatatgggatgattgaaccagaaaatgccttaagtcctatcatctctaaaattctgaatctaggtcatacagttacacatctcagaatatgatcatga

SEQ ID NO: 278113 - DNA, 502 bp, Homo sapiens
gctaggattaatggaaggatgagtttggctttctaatgaaataacaatatacaaaaatgctattttttaattctttagacattacttgtgaatacaaattaatgaagccaaagaataatacttgctaacaagtatttagcacttactatcagtacattccaaactttgcattagttattttacatacattatctcatttattcttacaacaacaactctgtaaagagtagtattcattttaactgcatttgacagctgagaaaactgaggctcagagaggttaggttgtacatctgctgttccagaaccaagaagtagcagaacaagcctataagacacctgtacctgagctccttctcagcacactcccatttagtgccaggtactatgctaagtgttcataataatgtattaatgtcatctatacattattatctctgctttatacaygagaaactgatacacaaagagatcatgtgttttgggtccgttggtccctaac

SEQ ID NO: 278114 - DNA, 373 bp, Homo sapiens
atagtgaattttttttcagttttttttttctattagaatatctattagaataagtaattttgggttgatacatcctcagttctcaaactttattccaaaatttttatccactagaacaaaaatggacaaactatggtctgctaaccaaattcattccatcatctgtttttctatgcctcataagctaagaatgattttcacatttttaagtcattgaataaaaatcagaagaaggatcgaggttaacattaagagtgaagtcatgttgatagcttgcactcttgataggtgagtggcactttacctctgtggtcttccytttcaaaacatattggcccagttccataatgagaaaaccataaaaaaaaaccca

SEQ ID NO: 278115 - DNA, 513 bp, Homo sapiens
tagggtggaagggaagcaccaaatataaaaaataggcaaattatataatttttaaattaagtactgttaaaaacaaactttttaaaattaggataaggtcgtggatcttatacaaatagaaaatggacagctgtcaaagatttttaaaaaaatttttattttaggtttgggggtacatgtgaaagtttgttccgtagataaacatgtgtcacagaggtttgttgtacataatattacatcacccaagtattaagcccagtacccaatagttatcttttctgctcctctccctcctcctaccttcccccctcaagtacaccccagtgtctgttgtttccttctttgtcttcacaaattcttatcatttagcttccacttataagtgagaacaygtggtatttggttttctgttcctgtgttagtttgctaaggatgatagcctccagctccatccatgttcctgcaaaagacatgatcttgtgttttttttgtggttgcataatattccatggt

SEQ ID NO: 278116 - DNA, 416 bp, Homo sapiens
tgtaatatctacttcatagggttattaggaggactatgtaagattattaaagggcttaatataacctatgaaaagcattcagtaaatagtagcctataatacaggcagtaatactactactagtggtagcgtggtaatagtagaggtgtagtaacagaaatggtggttcatgtagtagtgatataagcttatccaagtctttctgacgccatcatgaagttcagaatagggaagagacaacaccaaactctgtctggagggcttaataaaggaaacaccaagaaggtgagatttgaactaaaattataaaggaagastagaaatcacttacctaaatcacttaataggtaaagcgcagagaagggttttcccggcatagagattagcccatgccaagtgggcatgttatgttttct

SEQ ID NO: 278117 - DNA, 537 bp, Homo sapiens
tgtgattgttgagaggtgctcacagggttgtcagtggtyggatagcagtgagtttggtggggtgttcagggctgatacagtcagtcagctgaatttgggactgaggtgcacaaatcctctgataaccaaaattctctaacttctagaaatgattgaggattctgccagacaagttatccccaggactgcaggacttgatggctttctcttctgcccctgctctggcagggacaagtgcctactgttggcaatctacatttccattattcctaagcactagcactttctggaaagcagacatctccctgaatggagggacccagagtttcaggcctccatccccttatgaccccagacctggagacatgttcttcatcttcatctggaatgtcttcactgatccttgaggtcctcagacagaaaggggcttattccttcaacactcccctccctccccttttaaaagccagaacttgattatctctaatggtattcacacttataacattcaaaaaatcaatctcattgactacactg

SEQ ID NO: 278118 - DNA, 1117 bp, Homo sapiens
aaaatacaaaacaacatatcaaaatttgtgggacagacctaaagcagtgctaagagaaatgcatagcactaaatacatccattagaaaagaagaaaagttttgcatcagtaatataatctcccaccccgagaacctasaaaaagaagagtaaaataaaaccaaagcaagtagaaagaaggacatcataaagttaagaggataaatcaatgaaattgacacagaaaaacaatgcagactgtcagtgaaacaaagagctggtgatttaaaattaccaataatattgacaagcttctagaaagccaaccaagaaaaaaaaggaagaatacacaaattaaactatagaaatgaaaaggagatagtggttgccaggagttgaggagtgggaagtgcaaaggaagggggtttggctacaaagaacatcagaagggatccttctgggaagaaagtgttctgtatcttgacagttatcaatattattatcttggttgtgatattttactgtagttttataagatgttatcttacaagtgataaggwccagtgaaactcagaagctgtttttagcataatggctaaggggaggcagccagcaagaagtgttgacttwccttctgcaaaaatgttttgtgcaaacgtgggttccaatcactacagctccctgggaaacagtgcaagattaaaattcctgagctttccagtcagacactagtgtgcgtttgcctggacacacgattatgttataaggagcccaggaaagtccaatccatgaagttttaaggatctaagactggatgttcttttatgctaagcagtacaaattagtgcttaattatatacatattgcaggacagaaaactagaaagcaaattccaggaggtatagcttaagatcagttctccataacgagggattaacaactttaccaatatggtttccacatcatccttcttccccatggcaaccgaggtttaccttgttcattcgaaaattataaagctaaatagcgttatttctgggtattagaattacagatggacattgctatactttatttttctgtgatgagtatatattattttaacatccagaatttctttgtacaggcccaaagggatg

SEQ ID NO: 278119 - DNA, 579 bp, Homo sapiens
ccagtgaaactcagaagctgtttttagcataatggctaaggggaggcagccagcaagaagtgttgactttmcttctgcaaaaatgttttgtgcaaacgtgggttccaatcactacagctccctgggaaacagtgcaagattaaaattcctgagctttccagtcagacactagtgtgcgtttgcctggacacacgattatgttataaggagcccaggaaagtccaatccatgaagttttaaggatctaagactggatgttcttttatgctaagcagtacaaattagtgcttaattatatacatattgcaggacagaaaactagaaagcaaattccaggaggtatagcttaagatcagttctccataacgagggattaacaactttaccaatatggtttccacatcatccttcttccccatggcaaccgaggtttaccttgttcattcgaaaattataaagctaaatagcgttatttctgggtattagaattacagatggacattgctatactttatttttctgtgatgagtatatattattttaacatccagaatttctttgtacaggcccaaagggatg

SEQ ID NO: 278120 - DNA, 603 bp, Homo sapiens
aacaaagtaatatccctaatatataaaaagcccctgcaaagcagtaagtcaaacaacctagtttttttaaacgggcaaaaaatgaagaagtacttcacagaaaagtgggcacagataacaaacatatgaagctaaacccaatttctctagtagtcaaggaaatgtaaataaaacattagattgggttcatcaagagtttggggaaatgaatactactgatattattaactgccacagccttttgggaaaaaataagcaactactaaaagaattatatgaatgtaaacctcttccaggaatttattctacaaaagtataaggatataattacaagaataattttttgtcactamaaagaatgctataataatctttaaaatttccatcaatggggaattcttgcataaattatgatagtgagaggtgaagccagctggacttcctgggtcgagtggagacttggagaacttttctgtcttacaagaggattgtaaaatgcaccaatcagtcctctgtagctaggattgtaaaacgcaccaatcagcgctctgtggctggctagaggtttgtaaaatgtgccaatcagcacactgtaaaatgcac

SEQ ID NO: 278121 - DNA, 1111 bp, Homo sapiens
ttaacagttgatgaagcagcttggcattgcctctcttttctcctagggaagggataaaccactgtctttttgtgaggcatggttgtgttatgtcaggtgggagcctgatttctgaggtgcgcgcatgggaagatgggggtgcatcagatagccaaggaaagtggtgtagtggacttttgtcatctgaacacccttccttttgggaaaatcttttatcgagtgagttctggcagagtcctgccccctcctcctcgagacaaaggagccagatgctctctcctcgcatgttctggaagctacagaatgaacacatgcctgaggtttgcccaatcatatcctccctcctggtacttaaccttaagctcatggmagacagctgaggaagtactcgcagcagcaggggtgcagctggaggctccctttttgtgggtgtcatgctgtcagtggtggtggctgtggcaagtgctgcatctccagcaaatggtccctgtggtgcagccctgcctgggtttccagccacacaacttcccggatccctgtgaacttgctgggcttcatcccatctttcctgcccggctgaatgacctgtatcccaacawcctttatgtcttttaacacatttttgtagttttcagggtatgatttttgtaatgttttggttaaatttattcataagtatactttgataccattgtaaatggaatgttttaaaatgtttattttcatattgttcattgcaagtgcatagaaatagaatagatttttgtggattgctcttgtattctacaaccttgctgaactcatttattagttctaatagatttttagtggattccttagaattttctatatacaagattatgtcagctgcaaatagagacagttttacttcttcttttccaaattggatgcctttattttaggcatgtctaagggccctggccggaaccttcagcacatccacttttgcacagaaaaggggcccacactccatctgtccacagattctagagcttctccactcagcttctggggccctcactcaattccctcccttttattgccgacctgtactggwgcctcctcacttcccttgactccaatgccatcc

SEQ ID NO: 278122 - DNA, 512 bp, Homo sapiens
cctttatgtcttttaacacatttttgtagttttcagggtatgatttttgtaatgttttggttaaatttattcataagtatactttgataccattgtaaatggaatgttttaaaatgtttattttcatattgttcattgcaagtgcatagaaatagaatagatttttgtggattgctcttgtattctacaaccttgctgaactcatttattagttctaatagatttttagtggattccttagaattttctatatacaagattatgtcagctgcaaatagagacagttttacttcttcttttccaaattggatgcctttattttaggcatgtctaagggccctggccggaaccttcagcacatccacttttgcacagaaaaggggcccacactccatctgtccacagattctagagcttctccactcagcttctggggccctcactcaattccctcccttttattgccgacctgtactggtgyctcctcacttcccttgactccaatgccatcc

SEQ ID NO: 278123 - DNA, 566 bp, Homo sapiens
ggtcccaatgaaatcacaagggttcctaaatgaagaagagggaagcagaagaatcaaaagcagagagacgatgtcatgagaaagactcaaacaatcatcattgactttgaatataggaaaggaccatgagccaagaaatgtgggcagcctccagagctggaaaaggcaagaaaatggattttgtcttagagcctccagaaaaaaatgcagccttgcaaacaccttgattctagctcagtgagatcctctttagacttctgaccaccgcaactgtaagatgaaaygtgtgttgttttaagtcgccaagtttatggtaattggttggagcagcaataggaaactaatataagctcttcaatcctccaataaagcaagaaacattcttctgtgcttgttagaaagacatcatgtgcataggaatgtaatagaaggcaaatagaggaattaatctaaaagaagatggcacacctattgtgagccaagagaatcaggaagtctggaggtgaaaggtacagctattaattgaatgccatgaaccataatcatagttagttttgaacaattat

SEQ ID NO: 278124 - DNA, 601 bp, Homo sapiens
tgtgggggtagatatggggtctygctatgttgcccagactgatcttaaactcacgatttcaagagatcctcctgacttggccttccaaatcctgggattacaggcgtggccttccatgtccagacaggctaatcacagctttgccctctctacaggcagatatttacatctgcctcttcccctcctgggtcctttgaagactgggatttgagtcttctgaaccccctccaatcccagttgttggagatctctcctgaagttttctcacagcagcaagtcattgagtctagtttggcaggtggcttgcaaagacgtctgcattgactaagaattcagttgcccacctttacttcttcctgaggggcttccttttcccttggcagcaccactggatgtgtcctgaaataatcctagaattgtttgctttattatatttttttattttttggttgggatcaaacccattctctctctcagctgcagagcagacataacttatcacactcatgaatcaatgtttttgaggaccttcttatcagaatttagaggagaaacctgtgcctcccacacttccgttatgtgggagcatggaacccacagc

SEQ ID NO: 278125 - DNA, 598 bp, Homo sapiens
gcaacattggtcttcagcctgacgttctctgaggctctgctcctctttgtccttgttgcttcagtaggccataagtcatggatccatgaagaagggrgaaatattcagccaggagggatataaactagatttgatggattgacttttttccactgcatcgtggcctctgctgtgttaaaaacaggcataaggccaggcgtggtggctcaggtctgtaatcccagcacttttggaggctgaggtgggcgggtcatctgaggtcaggagtttgaaaccagtctgactaacatggtgaaaccctatctctactaaagatacaaaattagctgggtgtggtggttcatgcctataatcccagctacttgggaggctgaggcaggagaatagcttgaacccaggggacggagattgcagtgagctgagatcctgccattacactccagcttgggcaacaagagagaacctctgtctcaaaaaaaagaaaagaaaagaaacagaaaagcaagcataagaaccacaaactaagatagcagccatgtacttccctttctaccagaagctttaccttgtcaatatctatactcataatacatggacc

SEQ ID NO: 278126 - DNA, 511 bp, Homo sapiens
ttgtcctatccttggacttgtttggaacctgagaaaatggattgctgataatgtcatttgagatggtaaaaattataggaacaacatgattgaaaatgggggagggagtcctagaattaagtttgggaaatgctgagtttgagatacctcttagacactcaagtagaaatgtcaagttggtaaytgatatatgtgaatctggaactcaggaagatatacatttagggcaaagaagaagagattgaagagctgttagtcaaaggatcactgtcaaatttcagagatgaggaaggaatacagaatgtctgtatctataaaactaattgtattttataagttggaccaagtataatactgccaaacattcctaataaaaagtgcacttatacttatttctttccttaagtattacttgtttctatatttccttatgcagaactctactccctggtggggcaccctgttatattttgaattattttcttgtcaaatgatattctagatttccctg

SEQ ID NO: 278127 - DNA, 538 bp, Homo sapiens
gcaaacatataattagataagctaccagtgcaagggagtgcctggtggaaagaaggagaccaaaagtcactattttactattaacaaaaaaaagccatcaaaaaagggaagaaaggaaaaaagaactaagaaaactccttaaaaatagagtactcagttacaggatcaagagaaaatgggagatattggtcaaaggtataaaatttcaattataagattgattaagttcttgggatctaatgcacacataccaatgttagttaataatactctattatttaatgtgaaatttgatggcagtacattttcagtgtccttatcacacacacacaatgatagctatgtgtgctgatggatgttttaagtaatttgattatagtaactattacacaatgtatacatatatcamatcatcatgttgtacactttgaatatatgctatcttatttgtcaattaaatgttttagaacaaacaaaaaagagaaacaattgtcttggaaaaaggaagcatgatctatcaatacttgatgactttgag

SEQ ID NO: 278128 - DNA, 418 bp, Homo sapiens
aaagggagatagacatggggaaaagactggcacagtgagagaaagaactgtgagaaagagagtaaagtgtaagaatacaacagcaaaaaggtgtcagagagacatcaacaaagagccagaagatggaatattggcactattacayttggtgacctaactcaaattcttctcttgacttaatcgagctctagccataaacatagtgagatttgacctatcctttcctccgaggtgagtatctttactcccaataccaagcatggtctaaccctagctgtctttgcaagtttcaggcctgcagccaagcaggttgcttacttcagctctgcatttatgcatcactaaggttcatctcgtgttagggtgtgatagtatttttattactatttttcttcattttgactatcattgtttatat

SEQ ID NO: 278129 - DNA, 646 bp, Homo sapiens
tacttgccattatacatttgtccaaacccataaaatgtacaatacccagtaacccctaatgtaaactggggtctttcagtgataaagatgtgtcagtgcaagttcattaattgcaacaacacaccactctggtaatgaaggaacctrtgtatgcataggggcaagagatatggggaatcactataccttctcaatttttctgtgaacctaaaattgctctaaaaaataaagtctaattaaaaatataaataaaccaccactagggtaacacattttgttttgtattctataatcaaccatgacaatctccggaccatgataatctccagaccatgataaaaagctgtgttctaagaggatttaataaagtaagacaccagagaacaatgtgtacatagtatcacaaacaaaatctttattgaatttcacacagcatagaggagtatttccttatcctaagtaattcaaaataaatatttgacaagtatttctgtactaatcagttattgaacttctagttgtatttcatgcaaccattgtttctaagccttaaaaagtgttagccaaagaaggaacgaatgagaaagatgaattccaaccatgtttaagtgaatccccaaagttaattaaggtaaaacaccttata

SEQ ID NO: 278130 - DNA, 646 bp, Homo sapiens
tacttgccattatacatttgtccaaacccataaaatgtacaatacccagtaacccctaatgtaaactggggtctttcagtgataaagatgtgtcagtgcaagttcattaattgcaacaacacaccactctggtaatgaaggaacctatgtatgcataggggcaagagatatggggaatcactataccttctcaatttttctgtgaacctaaaattgctctaaaaaataaagtctaattaaaaatataaataaaccaccactagggtaacacattttgttttgtattctataatcaaccatgacaatctccggaccatgataatctccagaccatgataaaaagctgtgttctaagaggatttaataaagtaagacaccagagaacartgtgtacatagtatcacaaacaaaatctttattgaatttcacacagcatagaggagtatttccttatcctaagtaattcaaaataaatatttgacaagtatttctgtactaatcagttattgaacttctagttgtatttcatgcaaccattgtttctaagccttaaaaagtgttagccaaagaaggaacgaatgagaaagatgaattccaaccatgtttaagtgaatccccaaagttaattaaggtaaaacaccttata

SEQ ID NO: 278131 - DNA, 646 bp, Homo sapiens
tacttgccattatacatttgtccaaacccataaaatgtacaatacccagtaacccctaatgtaaactggggtctttcagtgataaagatgtgtcagtgcaagttcattaattgcaacaacacaccactctggtaatgaaggaacctatgtatgcataggggcaagagatatggggaatcactataccttctcaatttttctgtgaacctaaaattgctctaaaaaataaagtctaattaaaaatataaataaaccaccactagggtaacacattttgttttgtattctataatcaaccatgacaatctccggaccatgataatctccagaccatgataaaaagctgtgttctaagaggatttaataaagtaagacaccagagaacaatgtgtacatagtatcacaaacaaaatctttattgaatttcacacagcatagaggagtatttccttatcctaagtaattcaaaataaatatttgacaagtatttctgtactaatcagttattgaacttctagttgtatttcatgcaaccattgtttctaagmcttaaaaagtgttagccaaagaaggaacgaatgagaaagatgaattccaaccatgtttaagtgaatccccaaagttaattaaggtaaaacaccttata

SEQ ID NO: 278132 - DNA, 538 bp, Homo sapiens
gttccttgcctaatttggatggaaataccaaaaccttaggatgtggtggtggggacgcatactaattatatctacttcaatcatttaaagaagattgtctcttgaactgtctccaattttcttggtgtgtcttycattgaatgaatccatagttcaagatctgaacttctaagcaatacttcaagagaggctatgtttgctgaaaggctcacagtagcctgaaaattagctttagtgaacttgtacttctagtcaccacggaattcctccacagaactgatggaagcacctccccgatggtacagtaaatgctcctctgtcattctaggttattggctgtttattcttctctgtcacctgcataaagtatggcaaaaagttccctaggggggagtttgctcatcctccttagcctcctaaattatgccatcagcctgatcattatgcaaatattagttttaccctctcttccttgagaaattagagtaagctcccaatgcatttctgataattcattttgtcttccctttgacctaaa

SEQ ID NO: 278133 - DNA, 957 bp, Homo sapiens
taattttatgcagcaacttgactggattaagagatacatggatagctgttaaggcattatttctgggtatatctgggagagtgtttctggaagaaactggtatttgaatcagtaaagtgaataaggaagattcactctcagtgtgggcaggtaccatccaatcagttgagggaccagttagaagaaaacagcaatagaaatgtgaatttcctctcttctcttttgaaactaaggtactcttctcctacttttagacatcagaactccacgttctctggccttcagcctcagaccaccagctcccctgattctgaggccttcaggttttgastgattccctggttctccagcatgcagatggcatattgagagaattctcagcttccataatcacatgtgccaattcccctaataaatccactctcacttatctatatctatgtctatatctcctattggttctgtctttttggagaacwtaattttatgcagcaacttgactggattaagagatacatggatagctgttaaggcattatttctgggtatatctgggagagtgtttctggaagaaactggtatttgaatcagtaaagtgaataaggaagattcactctcagtgtgggcaggtaccatccaatcagttgagggaccagttagaagaaaacagcaatagaaatgtgaatttcctctcttctcttttgaaactaaggtactcttctcctacttttagacatcagaactccacgttctctggccttcagcctcagaccaccagctcccctgattctgaggccttcaggttttgactgattccctggttctccagcatgcagatggcatattgagagaattctcagcttccataatcacatgtgccaattcccctaataaatccactctcacttatctatatctatgtctatawctcctattggttctgtctttttggagaac

SEQ ID NO: 278134 - DNA, 562 bp, Homo sapiens
gttgcatgaatcaatttcttatattcaatacaccaatctaaaaaccataacataaagtattttgagaggaggaattatctggggagaccctctgtaatgatatgaaaaaagttttcattttccttctctattctcacaacatagtcagcccagaacacttcacctctggccaccaaaatatgtgggggtttctccgcaacaacaaccaactctgtggcaaaaatcagtgagatactctggtaataattcatttcaattctcacgctatctacctggagacagttagatatcatgtgttgatggctcagtcccagaagacagctcccactttagatgccagttgcaggtactaaattgtcaccyacatttctgatcaactggctaacaatcagaggttcgcatgacccgcctcctcaagctcaattaatttgcttgagcagctcacagaacgcagggaaacaccagtttattatgaaggatactacaaaggctacagatgagcagatggaagagatgcacaagtcacggtatttccatgccctctttcagcatgtcactgtcc

SEQ ID NO: 278135 - DNA, 621 bp, Homo sapiens
tctggaatccaattcagcccttcatgggggttgcaagggtgggcgtacaaacatggggtatgaggagcagtctcccagaggcaggagatcacagagggcattgtctgtaaaataattaaatatcataaaataatctacataataaaattcttcttattaaaaaataataaagtgatctaaaaggtggtctggtttttattgtcactatgttccagcaactttaaacaatgtcagtgaaaaatctttctctctgaaaaaatagtttgctggtctaaatgttacacaagtactatggttactgtgcaggttttaataatctataygtaagccccaaaataacctgtttttaatatatcagagttaattcagaaaacacccagctggcacactaatttccctagagaactgtaatatcaactcattaaacagctcaggttcatgcaggcttttcttaggtgcagccctctctcccaccactgttgtacatatttctgtatcgaggcagcaaatttgaaataaacaatgatagcacagtgattataaagataaagacatagaactttagttgcttcaactctgtcattctaactgtaaataattctatgaacttagaggaattta

SEQ ID NO: 278136 - DNA, 557 bp, Homo sapiens
tcgcaaacagaatttgacccatttgtactgcatcttcttacctcctaactaaatgcaaatatttcccaaacaactcccaaaccctagtaaaataagtctaataaatctattactaatgaaagatgttgaaaggagaaagaggaagaataacttgagacaatgggacttctcaaatgaaagggaacagctggacatggtgacttacatctgaaatcccagtgactccagaggctgaggttggtgggtcacttgaggtcagggttcaagaccatcctrggttaacatagcaagactatgtctctaaaataattagccaggcatggtggcacacacctttagtcccagctatgcaggaggctgaggtgagggaatctcttgagcccaggagctccaggcggcagtgagctatgatgttgccactgcactccagactgggcaacagagtgagatcttgtctctaaaacaataatcctataactaaaataaaatgagaggaggaaatagcaatgaaaaacattacagagagaggccagtggtatcaaggtgaatttttcccc

SEQ ID NO: 278137 - DNA, 438 bp, Homo sapiens
gctgtgactttgttgggttaatgatagtggaacatgaaaaaagcatccagactttgaggggatgaaaggatggacacctgggagatacaattgtagatgaacaatcctttttgatgatcygtccacccaggaaagtgcaaaaactgatttatttccagtaaaatagctttttaacttttactttatgtttttttctaggttttttttttttttttttttctgatctatgcagcgctcactccccaaggaaaagtttagttcaggcattcacaccccgatcttttatggaggaagtgtaaagggttttgattgaactatgagggcagccaggttccttcattatcatgccagcaggtcttcagggatgcataggcggtggttcatcttgattcaagggacttttcacagaaaacagaagcctgttttaaaagtatgatg

SEQ ID NO: 278138 - DNA, 1156 bp, Homo sapiens
atgttcttaatgccaaaaactacctttgtacaataccttaatttatggtacattttcctattcatatagagtagaaatgaaaattacttcttgttagcaatgaagacttgggggcttaaaagttaaatagcaagagtaaaatctcagcattaataaggggaaagctgggatttgaactcatgttatctgactttagaaatcaattttctttgccacatggtgcctataaaagggctttgttttatagattttcaacaaatttgaattgtctgatgaatcatctccaatctcttctatgactcatcattttctcattaagtttgcaaaaggaaaatgaacagtagggaaaaaatatctgtaccagaaacagcgtctaagtttgaaaaagaaggttaaaaatatatcctgtatttctaatgaaaatttatacaatgtgaacatcattgctagctgtcaatgaacacaatttgaagaayagggcaagttatttgcaatacatttatttaaagtgtttaaatatcttttataatagaacttataatcatttattgaatagaactactttgaactattttaataaatattatttggagattgatatggtttgwctgtttttcatagcggctacaccatttttacattcccacccattgtaatattgatgaacctgaaggaaattataataaataaaacaagcctatcacagaaggagaaatactgcattcacccatttatatgaggtattgaaaaaaaatgaactcatagaagcacagaataaaatgctggttgccagaataaaatgctagctaaagagaggggaaaatacagagttgttactcaatgagcataaagtttcaaatatgcaagataagttctagagatcttctctacaaacagtgcctawagttaacaatattgtattgtgccttaaacattttgttaagatagtgtatttcatattaagtgttctcacaagaaaaacaaatataaaaaaaggggggcattagaaacttttgggaataatggatatgtttatttccttgactatggtgatagtttcataagtatatgcatatgcccaaactcaaaaattgtatccgttcagtatgtacagtgtttatacattaattataccttaataaagctgttttaaaat

SEQ ID NO: 278139 - DNA, 638 bp, Homo sapiens
attgtacccagcacaatacacttaattattcctcaacttttctctttgcatactactttttccctcaacttttctctttgcatactacctttctcttggcaaaactatggcataaattttgcatagtggttgattttcataaggaaaacatacaactttcccctaccaagcgctcttctggggctttattgatgtttcttgcttgatttcttttgtctgagacaattaaaatagttctaactagcacttattctggcataaaaattgataatcataatctcctttctctaccaaccattctaggttttccttatcgttagtctacttgccctgaaagtagtacagatatgtaaatacctgagaggacctgcttatggcactgttagtagaccacagttgctgaaaatttccatttacaggtacccrttaggatggaagcaccaagaagcatgggtctactctgctgggattcctctgcattgcagacatacacctctttgcccacattatgtagcagcatgataaccagaatcaatttcccctgccaatatagtcactctcttcttgtcatgctgatctactgacaaaagaatcttggtcagccttcacaactttagatatgacagaaatattactat

SEQ ID NO: 278140 - DNA, 490 bp, Homo sapiens
gcctctactgggtgtacattgataaaaccttctcttcatgaagattttcttgactctaagatagagatattgtttgtgcacttgaaggtttccactatgcccataactkcttgtgctccattttcctatctgcctgtggaaaaccaaacccttttcttacagctttgcaattgtcttaatgacctttataagtgtgttggcattatccctcattaatatactctaaaaccctagattgacctaagaacttatttcatatagtaattgctaaacagaaaagtttaactgctttccaaaacagtaatgcaaatgattcaataaggatctttcctaattacagtctggcaatttgtgttttccaatattcactaattcacataaccagtattactatgttacattgtagatacatatctgttggccaccctagcatcatgtaatttagtcttatgagttttataaagaaggaattgacggtgaaacaggtaac

SEQ ID NO: 278141 - DNA, 490 bp, Homo sapiens
gcctctactgggtgtacattgataaaaccttctcttcatgaagattttcttgactctaagatagagatattgtttgtgcacttgaaggtttccactatgcccataacttcttgtgctccattttcctatctgccygtggaaaaccaaacccttttcttacagctttgcaattgtcttaatgacctttataagtgtgttggcattatccctcattaatatactctaaaaccctagattgacctaagaacttatttcatatagtaattgctaaacagaaaagtttaactgctttccaaaacagtaatgcaaatgattcaataaggatctttcctaattacagtctggcaatttgtgttttccaatattcactaattcacataaccagtattactatgttacattgtagatacatatctgttggccaccctagcatcatgtaatttagtcttatgagttttataaagaaggaattgacggtgaaacaggtaac

SEQ ID NO: 278142 - DNA, 595 bp, Homo sapiens
gcttagagagggaagatggttgaaaaattacctattgggtacaattttcactatttgaatgatgggcacactaaaagcttaagcttcaccactatgcaatatattcatctaataaaactgcacttgtaacccctaaatctataaaaaattaaaaattgtaaaaactgagaatccctccaagatggccaaataggaacagctccagtctacagctcccagcatgagcaatgcagaagacaggtgatttctgtatttccaacagaggtactggggtcgtttcactgggacttkttggacagtgggtgcagcccatggagtgtgagctgaagcagggtgggcatcacctcacccgggaagagcaaggggttggggaattccctttcctagctaagggaagccatgacagacggtacctggaaaattgggacactcccaccctaatactgcacttttccaatggtcttagcaaatggcacaccaggagattatatcccacgcctggctcagagggtcccacacccatggacccttcctgactactagcacagcagtccgagatcaaactgcaaggtggcagcgaggctgggggagggca

SEQ ID NO: 278143 - DNA, 591 bp, Homo sapiens
gtggcctgaactagacaacgaatgagtagtggacctctccactggctgtagagatgggatttgaagccagactttattacaacttcctattctgctgttcaagacctgttcggcctttggcatttttaaacctaaaaatgaaaagtctaatcgacatattagacatatttttaattccctcatttgaattacccttatctctaaaccagtggttttcaaacggggatgattttgccctccaggggacatttggccaggtctggagacatakttggttattacagttgggagggaggagagttgtgctaccggcatccggcaggtggaggcaagggatgctgcttaagcatcttaagatgtgtcagcccagactcacgacaaataattatgcagccctacatttcagtagcacgaaagtaaaaagacgctgccctgctctctctcacataccaactgtttctattcatgcttgaccatgaagaaggtgggcataatacagaaagcagagcccagtccttgcagcctgtatgtactaagggatatctcaaactgagacaaaagagaagtgaaagactgtctcttcttcaggct

SEQ ID NO: 278144 - DNA, 476 bp, Homo sapiens
ttattattacatcactcattgttattatcatttatagtggttagtaatgttcttyattccagcatttcactattgttcataattttatttcccctaggttttagctaaggtatcactttctcaatggggtcctaaagaaacctgtttaggattataaacccgtaccctgactctgacattaccatctttttcttctgcttgattttaattcatgacaattatcaccatctggaaaaagtaatgtactatgcattttacttatttatttgtggtttgctcacccaattagaatgtaagtttctgacccagagatttttgtctgtctcattatctgttatctctcagcacatagaatagtgtcaggcagatagtaaacaataaataattgaatgaatttgttgaattaatcttcgacatggagctaaagatgttttcctcaagtagttctgtgtgtggccaaatgagatggcttacaa

SEQ ID NO: 278145 - DNA, 582 bp, Homo sapiens
cacaatgaccaggcctttgtaccgtccctcacccaagtgcccactaacccaggaagggcataacctcaggcaaggtggttctctgcagctcagacagaccctaaaggagctgccacaacccctcaaggtcctatgagagagtgtctgtgctatgtgaaaccttgattgctaaaggtctgtgttcaaaagaggtagcaagtcagaagccattgtaaatcaagcttggggtgataaactatgacttttttttctaaaacactcaattccattgagtctttatggtgaccgagttaaggcatagamatttttctagttattttggtatattggaaaagatacctggccaggtgggagctacatcacctgaagtcaagctgcagttggaaccttctttctgggtgacttttgtcacttccttttcccttttttgggcctcagtctttatatctaaaaaaaaaaccaacaggaattgcatgacaggtgtgtttcccagctttccaaatcagtggctttccctcatggggaacttgttaaaatccaggttcccgggctctccaggagagtggcccaggagtctgatct

SEQ ID NO: 278146 - DNA, 582 bp, Homo sapiens
cacaatgaccaggcctttgtaccgtccctcacccaagtgcccactaacccaggaagggcataacctcaggcaaggtggttctctgcagctcagacagaccctaaaggagctgccacaacccctcaaggtcctatgagagagtgtctgtgctatgtgaaaccttgattgctaaaggtctgtgttcaaaagaggtagcaagtcagaagccattgtaaatcaagcttggggtgataaactatgacttttttttctaaaacactcaattccattgagtctttatggtgaccgagttaaggcatagacatttttctagttattttggtatattggaaaagatacctggccaggtgggagctacatcacctgaagtcaagcygcagttggaaccttctttctgggtgacttttgtcacttccttttcccttttttgggcctcagtctttatatctaaaaaaaaaaccaacaggaattgcatgacaggtgtgtttcccagctttccaaatcagtggctttccctcatggggaacttgttaaaatccaggttcccgggctctccaggagagtggcccaggagtctgatct

SEQ ID NO: 278147 - DNA, 641 bp, Homo sapiens
cctagcctcattgtacagattaagaacagaggcacagggagatcaagtaacttgctcaaagtcacaaagctaataaatagtggaaccagaactccatcccaggcagtcagccagtctggctccagagccaccctttattttttttagagacagtatatcacactgacgcccaggctggggtgcagtggtacaatcatagctcactgcaagcttgaactcctgggctcaagtgatcatcctatttcagcctcccaggtagctgggattatggacacgcaccaccccacccagctaattttttagttttttgtaaagacaaagtcttgctatattgtccaggctggtctcaaattcctggacttatgggatccttcccccttggcctcccaaaagagctgggactacaggtgtgggccaccgtgtctgggcygagagccaagcttttaaccactatgacaaacctgtgatttcacagctatcatgatagtgatatcaagtacccctttccagttaaattaaaatataggaagtcaatttataggaaatattaaataaacattggaaaaggagatatggggatgtgttaaaatgtttctaggtggtaaaaagcatttgggaaaccccaaaatacttcatggaag

SEQ ID NO: 278148 - DNA, 432 bp, Homo sapiens
tttactaaactggaagcactttgctaggccctttgtrttttctaattcaccccttacaacaatcttatgaagtgggtcctgtccccattttttggaaaggggaaatgaggcccagagatgttaagtagtttgtcccagatcactcagcctctaagtggcatagcagaaattcaaactcgagactgtctggcttcagagattctgctctcatcaccagctccagaacgcctcctctggatgtctgttgtccacttggaggcctagttctattcaagctcctaaatcaatgttgtaacttctgttctaaaataatcacatgtaccaggcaggatagagcagggaatgctgcagtagcaaatggctgaaaatctcagtgccttaacacaacaaagacatggtttttgcacacactgcatatccactgcaggtccg

SEQ ID NO: 278149 - DNA, 1005 bp, Homo sapiens
tttactaaactggaagcactttgctaggccctttgtattttctaattcaccccttacaacaatcttatgaagtgggtcctgtccccattttttggaaaggggaaatgaggcccagagatgttaagtagtttgtcccagatcactcagcctctaagtggcatagcagaaattcaaactcgagactgtctggcttcagagattctgctctcatcaccagctccagaacgcctcctctggatgtctgttgtccacttggaggcctagttctattcaagctcctaaatcaatgttgtaacttctgttctaaaataatcacatgtaccaggcaggatagagcagggaatgctgcagtagcaaatggctgaaaatytcagtgccttaacacaacaaagacatggtttttgcacacactgcatatccactgcaggtccgwtgggccctttcttattcacatcctttcagttattctccaattttctgtaaaactcctcttcccttgaaggtccttttcctcttttccttttctgacctcgcctcctctcccgcatccattcactttttcaacatacgtttcttgggtaaccactttgcwtcagtcactgagcttgctgcaggaaaacagactcaacctcactcctaacttaccctttttctatttcttttctttttattttttgtcccagttgctctgtcttgttaacatacacttgcaggcatttatttttttctttgtaacttacacctctagaaacatccccaaatgcaggtggcttctctgacagtcagtattccataaaccatcagatccatgaaagaagcctctctctgctgaatttatggattggcaaagccatttcataaaaaatgattaatgataattaacattttaactttgggccatttaatggcacctcacaaaagggtcaagtgaatctcatgggtgtcatatgtcaaatgtcacagttacatgatggggctgaacagtagctaagaattcaatgaaga

SEQ ID NO: 278150 - DNA, 555 bp, Homo sapiens
gtttccataactcctcctgtagaagcttctcagcatggagaaagtcaggcataggctcttccctccatcagatatgggctccatgtttaccaaagcctccttcttcctgatctggaggccccattaggattagcaagaggctgtatcgtcagccsgttctggggttcctgcctctgtgccctgctaatcaggctcaggatttgtcagcagccctgaaatattcatgaacagctgtttcaatgattataacagctgcacaaatagagaggaggcccacaggggagtcagggaggaaggagagctggggttttcatgtcatcttctcttctgttctcaatcccatcagacaaaggaagactttgggaaatcccaaagaactccagccagatagtgccaggcttcagcacagaagccacaagagcccaagagccagagcatcagcttcccctagagggcttggttagtctctgttaaaacacagattgctgggccccatcacagagaatatgatttagtaggtctggggtagggcccaggattttgcattttagtaag

SEQ ID NO: 278151 - DNA, 583 bp, Homo sapiens
tttttctacatttgtagagaggagagtttttatgaaattatgtgaagtgtcgggcaattaacagtgcttgaacacatatcactgccctcttcttccacactgaaggtacagatcctgcacttgccaggccaggacactgaagggggaaagtggatggayagaaggatgctgcctcaaccacaacctccatggcgaggggccagcttagaccactggccagaaagacagtgccctcttccctgtcacctgcttcctaactggcctcttccatttgggttctagatcagtctaatatggactggatatttgtgtctgcctaaaattcgtatgttgaagccctaacccctaatgtgactgtatttggagaaagagcctattaagagatgacaacggttaaatgaagtaatcaaggtagggctgtgatctaatagagccagctcccttagaagaagagccagagacaccagggctctgtgtctcctccatgtgagcacgtagctgtcacaagctgtccacagtccacaaagtggctgtccacaagccaggaagaaagcccttaccaggaactgaatcagctagtacc

SEQ ID NO: 278152 - DNA, 583 bp, Homo sapiens
tttttctacatttgtagagaggagagtttttatgaaattatgtgaagtgtcgggcaattaacagtgcttgaacacatatcactgccctcttcttccacactgaaggtacagatcctgcacttgccaggccaggacactgaagggggaaagtggatggacagaaggatgctgcctcaaccacaacctccatggcgaggggccagcttagaccactggccagaaagacagtgccctcttccctgtcacctgcttcctaactggcctcttccatttgggttctagatcagtctaatatggactggatatttgtgtcygcctaaaattcgtatgttgaagccctaacccctaatgtgactgtatttggagaaagagcctattaagagatgacaacggttaaatgaagtaatcaaggtagggctgtgatctaatagagccagctcccttagaagaagagccagagacaccagggctctgtgtctcctccatgtgagcacgtagctgtcacaagctgtccacagtccacaaagtggctgtccacaagccaggaagaaagcccttaccaggaactgaatcagctagtacc

SEQ ID NO: 278153 - DNA, 583 bp, Homo sapiens
tttttctacatttgtagagaggagagtttttatgaaattatgtgaagtgtcgggcaattaacagtgcttgaacacatatcactgccctcttcttccacactgaaggtacagatcctgcacttgccaggccaggacactgaagggggaaagtggatggacagaaggatgctgcctcaaccacaacctccatggcgaggggccagcttagaccactggccagaaagacagtgccctcttccctgtcacctgcttcctaactggcctcttccatttgggttctagatcagtctaatatggactggatatttgtgtctgcctaaaattcgtatgttgaagccctaacccctaatgtgactgtatttggagaaagagcctattaagagatgacaacggttaaatgaagtaatcaaggtagggctgtgatctaatagagccagctcccttagaagaagagccagagacaccagggctctgtgtctcctccatgtgagcacrtagctgtcacaagctgtccacagtccacaaagtggctgtccacaagccaggaagaaagcccttaccaggaactgaatcagctagtacc

SEQ ID NO: 278154 - DNA, 382 bp, Homo sapiens
ccccctaacccccaccctctggatcccagaccctgctcagccacatgaactgagtttagtggggtcccttctccaatctgatcttcagcttcccatctccaagtgttgactctctgattctaaggatccctctcccctccasgaaatggctctctagggccctactctcaactggaagccctaggacgcctctgccacctctgcggtctccggaggggtctacctggccccctagtagggggtggggtcgagagtgccttgaaagaaacctccagctaatgctctttattacaagcgttaatcccgcaaagccgactggaaataatgtttatcttttcgcagtttaattttccggaccctaagccgcgggtcagcgagggcg

SEQ ID NO: 278155 - DNA, 1714 bp, Homo sapiens
  misc_feature (1)...(1714): n = A,T,C or G
gaccttgggcacagttgcttaaccagtggcttaaccactctgtgcctcaatttcttccttggtaaaatggggataatagtacttataggttattgaagaagaccatgctggcagaatgcttggcagaatccctggtgcagaataagcagtagttaaatattagctgctgttattactgtaccacttgtccctccctcctttccccccttactgccccccaccccccgccccctgccccacaacacacaccagctggggcacttcctgctttamtcttcttcaggagcttttctctgaccctttgtatctctgtgacattgggcaaagtatttgaactcctgtgcacctctatttcctcattcttaaattgagattaatgattacttgcctacctcacagaattaatagaagtataaatgttttctaaacagtatgaagttctgcaaactgtaaggtactgtatttttttgtcctccttatacacagtcctaacwttctaaaatcccatcatttaaawgataaagtctacagtcattgtagttattagccattatcaaagtatgtgagaatctgatctgcaatggaaagagagttccaaagaaataattttggtcctttgaacacaacacgctcaacccagtgttaggtttactgatgcaggtggagcactcaattggcgaacatatacatataagaacataatgtagaaaagtgcacatttatgctttatgtgcttttctgtatttataggatgcgttaataaatatgtttattgtttttaagtattcaagccatgtcactttctaaaataatcagcttagctgggccaagaacacagagaaaagctgttttttaagaaaaactcagcatctctctgaaatgttctgcaaaagcccctaacccagggaacagggcagcaggtgcaccaggcccatgtgtgagaaattttccaaggagactttgaggagccaagacagagttaagtccttgtctccaaagaatctaccgcgcatctcctatccacttgctttatctgtttagcacactcacactacatcttacctcctctttgcgcctgacatctaggaggatctttgagatnwagtgataaaaattcacagtaatagatagatcccttgatttttcaaaatgcactttggaactatccacacatttgcagcttggatacatctatgctatttttttaaagtaagaattggagagtattcattaaattcatcccttggggaagattactgctaattaattaattgcaaacatttccagagggaaggtatgtcaattgtaaagtaataaaattagatagtagaaatactgactcagcaacttcgattgcccatttgttcctaagcagaatttttttwaaaaattttatgacagaaaaatggggctggtggtggagaaaaagcattagccctgtcccttggcgatatggttgcaaaggagaaactaccatataggaattattgatttttagctgatttataagacctctgttttatcaatgctgtgtgcagggcctccaggcctacttcttgtctttgctctctaggatttgagaaaagcaacacaattttttaaaaagaaaagaggatgttgaggaacagtggggaagaaaattgggaagtaggactatgaagatatcttggcatttttcttcttctggaaagacaagcgaacaaacaaaagagca

SEQ ID NO: 278156 - DNA, 934 bp, Homo sapiens
agatgtggctggctgtccagctgatacctgctccctggtctttccttgctaacaacaccttcatgttgtccggcatggctaagtgcagtcatggcctcctgctcctgggtttctggcatcttctgctcaggggagagaagcatgctatgtgacccaattctgctccatgaamctcggaggaaatctgagtgggagattctgaaaaagcatttgttttcataatagaagaggacagaggcagtggtgtcacctccaccttcttttgaatatggccatgataactaaagcattcattagttcaacaatgtttattgagcawcccttgccatgccctgtggaagtattcaagaagtcaaacctaatattcatggtggatgcaggtgtctccatggattaagaggcttttggagtccctatttgtgcagatagtcctactgttcatctatatacacttcttttcttcctggatatgctggagacaatacttccaagcctccttgccattagaaaaactcatgttactagtctgggatacagaaatatgagcaatgtgagtcacttctaggcggaggcagcaggaagtctccgtgtgagatgatcattactctctttccctgcttctgcaaatgtgcaggttttgtgttgacatggtggagctactggatctctaagccactagagaggagagttggtcttgagactcagacttgcagcaaaccttgcataaattaacacagtgatacttgggagwtatttcttattgcagcatatcctagcctactcagactaatatatgattctattgcttaatacctatgtgatcttgggcaaataacttctctgaggtttattttgttcatttgtaaaatggtataaataacagcaataattcataaggctgttaatgagatgatgcatgcaaaatgcttagcac

SEQ ID NO: 278157 - DNA, 1153 bp, Homo sapiens
caataattattgtcaaatgaaaaaatgaatttggatgattgagagtatattaggattctccagagaaacagaaccacatggatatatatagatatacaaaaagatttattttgagggattggtgaacacaactacaaaagctgagaagtcccatcatctactttctgaaagatgaaagctaatggtgtagttccagctcaaaaccaaagtcccgagacccaggagagccagtagtgtaagtcccagtccaagtctgaaggactragaaccaggagtgccaaagtccaggagcaggagaagatggatgttccagctcaagcagagagcaaatccacccttcctctgcctttttgttctatttgggccctcaacagattgaatgattcccacgcacactggtgaggacagctctaccttacacagtctgtaattcaaatgctaatcccttctggaaacaccctcacaggcactcccaggaataatattttaccagctatctggtcattccttagcccagtcwatatctttagcatagagtaacatattaaaatgggccttaaagttcaaataatagaacttccccttttaaagttttaattctctctaaaatattcctatgaggcagtcacagttcctttggttacacacatccaatgtcagggaattcactactttatgagtgagacagcccatccttcacttgagcaaaagttttgtcaagtagtttctattcatgggtttaactcccaatcaagaccgcatagattgaatgtgttctctcatctgcactatattaacaatcataaaggtagccagggtcagaggtggtaggataggccctgataagaaacctagatgctagcctcgtataatgggaagtgcagggatatagaaagaaaacaataacctctcagcttttttattttaaaaagatctctttggaagtaaccaagatgctcttccawaagttaatggataaataaactatggcacattccgacaatataatattattcagcattaaaaagaaatgggctattaagccatgaaaagacagcatggaaacttaaatgcatagaagtgaaagaagcccatcagaaaaggctatgtactatatgattacaactatgcgacattccagagaaggcaaaac

SEQ ID NO: 278158 - DNA, 457 bp, Homo sapiens
actgttcattaattaatattgaacactgaggagagacttgcctgcagcaatggccagtgataaaaagacacttcttggtggggctccctgagccctgggcttgcttctctccaagctctaatcacactgcgctataattatctgcttactagtctgtatcccctcagaacagagttccttggatgtaatgcctcagtcttactcaacaccatagcttccccctcacccctgtgcccagaatagygtctggcagaacttcacaaatgccagtggttccctggttgttggtgcacccaacgtcaggaccataagagcaggctgtgattacagctggaaggatgtaagttagatgacacgcagcctttccaacgtcatggaatatgttgacggctcaaatacaatgtgcctgaagattagaggtgacaatacaacttgtcacctgaattggtatactttt

SEQ ID NO: 278159 - DNA, 457 bp, Homo sapiens
actgttcattaattaatattgaacactgaggagagacttgcctgcagcaatggccagtgataaaaagacacttcttggtggggctccctgagccctgggcttgcttctctccaagctctaatcacactgcgctataattatctgcttactagtctgtatcccctcagaacagagttccttggatgtaatgcctcagtcttactcaacaccatagcttccccctcacccctgtgcccagaatagtgtctggcagaacttcacaaatgccagtggttccctggttgttggtgcamccaacgtcaggaccataagagcaggctgtgattacagctggaaggatgtaagttagatgacacgcagcctttccaacgtcatggaatatgttgacggctcaaatacaatgtgcctgaagattagaggtgacaatacaacttgtcacctgaattggtatactttt

SEQ ID NO: 278160 - DNA, 457 bp, Homo sapiens
actgttcattaattaatattgaacactgaggagagacttgcctgcagcaatggccagtgataaaaagacacttcttggtggggctccctgagccctgggcttgcttctctccaagctctaatcacactgcgctataattatctgcttactagtctgtatcccctcagaacagagttccttggatgtaatgcctcagtcttactcaacaccatagcttccccctcacccctgtgcccagaatagtgtctggcagaacttcacaaatgccagtggttccctggttgttggtgcacccaacgtcaggaccataagagcaggctgtgattacagctggaaggatgtaagttagatgacacgcagcctttccaacgtcatggaatatgttgacggctcaaatacaatgtgcctgaagattagaggtgacaayacaacttgtcacctgaattggtatactttt

SEQ ID NO: 278161 - DNA, 592 bp, Homo sapiens
cttggccaaaaatactacactcaacttctactttcattccattgaygagagtcagtcacaaagccagagctaacagtaggggatgtggaggaatggggcccaattctgtgaccaggaagaaacagaaggaatgggagagaggaggaagaaggtgaaggaggaagagaggaggaggaggatggggagaagaagatgaaagagaagaagaagaaaagtggacggggacttttaaatagaaaacaatctccaccacagatgattagcaacccctaatgagttcatttgactcacttttttttttttaattggacacgccattcttggttctaagtctcagaactgactcaatcttctatcttttttcctaattggacactccattcctggttccagttcttagaacctaatctgaactaccaaaccaatgtccgcccacaacttagagtgacttgcccaagttcacacaacaagatgggacagaatcatgaccccaggacgattatgcttcaaagattaattgaataaacctgtttttagcagtagtatctctaacacttagaatattataaataaggtacaacaacagcctgta

SEQ ID NO: 278162 - DNA, 592 bp, Homo sapiens
cttggccaaaaatactacactcaacttctactttcattccattgatgagagtcagtcacaaagccagagctaacagtaggggatgtggaggaatggggcccaattctgtgaccaggaagaaacagaaggaatgggagagaggaggaagaaggtgaaggaggaagagaggaggaggaggatggggagaagaagatgaaagagaagaagaagaaaagtggacggggacttttaaatagaaaacaatctccaccacagatgattagcaacccctaatgagttcatttgactcacttttttttttttarttggacacgccattcttggttctaagtctcagaactgactcaatcttctatcttttttcctaattggacactccattcctggttccagttcttagaacctaatctgaactaccaaaccaatgtccgcccacaacttagagtgacttgcccaagttcacacaacaagatgggacagaatcatgaccccaggacgattatgcttcaaagattaattgaataaacctgtttttagcagtagtatctctaacacttagaatattataaataaggtacaacaacagcctgta

SEQ ID NO: 278163 - DNA, 497 bp, Homo sapiens
ctggtacaaagaactgaaataaaaacatatgcaggtcggaaaggaagaagtaaaaatgcctttctccatagcaaacatgatcatgcaagtggaaaatctaaaagaattacaaagaaaagtaccagaattaaggctatgaaatgtcacttgaggaagctamaatcagtacagcaggattcaagagtggatccgaattacttgggggtaaataggaactataacacaagtgaaggacgtccttcatgctcacccacgtctcccaacccacagcctctgacacaaagagctcagactttaagaaggcattcggttacctctaatgtcaggttcacatccagctagagcccagcacattgctggagaaagcaatcagcagttttaaactgactctgtacacctgtgttaataattgctgaagctgtagatggacacatagcgactcatgatatcatttctctacatctgaattttgtaaaatttttcttaataaaaaggca

SEQ ID NO: 278164 - DNA, 500 bp, Homo sapiens
ggctgccaggtgtgctcagacccagccgcagctcactgtggctcccagtatatggaaatgattttaaataccccattaaaagactccctgatgggagtaaaagtaaaatttgattacacsctacttccatgaattatgcgtaaagaaaatgggacggaggggtatatgaaaagtgttataaagaagaacaaggcaaattgaaacaaaaagaaagtgagttataattcaagtctttaaatttaagagtcattttattatgatagaagtaacatcttcaatgaagataaaatagacctttatgaaaattcaaaacatttaaatttttttgaaatgtaaggagagttagacagagatgtaattgtgagaaggttaacaaaccttggatgccttcaatacatcaagtaaactgagaacatttgaataatacagttaataagacaaaagatatgtagtatttccaactttgttccctatacatactttttcaagtattaggagaa

SEQ ID NO: 278165 - DNA, 500 bp, Homo sapiens
ggctgccaggtgtgctcagacccagccgcagctcactgtggctcccagtatatggaaatgattttaaataccccattaaaagactccctgatgggagtaaaagtaaaatttgattacacgctacttccatgaattatgcgtaaagaaaatgggacggaggggtatatgaaaagtgttataaagaagaacaaggcaaattgaaacaaaaagaaagtgagttataattcaagtctttaaatttaagagtcattttattatgatagaagtaacatcttcaatgaagataaaatagacctttatgaaaattcaaaacatttaaatttttttgaaatgtaaggagagttagacagagatgtaattgtgagaaggttaacaaaccttggatgccttcaatacatcaagtaaactgagaacatttkaataatacagttaataagacaaaagatatgtagtatttccaactttgttccctatacatactttttcaagtattaggagaa

SEQ ID NO: 278166 - DNA, 577 bp, Homo sapiens
ttgaacaatgaatcaaaaagtttcctggaagtacagataggcaaaatcattccgaacagtttttgggaaggaagcaaaaaagactgatttacttgaccatgtattcaaatgtattcaattaaaacaaaatgttcagcaggaccttgaatagcatcattttattcaacatcctttcattgtaacattgatgagggaaaaaagtcaattcccggccaggatccttgtcggtgtcragtttacacgttcttcccatgtctacgtgggtttttttccaggtactgtggtttcctcccacatcccagagctgtgcccatttggtgaaccggcatgtctaaatggtcccaggatcagtgattgtgggtatgtgtgagtgcaacctatgatgggagggcatcctgtccggggctggttcccactttgtgattgacagctgggtatttacactcagctgtaaatgggcaaatcaatccctgagcttctgggataggctacagtgatccatgacttggctggcataattgggtacataattctctcacttgtttttattaatctttcttacacgtatgtatatatc

SEQ ID NO: 278167 - DNA, 577 bp, Homo sapiens
ttgaacaatgaatcaaaaagtttcctggaagtacagataggcaaaatcattccgaacagtttttgggaaggaagcaaaaaagactgatttacttgaccatgtattcaaatgtattcaattaaaacaaaatgttcagcaggaccttgaatagcatcattttattcaacatcctttcattgtaacattgatgagggaaaaaagtcaattcccggccaggatccttgtcggtgtcaagtttacacgttcttcccatgtctacgtgggtttttttccaggtactgtggtttcctcccacatcccagagctgtgcccatttggtgaaccggcatgtctaaatggtcccaggatcagtgattgtgggtatgtgtgagtgcaacctatgatgggagggcatcctgtccggggctggttcccactttgtgattgacagctgggtatttacactcagctgtaaatgggcaaatcaatcccygagcttctgggataggctacagtgatccatgacttggctggcataattgggtacataattctctcacttgtttttattaatctttcttacacgtatgtatatatc

SEQ ID NO: 278168 - DNA, 288 bp, Homo sapiens
gtttctacatattcgtatcagaaaaggtggcttccattagctcagtctgccatgatgtaggaacctatttaccattcatttctgaaaattatttcagacactttgccataactacctacattactctttttctaaaagtatttcagggatacttgtaagaacacatctgactttctaaaatgctactttattcgtgtttaagtrgaaaagaaacatactgttggttaggcatccccatctccagatttgtaatgtagaaactcttattacattgttagagaatcctgg

SEQ ID NO: 278169 - DNA, 288 bp, Homo sapiens
gtttctacatattcgtatcagaaaaggtggcttccattagctcagtctgccatgatgtaggaacctatttaccattcatttctgaaaattatttcagacactttgccataactacctacattactctttttctaaaagtatttcagggatacttgtaagaacacatctgactttctaaaatgctactttattcgtgtttaagtagaaaagaaacatactgttggttaggcatccccatctccagatttgtratgtagaaactcttattacattgttagagaatcctgg

SEQ ID NO: 278170 - DNA, 519 bp, Homo sapiens
gtggagatgaccaaaagaaggtgtggcacctgcaattagaaggttatccaaggggtccaggtgtcaggtaaagactaagaccagttagacagatgtcttcgttggcttgggttgccgtaacaaaataccatagactggttggcttaaacaccagaaatttatttctcacagttccagaggctgaactcagggtgcctgtatggtcaggtttctggtgagggctctcttcctggcttgtagatggctgccttctacytatgtcctcatatggtagagagagagagaaacatcagtctcctcctcttcttataaagacattaatcccttcaagggagtcccaccatcctgaccctttctaaacctaattaccttccaaagtctcatctccaaataccattacagtgaggattagggcttcaacatatgaatttgggtggtgggacacaaacattcagtccataacaacagattgaagagatatccttggagacagaattgacagtactgggtgattggctg

SEQ ID NO: 278171 - DNA, 597 bp, Homo sapiens
gtctttttttgagacagggtcttactctgttgcccagactggagtgcagaggcacrattatggctcattgcagcacccatctcccaggctcaggtgatcctcccacctcagtctccagtgtagctggggcttcaggtgcacggcccaccatgcctagctaatttttttttttttgtatttgtaaagacacggttttgccatgttgcccaggctggtctcgaactgctgagctcaagccattcaccagccttagcctcccaaagtcctgggattacaggcatgagccaccacacccggccaaaatgtctttattctatcctcatactttattggtggtttggttggatctaaaattcttagctaaacctaatttctcttcagaatattgaagataatagtcctttgctttctagaattcagtgacaatattgagaagcatgaggttattgtttctcctttcttttgatctgatcctttttcctctctttggaagctttgatggtgtttattcccagtgctgtagtttttttcttcttcatttttgttcgatactctctggacctcctactggctaaacaatagaatttctgattgatt

SEQ ID NO: 278172 - DNA, 593 bp, Homo sapiens
tagaagagtgaggagcagcagtaattaacttgaatttggaacttggatataactaaagacacattttgcttcttcatttttatgtcagtttgcaaaggaaacagttatgattttagctaaatacagaaatttttttcttttttctttttaaaattctacttgtatcacatttcaaaacctactctgaattttcactcagttcccacaatattaccataattctttgagctgttggcaaaatggatccattttataaagtcatgccttttgcattgagcttttgcctgtctcatatatttagataaatttgaaagcaaaaggaatatccactgtgttgaatatctttaatagcatggttgaaatttataatttgaaattcrtaagttcaaagaacatttatctactgcttgattttatgcttgaaacttcctatgcttcacagcagtttttttttaataggtggacaaaaatccttcctcctatcattcataacaattttctttatacttaagtaaaatatacagaaacttttaaaggaacgccaaaatcttgttccctcttattgttgccacattatttttattatattaccc

SEQ ID NO: 278173 - DNA, 530 bp, Homo sapiens
acagggagaaaaataaagttaatattttgaggaaaaaataaggcttttaagatgacatgctatatagtagacaaatagtttaactcggtgcctacttcatgtacactggatgtgttaacatgaatttatgaccytcagtgactttttattaccaaaacagcttccttaaagcaaacacacacacatgcctctacagtattggaaaattccgtctccttagataaaacaattaggatttttcttgggccaactagaataattagggctgcagagttggagcctttatataaggagtttgcagctcatatccgaagagagaaatgtatttggaaagtcaaaagtgtaggtaagtgagaaagcagagtagtttcagcttttgcagttggagtgggtataatttactgtgttgtcataagatactggaaagatctttggaagaataggttcttaaagtgttttctcatgtgcccttactgacatttcccattgggccttcaagacaactccagtaaatacttaaattgattttc

SEQ ID NO: 278174 - DNA, 530 bp, Homo sapiens
acagggagaaaaataaagttaatattttgaggaaaaaataaggcttttaagatgacatgctatatagtagacaaatagtttaactcggtgcctacttcatgtacactggatgtgttaacatgaatttatgaccttcagtgactttttattaccaaaacagcttccttaaagcaaacacacacacatgcctctacagtattggaaaattccgtctccttagataaaacaattaggatttttcttgggccaactagaataattagggctgcagagttggagcctttatataaggagtttgcagctcatatccgaagagagaaatgtatttsgaaagtcaaaagtgtaggtaagtgagaaagcagagtagtttcagcttttgcagttggagtgggtataatttactgtgttgtcataagatactggaaagatctttggaagaataggttcttaaagtgttttctcatgtgcccttactgacatttcccattgggccttcaagacaactccagtaaatacttaaattgattttc

SEQ ID NO: 278175 - DNA, 530 bp, Homo sapiens
acagggagaaaaataaagttaatattttgaggaaaaaataaggcttttaagatgacatgctatatagtagacaaatagtttaactcggtgcctacttcatgtacactggatgtgttaacatgaatttatgaccttcagtgactttttattaccaaaacagcttccttaaagcaaacacacacacatgcctctacagtattggaaaattccgtctccttagataaaacaattaggatttttcttgggccaactagaataattagggctgcagagttggagcctttatataaggagtttgcagctcatatccgaagagagaaatgtatttggaaagtcaaaagtgtaggtaagtgagaaagcagagtagtttcagcttttgcakttggagtgggtataatttactgtgttgtcataagatactggaaagatctttggaagaataggttcttaaagtgttttctcatgtgcccttactgacatttcccattgggccttcaagacaactccagtaaatacttaaattgattttc

SEQ ID NO: 278176 - DNA, 480 bp, Homo sapiens
agagtggttcacaacattaaacatatttkcaaagtattactccttccccagcctccaagtggttgtaaacattaaatatgtcttataaaaactgctttgccagctactggcaagacagctatgaacatcatttttctttaaagttgccttccagctgcgggactatttttccttatttgctctattctatttatattttgtacacaaaagcaggcaagaggctacattggcccaattgtctctggctttatgataagtgatcgtgggagagcagttgcacctccgtaaaaccctgctggccacaggagcttgctgaagttcaatcactgatactgaatatttcatatagatgtcagctgtgtcttccaaaataatttttgtttttcattgtgcaatgtgttgaggcataaagatgggcatgcattaacatcagcattaagaaaaataacttgaagcaaccagacactgatgaattatacc

SEQ ID NO: 278177 - DNA, 480 bp, Homo sapiens
agagtggttcacaacattaaacatattttcaaagtattactccttccccagcctccaagtggttgtaaacattaaatatgtcttataaaaactgctttgccagctactggcaagayagctatgaacatcatttttctttaaagttgccttccagctgcgggactatttttccttatttgctctattctatttatattttgtacacaaaagcaggcaagaggctacattggcccaattgtctctggctttatgataagtgatcgtgggagagcagttgcacctccgtaaaaccctgctggccacaggagcttgctgaagttcaatcactgatactgaatatttcatatagatgtcagctgtgtcttccaaaataatttttgtttttcattgtgcaatgtgttgaggcataaagatgggcatgcattaacatcagcattaagaaaaataacttgaagcaaccagacactgatgaattatacc

SEQ ID NO: 278178 - DNA, 480 bp, Homo sapiens
agagtggttcacaacattaaacatattttcaaagtattactccttccccagcctccaagtggttgtaaacattaaatatgtcttataaaaactgctttgccagctactggcaagacagctatgaacatcatttttctttaaagttgccttccagctgcgggactatttttccttatttgctctattctatttatattttgtacacaaaagcaggcaagaggctacattggcccaattgtctctggctttatgataagtgatcrtgggagagcagttgcacctccgtaaaaccctgctggccacaggagcttgctgaagttcaatcactgatactgaatatttcatatagatgtcagctgtgtcttccaaaataatttttgtttttcattgtgcaatgtgttgaggcataaagatgggcatgcattaacatcagcattaagaaaaataacttgaagcaaccagacactgatgaattatacc

SEQ ID NO: 278179 - DNA, 636 bp, Homo sapiens
tcaatagaacatacatcataatgacccaggcattgaaatcaacagatatatattatgaatatgtccttagactatggagatattgtcacaatgatagaacgaaaaaggtaattttgagaaatgaacattgttgaagtaacaagtgcaaaatatacaatgaaagagtcactggcagggtatactctcagatttcagctmtctgaaaagcagacaaataaccttgaaaaccatttttgaatttatctaatctcaaacaaaagaggaaaatgattaaaataagagattgaatgacatgggatatcaagccatcaaacctatacacaaatgaagtctcaaaaggatgagtcagaaaatgggaaagaaaaaatatatttgaagaaataattgccagtgttttcaaattttgatgaaaaatttcaatgcagagatccaagaacatcgaatcaacaagaacacatgtatgaagggtataaagccaatagcataattaaaatgaaatattgaaaaatatccatttactctaaggaaggtaacactgaaccggtgaagaaagaaatatcaacaaccaagggaagagaacaacacccaaataagaaaatagtaggcaaatagtaacatggtagatttaacaacact

SEQ ID NO: 278180 - DNA, 543 bp, Homo sapiens
gagaggaagtaaaattatccctatttgaagctgacatgattctatatctagaaaacccatagtctcagccgcaaagctccttctgctaataaaaaaaacttcagcaaagttttagaaagaaaatcaatgtacaaaaatcactagcatttctataaaccaacagtaaccaagctggcagtcaaatcaggaaggcaatcccattcacaattttcacaaaaagaataaaatatctagggtaaaatacaactaaccagggaggtgaaaaatctctacaatgagaattacaaaacactgcacaaagaaatcagagaggatacaaacaaaatggaaaacatatcatgctcatggataggaagaagcaatatcattaaaaggccatactgcacaaagcaatttacagattaaatgctatttctatcaaactaccaatgacattcttcacaaaactagaaacaactgttttaaarttcatgtggaaccaaaaaagaggccaaatagccaaggcaatcttaagaaaaagaacaaagctggaagcatcaggct

SEQ ID NO: 278181 - DNA, 620 bp, Homo sapiens
caaaaatgacagataaaagaagcaggtcatgcatagcctatctgcctgagatttatttaacccttcttcagaagaggctttgattcttgtctctctgtgtctacctatagacagcatttctcccaggaagcttgccctgacctcctagaattggttatgtaccatttatatatttttcatattccamtgtacataactcataacagaaattatcacaagggaacagctgtggttttattgttatgtctagctatccagctatcatcttcgggagactgtaggctccttgaaggcagaagccagatttatcttcatgacctctgtgtgttagatgaggtctcagagatagaggtcaaaattttccttttaggtaaattaattagattaacctcaacttatacaaaacagtagtcattaaatttatccccagccatcaggagcttaactactctggagagagagccaggtgttggagtaggcaattaagacatcaagacaaaaggacattaacaaacctttgaggttaaactggaaaaagccctgacggtccagtccccatcctttttttccttcatgaaacagctctatcaaggatcacatgggtcagcacagatgtggag

SEQ ID NO: 278182 - DNA, 620 bp, Homo sapiens
caaaaatgacagataaaagaagcaggtcatgcatagcctatctgcctgagatttatttaacccttcttcagaagaggctttgattcttgtctctctgtgtctacctatagacagcatttctcccaggaagcttgccctgacctcctagaattggttatgtaccatttatatatttttcatattccactgtacataactcataacagaaattatcacaagggaacagctgtggttttattgttatgtctagctatccagctatcatcttcgggagactgtaggctccttgaaggcagaagccagatttatcttcatgacctctgtgtgttagatgaggtctcagagatagaggtcaaaattttccytttaggtaaattaattagattaacctcaacttatacaaaacagtagtcattaaatttatccccagccatcaggagcttaactactctggagagagagccaggtgttggagtaggcaattaagacatcaagacaaaaggacattaacaaacctttgaggttaaactggaaaaagccctgacggtccagtccccatcctttttttccttcatgaaacagctctatcaaggatcacatgggtcagcacagatgtggag

SEQ ID NO: 278183 - DNA, 620 bp, Homo sapiens
caaaaatgacagataaaagaagcaggtcatgcatagcctatctgcctgagatttatttaacccttcttcagaagaggctttgattcttgtctctctgtgtctacctatagacagcatttctcccaggaagcttgccctgacctcctagaattggttatgtaccatttatatatttttcatattccactgtacataactcataacagaaattatcacaagggaacagctgtggttttattgttatgtctagctatccagctatcatcttcgggagactgtaggctccttgaaggcagaagccagatttatcttcatgacctctgtgtgttagatgaggtctcagagatagaggtcaaaattttccttytaggtaaattaattagattaacctcaacttatacaaaacagtagtcattaaatttatccccagccatcaggagcttaactactctggagagagagccaggtgttggagtaggcaattaagacatcaagacaaaaggacattaacaaacctttgaggttaaactggaaaaagccctgacggtccagtccccatcctttttttccttcatgaaacagctctatcaaggatcacatgggtcagcacagatgtggag

SEQ ID NO: 278184 - DNA, 552 bp, Homo sapiens
atattttaatttcttccatcccaccccaccataatattcttacctctatgacagtgctcatcaaaatttgtagctattatttgtttaaatgacttcattatgcttcttaagaggcataaactttctgctatattcatctttgtatgcctgtcacacattacattggctgagacaaggtaaatatttaatacatatctattaaataagaaacttaaaaaaataaaagagtgaatgaataactgtatctaggaagtatgaaagtgacttatcttttagcatttttcatcaaggaattaagaaatgtgtggggaaaaagttaagaggccccagttaaaatggcttttatcccaaattcaggcaataacaaaagttggcgmggatatacagaaaaaggaacccttgcacactgtcagtgggaatgtacattagtatgacccttaaggagaacagtctggaggtttctcaaaaagcaaaaattgagctatcatatgatccagcaatcccactcctgggtgtataaccaaaagaaaggacatagtatatcagagagat

SEQ ID NO: 278185 - DNA, 631 bp, Homo sapiens
aacagtataaaggttaacaggctgagaagggtagtgagggtttgggaggaaagcggggcagactaataggtacaaaaacatagttagaaagaatgaataagacctagcatttgctagcacaacagggtgactatagtcaaaaataatttaatcgtacatttagagataactagatgtgtataatcagatcggtgtaacacaaaggataactgtgtgaggtgatggatatctaatctaccctgatgtgattattatgcatgtatcaaaacatctcatgtactccataaattttcaaaagaagtatgtatagcataacgcttaaaataatatactgtaatagtctacaacttggcaagaaattaagctttcgtttatttttgtcacaacaggtatactacatgcagattaaaatatatattttatatatatatatatatatatatatataccatytattttttaagggcatttttcataaccttgaaatataaacaataaaaattatgaagcaataatttatttttttaaaaaaatccacttgccaaacaaacaagatactccttccaggatgtcagtaatatcaagataaaatgccagagaattttagctcagtataggaaatcaaacagct

SEQ ID NO: 278186 - DNA, 631 bp, Homo sapiens
aacagtataaaggttaacaggctgagaagggtagtgagggtttgggaggaaagcggggcagactaataggtacaaaaacatagttagaaagaatgaataagacctagcatttgctagcacaacagggtgactatagtcaaaaataatttaatcgtacatttagagataactagatgtgtataatcagatcggtgtaacacaaaggataactgtgtgaggtgatggatatctaatctaccctgatgtgattattatgcatgtatcaaaacatctcatgtactccataaattttcaaaagaagtatgtatagcataacgcttaaaataatatactgtaatagtctacaacttggcaagaaattaagctttcgtttatttttgtcacaacaggtatactacatgcagattaaaatatatattttatatatatatatatatatatatatataccatctatyttttaagggcatttttcataaccttgaaatataaacaataaaaattatgaagcaataatttatttttttaaaaaaatccacttgccaaacaaacaagatactccttccaggatgtcagtaatatcaagataaaatgccagagaattttagctcagtataggaaatcaaacagct

SEQ ID NO: 278187 - DNA, 1168 bp, Homo sapiens
aacagtataaaggttaacaggctgagaagggtagtgagggtttgggaggaaagcggggcagactaataggtacaaaaacatagttagaaagaatgaataagacctagcatttgctagcacaacagggtgactatagtcaaaaataatttaatcgtacatttagagataactagatgtgtataatcagatcggtgtaacacaaaggataactgtgtgaggtgatggatatctaatctaccctgatgtgattattatgcatgtatcaaaacatctcatgtactccataaattttcaaaagaagtatgtatagcataacgcttaaaataatatactgtaatagtctacaacttggcaagaaattaagctttcgtttatttttgtcacaacaggtatactacatgcagattaaaatatatattttatatatatatatatatatatatatataccatctattttttaagggcatttttcataaccttgaaatataaacaataaaaattatgaagcaataatttatttttttaaaaaaatccacttgccaaacaaacaagatactccttccaggatgtcagtaatatcaagataaaatgccagagaattttagctsagtataggaaatcaaacagctwgaaagagagaccacattcacataacttttactacagtatattgttataataattctattattagtwatgttcatataattattagtaaaaggaatataattatattcctatataattatagaagtatactactcctatacataatatattagtataactaatataattctattatcattagtagtgttagtttaactaataaactaatagaattattaaactaatataattagcctattagtttaatactactcccataatgagtatattagtttaaacaaatactactactataataattagtagtagtttaactaataaactactataattattagttaaatttcactatgcctaatttttaaattacagtctattataagtatgtatgtgtaggaaaaatagtacatgtttactatccactgtttcaggcatcaactgggggtcttaatacatatctttttacagataagggtggagctacagttaccttccaaaaggtagtattgccactgccattgttgcctgctaatgta

SEQ ID NO: 278188 - DNA, 613 bp, Homo sapiens
gaaaatgggactagggacacaggccctttttgttttttgcttgcacattctgtaattagaaaatgttattttatagacacacatatcaaataataggagaaaaaagatatttcatgtaagattagtttattctcaatattctgaattagaatattggattaaaacaatatttagaatgatagaagctggattaaaacaactttaaaacaagcatttgtactgcattgacatctctatacaagttgctgtcatactagttgagaagagcttggggacctggacttgggagatttaatggaccgataaaattactcagaggggtaaccttataaagaattctgaaaccaagaatttggaagtctaagaaaagaagggacaacaatgcaagttgtccaaccaaaacctctcttccctactttcttgtttctgaatgccatttttgtttgaaagagcaatgtgtcctgccaaataactacaatgcccagtctccttgcccttgtggctggtgacatgttatagtcctgtagaaagatacgtgggctgaagttsttgaaaaggacactttgttcttcaacttctcccttcctgccctgatataaaaacatgataacac

SEQ ID NO: 278189 - DNA, 548 bp, Homo sapiens
cctgtccatattgcaaaaaaagtgagaaagtgtgttctgaagagaacatgaagagtgtttcggacccttactgatttgattaatatgggtgtgaaccacaggcttaatcaaacatctcaacacaaaccatgactagaaatgggattataccaggagaaacactgccagttgggactaaaggaaacagagataatgggacgaaataaaggaagacattcggaatgcttaagccctacaggcccggacccgagagctattcagttgtggatgtgtgctattctctccttcaaaattacggaagaaggggcgcaaaggggatttggagacaattacagctgctgcttttaccaaaaatccagagggtatggcaaggtgggccaaggttrcctccattttgatttcaaaggacagaaatgatgctcagaggagctgtgtgggagggccatccagtgaagccctgggtgagtgacctcagccctgacaaaagactgtgccataagtgggtccagtgcatagagtcagcagcgagcagtgcctcactgagctgt

SEQ ID NO: 278190 - DNA, 588 bp, Homo sapiens
tcatgtatcatgaaatgctctcatattcatttttaaaaacccatttaaaatgtaaaaattattcttagtttgcgagctatacaaaaataagcagctggctagatccggccatagttcaccacctcctgctctgttcagtctgagccatcttgtgcggtgctcctgcctcyggaggtctcttctcccttaccctaatctccaatctgctatcctgctctgggcttcctctccaccttctaccttcttccttcccagatctttcttctgtgccctgctttcattcaattgtatataaacttctttccacttttaacctcctggctcattccttgccttaactgaaaagtaactgtaatccctaaggaacatgattccattgctgaattctagaaaggatgctactcattttcccatgccccacaacccatgggtatggaaagtggtactggcgctctccacattcctcaatcctacttctaaacctttagctcttccaacctccagcaaaactccctcctcctttgatgctctaccatctgagtctttgagcaatagctaacatatgctgagcaatatcctgagcaaaac

SEQ ID NO: 278191 - DNA, 562 bp, Homo sapiens
agagccaggatctaatcccagcagtccacacttactcccaagatgttacactgccttttctctatgaccacatggatcaccatcctccattcaagcctctgaattccattatctcctggatcagttaggtacctgggcggaaacaggtgcacattcagcctgagtcatttgaaaaggatctagtcaaggaaatatttacaaasgtgtagagcagtgttgctcaaccttttgtcattatctccttatttcatcctaagagaaaaatttaaatttcccttgacaaaattttggtgagtagggttgagctttggaggccaacaaaccatttcatatctaagattgttttgctcccccagactaattttcacccctttagaggcaatattacccccatttagaatgtaagaatgcatggagagggaaaccatagtgataccacagccctccaggctagtgactgagataccatctcaaggccagaagtggtgagggagggaggtattactggaagtcggagacatctgagagctgtgacattctgtcaagagattggtatggcccc

SEQ ID NO: 278192 - DNA, 562 bp, Homo sapiens
agagccaggatctaatcccagcagtccacacttactcccaagatgttacactgccttttctctatgaccacatggatcaccatcctccattcaagcctctgaattccattatctcctggatcagttaggtacctgggcggaaacaggtgcacattcagcctgagtcatttgaaaaggatctagtcaaggaaatatttacaaacgtgtagagcagtgttgctcaaccttttgtcattatctccttatttcatcctaagagaaaaatttaaatttcccttracaaaattttggtgagtagggttgagctttggaggccaacaaaccatttcatatctaagattgttttgctcccccagactaattttcacccctttagaggcaatattacccccatttagaatgtaagaatgcatggagagggaaaccatagtgataccacagccctccaggctagtgactgagataccatctcaaggccagaagtggtgagggagggaggtattactggaagtcggagacatctgagagctgtgacattctgtcaagagattggtatggcccc

SEQ ID NO: 278193 - DNA, 591 bp, Homo sapiens
ttttgttcattctataaatttgtactgagtactttatatacactaggcattctgacagatataattatgtgggtataaaatttagtttatttgatagttgctttccccaccgcctccagaaattcttgatttagttggtaaagaaaatcagttaagcaaataagttcactatttgtagaagtgtagatgggttatggtgggggcacaaaataataaaataatgtatttaaaactattttcacatctgtgaaaagctctatacatctgtggcattaagactaaagagaatggtatcaagtcatagctgctttctagaaaacatgcatgagacatttaggacctctgcatattaccactgagttgtttttcttttaaggggctacaaaggagtatgttcagcatgatcttatttttattaaaattatactttctatacagaaaaagactataaaaatacacacttaaaacattagcagtgacccacagctagtatcatactgaatkgggaataactaaaagccttttctccatgatctagaacacaacaaaaatgcccatttttaccactattattcaacttagtactggaag

SEQ ID NO: 278194 - DNA, 525 bp, Homo sapiens
aaaaaaaaaaaaaaaagaaattctggaagaaatgacagaggaaatcactgataaatttcgaaacataagtttgtgcaatatcagagacaaatttaacaaatatgtaaaatttgcctccattatgagttaatataaaactatgaagagttcaggagattataaaaagagacaaagacaaccaggagaaaacagataacttaatactttttaaaaaaacaccaggctaacaaaaaagaaatatatagttgactaaataaatatagcacaatatatttaaccctacaaatttcaactaatgcaatgaaaacataatagcagcttttcaactgttattattaccagaaagaaaaatattttaaaatgctattgtggttttggtgagggaacatttttcatgcmctgttgtttgagagtagaattcagtgcaccctttctggaaagcagtttggtaacctgtaatacttcttttaaaaaaaaattcatcctcttgtctaaaaatttctcctctagaaacttaaagataat

SEQ ID NO: 278195 - DNA, 557 bp, Homo sapiens
ttctcctacatttatctgtacacttccttgtaaagacaagtttagcaagaacccggctaaattggtttagccagaatcccccaccctccatatctgatccctctccatatctgattgggttcctcatcctccaccatccccaggtgatgtgtgatcaccctgccctgtcttcagcaaaaatcctgttaagctagagtctcccttakcccacccgccaacccccaccctgctcctggctataaattcccacttgcccacactgtattcagaagtgaatccagttctacactgtgatctcttttcccctagtgagatagtcataaacagaaacctgtttttaccacttcaattactgtctagctctggttttaccttgtcagtacatatggctgcccttcatttaaaagtcacctcaaaaagaccactcagtcacagtctttaaattctttatattttaattgtgtaagtaccttgcctctctggtatcttgttcccaaacatttcttcagctggaccacttaagccaatgaaagagcgaatctatttaacattgattc

SEQ ID NO: 278196 - DNA, 1263 bp, Homo sapiens
agcaagcttcttttcttggtgaggtgctttggatacccgcttctctcccctctcccagcaagctgtattaggctcactcttggggatacctgagaggaggagatactcgaaacaagttgggtgctctccacacatgcctcccctatgcagaatgcaggtaagccatgggcaggaagttgggccccaagtcagtcgtctgtaagctttatctgatagtttcccatctattaaccagtgagccctgactcaccttcactggcctatttttaaaatttctgttagagctgaaatgtttgtggcagagccaggaagaattttcaagtatttagtaactttggctgccctgctggtgatttatttaacctgccacctgagaattctcatccaggtaaatatcctagatgtgatcatctacttttcttattctggaatcatgagaaaccagaaagttaactgtgacagaattttgggatttgttttagttaggtagctaattcttagtaaggaacaatgagtttakaatctgaatttagaatcttagtaatgaacaatgaatttagaatttagaacaatgaatttagaatcaggcccagttctggctcctgcagttaaatttgtacaaggaacttgawagcaagcttcttttcttggtgaggtgctttggatacccgcttctctcccctctcccagcaagctgtattaggctcactcttggggatacctgagaggaggagatactcgaaacaagttgggtgctctccacacatgcctcccctatgcagaatgcaggtaagccatgggcaggaagttgggccccaagtcagtcgtctgtaagctttatctgatagtttcccatctattaaccagtgagccctgactcaccttcactggcctatttttaaaatttctgttagagctgaaatgtttgtggcagagccaggaagaattttcaagtatttagtaactttggctgccctgctggtgatttatttaacctgccacctgagaattctcatccaggtaaatatcctagatgtgatcatctacttttcttattctggaatcatgagaaaccagaaagttaactgtgacagaattttgggatttgttttagttaggtagctaattcttagtaaggaacaatgagtttagawtctgaatttagaatcttagtaatgaacaatgaatttagaatttagaacaatgaatttagaatcaggcccagttctggctcctgcagttaaatttgtacaaggaacttga

SEQ ID NO: 278197 - DNA, 456 bp, Homo sapiens
agtgaatttatcactttttgtaatgaagaaaaaaatacacatcacagaagtttgctgttgtcatttcctcccctcatgtaatccttatctctaccccctgtrgaagccaataaaagataatctgtgtttgttgaatgaatgaagaaacccagtctaccgtgggtttaccatgtgccaaatgcagagctacaaaaggaaaaatgaaaaagaaaagacctagagaatctcaagtccagtggcaaagatgacatgcaagtcatagcaaaatgctgtaattgtggcaccaattgccatgaagacagaagagattgtgctatagactctgtctccccatcttgggtctttgtttgggataaaagtccagtgtaattctaaaactcagtgtttgcatattacataaccatagctaatattgacattagctgctgctgttgactaatgtttgtttgtaaggaa

SEQ ID NO: 278198 - DNA, 456 bp, Homo sapiens
agtgaatttatcactttttgtaatgaagaaaaaaatacacatcacagaagtttgctgttgtcatttcctcccctcatgtaatccttatctctaccccctgtagaagccaataaaagataatctgtgtttgttgaatgaatgaagaaacccagtctrccgtgggtttaccatgtgccaaatgcagagctacaaaaggaaaaatgaaaaagaaaagacctagagaatctcaagtccagtggcaaagatgacatgcaagtcatagcaaaatgctgtaattgtggcaccaattgccatgaagacagaagagattgtgctatagactctgtctccccatcttgggtctttgtttgggataaaagtccagtgtaattctaaaactcagtgtttgcatattacataaccatagctaatattgacattagctgctgctgttgactaatgtttgtttgtaaggaa

SEQ ID NO: 278199 - DNA, 621 bp, Homo sapiens
cagagatgaaaggcccctgcccccgcctccctcctcccctgagttcatgtattatgaatgaaacggcagcctcgctgcttcctgaggtgctccacttcaggtaggagagagactcaatgtcaaggcagctggctactaaaagttgggtgtgtgcgcgcgttggggagggacggagascaggaaataattgacaggctgggaaacattcttttcgagaaaatgtaaccgctcagggtttgcctctggagtttcagtttacaactgtacaagcctcagtcaatttaagaatggattatgcaaaggggctttcgactgcggcttgctcgccctcacaccctaggccgctgtctctgtggaaagtgctgtttcattcagaggagctggtttctgccctcccagggaggcagcacacatcccctctcccctctcatcccccactttaagatgagccctgagaacccttgagggtctcgagaaaagcgaatgctggtcactgtagccattctctagttccagaacctcttggaagcctcagcgaggtccaaagctgagtaagttttaaaacgtattttttttccaacagtttttcaacaataggtagtcattttaaaaattaaagga

SEQ ID NO: 278200 - DNA, 621 bp, Homo sapiens
cagagatgaaaggcccctgcccccgcctccctcctcccctgagttcatgtattatgaatgaaacggcagcctcgctgcttcctgaggtgctccacttcaggtaggagagagactcaatgtcaaggcagctggctactaaaagttgggtgtgtgcgcgcgttggggagggacggagaccaggaaataattgacaggctgggaaacattcttttcgagaaaatgtaaccgctcagggtttgcctctggagtttcagtttacaactgtacaagcctcagtcaatttaagaatggattatgcaaaggggctttcgactgcggcttgctcgccctcacaccctaggccgctgtctctgtggaaagtgctgtttcattcagaggagctggtttctgccctcccagggaggcagcacacatcccctctcccctctcatccyccactttaagatgagccctgagaacccttgagggtctcgagaaaagcgaatgctggtcactgtagccattctctagttccagaacctcttggaagcctcagcgaggtccaaagctgagtaagttttaaaacgtattttttttccaacagtttttcaacaataggtagtcattttaaaaattaaagga

SEQ ID NO: 278201 - DNA, 577 bp, Homo sapiens
ggaagggatatttggacatggctatgaaataacrctcccactcactcccctggcttcttaagtgtgtcagatggaacctgtagatatcacctacagtgcttagaaggagtgatatctgcttttttctgttcttatatttttaaatgaaaatctgttttttaggagtatatgtgtctgtttctatagatctgcctaacgtgcattgatataagcttgataaggagctggcattaacaccagaacataagacttcctcccctggctcctctggcccggggttctccttctgacagaggcgccatcatgccagggtgcacatgacagggaagggactgggaagacaggatttggagacattttagttccaccaagaggtattgaatgcccactctgtgccagcttgtgttcaatactgaggatgccaagaggaagctctgacgacatgctctcagagcccatcttcctggaaggcaaggcacctaaagcaataatttcaaaataatgcagaatgcactaggcaaaaaagtataccaaggatcttttacaggtgttgtttttctagaaaagtgacacctga

SEQ ID NO: 278202 - DNA, 577 bp, Homo sapiens
ggaagggatatttggacatggctatgaaataacactcccactcactcccctggcttcttaagtgtgtcagatggaacctgtagatatcacctacagtgcttagaaggagtgatatctgcttttttctgttcttatatttttaaatgaaaatctgttttttaggagtatatgtgtctgtttctatagatctgcctaacgtgcattgatataagcttgataaggagctggcattaacaccagaacataagacttcctcccctggctcctctggcccggggttctccttctgacagaggcgccatcatgccagggtgcacatgacagggaagggactgggaagacaggatttggagacattttagttccaccaagaggtattgaatgcccactctgtgccagcttgtgttcaatactgaggatgccaagaggaagctctgacgacatgctctcagagcccatcttcctggaaggcaaggcacctaaagcaataatttcaaaataatgcagaatgcactaggcaaaaaagtataccaaggatcttttacaggtgktgtttttctagaaaagtgacacctga

SEQ ID NO: 278203 - DNA, 610 bp, Homo sapiens
taaagtcattactatacacatcatgttgcaatatctatacatctttaattgtattctcagagtaaattatttaaaatatatttattgtatcaaaggatagagaatgtgtatctccaaccagaagttctactagaaatttcagatattcagaattccttacatcctaagcatcctggcttgtagaaatgtcatgtttactmtattttcttccattgtaagatggaaatacttccaaatacttggaagatagagctgtcattaatttaatagcatggctttgtgtgtttgtggtggaggatgagatggggtggaactaccaaaggatacatattccaacagaatttgcttgctaattgctaattgatatacatctatccgtaacattctaggccactttattttttgacatcgcaaagttgtagcctaccctcaaattattcagattcttctgaatcccttttgaccaataggagcctcatcactcacggggggctctgccaagtgcccttgcctttcctggatggaatggcaggaaacagagtagctggcaggaccccaccatgtccttaagagaatgcacacagtcaaagttggttgaaaaactggacta

SEQ ID NO: 278204 - DNA, 610 bp, Homo sapiens
taaagtcattactatacacatcatgttgcaatatctatacatctttaattgtattctcagagtaaattatttaaaatatatttattgtatcaaaggatagagaatgtgtatctccaaccagaagttctactagaaatttcagatattcagaattccttacatcctaagcatcctggcttgtagaaatgtcatgtttactatattttcttccattgtaagatggaaatacttccaaatacttggaagatagagctgtcattaatttaatagcatggctttgtgtgtttgtggtggaggatgagatggggtggaactrccaaaggatacatattccaacagaatttgcttgctaattgctaattgatatacatctatccgtaacattctaggccactttattttttgacatcgcaaagttgtagcctaccctcaaattattcagattcttctgaatcccttttgaccaataggagcctcatcactcacggggggctctgccaagtgcccttgcctttcctggatggaatggcaggaaacagagtagctggcaggaccccaccatgtccttaagagaatgcacacagtcaaagttggttgaaaaactggacta

SEQ ID NO: 278205 - DNA, 567 bp, Homo sapiens
tgctgtctctccgtttgttaatacartggatttctgaggagatttttgaacttttacattttccactgtttcttgagacacatctccatcttgagcttctgataaccccacattcacagaacgttttgattttttaacctttccacctcccatcgtttcttcagacacacctccgttttgagtttctgatagggtcagatttgaggcccccggcaactttaggttccggtgtgcattttgaggttctgcttcttgatcttcttgctcaggagtttcatcagcaggtgagacatgctgtccaagaagtgccaagaccacagtgccacacagtatggctactcagctctcagggctcatgttgcacacagcttcttaatacctcactctcattcagggagtcactaaccaaaggcaacactagaacagagtgtgcacttttatcttcaggatattcccatcaccctgaccaagttcactaagttatagggcaaggcagatcttaattttctacatgagaagtgtttagagactagagtgggggcaggtaggggacttgtgttgatgcca

SEQ ID NO: 278206 - DNA, 567 bp, Homo sapiens
tgctgtctctccgtttgttaatacaatggatttctgaggagatttttgaacttttacattttccactgtttcttgagacacatctccatcttgagcttctgataaccccacattcacagaaygttttgattttttaacctttccacctcccatcgtttcttcagacacacctccgttttgagtttctgatagggtcagatttgaggcccccggcaactttaggttccggtgtgcattttgaggttctgcttcttgatcttcttgctcaggagtttcatcagcaggtgagacatgctgtccaagaagtgccaagaccacagtgccacacagtatggctactcagctctcagggctcatgttgcacacagcttcttaatacctcactctcattcagggagtcactaaccaaaggcaacactagaacagagtgtgcacttttatcttcaggatattcccatcaccctgaccaagttcactaagttatagggcaaggcagatcttaattttctacatgagaagtgtttagagactagagtgggggcaggtaggggacttgtgttgatgcca

SEQ ID NO: 278207 - DNA, 1129 bp, Homo sapiens
tgctgtctctccgtttgttaatacaatggatttctgaggagatttttgaacttttacattttccactgtttcttgagacacatctccatcttgagcttctgataaccccacattcacagaacgttttgattttttaacctttccacctcccatcgtttcttcagacacacctccgttttgagtttctgatagggtcagatttgaggcccccggcaactttaggttccggygtgcattttgaggttctgcttcttgatcttcttgctcaggagtttcatcagcaggtgagacatgctgtccaagaagtgccaagaccacagtgccacacagtatggctactcagctctcagggctcatgttgcacacagcttcttaatacctcactctcattcagggagtcactaaccaaaggcaacactagaacagagtgtgcacttttatcttcaggatattcccatcaccctgaccaagttcactaagttatagggcaaggcagatcttaattttctacatgagaagtgtttagagactagagtgggggcaggtaggggacttgtgttgatgccawtgtcaggcatttaatgcatatacatacactttattgatattattgcatatccttacaactactctgctcaatcttcccctcctttctgtggacaagaaaaccgggagtcagaaacatcctgtggcttccatgaggcacacagttagtaagcgttagaatgagataaaaacccagagaaactcctaggtctgtgttccttcactaagtctgagaccccatggcctgccaaggggctgagtgaaaattgctgtccttgaaggttttgcccattgcctgtgtgcctggttccaggaggcctcagagctcagagggaactactgttgttcaggccagccctccaggagtgaggatggatccaggtgtctccctgcgatgaggacagcagggtgtactgcttggacaggctctgatctatagaacatgtgtattttatgccagaaacattttcatattgaggacagcagggtgaggacagtgtgaggtgaggggagataaccaccaatacatgcagatggtacawgcagttgattatttggtggctgcaaaagtgggagagaaata

SEQ ID NO: 278208 - DNA, 535 bp, Homo sapiens
agtcagtcagaaaatcagcacgtgtctcctgctggggatcccacaggaaataaggccatcagaaactctgccgtcacagaatctacatgctagtggtgagagatagccaataaatacgtcagtaaatacgccrttttcagatgatgataagtgcaatgaagaaaacaactcagataattggatagagtgcagaggggagggtgggctactctagccacggtcagtaaaggcctcactgaagaagtgacgagaactaaaatgtgaacaataagaaggtggccctgaacatggtgttcctgccattacaacaggctgtattttaagaataagaaacttaataagatcataatatacgcggagtaaagtgtctaaatcttaatcttacatctatataaatatgcacatacagagataactaccacccagctcatgatatgcaatgtttccatcatggaaggcccatttctatgccttcttccctgtcagtacccacccccagagataaactattctgacttcggttgccattgattca

SEQ ID NO: 278209 - DNA, 612 bp, Homo sapiens
tgctataacaagatatcacagactgggtgacttacatttatatttacttctcacagttgtggaggctggaagtccaagatcaggtgccagcaaggttgagttctggtgagggccctcttcctggctcacagacagcctccttctccctgtatcstcatatcgtgagactatatatatatatatttctcacttttctcatgtctcttcttataagggcactaatcctattcatgagagttctactctcaagaactaatcaccttcggaagaccccaccaaatatcatcacactggggattagggtttcaacacatggattttgaggggacacaaacattcagttcataccgtggagagttatttttctgatacctctgggctcgtgtgggccaaatattcaacaatggctaaataaaagtctctcagcagagagatgcctgtgttttcagcaagccacttccggaccgttgaggtaaaggccaagagtatatggttagagttcgtgtctgctacacccttcgacccggtatttccacttctagatatatactcaacagaaacgcatatatctgtgccccaagtaacagctataagaatatgcacagggacatt

SEQ ID NO: 278210 - DNA, 593 bp, Homo sapiens
tgcaccatcacagaggcccggggcaacttaggagtgctttcatgttgtgatatactacgtcatcccaaagcaagttttaatattattgcaaaatttcaaagctatataagctaaacagcttacgtgaaatgaaatctttcctgaaagtgacaaaattattctaaagtttatcttgaagaaaaaatgtgttgagagaaaaaaggytttggtattttaaaatgtatttaaaagttttaataattgaaacagtatggcacttgtgtaaaaacagatgaatataaattgatatatataatttatatataaatatatatcaatatatctgtatctatattgaacatataaaatgaaggacacaccagtgagaaagtgagggattatccctcctacattatgagaaaaattggctttgggaaaaaaatttttagattcttaaactatagccctaaatatattccacttggtttaaaaagtatgaatatttaaaacttagttttattttaaaatttttaaattaaaagaaaatatatgaaaacatttaactcttcttagattgggtaaggaatttttaagcactaaaaaatggatgaaat

SEQ ID NO: 278211 - DNA, 623 bp, Homo sapiens
tttgaggaacagtgttaggtgatgcaggaatatagcggcaaatcaaacatcatcaaacatttggaaccctttaggagcttacaatctagtaaagaagttcaccatttgtgagcatttatctaacaagaggctcttctcttttacacaataaaataaaaacagataaaactttactgtttgaagtgtttgggcccacttcctaaacttaataagtatagtctggtgattttgaaaattgataactgagggttcaccctacactgaaattctgagcatcactcattgttgtataagaactaggaytgtggatccagaaagactaggcaattaattgcattcattaatctggactgaaaccctgaaggttagtttctaaatatataggttttggttttgtttctttttcttattagattctggaaatggaaaatctaatattttgagattgtaattaattggattttggctaactgagcctttattgtatgcattttacaaagcataatggtagttggcaaaactccatgatctttcattcaataatcttgaatttctacttgccaaatgccatgtaacacatgaattaggtctttaatctcaaggggtttataaactagttgatc

SEQ ID NO: 278212 - DNA, 567 bp, Homo sapiens
caggctgttcattatcttttaaatttctgctgctcctgtatttatgtctccattttcattcctaattacatttatttatgccatctatcattttttaatggtcaatgctgctaaaggtttgtcaatgttattaattatcttcaaagaaccaatctttgactttgttgatcctctttgttgagtatttatcttctatttcattaattttcactaggatcttcagtatttttttttcgtttagttggtgtttattctgttcttctttttctaacatcttgagagagataacagtgtgagatatttttaaaccttcctctgaccatataaagctataaatttgcctctaagtagttctttggctatacttcacaggtttgggtatggattacttttatttattccacttstaattgatttcttatttggtccatgagtatgcagaactatatttcttaatttttaaacttttggtgctttctaattatccttttgttactttgtaacacaattacattttgctcacagaacatgaattttgtagacgtttatttatgattatgtgtgagt

SEQ ID NO: 278213 - DNA, 579 bp, Homo sapiens
gaaagttcaaagtgaccaaaatacatcagaagctccccagaaagaaaggtgagctcattgctctatgggttcccacttccactgtatttggggcatctgaagtttccttactttatttccagctcaacaatgcatttctaagcaggctgtttgtaatttacacaaggagatctgttcagggtttctactccaccatattggaaaggaaattcctttgaacacaaattatattcatttacagtctgaagattcattgttaagcactggcatataaaacaataacaaaacccagtccctgctttaaaaaagaaaatgacaatcttggtggccagttccctaggatctctttttaggaatacacaacattttttttttacgcaacgttttatatgtttgatttgcstgagaaaatataaccaatattctctcaaaagagagtgtaacagttacataatgtaagtgcataaatgttttttgaataaatgcatgaattaaatattaattgatgaatgaaaccaattagtgttggttgtgttatacttgagccttcttttactgagcctaatgcagcacaagaaa

SEQ ID NO: 278214 - DNA, 671 bp, Homo sapiens
ttgtccctgctccataggttttgttagctgtctgtggcactggttctgtaatgagaactgagagacatcagtacataacatatgttcaactgttccagttggatttaattcatcacgtgcagtaacaactctttccatctcctcctaatcacttcctgattctattttatactgctctgccatgtgaagatgaagtctagtgacaggctgmcacactgtggcaggggtaggggtcgagggaaagagaaatcctagcgtttctaacccatgcttacaaatccagggaggagttaatttctataaaattccttagcatgtggaaacatcttcaatttagtcttgatgattctgatagacaggaattgttgggaagcctgatgaataattaatctactacaatggcaacgagcatattaatattttatatcactgtaaagctatgtaaaaccctcctatagttgataggtaacttgggttgggcacaacttgaaacccaactcgtttctttactgaaacgagagattcttcctttatctcaaatataattatccatttaaatgtcatgggtcaatttattaacaccttattcattggggtgtaacctttattaggctttattgtgaccagaaattatatcctacacaaatacaatggagatttaaacgttctgg

SEQ ID NO: 278215 - DNA, 598 bp, Homo sapiens
tgtaatgagaactgagagacatcagtacataacatatgttcaactgttccagttggatttaattcatcacgtgcagtaacaactctttccatctcctcctaatcacttcctgattctattttatactgctctgccatgtgaagatgaagtctagtgacaggctgccacactgtggcaggggtaggggtcgagggaaagagaaatcctagcgtttctaacccatgcttacaaatccagggaggagttaatttctataaaattccttagcatgtggaaacatcttcaatttagtcttgatgattctgatagacaggaattgttgggaagcctgatgaataattaatctactacaatggcaacsagcatattaatattttatatcactgtaaagctatgtaaaaccctcctatagttgataggtaacttgggttgggcacaacttgaaacccaactcgtttctttactgaaacgagagattcttcctttatctcaaatataattatccatttaaatgtcatgggtcaatttattaacaccttattcattggggtgtaacctttattaggctttattgtgaccagaaattatatcctacaca

SEQ ID NO: 278216 - DNA, 597 bp, Homo sapiens
gtaaaatgaacaaatgcatatttgcacagacctaactcaatacatgttgcctgcttctgttctccttcaagccaataayaagattgagctgggaagctccttcactgcactgacagccaacccagtcaaaatgtttgctgcccaaaagcacacagagccttccctgtggagaagcgatgtaatatgggtctctagtgaatacagaaagccccttctgccgcagcctgggcatcctgggagctcaggttccccttagccaggcaggatctcttgggattttgtcttccctggggatggtagacatgacatgtcgtttgtcatggtcattactgaactgcgactgcattaaaaggaattatggagactgtgaatttgagatcacatttcagagtggagcccaaggcttccagttaagtgtgaacagtgtatggaagataacaatggggagtgagatatgctaaaagtgttatacatgaatttacattcaataaaaaacccttccagctataattatcacatttttgctaatattgagatactagatgtcagatttaatatttgagtaaactaattaaagaatgtttttgcctagccttg

SEQ ID NO: 278217 - DNA, 597 bp, Homo sapiens
gtaaaatgaacaaatgcatatttgcacagacctaactcaatacatgttgcctgcttctgttctccttcaagccaataataagattgagctgggaagctccttcactgcactgacagccaacccagtcaaaatgtttgctgcccaaaagcacacagagccttccctgtggagaagcgatgtaatatgggtctctagtgaatacagaaagccccttctgccgcagcctgggcatcctgggagctcaggttccccttagccaggcaggatctcttgggattttgtcttccctggggatggtagacatgacatgtcstttgtcatggtcattactgaactgcgactgcattaaaaggaattatggagactgtgaatttgagatcacatttcagagtggagcccaaggcttccagttaagtgtgaacagtgtatggaagataacaatggggagtgagatatgctaaaagtgttatacatgaatttacattcaataaaaaacccttccagctataattatcacatttttgctaatattgagatactagatgtcagatttaatatttgagtaaactaattaaagaatgtttttgcctagccttg

SEQ ID NO: 278218 - DNA, 676 bp, Homo sapiens
aatgggattcaatctattgaaaggccttaagcagggctgaggcttccctgaaggagaagaaattccacctgtcaacagcagttcagcccatgctaacagttcctttctaacggcctgtcctacagatctccgatgtgcctagccggcccccacaatcaggtaagccacttccttgcagtaaatctcttcacatttatctcctactgcttctgttcctctggttgaacccaggctgatacacatgtcacttctgagataaagtgataagactgtgactttcaacttgcctgcattctctccctggcttttctagcacggctgctctgacgtagagggccacctggcaagacactgggggaaacctccagcaaagagccagaaaggaactgaggtcctccgtccgacagcctgtgaagaactgcagcctgccaataaccacgtgagtttagaactggatcctactccagttaaggcttgaaatgactgtagcttcagccaacacctgactgcagcctcatgagagaccctaacgcagaggaccctgctgtgcataactggaaactgtgagataatgtttattgttgtktataaccactaagttctggggtattttgttatgccacaacagataattaatacagattgattcaaacaagttgatttttaaatacagtgc

SEQ ID NO: 278219 - DNA, 593 bp, Homo sapiens
ggaaacctctcttcgatgtggagatttatctctctattgggaggttgctgtattaaagaagttggaattgcttgacatctttgaaaataatttaaatgtgtgatttgatcccactacccccttgtaaggatttatggagcttgaagggacagcagagataaggacctcatcactatgtaacggcagtgaaataaacaggtgcccctgcctcattgcccttcccattccctaagcttatattggatcaagttcagattcctttctcctaaagctgctctgacacaagtcccccgggaacgatctccctggagcctgccaaaaaaaagtagagattttgtaccagagaagggtctgttttgctactgaactaagtagcgctcattttaacagcccagaaacgtatattctaaatgctcagaaagtctggattgaaagcaagaaggtaatcaaatgtgatggcaacttcagaccttcctagcagaggaccagttaatgctattattacgtgacattagctaaagtttttttkttgttgttgttactgtttactcatccctctggagtcattaaaacttgggttattagaaatgaga

SEQ ID NO: 278220 - DNA, 589 bp, Homo sapiens
acatttcgtctttgtttgccaaaagagaaatgcctttcttaaaaaagtacaatccactctttcccccccaactttatctgtctagataaatataattaggtaatagatgatgatttgttagcattttatttcctgtgtttgcaagggcattaagagtgatcaaacagctgacaacaaatatggtcagtttctgattctcagaggaaagaacgtgacttttgagaatcagatgggctgggagcaggcatttttgcaaattaactcttcctgtattctgaacaggatcakagaggcttttgtcttagctgatttgcatgcactaattgctagttctgagtaaatttgggttgatcacctacacaattacattcataaattaatatttttacttcacaattatttacacacaggaagaaacagtataaataattttaaagctgtgtctacactttcataatgaagtggttaattaaagtaatgagctagttaatgacaggcccaaaaatttgtcatgaaacatccatataagggagaaagaaatgtctttgcctgaataattttcataattgcctcaacatttgatttcact

SEQ ID NO: 278221 - DNA, 575 bp, Homo sapiens
tcccaactacttggaaggctgggacaggagaatcgcttgaacccaggaggcagaggttgcagtgagccaagatcacgccattgcactccagcctgggcgagaaagcaagactccatctcaaaaaaaagaataaataaataaaatttaaaaaaaaaagcaaagaacagtgaaggaataaagcatgacaatagtggtagctattattttaggtttgggttatggcagcacctcacctatggtatcaatttctacatcagttaaggttaagytaaactgctataaccaaatgaccaaaagagaaaatggctgcaaaaatataggccctatgttgcccaggctggtctcaaacccctgtgctcaagtgatcctctcaccttggcctccctaagtgctgggattacaagggtgagccaccacacctggccctactcatctttaaagcccaactcaagggtgaccacctatgagacaacgtccctggttctctcttttcctttcctcgcctctatgcccacagcactttgtttgaaatgctgggaggacattccatagcatatttcagttagttgttattc

SEQ ID NO: 278222 - DNA, 627 bp, Homo sapiens
atgctttcctttcagcctcccggccttcctgacagctatcagcctagtcaattggacttggcaggtgcgaggaatccaatttagcatccctggtttagaccttgagcaatctgcactcacaattcacctacttagcctctttatccacatctcctagtttttgacctgttttggcactaattaccctcatccccccaattttagaataagaggcctttggacttgttcccttacatcaaatcctgggattkactcaacatgcaggttggattttcctccagttggcccatccaattataggcagatctcatgctgtctctgcaacactcttgacctccctaccaacatttctaatcaatcaggtgacttcccatttgagcggaggtgtaaatgtgtttaaagcagggatcacatctggcattccaagggctagatctgttaagcagccaagttttatttgcctataccatgttttaaaaaaattgagccaatattcaacaatttggaaatttcatccacaataaaatccaatttctctcttctcttaaaaaaattggatgatccagcaatgcaaacaagcatttctacccagcaacacttggctgaagatgaagaactactgcctcc

SEQ ID NO: 278223 - DNA, 627 bp, Homo sapiens
atgctttcctttcagcctcccggccttcctgacagctatcagcctagtcaattggacttggcaggtgcgaggaatccaatttagcatccctggtttagaccttgagcaatctgcactcacaattcacctacttagcctctttatccacatctcctagtttttgacctgttttggcactaattaccctcatccccccaattttagaataagaggcctttggacttgttcccttacatcaaatcctgggattgactcaacatgcaggttggattttcctccagttggcccatccaattataggcagatctcatgctgtctctgcaacactcttgacctccctaccaacatttctaatcaatcaggtgacttcccatttgagcggagstgtaaatgtgtttaaagcagggatcacatctggcattccaagggctagatctgttaagcagccaagttttatttgcctataccatgttttaaaaaaattgagccaatattcaacaatttggaaatttcatccacaataaaatccaatttctctcttctcttaaaaaaattggatgatccagcaatgcaaacaagcatttctacccagcaacacttggctgaagatgaagaactactgcctcc

SEQ ID NO: 278224 - DNA, 580 bp, Homo sapiens
tcctttaattcacttatctaaattaccaaatagtatgaacataaagtcaaattccactaattattgatgcccccataacttatccttcatgcataaaccagaaacaaaagcaaaatgcaaaattagcgaagagagaaaaaaataccaagagaaacatacagacagaaaagttaaagttctcgtgctgcctgagaatgactttcagaagccaagaaaaaaacatgcctcatcttaagccacccctgatctcccgtcactctcccgagtaggtatagttctctagcagtgcagtttggctctgtgaggacattgtggtagatgatctcccaaactgtgaaaaggcaattaaaaagaagtaaaatcatgactcctatacaaacataaatgaacatgtgtcaaagattttatttaacttgtyaactaatgaagaaacaataagatatcatcaccagtttctataatgacttttagaaaaagagaaaggaaaaggaaacaaagaaagagacagagacagaggaagaaaaggaagaagagtttactatataatttcaattctaggaccgggtccgaaggaaaaatc

SEQ ID NO: 278225 - DNA, 612 bp, Homo sapiens
acctggttgataaaataagctgtacaacaagcccccatgacacaagtttagctgtgtaacaaacctgcacatgtacccctgaacttaaaagttaaatcaaaaagatacattatatttctgaataactgaaaatttagtgtcttgtatgcatgaaaaatatttgtgctaacagaccttagatgatccaactcaacatacccttggatttaactaaaaatataactattttccaagctattaattatgatttttctctttcaatagtgttgtttgttagtgctgaaaatgttaacatattgctctacaaccatgcagaaggaattaatgagcttctgttgtcttttttcataagcatatctaatttgctcattcatccacttgttcatttgttctacccttatttagccaggcaaaagagagagtgcagtcattcctaataatcatgatttgttttccttttttcagccatgcratgatggacctactggttgaactttgccttcagaaccacctgaatccatcccaccatgcccttgaaattcggtcttcagaaacccaacaacctttgagttttaagccaaatactttgattgggaccctgaatgtgcatac

SEQ ID NO: 278226 - DNA, 556 bp, Homo sapiens
ctgtcctcaaaaattatcttgaatgatcctttgatgatccttgaatgatacctgattagattatctttcaaatttgtcaatagctaaaatttgggagccatccgacttgcaaagtgatttgttactcattcacactggatattaacttctggcaggtataagaaaaaaatgccttattaagacttataaaatgacaattatacttaaggctcttttgctcataggcactcttttggagaaaagagggtgtggcaatggctctttaaaattttcttaaatttgattttatttttaattgattcataatyattgtacatatttatggggtaaagtatgatggttttgatacatgttcacattgtgtagtcatcatcaggataagtagcaaatccattacctcaaacattaattatttccttgtggtaagaacattcagaaccctttcttctagctgttttgaaatgtgtaatacattattattaactgtagtcacacaactgtatgatagaataccagagagtattcctcttgtctaactgtaacattgtacctgttg

SEQ ID NO: 278227 - DNA, 527 bp, Homo sapiens
tatccctgtgcattaactcagcttgagtggctttttttttttttttcaggcaaagatatgctggattcaccagcaatcccacttctaggtatatatccccaagaaatgaaagcagagtctcagatatttgcatacctgtgcagcatcattcacaataaccatgaagcgggaacaacttaaatgtccactgacaatggatggataaagaaaatgtggtctatacatatacttgaaagatatttagctttaaaagggaagggaattctgttatatgctacaatatggataaacttcgaggaaattgtgctaagtgaaataagccaggcgcaaaaagacaagcaggcaaaggggagttgctgttcagtgagtagagtatcagatttgcaggacgatgaggtcctggagatckgtttcacagcattgtgaatatacttaaatctactgaagtatgcatttgaaaatggaaggaatgggacattttatatttttttttaaatcacaatttaaaaaagcatactgatgctgca

SEQ ID NO: 278228 - DNA, 564 bp, Homo sapiens
gtaaataaaagactaagaagtaattagcaaaaagaaataggctcataaggtttttttgaaaagctatatatagatctattttgattctcactacttcacttctaagctacatccaatcttcagtctatgttgggttgacttaatggttttcaaggtacaatagtaacaggttaaaagttcagttccgyttttttctaatgtacttttgagtagggacagattctgctcccacagttgacgatttccttccattttatgaaaaggcccatttgctcacgacccacttcctgttttcctggatgccatgcctgccccgtggcagcaggaacagctgtgtggctggctctcctgccagggaaggaaagtggcaaataaacaccagccaagggcaagaatgcttcccagggcttgctctgagctccacacctgtagtgtttcatgggtgtttcccacaacaaacaggactcacagaactgtgtttgtgtcacaagctttagaactaactgcttcgttttgaaataggaaaagtacttagtttgggctcaaatttgagaataaggcatt

SEQ ID NO: 278229 - DNA, 564 bp, Homo sapiens
aaacaccagccaagggcaagaatgcttcccagggcttgctctgagctccacacctgtagtgtttcatgggtgtttcccacaacaaacaggactcacagaactgtgtttgtgtcacaagctttagaactaactgcttcgttttgaaataggaaaagtacttagtttgggctcaaatttgagaataaggcattaggggactctaatgaggactggtcccaacctaagggccatcagccaaattcccgtcctaccttctccagttccacgccctctgctcaagcagcacatggctgttcaccgagccagcagcccttagtgagcatctggtccccaagtgtagagataggattgtagccaccaaatatttcaagctgtgccacaagtatttctagattcgcaattcgcagttcctctgctcgatcacttgcttaaaatgtaaatcattmttattattatttctgcattgatcaaactcaagatactctcttctaattcaaaatagatagttcattcctctcattttatttccttgttttagaatttccttaaagttctttagaattg

SEQ ID NO: 278230 - DNA, 854 bp, Homo sapiens
tggcaatcaacagatacttggataaattgttttttatatacatatatatatatgtatataaaacacatatatttatattacatatatatgtaacaatacacagcctttaaaaagaagaaaattctgtgatttgtgacatcatgggtggaactggaggacattatgctaagtaaaataagacagcacaaagagacaaatactgtatgttctcacttatatgtggaatctaaaacagttgatctcatagaaacataatagaaaggtggcaaccagaagctgaggagtagaggagagakaggaaaagaggagacattggttaaagggtgccaagtttcagttaaactggaggaataagtttcagtgccctgcatggtgaccatagttaataacaatgtgttgtatatcccataattgcttaaagaatataattttaataatctcaccacaawagcctcacactttctggtttcaaaacatattacaaagctactataatgaaaacagtatggtactgacatagagaacaatgtgtaaatcaatgaaacagaataaggagctcaaaaataaactttcatgtatataatcwaatgatctttgataaaggtgttaacacaatgtggaagatagtttcttcaacaaatggtgtttggaaaatgcaaaatattcaaatacaaaagaatgaaattgggcccttaccgttaaccatataaaaaaattaaaatggattaaacatccaaatgtaagacctgaaattataaagttcctagaagaaaacatagagggaaatctttatgacattctatttggcaatggtttcttagatatggcaccaaaagtacagacaacaaaagcaa

SEQ ID NO: 278231 - DNA, 525 bp, Homo sapiens
ttacctggtcttttgcaattgcttagacacaccaatttgtttctgcctcagggcttttctgcttctgcctgcaatgcttttccctcagatcttcacaccagtcactcccttacttcattcaggcttctgctgcagtgttaccctcagaaaggcctccgaccatgttgccattacccactttctctcttttttaaacttamgttttgttctcttatacttattatctaatattatgaaatgtttattaggatatatgttcctcaccagaatgaaactttatgagggcatagtcttcatctgcctttttcccactctgttctcagtgccctagccctgtgtgtaacatgtaatacgcccccaacaaataaatgttaataaattaatcaaatgcttccttaagacacaaaacagttcaacatatgtgagaaacttaaaatttaaaaatgtatagaactaaagacaccataaggacgagtgaccagctgagaaaacgaatataataatgttaattagaacaaaaaggat

SEQ ID NO: 278232 - DNA, 389 bp, Homo sapiens
ttttttcttcactgaaccttttttctttcttcctcttgattctctgtctgcttactcattctagtttgtctttgcaattctcrgtttctctcacacttagttactgcctattttatgtcatagttatttctttcttttataatgttatctttccttgtttacatttttctctttacttgctttcatcaatgttgccctttccttttttcattttccttcctagatcattcccctaatctcagtttttttggggcctacgatttgccttcactactctgcatgcaatacaactctttggattcccattccctttcttccaggttagagcagtgaattagttttctatcactgcataataaattaccccaagacatagcagcttaaagcaa

SEQ ID NO: 278233 - DNA, 404 bp, Homo sapiens
acttgtggcatcatctcagtgctcaaaaagttttggatttcggagcattttagattttgaatttttggattaggtatgctcaacctgtagtatatctctccagttgttttcttctatctaagttttccttgcagtgttttgtagtttttagtgtacacgtttttcacacatattgttacatttattcctaacaattttgctttcttgaggatactataactgattttttattttaatttgtgttgctagtgtaaaaatacaattgattttgcatactgaccttgaatctatgattatgctatactcacttattacttctagtagcttttctgtcaattacatagaattttcaacactcacagycatttcatctgtgaataaagacaattatgttctttcctttt

SEQ ID NO: 278234 - DNA, 482 bp, Homo sapiens
agggaactgatcctcaaaagtgctaagtaaatgatcccaaatcacacagctatattttaaatcgagctctattcaccactctgtgcagtacttgtgcctgaaattctaggctttctttctgtagtgttgatctcaygctttcttttgtgcatgttgaattattattctcctcttggaattttattatcactgcctagctgcaaagagatgcttcagtatcattaaaaggacagggaacttgaactaaacaacttcccacatgtttgtattggggctgatcttgctgaagttgactgaagtttttgtaggtaccatttgtagaagtcttgggaaagaagcttctatacaatctccatgtcttctatcatatgtgtttcatttcagctctactgacctggtctccttctttatctcctcccatttaacatttatccatttgccatttcttcccaaaccaccacatttttgcctctttcagattt

SEQ ID NO: 278235 - DNA, 516 bp, Homo sapiens
gcaaggatgaaaaagaactggaactctcacatattygtggtaggaatagaaaatggtacaaccatgggaaaaatactttgcagtttcttcctccaaagtaaaatatacagttaaccatatgacccagcaattccactcttagatattttcccaaaataaacatatatgttcacaaaatgtgatcatgattgtgcatcaatcatagtttcatgctggaaaaaaacccaaatgttctttgattggtgaatggataaacattcaccatgtattcataaaatgtgttatgtatcaacacaatatagaacttctcaacaattacaaggaattcattactgatattcacaataacatggaagaatctcttggattgaggtgcatgcaaacatacacataatgtattattccatttacatgaaattctagaaatagtaaatctaatctatagtgatagaaagcaagtcagtaattgtctaggattaggagtgcaggctggggattgactggaaggggcacaag

SEQ ID NO: 278236 - DNA, 516 bp, Homo sapiens
gcaaggatgaaaaagaactggaactctcacatattcgtggtaggaatagaaaatggtacaaccatgggaaaaatactttgcagtttyttcctccaaagtaaaatatacagttaaccatatgacccagcaattccactcttagatattttcccaaaataaacatatatgttcacaaaatgtgatcatgattgtgcatcaatcatagtttcatgctggaaaaaaacccaaatgttctttgattggtgaatggataaacattcaccatgtattcataaaatgtgttatgtatcaacacaatatagaacttctcaacaattacaaggaattcattactgatattcacaataacatggaagaatctcttggattgaggtgcatgcaaacatacacataatgtattattccatttacatgaaattctagaaatagtaaatctaatctatagtgatagaaagcaagtcagtaattgtctaggattaggagtgcaggctggggattgactggaaggggcacaag

SEQ ID NO: 278237 - DNA, 516 bp, Homo sapiens
gcaaggatgaaaaagaactggaactctcacatattcgtggtaggaatagaaaatggtacaaccatgggaaaaatactttgcagtttcttcctccaaagtaaaatatacagttaaccatatgacccagcaattccactcttagatattttcccaaaataaacatatatgttcacaaaatgtgatcatgattgtgcatcaatcatagtttcatgctggaaaaaaacccaaatgttctttgattggtgaatggataaacattcaccatgtattcatamaatgtgttatgtatcaacacaatatagaacttctcaacaattacaaggaattcattactgatattcacaataacatggaagaatctcttggattgaggtgcatgcaaacatacacataatgtattattccatttacatgaaattctagaaatagtaaatctaatctatagtgatagaaagcaagtcagtaattgtctaggattaggagtgcaggctggggattgactggaaggggcacaag

SEQ ID NO: 278238 - DNA, 609 bp, Homo sapiens
cacgaattcacaggaaaataatataaaaggagaaaattgaaagctaacataggacaaaagccagagaagccatctaggtattttaaaagtctgcttactcttgcaaatgtgggcaagaaagtataatgcaaagatctttggagtcacatggttggtggttcaaatcattttacttgttaaatgtatgattttgtgcaagttactttaggcaagaacctcagtttctcagtcaataaaatgaggattataaaccttttagagctatactgagcagaataaacggcgcatatattgttgaagacaatgtctagtacacactaagtattcacatgtagctattattcatcattatatgatctcaactctatcatcagcaatcttttagaatacacagggaaatgtaggagagataaaagacttgaatgccaacttgaaaaacckgcaatttgaaaatatgggaggaaagagagacttcagatactgtagattgggaaacccaatgttgatatccaagaaagttccagcactgatttaaaaaaaaaagtctgagaaacagcgtggtttcaaaaacaatataaatgtaccaaactaatctcccctcccctttat

SEQ ID NO: 278239 - DNA, 514 bp, Homo sapiens
tagttgtttgataatcttttctaatttatctttatgctaagtgtgtagtactttgggattccagttttgtagagagatggataggttctaggtgccccatctacttccctatggcattcaggcagtgaaagctgcagctcattttcttctgtttaagcaaatgtcctcaagacaaaagattttgtctttggctttttagtcagttgcttcttgtacttaaattttaacctggtaactatttatatctcattggcttttatgtgctcttgaggttttttaaaaaatgtttcatccagtattcctagttttttttcaacaggagagttggtgtgaacaagctacatgttatcagaacacacatatacacatcygggcagcttcaagattcccatcttttaatacccatgctcatttatgtggagtcaggaaaattgtgagggtcttttatgccttacaaggcatctagaaaacaggaatggggtaggaattggatcactgttcttcccaagtacct

SEQ ID NO: 278240 - DNA, 628 bp, Homo sapiens
gtctgacacagtgagcatattgtggtattgcrctgtaatttcaatttatactgaaagaccattctttcttcataactaatcaaagacaaaaatactgtttacttaggaaatttgttctgaaatattcaaattattttttcttccatgttgtgaattaaattccctccattttgctttgctagtgtggatatgggcccaaagtccaggtttcagctttcccgtcttagataaagtctagcttacataaaggtttaacattctgccagctcaagtatccatgccattttaattggacacaaaggacagagacctgagtcatagcaagaggtagtccagagattttgggtacatttctgaaatgtaaggaatttttattcatttgcctggaaatgagacttggcctcttctttcttgcttacttcctctaaatgcgtgaaatatcactctgcactattaagcaatgcaatttcaccctaggggcaatggtacttgaggagtgaatactgggatctctgaggtttgtttatcacttcttttaactttctaaagtggttggaacattccctagaaggaaggtactgagtaactattaagcaccattatggttaatatgtttgctgaatcacac

SEQ ID NO: 278241 - DNA, 628 bp, Homo sapiens
gtctgacacagtgagcatattgtggtattgcactgtaatttcaatttatactgaaagaccattctttcttcataactaatcaaagacaaaaatactgtttacttaggaaatttgttctgaaatattcaaattaytttttcttccatgttgtgaattaaattccctccattttgctttgctagtgtggatatgggcccaaagtccaggtttcagctttcccgtcttagataaagtctagcttacataaaggtttaacattctgccagctcaagtatccatgccattttaattggacacaaaggacagagacctgagtcatagcaagaggtagtccagagattttgggtacatttctgaaatgtaaggaatttttattcatttgcctggaaatgagacttggcctcttctttcttgcttacttcctctaaatgcgtgaaatatcactctgcactattaagcaatgcaatttcaccctaggggcaatggtacttgaggagtgaatactgggatctctgaggtttgtttatcacttcttttaactttctaaagtggttggaacattccctagaaggaaggtactgagtaactattaagcaccattatggttaatatgtttgctgaatcacac

SEQ ID NO: 278242 - DNA, 628 bp, Homo sapiens
gtctgacacagtgagcatattgtggtattgcactgtaatttcaatttatactgaaagaccattctttcttcataactaatcaaagacaaaaatactgtttacttaggaaatttgttctgaaatattcaaattattttttcttccatgttgtgaattaaattccctccattttgctttgctagtgtggatatgggcccaaagtccaggtttcagctttcccgtcttagataaagtctagcttacataaaggtttaacattctgccagctcaagtatccatgccattttaattggacacaaaggacagagacctgagtcatagcaagaggtagtccagagattttgggtacatttctgaaatgtaaggaatttttattcatttgcctggaaatgagacttggcctcttctttcttgcttacttcctctaaatgcgtgaaatatcactctgcactattaagcaatgcaatttcaccctaggggcaatggtacttgaggagtgaatactgggatctctgaggtttgtttatcacttcttttaactttctaaagtggttggaacattccctagaaggaaggtactgagtaactattaagcaycattatggttaatatgtttgctgaatcacac

SEQ ID NO: 278243 - DNA, 590 bp, Homo sapiens
atggggtgatgtcatcaggacactgtctctttccatctctcaactctgttctcacccatgttgtgttatttcttacactctcaggatagcaagatggccatccacaacttcaaatttcaaggttcaagtccagcaggaaagagcacatgcttcctctcaacagttgcagcaaaacttcacaaattgaatctcatgagatctgatgaaatatttgattttccaagcctgaatttcatgcccctctatggagttaggtgtccagtcaactcaattcaaaaatccatggacaatggattgtgtccatgaattctggacaaaatggaaaagacagtactttccatggcactttgccagaagaagggggaatggatactgggtgaggtggggaataacaaatatctacaactcttacatacaaaatgcctgtctcttagtaataccttgcacaatttcccccattcttttcaactttccagtaccattgtcctgtgacatttgtaagaagagaatacatagagcccaaaaatrtacagtgcccaagagtggactacactttatttatttatttgtttgtttgtttatttatttat

SEQ ID NO: 278244 - DNA, 610 bp, Homo sapiens
tatttaatatcatactaggagtactacctagtacaataagacaagaaaaggaaataaaaggtatacatagtgagaaggaagaaataaaactgtctttgttcacaaatgctgtaattgtttatgtagaaaatcccaaagaatcaacaactcctggaaataacaagtaatgtatagtagggttgcaagattcaaggttaacacacaagtcaattgctttccaatacaccagcaataaacattagaattagaaattaaaaacacaatgccatttgtaatagcaccgaaagmaaataaaatgggcataaatctaacaaatttagaatctatatgcagaaaaccacaaaactgtaatgaaagaagccaaagaagatctaaataaatgaataagtattccacggtgatggactggaacactcaatattgcttagatgacaattcagtacttgacctatagattcaatgcacttccaatcaaaatcccagcatgctattatgtacatactgacaccttaattctaatgtctatatgaaaaggcaaaagacccctaatagctatgttagctccctaggactgctataagaaattaccacaaacaggtggtttaaaata

SEQ ID NO: 278245 - DNA, 610 bp, Homo sapiens
tatttaatatcatactaggagtactacctagtacaataagacaagaaaaggaaataaaaggtatacatagtgagaaggaagaaataaaactgtctttgttcacaaatgctgtaattgtttatgtagaaaatcccaaagaatcaacaactcctggaaataacaagtaatgtatagtagggttgcaagattcaaggttaacacacaagtcaattgctttccaatacaccagcaataaacattagaattagaaattaaaaacacaatgccatttgtaatagcaccgaaagcaaataaaatgggcataaatctaacaaatttagaatctatatgcagaaaaccacaaaactstaatgaaagaagccaaagaagatctaaataaatgaataagtattccacggtgatggactggaacactcaatattgcttagatgacaattcagtacttgacctatagattcaatgcacttccaatcaaaatcccagcatgctattatgtacatactgacaccttaattctaatgtctatatgaaaaggcaaaagacccctaatagctatgttagctccctaggactgctataagaaattaccacaaacaggtggtttaaaata

SEQ ID NO: 278246 - DNA, 620 bp, Homo sapiens
  misc_feature (1)...(620): n = A,T,C or G
tgatgtgcagtttggagtcttgaayttgtatctccttgggtgcttcttgcccagtctacttggtgcctaggtttgtccttccttgcggcactcatctagggaagttgcatctctgattgatgaccggtagggagggctttgagcctagaggacagcttctaggcttgggtcagtttttaaagattccctggggcatatactctgttttttgttggagccgtgggccacatcaaggtgagaaaatcattttctagctgaagttgcagttctggactctgccaagacaagaagagccagctaggagcaagatatgctatgtgcaacaagcgatgnaggtactcagagacatgatgcctatgtatccaactgcntacgtatgtctgcacttggatatggtctccaaacatcttagacataagatacctaaaactgaacttgtgaacatccttccaaaagcaggttcttttcccaggaactgtctctgaaattcccaccttggagtcatcctagtcactttcctctcctttacttcatctccaagtctatttcatcaatgagccctgacgttctttacttcctgtttttcaaagttgttcacttctccatctctgccaccactg

SEQ ID NO: 278247 - DNA, 606 bp, Homo sapiens
ctgcaggtgcatcctcctgcactcgttaaactaagggttttccttttctgtgctagacccgcttttacgaccacgctctccacctgattcacagaaagggttctacgaccgtcaggtcaccgccgcctttgtactttattggggagtcgaaggcctcagcgctgctcgcgatttccctaaggtggtcgggaaggtcccaaccacgttcttctgtaaaccagataaggaaggcctggggattccggccgcggaaaggcacagaggaggtgaacgctccggmtgcccaagtgacgcacttgtaggcggattcggaaactcgtgctcttgagccggaggcggagcccccagactcagaccgaccccccagaaccgggcggccttgcccgaggcatgaaggctttctaggcccgcttctaaaagctgtgtacaatggagactcctggaataggcacatatctctactgtaatcagaacgagatgtaacatctaagacgcagggcagggctctggcaaagacacgctgggggaacgtgaaagaaagggccaaaactacgcagctggtcctcagagaccaaagactacgacccccagcattcaatgcagtga

SEQ ID NO: 278248 - DNA, 607 bp, Homo sapiens
taaaatatttactgtgtggccctttacagaaaaagtttgccagcccctggcttaaatcattgatcacaggctgcctgtggtctttgctctgcctcatcctcaggctgggacagaggcgtgggccagcccacctggagtgtgtagccggttgccatggtgcagagcaagcttagagggtctcatactattataattaaaggctcagccctgaaaacagagctctcctttacaactcattgcccatttataactcattggccaaaactagtcacatggccttagccattcttaaatggaaagtagagtactcctaagtttctggaaggcacacagccaggaatattgagtgaagaatattaatgatccatcacagattccaaatagaggaatcattcaagttgttttgtattctagtaaagaaatagrcaagacataaaattttatttttcttgaattgttttccttcaaaggtaacttgttttatttaggtcagcctctaacctttgacatttaggccagtctgcccatttgatattaatactttctcaaatacataaattactttaagatgtacactttcagaaaaggccataaaaaactatgtgga

SEQ ID NO: 278249 - DNA, 549 bp, Homo sapiens
ctagttctcaaatttatattcttagcctagatcaggagttagcaaactttttcttaaaagagccagctagtagaaaaaaagataaaagaaaacaacaagaaagaaagagccagctagtaaatatttttagcttgtgagctatatggtctgtcacatgtcccaactctgtttagcttgaaagcaggcatagacaatacataaggatgtgtcccagccaagtgtggtggctcatccctataatcccagcacctcgggaggctgaggtgggaggatcacttgaacccaggagtttgaggtcagcctggacaacataatgggatcccatctccacaaaaataaaaaataaaaaattagcttggcacagtggtgcatgcctgtagtcccagctactcaggaggctgaggtaggaggattgcttgagcctggcaggtcaaggctgcagtgagccatcatcacrcctgggtgacagaggtccaaaaaaaaaaaaaaaaaaagtgtcccaataaaatttctaatgggtgccagctgtacagctatagcttgccagcc

SEQ ID NO: 278250 - DNA, 487 bp, Homo sapiens
catctccacaaaaataaaaaataaaaaattagcttggcacagtggtgcatgcctgtagtcccagctactcaggaggctgaggtaggaggattgcttgagcctggcaggtcaaggctgcagtgagccatcatcacgcctgggtgacagaggtccaaaaaaaaaaaaaaaaaaagtgtcccaataaaatttctaatgggtgccagctgtacagctatagcttgccagccccttgtctaggtctcactactgggctctgtgttcatgtgtttaattgccttttaaatgcttctacctaagatatctaaccagcagcttctacttgcatccaaaactgaactcttaatccccaaatcactagaacatgtgctctgagaccagggrcctagtcactcactaggctttgtcatatcatggctacttattggccaggtaccactaaactaatgagccttttgagacagggagggaaccatagatagaccatttc

SEQ ID NO: 278251 - DNA, 551 bp, Homo sapiens
tcttttcattatccttggcatgtcctcctccccccaccacccccccaacaacttggcttsgtttccttcttcaaaacttcaagtcttagcacaagtctctcctccagcaatgagggtccttgggttagctcccaaagaattcctcctctgcgattccgtctcatcttttgtttccatagagcacttgtctgcagttctttgtctatttatttgttctttgtcagtttgcttcagtagaatgtaagctccagactatgtctgtctggttcagtcttgtatctcaactgcttggaatgtagcagacactcaataagtatttgttgaatgaaggatgagtgactataggcattcaaaggagggagaaatttaaattaattttaataagcattcattaggaactagaattaaaggttcttttcaggaattagagtcttggggaggtggagatgagaaagtatggcacaaataattacaagaatgtgctgttatgctataggtgtgaatagtggtttggagcacaatgttgggagcagtcatttctgtttggactc

SEQ ID NO: 278252 - DNA, 551 bp, Homo sapiens
tcttttcattatccttggcatgtcctcctccccccaccacccccccaacaacttggcttcgtttccttcttcaaaacttcaagtcttagcacaagtctctcctccagcaatgagggtccttgggttagctcccaaagaattcctcctctgcgattccgtctcatcttttgtttccatagagcacttgtctgcagttctttgtctatttatttgttctttgtcagtttgcttcagtagaatgtaagctccagactatgtctgtctggttcagtcttgtatctcaactgcttggaatgtagcagacactcaataagtatttgttgaatgaaggatgagtgactataggcattcaaaggarggagaaatttaaattaattttaataagcattcattaggaactagaattaaaggttcttttcaggaattagagtcttggggaggtggagatgagaaagtatggcacaaataattacaagaatgtgctgttatgctataggtgtgaatagtggtttggagcacaatgttgggagcagtcatttctgtttggactc

SEQ ID NO: 278253 - DNA, 577 bp, Homo sapiens
aaactattgacagatttgcaacataagattttttaacacctatgcatctaaaaatatgaaaacaacaatttggggaaagaggtgagtatattagaccaaaaaattgaaaagacaaacagcaatggtctagtattcttaatattttaaaaatccatacaaaaggaaattaaatagctggtaaactaaatgttcaaccactcgaattaccaaaaaaagcraattaaaacaagtaaacacagttaacagtagatgtctcaacttttggaattgcaaatgtctctactgtctttatttcatttacatggttttctataataagcatgtgttatttggctaagaaataaagtaagaagtcattttcctcttgtcagattgcagcagtgtttctgctgctagtggtagtgctatccgtgtgtgttgttttgggggtgttctattcttgttttgtctgtaataacggaatctggtgccaggacctgggcagcttcactccttgctgtttaagaatataaatcagaacaagctttctagaaaacagcttggcaatatgtatcaagagtctgttaaaaatattcat

SEQ ID NO: 278254 - DNA, 595 bp, Homo sapiens
ctattgtttagacattttaaaatatttaattcaggattgttcagcctatatgcataaaaatgtataactggtaattgattggtaatattaacctgatgtattaaatcttttaatactacacattaatttccactttgacagatgaaaactatattgctattgatttctgctattctgccctaataaatttttattgcttcctatgtctattcatgyatgacatcattttatttattacttggatggttctctattgagactcttctttagtcttattcaataattcatttaaagttttctgtgtgtatgcatgttctaaaatctcagccagaaagaatactccctcttatttcagtgtggctgtgactctagttattttcaccaggaattcttgagcagtcatactgaatcttgagagagagggataaggcggccaattagatgtagccaggatgcattgctcccactgagagagaccaaaattttgaataaaccaatataatttgaacagatgtttggatagaaaatgccaagggtggatgaacataccatgtagacactgaggccgaatagggagaaagctgggaagcctgtg

SEQ ID NO: 278255 - DNA, 595 bp, Homo sapiens
ctattgtttagacattttaaaatatttaattcaggattgttcagcctatatgcataaaaatgtataactggtaattgattggtaatattaacctgatgtattaaatcttttaatactacacattaatttccactttgacagatgaaaactatattgctattgatttctgctattctgccctaataaatttttattgcttcctatgtctattcatgcatgacatcattttatttattacttggatggttctctattgagactcttctttagtcttattcaataattcatttaaagttttctgtgtgtatgcatgttctaaaatctcagccagaaagaatactccctcttatttcagtgtggctgtgactctagttattttcaccaggaattcttgagcagtcatactgaatcttgagagagagggataaggcggccaattagatgtagccaggatgcattgctcccactgagagagaccaaaattttgaataaaccaayataatttgaacagatgtttggatagaaaatgccaagggtggatgaacataccatgtagacactgaggccgaatagggagaaagctgggaagcctgtg

SEQ ID NO: 278256 - DNA, 380 bp, Homo sapiens
ctgttaaaagtctcctagaactgataaatgacttcagcaaaatttcaggatacaaaatcaacatacaaaagtcattagcatttctattcacyactaatgtccaggcttgagcatcaaatcaagaatataatctcatttaaaataggaagaaaatgaaatacctaggaatacagctaaccaaggaggtgaaagatctctacaagaagacctacaaaacagtgctgaaagaaatcagagacaacatagataaatgggaaaacattctattctcatgggttagaaaatctcataccctagtgctttgtttttaacatataattttgttagactgaaatactgaacatataactacatagaaattccacaatgtttccctatga

SEQ ID NO: 278257 - DNA, 565 bp, Homo sapiens
cacatttctcttatgttaggtttctgagtcctcaggcaactctgactatatagacatctattgatctttcttttaggcagcttgacagtatagccatctattgtcttttctatttatctaatttatctaaaattatcttaattttaacatagccaggacctgcccatatatgattggataaatatgtgttgaataaataaaagaatgaatgaataaataaatcagtcaagttacataactatctgaataattttaggtcaatattctaacacatggtagagatcatatagattatacagatctctactatggtttatagattagatagattatatagatctctactatgttttatttataaaaatatttaaagttttaagtatttccttattcttaataagtgcttmaaaattgataaaataaagcaaaattaaaaagtcatgcaatctaatataaattttgctagaaaagaaatagattttttaaaaaattgaaatagttttatttcagagaatccagattctgggtcatgcattctggctttcatttggtaatgaatcatttt

SEQ ID NO: 278258 - DNA, 559 bp, Homo sapiens
tttaaaaaattgaaatagttttatttcagagaatccagattctgggtcatgcattctggctttcatttggtaatgaatcattttacttttcaaaggtattggtggtaagtctgggagcaaggctaaaaccctagttgatccagagctcaggctgatcaatgagaaaacacaattagcttccagcaatgtgaacattgtttctaccagtattgattatctaatttataatttaaaaaaataatgtctttytcttattaaaggttgtatttcttctagtattaggaggggagtggagtagaatgaataagctctacacaagggtttacacttagaagttggtcaaataaaacacatgctctccttagtatggatctctttaggtcaaggctgtttttatccacactggtgaaattgtgagacagcttatcacggtctacagttaatattctcaggtgctttaaaaacattatatcttattataatgcattcaatataggaaatagaattatgattatcacccattagtcactcaaagaaaaatgttcaatgaatgaattga

SEQ ID NO: 278259 - DNA, 559 bp, Homo sapiens
tttaaaaaattgaaatagttttatttcagagaatccagattctgggtcatgcattctggctttcatttggtaatgaatcattttacttttcaaaggtattggtggtaagtctgggagcaaggctaaaaccctagttgatccagagctcaggctgatcaatgagaaaacacaattagcttccagcaatgtgaacattgtttctaccagtattgattatctaatttataatttaaaaaaataatgtctttttcttattaaaggttgtatttcttctagtattaggaggggagtggagtagaatgaataagctctacacaagggtttacacttagaagttggtcaaataaaacacatgctctccttagtatggatctctttargtcaaggctgtttttatccacactggtgaaattgtgagacagcttatcacggtctacagttaatattctcaggtgctttaaaaacattatatcttattataatgcattcaatataggaaatagaattatgattatcacccattagtcactcaaagaaaaatgttcaatgaatgaattga

SEQ ID NO: 278260 - DNA, 559 bp, Homo sapiens
tttaaaaaattgaaatagttttatttcagagaatccagattctgggtcatgcattctggctttcatttggtaatgaatcattttacttttcaaaggtattggtggtaagtctgggagcaaggctaaaaccctagttgatccagagctcaggctgatcaatgagaaaacacaattagcttccagcaatgtgaacattgtttctaccagtattgattatctaatttataatttaaaaaaataatgtctttttcttattaaaggttgtatttcttctagtattaggaggggagtggagtagaatgaataagctctacacaagggtttacacttagaagttggtcaaataaaacacatgctctccttagtatggatctctttaggtcaaggctgtttttatccacactggtgaaattgtgagacagcttatcacggtctacagttaatattctcaggtgctttaaaaacattatatcttattataatgcattcaatataggaaatagamttatgattatcacccattagtcactcaaagaaaaatgttcaatgaatgaattga

SEQ ID NO: 278261 - DNA, 592 bp, Homo sapiens
ttatttttgaatgtatttcagtttgcttatgtttttattccctcacaaccaaaaattattactttgaaaacagagtagcttcttatgcttgtacttgcgatgcttttcatattaaaaggtactttcacaattactttattttgaacaagctaatactgtttgggtaagacatactcttctaaaataaccttaatcaaaaccactgttcattttgaatgagatcatcagtttcaattagaaaaaattcaaaaggactttacatgtttgaataatattttcttaaagtgtcagtatctacattgcaaatgttcatggtgttttaattcagtcctttaaagaatactttatagaactctataaaatktattatagtataataagtggtttatattttgagatcacatattcacacttataagacaaatttttcaaaagattgtcttaatactttttatatgggataaaatctccagggacaatatcacacctaaattgaaaaggtgatattttttacaactcagaagaaagtgaagatgatgatcttttaaaaatgtgtgagatggcttgaaaactcatccttattttgacaaag

SEQ ID NO: 278262 - DNA, 592 bp, Homo sapiens
ttatttttgaatgtatttcagtttgcttatgtttttattccctcacaaccaaaaattattactttgaaaacagagtagcttcttatgcttgtacttgcgatgcttttcatattaaaaggtactttcacaattactttattttgaacaagctaatactgtttgggtaagacatactcttctaaaataaccttaatcaaaaccactgttcattttgaatgagatcatcagtttcaattagaaaaaattcaaaaggactttacatgtttgaataatattttcttaaagtgtcagtatctacattgcaaatgttcatggtgttttaattcagtcctttaaagaatactttatagaactctataaaatttattatagtataataagtggtttatattttgagatcacatattcacacttataagacaaatttttcaaaagattrtcttaatactttttatatgggataaaatctccagggacaatatcacacctaaattgaaaaggtgatattttttacaactcagaagaaagtgaagatgatgatcttttaaaaatgtgtgagatggcttgaaaactcatccttattttgacaaag

SEQ ID NO: 278263 - DNA, 390 bp, Homo sapiens
taaagactttatattttttcagaaaatatgttaaaacatattgtaaaaatagtttcaaatcacttgaaaatgctaagaaaaaaaatcttaaatgttctcaccacaaaaatgtaagtatgtgaggtagaggatatgttaatgagcttgataatagccatttcacatgtaygtttttaaaaaagaaaacatcttaaaacaatacttaaaactattgggtcaatgaggagaactagtttgtgggaaattctattaggctcctagttttatcttcaatcatcattttacagcctagttatgcagatcatattaaaggcaaccattttaatgagaaaacaggtagtgagacaaagtaattccaaggatgatctattgtaaatcttcatgcattct

SEQ ID NO: 278264 - DNA, 594 bp, Homo sapiens
aatacctttggacttcctgctatgcacaaaaatgcatgttattaacattacatgagccaagtctgatggaagtttttcagttatttgcagatcaaacacatcctatctcatgtcccatgaacttcagtaactcttgagcatttgttgagaaatacacataaaattataataattgacattgagagtttaccatttgcctggtacaggactcattacttttaagtgtgttacctcaataatcctcccaccaacacacaaaagctaagatatatatatgccatattttatgaacagagaaactaggacttataytctaagtcacagaaccaggatttgaactcagacagtttgacttaagagctcaagttatgcctcttctctaaaaggttatgtattctcacaagaaactcaaagatttagtgagttccatatactatttcagatatggaatttgcaagtcagaaaataggaaacaaattgagtataaggttggtccaaaattaattgctgttttgctgctgtttttaatggcaaaattaaaaactcaaattctatctaccaacctgatagaatttgagtaggaagcatgaagag

SEQ ID NO: 278265 - DNA, 594 bp, Homo sapiens
aatacctttggacttcctgctatgcacaaaaatgcatgttattaacattacatgagccaagtctgatggaagtttttcagttatttgcagatcaaacacatcctatctcatgtcccatgaacttcagtaactcttgagcatttgttgagaaatacacataaaattataataattgacattgagagtttaccatttgcctggtacaggactcattacttttaagtgtgttacctcaataatcctcccaccaacacacaaaagctaagatatatatatgccatattttatgaacagagaaactaggacttatattctaagtcacagaaccaggatttgaactcagacagyttgacttaagagctcaagttatgcctcttctctaaaaggttatgtattctcacaagaaactcaaagatttagtgagttccatatactatttcagatatggaatttgcaagtcagaaaataggaaacaaattgagtataaggttggtccaaaattaattgctgttttgctgctgtttttaatggcaaaattaaaaactcaaattctatctaccaacctgatagaatttgagtaggaagcatgaagag

SEQ ID NO: 278266 - DNA, 518 bp, Homo sapiens
gcaggaatctttgaactgcagaattgtgttaattgctcattctcaaatatagagacgccaattaattccacacaacctagattcaaagcagcacagggaaatggtcytgaggtgagtattgtacaaaaatgaagaaaaatagatgtgttctagcgtccacaaagctgattcttcaacaggcagtaatagaagcccaatgcacccagcgattggctgatggcatctttgttcaggcgatcgatgagcgccctaacccacacgctgggtggagaaatccctctgccaccctcaccttcagaatccactgctcagccacctggctcccgcggggtgcgccaccgcctcactgctggtacacgtctccccctctcgaccgccaagtgcttgctccctccaggcgagcactcacacaatggactcacttgtttcccatgcccctctcctttgacttccagcctcagcgaacaacttgagcaagagtcaaacaggagtctctgccatggagcatagacccttgg

SEQ ID NO: 278267 - DNA, 1411 bp, Homo sapiens
tatgtgcttctgctagcaaacacagagcaactctcatgcctactgagcccctgcttctccaactgtcctcaaaacagaggaacaggtatctrtagctatcaaatcaaggaattggagcaggagggcctatttaactgtccagagatgttctctaatcattcagtgaaggttattcctgcttcaatggtgaaggaggagaaccagcagcagccagggaagggaaggggaggtggggggtgaaatgacaagatcaagggagtgggtgccatggaggctaggaaaggatataaaagaggagacccaagaacatggggaagtagatgaccaaggcctgcctctgaagaggtctctgcccttcaggagccatgcaaaccttgatcccaaaacacaagacaatggtcagagttccaccatcagacacatggtcaacagtacccttgagatgaaaactagatttttaagactagatatgattcccctaaatcaccactatttaaaaaaagaataccagaacttaaacataaaaagataaactwgttcaccctgtcccattttggtacaaaacctttcattttatctttgagcttctgaattaacactttattcctaccaaatcttattgttcagggatcaggcagttagtttaaaggatgaatcatgcctatcaacaggcctggcagttgcagtcaacagcaaattgtgatttccagaatgaaagtgacttgttgcaggacaacacttaccagcatgtgacctggggcaagtcacagcctccctgagcctctgcatctgtaaagtgggctcaattccacctccttcacaaggctgttgtagagwttaaacaaaatagaccatgtgaaagccctgggcctcatttatgtttataaacaaatcctgtatttttaaaaacaaatttccacatttccttcactcaacacacatttattaaatatctgctgtgttccagaatccttgacaggcactgagaatacaaagaccaataaggcatgcactctgcagtcaaggacctcacagcccaggagggaggwgaggacttggtacttgagaacatgagactattttactttctaaggaatgcacattccacatgactcatgttagcttttcaattttccatttawatagggaaaactgttatggagagacaattttgaagagttcacattgtgatacatagatggactacatgtaactcttctaaaaatattcaaatatagcacatttcagtcttaattctatgggcataagcatttagtattttatttaccctctcagggacagaaattttaaatattatagaaatatcttgtaatggccaatgctggcattttcccaagcatttttatagctaatccttgggaatttttccatatatgttttattgaaagca

SEQ ID NO: 278268 - DNA, 596 bp, Homo sapiens
tagactggataaagaaaatgtggcacatatataccatggaatactatgcagccaaaaaaagaatgagttcatgtcgtttgaaggaacatggatgaagctggaaaccatcactctcagcaaattaacacaggaacagaaaactaaacaccacatgttctcactcataagtggaagttgaacaatgagaacaygtggacacagggaggggaacatcacacaccagggcctgtcagcaggtaggtggggagaggaaggatagctttaggacaaataacctaatgcatgcagggcttaaaacctagatgatgggttgagaggtgcagcaaaccaccatggcacatgtatgcctgtgccatacacctgcatgttctgtacatgtatccttgaacttaaaaaaaacttagcaaactaggaataaaaggtattttcttagcctaataaaagttatctataaaaatgtacagaaaatactacagttaatgctaaaatattatgtctgttctctttcaacgactccgttcccccagaaattggattaagaaaattatgcctaccattgccactcgattcaatagtttgctggaggtagaatgaga

SEQ ID NO: 278269 - DNA, 559 bp, Homo sapiens
aagagggataaatttccactgcttaattataatttttattgatctcagaagtcaattttgccctggtaatacagatggctgtctttcttcccttccctagctcaacatcattctgggaatttgaaaatgtgttgcctttctctcagtgggtggaytgaatgcagtgcttctatcatgcattcagcattttaaaagacgaatgtttagagaagctgaaacagggcaagtggagcaatgaagaaaatatcttttttatagtttgatagtatagtttgggttgaaattgaatgctggagtttcattaaaagccttaccttcatactgatattatacaagagtatttgatagagccacctgaagaatacttaatcaaattcagcttgtttgtaggatttaaatttgaaaagtgttggtagttctgcaaacaaaagacaattgcttgagtgagacatgtctcccaacagcttgtgctgtgagaagaggaaataaagcaggttattaaatgtgtatctccatgatgattagaattatgtgaaacttttggctgcataaatgtctt

SEQ ID NO: 278270 - DNA, 580 bp, Homo sapiens
aggctggcataggaagcagagaaatggatgcacaacagtaggaaaagaacttgatttctagccaaacattgaggccagccaggaaaattaataaatcggattactgtttgggcagacacgaaacytaaggcttaatagacccaggaattcttattggaacaacacattggaagcacatggtaagatatggacagattatgatagcaggttgtttttgtcttttatgtcatacttcaaccactttaattttcttagtccagtaaattccattttgtgaccatgaaacaatttgtggattaccaaaaatcagtatttacattttagttcctgatctgttggttgattaaatatataagataaaacactcctaaaaagagagtaattgtttttctattcacttgcattttgtactttctaggagaatgtgtataatttgaaaaagtaaaacaaacaaacaaaaaacccatacatttaagacatattatttacttgattaattggtccactgttgtgaatttggattgttgaaccattggatgaaatcagatggccacagaaatgtaatataaagagttgactt

SEQ ID NO: 278271 - DNA, 580 bp, Homo sapiens
aggctggcataggaagcagagaaatggatgcacaacagtaggaaaagaacttgatttctagccaaacattgaggccagccaggaaaattaataaatcggattactgtttgggcagacacgaaacctaaggcttaatagacccaggaattcttattggaacaacacattggaagcacatggtaagatatggacagattatgatagcaggttgtttttgtcttttatgtcatacttcaaccactttaattttcttagtccagtaaattccattttgtgaccatgaaacaatttgtggattaccaaaaatcagtatttacattttagttcctgatctgttggttgattaaatatataagataaaacactcytaaaaagagagtaattgtttttctattcacttgcattttgtactttctaggagaatgtgtataatttgaaaaagtaaaacaaacaaacaaaaaacccatacatttaagacatattatttacttgattaattggtccactgttgtgaatttggattgttgaaccattggatgaaatcagatggccacagaaatgtaatataaagagttgactt

SEQ ID NO: 278272 - DNA, 300 bp, Homo sapiens
catgtagcacaggttcagtgggtttgatgccttgtattctggtctagtggaagtcctagcatgtaactcttaaaatccttagtgcctagcacaataaaaaatagtgttggggctttcacttgaaggtaattaaatatgattgagctttttcttagcttctgttgttactgtccttggagattctttcagctctctaagactctaataaatctctttctatttaagcaaatcacacagattaataayggacactgatttaggttaaaaactacacttgtaaaaatagagtatcccaatttg

SEQ ID NO: 278273 - DNA, 621 bp, Homo sapiens
ttaagggggattgaccaagcccttcccaacaagtataccctctgagtcttgcagaccagcagccatggtattcactcttaactggctgacagatgcctggtgttttatctgtttgtgaaaattcctgaggatgagaagcctcagaagtgaaagtaaagagccataagtctgcttttactcagccttccaacaatcccagatgagtccccaagaaatgttgcagctcttttactcccatagtttaatgagctctgtgttcttgtcccacagcctagaagaatgaggtacacagacaccagagagtgagtaaggcagagtagaatttattgagtgacagaaaagctcttaacagtgagagggracctgaaggtgggttgatgccacaaggctgagtctaagggtttttatgggcttgaaatgggtaagtgcatgctgattggtctgtggctatgctagaaaaagcaccattcagaaataggcataatagtgtaggaagggtataggtagatatatataaaataggtgaaggataaggaccaattgggagagagcacaccaaatgtgaatgggagctctcaattggtccacaaatttatctggaacttgtagcttggttttcag

SEQ ID NO: 278274 - DNA, 581 bp, Homo sapiens
attcctgtctgcctaagaatttgcccacctcctatcactatcaatacttaggaataaatgaatccaaggaggtgaatgatcttttactgaaagctataaaacactgatgaaagaaattgaagacaaagataagtggaaatcttctgtgttcatggattgaaaatgttattattatttaaatgttcattctaaccaaagtgttraacagattcagtggaatttctatcaaaattctaaaggcattttttacagacttaaaaaacaaatcctaaaattcatgtggaaccacaaaacaacccaaacagccaaagcaatcttgaataataacaaagctaaaggcattacactacctgatttgaaatacactataaagctatagtaatcaaaacaatatgatattggcataaacacagacatatagtccaagggaacagagtagagagcctagaagtaaattcatatatttacagtcaaatgacctttgaaaaaagtgttaagaatacacaacaggaaaaggaaaatctctttaataaatgaatagtgctaagaaaactgcatatccacatatagaagaataaaat

SEQ ID NO: 278275 - DNA, 406 bp, Homo sapiens
tgcatttccaactaaggtaccaggctcatctgattgggactggttagacagtgagtgcagcccacggagggcaagaagaagcaaggtgaggcgttgcctcacctgggaagcacaaggggtcaggggactccctcccctagccatgggaagccatgagggactgtgctgtgaggaacggtgcactccagcccagatactacacttytcccatggtctttgcaacccacagaccaggagattccctcaagtgcctataccaccagggccctgggtttcaagcacaaaactgggcagccatttggacagacaccgagctagctgcaggagttttttttcataccccagtggtgcctggaatgccagagagacagaaccattcactcccctggaaagaaggctgaagcca

SEQ ID NO: 278276 - DNA, 623 bp, Homo sapiens
atctctagggctcactaccacttgctttaagttgtgatagttcaacaaagaggtcaggagttattttgtaaggaatcttgaagagctctaaatttcaattttctttatggaccaaggttagctaatgacaatttcaggtaaagagaaataaaaaattatgtttatatgattctgaatgccagctttgccagtgttctcttctcttctcccttctcttttctttttttcctctgtcccgtgtccttcttcattacatccctcaagtgcttagatttttctttcttcagagagctctgatgaccacagcaatgacttgtctgtaccactgtctctttaatactgctggaatttaaggcaaatataaaatgcactgtccaatggaccattcatatcttacttcttgtttcttagactgtgctgtargagttggatcattatgagtatcaactcaaatgacatcgggagtaaattgagagacaaaagagtaatgaagttagaacctctttgggagctgtcttgacaggatagtcagaggttgcaagctacgttacacaatttttgaaaggaagtctataaatatattattttaaaaaataaactgaattattacacatgataacagc

SEQ ID NO: 278277 - DNA, 625 bp, Homo sapiens
tgcagggcaaagatgagggaaatggttcccattttcagagggccacctttgacactgcaatgtggcctgtcttctctgaaatctgtcctgcattacagcattttcaggatgcaaaataggaaaggccctccttccttaggaataaacccagatggagagcaaaagtccggagatatatctctctcctacaattatttcacagaataaaaaagtggcagggttcatcttcattattttattttgtrtagtgcctttcacatgaatgcaattggataatttgatgataagttatgatgatgaccaactaaaagtgaagtattgttcatgaaatttcatgaataataaaatatcaaaagttttcattttggaatggtgccaaaagcaaaattctacataaattgtattatttatccttagttcaagatgcagaaattcttccctatgcaggcaacttttaagtaatattcattgattgccatttcttttacaaataaaataaaccactcacaatcctaccatgacaaatatagtgtaattttgtgtcttctttctagatttacgtatttgtaaatgataaaaatggtacctaaaaaacaatatttgaaaatgctatttaggagaagaa

SEQ ID NO: 278278 - DNA, 1149 bp, Homo sapiens
gatatttccaactgcaatccacgccaacatggttctttattctctcccctcacctcataccatatttacattttgcttaaaccatagtaagaagcctggattccaccaatatcaatacatttacttggtcartcctacaaatcacctatcataatttgaggattgcttcatctgtgccagtacaaaaaaatctactaaaagatttcatcattgcattcctccctcaatccccacatctcactccagagcttaggatatataccatgttcaaaagttgctttgattcaactgtctttaatttgccttggctttgcttttattttttgttgtaactatataatccttttgagacaaagttgggtttgtttgtttccaatttaattcttgtttcttctcattgtttagaattatatttaatttttgaatatgtaaaacgttaacatgcttccaagagttaaaactatgtaaaaagataccttcggaacagcgtcactttcctttttttttccctcttcttcctcataccctatcagtaataatttcagttttctgctttattattctcgtaggggcagttgctattatttacwaaagtatactaaaaaaaaaaaaaaaggaaaaaatttgatggaagaataaggaaataaggagaacgtttttgtaaagttgtataatatgtgggtattttaagctgtgttattaccaaaaagctagaacattaaaaaataaaaattttataaggtaaaaacagtaatctgttaatttattattaagaaaaaaaatttaaataaatttagtgtagcatgtatgtacagtatttatagtctacggtagggtacattcattccccattcactcactgactcacccagaacaagttccagttctgcaagttcaatttatggtaacagccatatacaagtgtaccattttatatcttttatgctgtattcttactctaccatttttatgtttggacatgtttagatacacaaatacttaccattctgttacaattgccwacagtattcagcacactaacatgctgtacaaatctttgcagcctaggagcaagaggctataccatatagcctaggtgtatagtaggctgtagcatctcagtttgtgtaagtacattctatgatgtta

SEQ ID NO: 278279 - DNA, 557 bp, Homo sapiens
atacaaataattttaaaaaatgaaagattgcaagaatgaccaaagtatgacacaggcatacagagtgagcacatactattggaaaaatggtgtcaatagacttgctatttcacatkgtattgataaatattttaaagcaggaatcttctagctcctgtgcaataaagtgagcacactcagaattgtagagagaaatgggagatgagagcaggatactttctgctttttctaaagtgccttattctacagtgaatgaggggaaaaaaaggacatgcacttttgcttaaaaagaaaattcacaataaaaaaacaattaggctcaccttacagatttatggtgcctttcagaacaaaattactacattttatatgttcatattaaataaagttttagagttttccccgtccatgcatttcagtcccatgaattttcccattttatgtgaccttttttgtttctagatagaaataattatatggcttatttgcctaagcactgtttttttcccctgatttattttttaatgtagcaagttaattgatacatcaataatagg

SEQ ID NO: 278280 - DNA, 557 bp, Homo sapiens
atacaaataattttaaaaaatgaaagattgcaagaatgaccaaagtatgacacaggcatacagagtgagcacatactattggaaaaatggtgtcaatagacttgctatttcacatggtattgataaatattttaaagcaggaatcttctagctcctgtgcrataaagtgagcacactcagaattgtagagagaaatgggagatgagagcaggatactttctgctttttctaaagtgccttattctacagtgaatgaggggaaaaaaaggacatgcacttttgcttaaaaagaaaattcacaataaaaaaacaattaggctcaccttacagatttatggtgcctttcagaacaaaattactacattttatatgttcatattaaataaagttttagagttttccccgtccatgcatttcagtcccatgaattttcccattttatgtgaccttttttgtttctagatagaaataattatatggcttatttgcctaagcactgtttttttcccctgatttattttttaatgtagcaagttaattgatacatcaataatagg

SEQ ID NO: 278281 - DNA, 585 bp, Homo sapiens
tttcttccactattattctttatccctagtagccattcctacacatattttctggatttgccttcataaattagaaaactcagcagttcttttggagtgtaacatacctcctcatgtgtcacactttgtccagaagcaaatgagagttgtgggcattctattctcaaatattttcaractttcaacatgaaggtcttctgaattaaaccaatatatgagggcatggtatctggaagcatatcatttggtatgattttaattattagattagctttatgaaaacagttaaacctggtcctgatgggaaggatagaaacacgccacaaaatattttttttttcttgtgaagatgtaggtgtggcttccaaaaacaaataaataaaaaagatttgttctcttcctagaatccccacgcaacctccttccaaattggtagagaacatcattcaataacatatagttcaattaaacaaacagcaagcatttctgcaggctggatcactcttgaagccatgtgggaagtgagtttggggagttggggaagagggaggcactctggaaataaaggtactaattggtaggcaa

SEQ ID NO: 278282 - DNA, 585 bp, Homo sapiens
tttcttccactattattctttatccctagtagccattcctacacatattttctggatttgccttcataaattagaaaactcagcagttcttttggagtgtaacatacctcctcatgtgtcacactttgtccagaagcaaatgagagttgtgggcattctattctcaaatattttcagactttcaacatgaaggtcttctgaattaaaccaatatatgagggcatggtatctggaagcatatcatttggtatgattttaattattagattagctttatgaaaacagttaaacctggtcctgatgggaaggatagaaayacgccacaaaatattttttttttcttgtgaagatgtaggtgtggcttccaaaaacaaataaataaaaaagatttgttctcttcctagaatccccacgcaacctccttccaaattggtagagaacatcattcaataacatatagttcaattaaacaaacagcaagcatttctgcaggctggatcactcttgaagccatgtgggaagtgagtttggggagttggggaagagggaggcactctggaaataaaggtactaattggtaggcaa

SEQ ID NO: 278283 - DNA, 473 bp, Homo sapiens
ttgaaagacacttctttatggtacactgaagcttgtacagagatctcatgactcccatccagacatctttccattgcgttacctgcttcggcccctgcctatacaaggagaatatttcatttgaaggagaaagaaaagttaatatatccaattatgacatggtgttttgtacaaccaaatacttctttaatcaggctataagtaactatactattttatatgatgtcctcactctcagcaagaggtttttaatcatctgttgctccagttggttgctgttagacatctgcttttgaattcaattttttttgaacagatcacccamaagttatgtttgtattattacccaggtaaataatttccttccagtcttgcggctctgtgctaaccaaatcattaggcaccctgccactgcctcttattacagggaaaaaaaaaaagaaaaacacatatccatgtattttattttggtt

SEQ ID NO: 278284 - DNA, 546 bp, Homo sapiens
tagattgcctcataatacatgaaacttaaacataatttaccacgagtacttgacacaaagaattttttttgggtgaatataaaacatttaattttaaaatgttgacactataatgtatgaaatagctagctattacaaatgcacatggtgtattttgtagataccaactagacttttttgttttaggaagctttaagttacactgtggttaagacatatcttcacccttgaaaaagcccacattctatcactgtgatgtatggtcaaactgaggcccaatcgttaaacacttgkatcaaatcataactaagtttattgccaaaggacttgtacacatttatttgtcaattttagtgccttaaaatctacccagcagctcattaacatatagaaacatacatcatgagaacaagaactatcacccatcccttctgtatattagcaacttatcactcctgagcaacatctcattactgaggcctgtgaacagtcacttttcacatttgagtgaaatatggaatgacttaagtataaatgcagctatta

SEQ ID NO: 278285 - DNA, 572 bp, Homo sapiens
gggtggtgttggcattatacacagaatggtgagtcctaaccacagtcaaaaccttgttcccctccagtcaacagatatcatctgaggctttgaagcaagtgctaagggaattcaagctggagatttaggggctctccacagtgcctctctccagataaactccaggggattccagggtgacagagtaggtgaatgctgaagtaggtataaataaagtatgacatygcacctcccagccctcttgtttaaacactccccacttccagatctactctgctgcttcttcctctatctgctgtcaatactgctgcctcgttctcctggacttctgaagtgtttccttagatcctctagttagactgatggctaatacctatctcatgtgactgcagtcacagtatttactcatttattccacaaagagataaggaaacaaaaaaaggtaatattcttccatctttaagagttttcttaaatcccaactagaaagataaacttcctttcctattactgtgttcctaccaatatgaacgcattaggtgccacaagagaccatgctagacccaaagttt

SEQ ID NO: 278286 - DNA, 572 bp, Homo sapiens
gggtggtgttggcattatacacagaatggtgagtcctaaccacagtcaaaaccttgttcccctccagtcaacagatatcatctgaggctttgaagcaagtgctaagggaattcaagctggagatttaggggctctccacagtgcctctctccagataaactccaggggattccagggtgacagagtaggtgaatgctgaagtaggtataaataaagtatgacattgcacctcccagccctcttgtttaaacactccccacttccagatctactctgctgcttcttcctstatctgctgtcaatactgctgcctcgttctcctggacttctgaagtgtttccttagatcctctagttagactgatggctaatacctatctcatgtgactgcagtcacagtatttactcatttattccacaaagagataaggaaacaaaaaaaggtaatattcttccatctttaagagttttcttaaatcccaactagaaagataaacttcctttcctattactgtgttcctaccaatatgaacgcattaggtgccacaagagaccatgctagacccaaagttt

SEQ ID NO: 278287 - DNA, 572 bp, Homo sapiens
gggtggtgttggcattatacacagaatggtgagtcctaaccacagtcaaaaccttgttcccctccagtcaacagatatcatctgaggctttgaagcaagtgctaagggaattcaagctggagatttaggggctctccacagtgcctctctccagataaactccaggggattccagggtgacagagtaggtgaatgctgaagtaggtataaataaagtatgacattgcacctcccagccctcttgtttaaacactccccacttccagatctactctgctgcttcttcctctatctgctgtcaatactgctgcctcgttctccyggacttctgaagtgtttccttagatcctctagttagactgatggctaatacctatctcatgtgactgcagtcacagtatttactcatttattccacaaagagataaggaaacaaaaaaaggtaatattcttccatctttaagagttttcttaaatcccaactagaaagataaacttcctttcctattactgtgttcctaccaatatgaacgcattaggtgccacaagagaccatgctagacccaaagttt

SEQ ID NO: 278288 - DNA, 572 bp, Homo sapiens
gggtggtgttggcattatacacagaatggtgagtcctaaccacagtcaaaaccttgttcccctccagtcaacagatatcatctgaggctttgaagcaagtgctaagggaattcaagctggagatttaggggctctccacagtgcctctctccagataaactccaggggattccagggtgacagagtaggtgaatgctgaagtaggtataaataaagtatgacattgcacctcccagccctcttgtttaaacactccccacttccagatctactctgctgcttcttcctctatctgctgtcaatactgctgcctcgttctcctggacttctgaagtgtttccttagatcctctagttagactgatggctaatacctatctcatgtgactgcagtcacagtatttactcatttattccacaaagagataaggaaacaaaaaaaggtaatattcttccatctttaagagttttcttaaatcccaactagaaagataaacttcctttcctattactgtgytcctaccaatatgaacgcattaggtgccacaagagaccatgctagacccaaagttt

SEQ ID NO: 278289 - DNA, 595 bp, Homo sapiens
attttctcttgttccacaaggtctacaagtagttgttacccactgacagagtttccagaactccatgaaacggggtttgggcaggcacatactgaaygaaaaggaaacaatgtctgccatgtcaatgacctaaagaagacagagatgacctcaggtgaggattacaaacttctctgcttccgtcgccaagtccttcaaggcacgtgatggccagagatattttccaaggttcaacatggcctagggctttgtctcagttgtaggacttaggcacaggagagagcctcatgctggtgaacctggcaggtcaagatgttgatattcattagaaagacttagccttttctcctaagcatagagcatcaggaggtatccattcctggggtaactactcctttatgtgagtgaacaaaaataatgagatttccatagattccaaggagatatcagaatagtcagaagtcttgcccccagaaagacctatagatttaagaggcagagattcaccttccagttttaggaaggaagatctaggccattaaattgaccttggaatggtatttttccttacccattctaagtaatcaaatatgac

SEQ ID NO: 278290 - DNA, 595 bp, Homo sapiens
attttctcttgttccacaaggtctacaagtagttgttacccactgacagagtttccagaactccatgaaacggggtttgggcaggcacatactgaacgaaaaggaaacaatgtctgccatgtcaatgacctaaagaagacagagatgacctcaggtgaggattacaaacttctctgcttccgtcgccaagtccttcaaggcacgtgatggccagagatattttccaaggttcaacatggcctagggctttgtctcagttgtaggacttaggcacaggagagagsctcatgctggtgaacctggcaggtcaagatgttgatattcattagaaagacttagccttttctcctaagcatagagcatcaggaggtatccattcctggggtaactactcctttatgtgagtgaacaaaaataatgagatttccatagattccaaggagatatcagaatagtcagaagtcttgcccccagaaagacctatagatttaagaggcagagattcaccttccagttttaggaaggaagatctaggccattaaattgaccttggaatggtatttttccttacccattctaagtaatcaaatatgac

SEQ ID NO: 278291 - DNA, 569 bp, Homo sapiens
ccatgggaaaccttcattcattgggcaaatgattggttgggtctcagtgaagaaataaaaagaattttctttgtgttcactctgcattgtgacttttatgtcttcgtttgtgaagacagctctcttcataaccccctaatatttcccagagaattctccatcttttctgtgatcaattatgatagctctaaaatagcatgcagttctgaaattctccacttgccactatgtttcttatcacctctatagtttattcactcatccatttcttcatcaagcaggcactgagcaccagctatgggcaagcatcaggttctcatggcattctcagcaaagtccccttcttcgcygttgtttcatgcttaacatttgcagaattctgtttttcgagagatttttatatttgtttgaaattctaataagaataaacatatttactgaatattaaagctcaataagatagctatagtgtgaaatgtggttcaacattaaaacagcaatgctgtgaaaatgtgtaatgtaacatgaacttgtaaattataaaaaagttatccttctcacctcgtagt

SEQ ID NO: 278292 - DNA, 488 bp, Homo sapiens
agtggcgtgaccacggctcactgcgacctcaacctcccagattcaagagatcctcacacctcagcctcccgagtagctgggactataggcatgtggggcctgtgccaccgtgcctggatgattttttgtagaaaggtctacgttgcccaggctggtctccatcaaggctctaattaaactggtccttcctatcttttcagatccatcttccagatctgtggtatgcacactgggtctgaatcakcaggtgaggggcctgggaatctgtgcttttagcaaactccccaggagacctttattggcagaaattttggaaaacatttccatcctgttcctggccattcacaaacatggtaactctgacctcctggggcaactcaccatttacaaggcacattacctactctctcagctttctgccagggctcaagcccattctccagcctgaaatgtatgtctcatgctttcctcccaggcctggctcaaag

SEQ ID NO: 278293 - DNA, 528 bp, Homo sapiens
aatagtttggtaatacaccatcataaaggttcctaaattcatctctatatctacaaacacacacacacacattctttctttaacaatatggagtacatagacatttatttactttgaatattttagcacttaacatgtgttgaatatattcccacatcaagcagatttagctctttcttattaaatgctgccccacacaccacagtcaagaggttgcacatgtgttcaaacactctcttcttggtagatagtcagactatttggtgttccttctgcraaccgccctactgtcatttaagtaacaaactctgttgatacaggagtggcctctaactcatttagtctcctgtggatcaaaataaaatcctggtctcctaaatgggtgcggctgggagatcacttgcttttcagagagtagtttccatttcctgtacatcagatggtcagccctttaagcatgccaatctgcaaaaagaaaatatttctttttactttcatgtttcagagatgggatcttgctatgctgcc

SEQ ID NO: 278294 - DNA, 577 bp, Homo sapiens
gtttaaggagaagtagaatatttcctagccccaaagtatctgttggttacaaagggaaacacagtgactttatagtggagatggctggcagacaccaccttaactagggaatcagatcgaggttcacatcaccagaaatgggacagctcgatggcatgacacaatataccratgatatgatatgttaaggagagcccttcacctctgtgtggtgctcttcccctaaatccacaggctccctttaaccaggagaaaatgccagagaacccaaattggggggccttctataacgttcctaaccaatgctcttcacagggatcaagatcaagatcataaacaacaaggaaaaccaaggaatcatcacaggctgggggagactaagtagacaacacaactcaatgcaatgtggaatcctagaacagagaaaggacgctggcagaagaatgagtcaatccaataaggtctgtaggtggtggcattgtgccaatactaagtttttaattgataacttgtaccatggttacagaggttaactttggggcaagctgggtgaggagtatgcaggagttgcctgtac

SEQ ID NO: 278295 - DNA, 588 bp, Homo sapiens
ccttaaatcttggctcctggagaacaatggggtaagtaagctgggtacaaacggctgtgaggatcaaatatattgtatctgtgtagtgcaaatacctagctgagtccagtattttaaactttataaatgtagtttcatattcactatatcacttagtttacacaaataacccattaactttaaaaggtattttttaacattttatgtttagctgaaactcagaagagttaacctacctccctaccatcacacagctagttgggtgtcatgcccaacacagaggtctctggattgaaagttcctttcaatattcatratgttgcctacatttatgccaaaagggctatttttatttccctaagaggtgtcaaaacttaatggttcagaggatataatctattctcacttggtcaaaatacttggttttggtcattcttttttcatcctgcgaacatttactaagtacctaccatgtgccgtgtgctaccttaattaaatattctgtttcagatttactacatgtaccatgcagggttgtttggttttctgaagcttggaaaaggataaattatactctaccttgaaaat

SEQ ID NO: 278296 - DNA, 617 bp, Homo sapiens
gggtggagaaggaggtgtcacatgaaccagcctaagctagtgagtatttttttaaggattcattatagaaaaagttagactttttcccttaggtctcttgctgtagaggaactgcctgtgaatagagaaaagccaacacaggaacactttgactccctggatccagcccttcctgaagtttgatctcctccttaaactttctagttatatgagcccattaattctcatctttacttaagatagtttgagtctgtttttctcatttgaactcaaaagagctatgmccaataccaataataataatagcagctccatttgcttatgaagaaacatcatgttaattgctttacatatgcaatatcctaacaattctgtaattttacagttgtggaaattgagacccagagaggctcaatcattttctcaaggtcacacgaatagtgacagtgtcaagtgtcaccagtcccagcttaatgcatttccaccatatgccaccttgagacactaaccttagcggatggctccaggggcacgtaggaagggttgttgctcttaacgcggccctttttttaagaattgctgtagttggaagcagctccacagtaatttcctatagc

SEQ ID NO: 278297 - DNA, 617 bp, Homo sapiens
gggtggagaaggaggtgtcacatgaaccagcctaagctagtgagtatttttttaaggattcattatagaaaaagttagactttttcccttaggtctcttgctgtagaggaactgcctgtgaatagagaaaagccaacacaggaacactttgactccctggatccagcccttcctgaagtttgatctcctccttaaactttctagttatatgagcccattaattctcatctttacttaagatagtttgagtctgtttttctcatttgaactcaaaagagctatgaccaataccaataataataatagcagctccatttgcttatgaagaaacatyatgttaattgctttacatatgcaatatcctaacaattctgtaattttacagttgtggaaattgagacccagagaggctcaatcattttctcaaggtcacacgaatagtgacagtgtcaagtgtcaccagtcccagcttaatgcatttccaccatatgccaccttgagacactaaccttagcggatggctccaggggcacgtaggaagggttgttgctcttaacgcggccctttttttaagaattgctgtagttggaagcagctccacagtaatttcctatagc

SEQ ID NO: 278298 - DNA, 1002 bp, Homo sapiens
aggtgagtgcttccaggtggctcctgggctaagtggaaaaggggagggacaggagggtaaatatggggaaagcctctgaacaaagtacaaagaagggaacagaaggaactaagacagcagttaccctttcacattttgtcagaggatcactctgtgaatataacagtaacaatcttaatttcaaactacatgcaatatagaccatttataaagtttttttttttattgttgttaccctgaatatctctaggatttttctgtggattcccagagtgtttcagctgaattctctagctccccacctcctctgagcacttgctggcatatttccaagctcctctggcatctctcaattcctcaggaagatacctattagccccttcatcttccttttccattttgaataagacagtccaatcttgacaattattaactataactcatcaartatgttcctctaaaaagacatatttagggaagcactgacawtaataggtgattctgaactagtacctttggctataaaggacctgattgagacaatgggtgaaacttgaacggggtcaaaggatttgaaggttataatgtatcagtgctaatttgctgatwttgatggttgtattatgtatatgcaggagaatatccttgtatacagggattacacactaaagtattccaggtattggggcatgaggttggcaacttattctcagatgattgagaagaaaattaagtttatctgtactagtcttgttacttttctgtaagccagtgggcatgacccatgtgagaggtagagtgggttttagaagagaaggaataatccatggtgcacaggtcctgagaaggaagagttgaagcacaggaagtttgagaagaaatttaaaacagttgtcatgttgtgtgagaaaatgagtcaatcagagaattagaagattgccaagcatatttggggcccataacaggatggtgattatgaacaaaacaatgccgtgactttta

SEQ ID NO: 278299 - DNA, 627 bp, Homo sapiens
atttgaaggttataatgtatcagtgctaatttgctgattttgatggttgtattatgtatatgcaggagaatatccttgtatacagggattacacactaaagtattccaggtattggggcatgaggttggcaacttattctcagatgattgagaagaaaattaagtttatctgtactagtcttgttacttttctgtaagccagtgggcatgacccatgtgagaggtagagtgggttttagaagagaaggaataatccatggtgcacaggtcctgagaaggaagagttgaagcacaggaagtttgagaagaaatttaaaacagttgtcatgttgtgtgagaaaatgagtcaatcagagaattagaagattgccaagcatatttggggcccataacaggatggtgattatgaacaaaacaatgccgtgacttttaagcacattcgagaactgaaaaaaatgtagcatctaaaacagatttttaaggttgcgtgtatatccaacttactaagcaagtttatttctaataaaagataagctatactttatagtrtctcttccccattaattttgagaaaaacgcaaatgattgtgaaggatattagaaaaatatagtttaaaactcacaaaa

SEQ ID NO: 278300 - DNA, 624 bp, Homo sapiens
tctcagtgggacccttcaaatttgttaagacctcctgccattttctttctccamatccatcaccaaccaagtgagagacagagggtgattcattctttatctccaaattgacctagatagtagctccatataaataagacactcaagcctacagattttattaacttaatagtggttcttattcaagtattatttacttgctatggtgtccaatttggtcgccaccaacccacatggcttttgcacatatgaaatgtggccagtctgaattgagatgtgctgtaagtgcatacatacaccagattttccagatttagtatgaaaacagggatgtaaaatatcttatcaacaagacaggcatggtggtgcatgcctatagtcccgactacttgggagattgaggtgggaagattccttgagcccagaactttgagaccagctgggcaacatagtgagaccatgtctcaaaaaaaaaatcttattaactattattttatattggttacatgttgaaaccaaaatattttggatatgttacattaaataagctgcattatcaaacttaatttcacctatttatttttattcattttaaggtagttactaggaaatttaaaattacat

SEQ ID NO: 278301 - DNA, 487 bp, Homo sapiens
attttatagatgagggaaatagggctcagagaggttcatccccatgccccaacagctaatgaacaataaagctgggactaaagtaatagcaaatatttactaaggacttaacgtcagtcagtttcatgtgtgttaactattaattcattgaatcctccttttaatcttatgaggtaggtacctctatgcccttttcagaggtcacagaacaaacacagagaggttaaataacttgcccaaggagtcacagctgatacatagcagagctggggctggaacctgcgtgatcagcatcagaccctcgtctcttaactaccacactcagccattctctacartagcgtctaggttggcctttttccaaaggctaaatcctttccggaatacaactttgattttatgtttctagagaaaacaaaaaaggcatacctcaacaatagcctattagacttttccaagcatgacaaatcatgtgtatttgttatat

SEQ ID NO: 278302 - DNA, 571 bp, Homo sapiens
cctgggttataaacagacctccggctgaatgttaagcactttaatgactgagaagctggggagtatggggcagcatctttcaattgctgcgctgaagtaaaaaggctgagacaaggacagaaggtggggaaggtgagtactctgaggcacccaagctgcatagcactgcttgtgctgggatcacaaggtgcccagatcatccaaggggggtaccaggtatagaggggagaagaagaccctagaacaggtcagacagtgcagagaatgagggcaggccctggccaggagtcagggagaggctgggcctcaaggcatactscagtgtccagcaaatcaaaaatctgacaagggactggcctacatccctactccccattccattcctttctagacctaaaatctcaacacaaacggaatgtctgatcactttagctataaaaacacataaagccatatttttcccccttaaatcagaagcaaatgctaagggaaaaggacttcgtggcatgcagagaacaacaggcacaactattgtctctgtctcctggcagtctcccccagacatctgcaa

SEQ ID NO: 278303 - DNA, 572 bp, Homo sapiens
tgggagtcaagacttacttttggcctcagacacagtcaaggatcatcctgatgcaaaaaacaaaatcacctttgaacctcttcctccacaccatcttccactttggttttccgctatgcctttgtactggggacaaagactatccacgaatccttactttaaaaactgaggcagtggctctgaatcattcccccttggacacccccacacatctgaacaccctcgtgtcccaacaccacatctgctgaagttgactggacctgaaatgctggmggctcagtgttttcggaaactgcggagagttctcctgccacaattctcttgttgtcgtcaaaagcaattacatgtttcagatgatgaaaagcactgtcatgaaaagctggcacagcagccaaggagacagatgtattaaaccacacggcttctcagaactcccacttacgttggagctcagcacagagatgagcatggtgatatccccccgtctaacatcctcccatttggatttaatgcatgaggctcgtttctgatgaggtgccaaattctttcggtggacaaacacaaagttgcag

SEQ ID NO: 278304 - DNA, 557 bp, Homo sapiens
gcaaggatttcaagggtctcttaatagtagctacgtcgactagttcatctcctactgatttacctactcagtttcagaggaattaggtaaaaaatgcataactccattggcattgttgaatttttttctaaactcttgtgatagggatggaaaaaaaggacagagatagagcatcagttagcaaatatttactgagaaggtataatgtgctctgctctgaggcactggatacccagcagaataacccttgcccttatccacaatgagctggctagggagttttacacgagctttacatttgctcgcctgggcactcttgggtggtggtggtgaagagctcgtgttttgaattagacctggtttgaaacctggttttgtggctttatttcctgtgcgaccatgagcaagttacttaagctcttaagggctcagtttctgtctttgtaatggagatcataatactcataataggatgggaagragtagcaaatcctgtatataaagaggccagcatgtgcccagcacacagtaaggattatgggaatcaaggacctagc

SEQ ID NO: 278305 - DNA, 542 bp, Homo sapiens
ctaaagaaaaaaaggaaagaaaactgaccagactaaatgctggtgaagatgaggagcaactggaatttatgcattgttggtgggattgaaaaaatggtaaaataactttgggaacagagtttagaaatttaataagttaaatatacatttgccatactttccagtaatttcactcctaggtatttatccaagtgaaatgaaaacttatgttcacagagacatctgcacttaaatatatatgacaattttatttatattcactccaaactggaaacaactcaaacgtctttcaactggtgaatgaatgagcaaatgatggtacatttgtacagtggaatacttaccagcaataaaataaatgaatgtctaaaataagaacatgaataaaaccatttatgattccatttatgtaacattctagaaaaggcaaacatataggtaccaaaagagattagtgaatgccatgggctactggtcgaggcaagggttaactgttaatgggcatgaagaaaatttgsggagtgatggaaatggtctatatc

SEQ ID NO: 278306 - DNA, 472 bp, Homo sapiens
ttgctaaggataatgacctcaagctccatccatgttcctgcaaaggatcttgtaattttttatggctgtgtagtattccataatgtatatgtaccacatttttttatccaatctactatttatgggcatttaggttgmttctatgtcattgctatcgtggatagtgctgcaaagaacttacccatgcatatgtctttatgacagaacaatttttattctttgaggtatattcccagtaatgggattgtcagattgaatggtagttctgtttttaggtctttgagaaatttccatactgcattccacaatggttgaactagtttacactctcaccaaccgtgtatatatatgcattcccttttctccacaattctgccagcatctgttatttttgacttgttaatagtagccattcttaccaatgtcagatggtatctcattgtggttttgatttgcatttctctaatgatca

SEQ ID NO: 278307 - DNA, 604 bp, Homo sapiens
cttgaaccaggagaaaacaaacaaaggactgagtgacccagttctaagcttcacctaacctactataaaaaaaaagaggttgaaatcacagtttaagaactaataagcaaatgacactagcaaacagagttattaaaactatttttagatgcaaaaatatatatagttagattacataacaattttactattactctgtattttatgtttctcagaatttactgcccacattttctggcttataaatagtttaattatgaatatttaacattttctaggtaaactaaatcaactatacaaattcattacgcatttgaaataagttatggatattacctgcttsatcagtttgaggaataaaattttttaaaatccttttatattcaaattacaaggacactgaacccctttctccttcttctgggcttcttcctgggagatcctcaggatatttacagcccttcacaaggctaggcttcagcaacctggccagagagcaggaacccataggcccagatgaagctattctcaagacaaaagaaagtgaaaattcaatgcttctcttgattttcctgtggctattgacattttgtgtttaacaaca

SEQ ID NO: 278308 - DNA, 580 bp, Homo sapiens
acaaaacaggcacagaaaaaccaacatcacgtgttctcacttatttatgagatttaaaaattaaaacaattgaattcatggagatagagagtggaaggatggataccagagactggaaagggtagagcggggatggtggtagggagttgagggatgattaatgggtacaaaaggatatagaaagaatgaataagacctgctatttgttagcacracagggttactatagtcaataataatttaattgcatatttaaaaataactaaaagagtataattggattgtttgtaacacaaaggataaatgcttgaggggataaataccccattctccatgatatgattattacatgttgcacacctgtatcaaaacatctcatgtacccaataaatatatatgcctgctatgtacccacaaaaatttaaaaaataaaaaagttacacaaagtttgcaactcacactacagtgcaaaaatatgagaagaatgtttttcctagttaagaggagaaaattgttttaaaacaattaagaagaaatattaatatgcttcctaccactgcatattagcttatgttgacaa

SEQ ID NO: 278309 - DNA, 548 bp, Homo sapiens
atttgtttgattcttaataatgttgatcatgttttcatgtgtgtattggccattcatacatattctttttaaagtgtcttttcaaatttttggcacattaaaaagtatcaggctgcctgtcttattatttagttgtaagaattctttatatatttcggatactagtaaaacatttagttttcatttttcacatgtaggtgaatattagatggagtttaaaatgaattgtggaaaaatgacaatcccatacatctaacmgtacatttcaagcaggatcatatatcttttttatttttataagtacaacagttctgtgaggaaagaaggatagttataattctcctcactttcagaataaagagaccaagttttagataggaaatagagcacttcttaggcatgtgggctttggaactagatgacctctgtttaaattgtgacctattcactagctgaggaacctctagcaagttgatagggagtctctaaaactcagttttattactgctaagatgtgagaaataatagtacttaaataaagagtaaga

SEQ ID NO: 278310 - DNA, 899 bp, Homo sapiens
cctgttcaagattgcacaactagtcaggggcagagatgggattttagcccattttattcaaaagtccatgctttggtgcctccctctagctagtaattatggtcattaagctctgtttcctgttttacaattgattgctggtccacgcagcccatggccatggccattgctctctgtacgggacccactttgacagggaaactcagtgtggggcaggggctcctgcacctgcctgcatccctcataatggctctagcttgaagktgtggtgtctggtaaaaccagtgatctttgtagcggcagtgccaggacaacagtaggtttgagaaagatgggtcagggagggaggggcctccctttaagacaaagcacccaggtgcaaatccaggttgtttatctgaacacctgaaaatacacgggcaaagaggaagaaaaaaacaggtactaaawcctgttcaagattgcacaactagtcaggggcagagatgggattttagcccattttattcaaaagtccatgctttggtgcctccctctagctagtaattatggtcattaagctctgtttcctgttttacaattgattgctggtccacgcagcccatggccatggccattgctctctgtacgggacccactttgacagggaaactcagtgtggggcaggggctcctgcacctgcctgcatccctcataatggctctagcttgaaggtgtggtgtctggtaaaaccagtgatctttgtagcggcagtgccaggacaacagtaggtttgagaaagatgggtcagggagggaggggcctccctttaagacaaagcacccaggtgcaaatccaggttgtttatctgawcacctgaaaatacacgggcaaagaggaagaaaaaaacaggtactaaa

SEQ ID NO: 278311 - DNA, 651 bp, Homo sapiens
  misc_feature (1)...(651): n = A,T,C or G
tttaggtaagggtttcaaaatttagaaggtatttttttccaaattaagggaaaaaagatacaactacagtcatgcataacttaacaacatggatacattctaagaaatgcatcattagcnatttttcttcattgtgcaaacatcatagggtatacttacacaagtctggatggtacatcttgctacaccctaggttatacaatatagcctgatgacaaaaaaaggaaactgaggcaaaattaatattgagagtttatttgggccaaggttgaggackgcagccccagaaactctgggaagtgctcatttcagccctccttacaagctggtttttaaaaggcaaaagggcacaaggagtgagctgatagaaaactgtttgaataggaattctcactggtttacagaaataacatcgattagtaacttgctacacattgttgaactacagagtatgagtttcagcttctgacatgtggcattttatggctacatggcatcagatagtctagcacccacatagcgaagtcttcaagaggtaattatttagctcaaagggtgagtgagatgagactgctgtcacattttaatgtctctctgggcctgataatttaaaaggggctcatattcctcagataaaaatttcttttctct

SEQ ID NO: 278312 - DNA, 651 bp, Homo sapiens
  misc_feature (1)...(651): n = A,T,C or G
tttaggtaagggtttcaaaatttagaaggtatttttttccaaattaagggaaaaaagatacaactacagtcatgcataacttaacaacatggatacattctaagaaatgcatcattagcnatttttcttcattgtgcaaacatcatagggtatacttacacaagtctggatggtacatcttgctacaccctaggttatacaatatagcctgatgacaaaaaaaggaaactgaggcaaaattaatattgagagtttatttgggccaaggttgaggactgcagccccagaaactctgggaagtgctcatttcagccctccttacaagctggtttttaaaaggcaaaagggcacaaggagtgagctgatagaaaactgtttgaataggaattctcactggtttacagaaataacatcgattagtaacttgctacacattgttgaactacagagtatgagtttcagcttctgacatgtggcattttatggctacatggcatcagrtagtctagcacccacatagcgaagtcttcaagaggtaattatttagctcaaagggtgagtgagatgagactgctgtcacattttaatgtctctctgggcctgataatttaaaaggggctcatattcctcagataaaaatttcttttctct

SEQ ID NO: 278313 - DNA, 437 bp, Homo sapiens
ttgggactacggcagatttcataatttgccttgcgcatttgggaactgytagtaaatcttctttctcatcactgacatcagtatgtttttgctccaaatttgtatttagtgaaggctgaactcctaattgtcattgccccatagtaaagcatagttgagcctgactgacagactaatgaagctcaagttactgggaacggaggttttacgaggttgccctgagattgatcccactgagctgggagtccagagggtcccatgaaggctactctgcttcatgacctcaggagagttgatgcaaagaagatagagcagctgaatttggttcaaagccaacctggcagtggtaagagtattaatatacaagacaagtgtttacagatgaagatgttgtggaataggatgggaggaagtaggattaactagtacaattattc

SEQ ID NO: 278314 - DNA, 646 bp, Homo sapiens
agtaaatgccataaatgtctttgaaggaaaaaatagtatgcattccttctaaaattagtttagatatggtgaggccttttcctgagagtaatggttttatttttctttgactccagtggtaaatgaacagcattggctatctctccacagggccaccaactacaaaggaactggaagacctctgaaatttgggactacggcagatttcataatttgccttgcgcatttgggaactgctagtaaatcttctttctcatcactgacatcagtatgtttttgctccaaatttgtatttagtgaaggctgaactcctaattgtcattgccccatagtaaagcatagttgagcctgactgacagactaatgaagctcaagttactgggaacggaggttttacgaggttgccctgagattgatcccactgagctgggagtccagagggtcccatgaaggctactctgcttcatgacctcaggagagttgatgcaaagaagatagagcagctgaatttggttcaaagccaacctggcagtggtaagagtattaatatacaagacaagtgtttacagatgaagatgttgtggaayaggatgggaggaagtaggattaactagtacaattattcatcaagtctaaatcattatag

SEQ ID NO: 278315 - DNA, 646 bp, Homo sapiens
agtaaatgccataaatgtctttgaaggaaaaaatagtatgcattccttctaaaattagtttagatatggtgaggccttttcctgagagtaatggttttatttttctttgactccagtggtaaatgaacagcattggctatctctccacagggccaccaactacaaaggaactggaagacctctgaaatttgggactacggcagatttcataatttgccttgcgcatttgggaactgctagtaaatcttctttctcatcactgacatcagtatgtttttgctccaaatttgtatttagtgaaggctgaactcctaattgtcattgccccatagtaaagcatagttgagcctgactgacagactaatgaagctcaagttactgggaacggaggttttacgaggttgccctgagattgatcccactgagctgggagtccagagggtcccatgaaggctactctgcttcatgacctcaggagagttgatgcaaagaagatagagcagctgaatttggttcaaagccaacctggcagtggtaagagtattaatatacaagacaagtgtttacagatgaagatgttgtggaataggatggraggaagtaggattaactagtacaattattcatcaagtctaaatcattatag

SEQ ID NO: 278316 - DNA, 629 bp, Homo sapiens
atgacccagcaattccataccccccagaattgaacagggactcaaacagatactttttaaccaacgtttatcagactactatgaaaggtggaaacaactgaaatgttcattaactgatgaacggataaataaaatgtgctacatatatattacatatatgcataatatattatgtgtaartattatctatatatacatattatgcatattatatacatacacatacaccccaatattattcagccataaaaaggaatgaagtactgatacacactacaatatggatgaaccttgaaaacattatactaaacgaaagaagccaggcaaaaatgaccatatagtgtatggatccatttatacgaaatatcatgagtcagcaaatttatagcgctaacagcttagtggcttccaggatcagaggtgggaggaaaatggggagtaactgcttaatggatatgggttccctttttgagtgatgagaagtttgagtgatgatggttgcaccgctaaatatcaccaatggtaaattttatgctatacatattttaacacaataaaaaagcacaggtgataaactgcatacgtcaaaatgtaatactcctacacattaaaagacaccataaatgatg

SEQ ID NO: 278317 - DNA, 607 bp, Homo sapiens
gtttgtagtcataaatctctgcaagaatccacggcccaggacatagaaaagcctttgagggatgagtagttggctactggagaccttctggagagcactttcagcaaagcagtggtgaagaagcccaaccccagagggttaaacagggagagggtgggagaatggggtgtggtgaccagaaaaccaccttatcaagaagaaagaggacagtagtgagaaaagagggataaacttataattcttttttcaggctaatgatacttgggctcatttatacgtagaggrtaagttagtggaaattgttagagaaaaaagatagctgaagtgacaaagtcctttttgaggtgggaggtaaagttatcaaagatgtgagaaaggctcagagcaccacagagaggaaggaagtcaaggggaagggaagggagggcctgtgaagatgtattgtgaggtcgtgaggcacaggctgaagaagtctacttttgatgaccaaaatctcccataaagaaggaagccattgccagtgctgaaagtagtaggttcagctggaggtggagatttaaggattgtagtaatcattcacaaaaacctgcagaaagtcaacaaaagt

SEQ ID NO: 278318 - DNA, 594 bp, Homo sapiens
cgaactcaggagtaagtccaatcataacaaacctgcatgttgtgcacatgtaccctraaacttaaagtataataataataaaattaaaaaaaaaaattgcaatgaatgtgtttagaaccgatcatgctctggttaaaaatacagggagaagatataagcttttttttttttcctactaaaatgcctcaaccggggaaggcaataaaaatacagtcaagtcaaagctcaaatgaaagtatattttaggcaaagcatagggtcctatgatgatcttaaactgagtaagcacttggaatctaattggaaacacaggacaaactagaaggtaaaaatcatacagtgtagtgcaaatgttacaaagtactaaagtatgagttatagattttaaaacaataaagccccaaatcagcgataattgatgtttaagattagtctagcggtgcgttgtataaacacctgggcaaacaaagttggtagcttgccagcatcaatttcttatcactacaaaatagaatatggaaacaataactgtcatgacacacaattcataatgaatttagaaaatactttttattccccccaaattaaaaaaca

SEQ ID NO: 278319 - DNA, 531 bp, Homo sapiens
  misc_feature (1)...(531): n = A,T,C or G
tatacagattaccgaagagttggttttaactcaacacrgacttcatccagatggtatatctacattttgtatgaaacaaaaaggagcactaggtccttaggtgagtctaagnacttacctaagcttgtttaaagtaatgtaaagtaatgaaatgtaagtaaagtaatgaaagcttgtttaaagtaatgtaagtgttaatcggacagtatataaaaatccacactaggaaactgccagacaatgaaatattgctggcaactgtctactaaaaagaaagccaagcccttttctttcatttaaagaaaagtaatttcctctgcaaaatactataaaattatatttattgattcatctggggccttttcaaattaactggacaattatcctaacacacctctccaaaaaaagaatacaaaaaacatgttcttcctctgacaataaaacatgcatgtacttacacattgaaggtacaaacaaaagttaaatttcaaaaacaactgtatttttttcatcatgtcatactgttaaatc

SEQ ID NO: 278320 - DNA, 547 bp, Homo sapiens
atgtttcccaaggtggaccagagggtaagaagcaccaggggagtgctttaggccaacagaggtgaagtccatttatgaacttagccaattgtgttttaattattccattggtcctttccgccagctctgaggactggggatggtaggcacaatggaaatgttgaaatatgggccaaatttcacaaatattttgaataacttgaccaggaaaatgagttcttctatcacgtaaagttcacagtggactccccacagtggaataaytttttctaataaagttttccaactgccatcgctgttgcttgcctgcagggaaaagcttcaacccaatgggaaaacatgcagaccattactaagacatgtaaccttgagaggatggcggctggataaaatcaagctgccatacctcaaaaggtccagctggaaggggaaaatgaccctgggcctcatggaggagcttccgtggattatccttaggacaaatagcacactgggaataaaccttttgtgccactgtggaggatcgtttccagtaacattgtttaca

SEQ ID NO: 278321 - DNA, 500 bp, Homo sapiens
actacatgacaacttaattattctagccagagaactacaaattactagcagatcgtaagttaggattttgagtctcatgctttacattttacagacctgagaaatctagctagtggaaatattccaagtctttaaaacatgattctgggatgaaacaaagtggcaatttttaaaatatatattttaagactgattttacctcttttgttgtgattttatgatgagcaatttataaacataaacattaatatrtttaacatgatatagctaataaccagttcttccatgctcctatctaaatgctaacatttagacaccatagtagcaggtgtctaggcttcagatgaaacagggactcagtcccatcagcatctcggggttggtaaaacttctatgtgtatttggcctggggacggggaagctcacaaagctcttctcttctcccagagattctctcttttattttgcaccaagttttctagtgggtagagccacagggt

SEQ ID NO: 278322 - DNA, 500 bp, Homo sapiens
actacatgacaacttaattattctagccagagaactacaaattactagcagatcgtaagttaggattttgagtctcatgctttacattttacagacctgagaaatctagctagtggaaatattccaagtctttaaaacatgattctgggatgaaacaaagtggcaatttttaaaatatatattttaagactgattttacctcttttgttgtgattttatgatgagcaatttataaacataaacattaatatatttaacatgatatagctaataaccagttcttccatgctcctatctaaatgctaacatttagacaccatagtagcaggtgtctaggcttcagakgaaacagggactcagtcccatcagcatctcggggttggtaaaacttctatgtgtatttggcctggggacggggaagctcacaaagctcttctcttctcccagagattctctcttttattttgcaccaagttttctagtgggtagagccacagggt

SEQ ID NO: 278323 - DNA, 543 bp, Homo sapiens
ctagaggccattatccttagcaaactaatgcrggaacagaaaacagcatgttcacacttataagtgggagctaaacgatgagaacacatggacacatagaggggaataacacacactggggcctattggagagtggaggatgagaggagggagaggatcaggaaaaataactaatgggtaaaaggcttaatatctgggtaatgaaataatctgtacaacaaacccccatgacataagtttcctatataacaaacctgcccatgtacccctgaacttaaaataaaagttaaattaagaaaaaaaaaaagatagggctttctttctttcaactcctttttcttctctgctggagttctaagccagaatctgttacaacatacaagggaatatattatttcctcttgtccctccttccacctggctgggccaggactagaccccagttgtggccccagttgtggctgagggaaagcacattcatgtcatgtccctctgtggtgtcttccagccaggtcctgacaggtgtgtgttaggtcagtctct

SEQ ID NO: 278324 - DNA, 556 bp, Homo sapiens
atcatggcctttgcaagaacatgaatggagctagaggccattatccttagcaaactaatgcaggaacakaaaacagcatgttcacacttataagtgggagctaaacgatgagaacacatggacacatagaggggaataacacacactggggcctattggagagtggaggatgagaggagggagaggatcaggaaaaataactaatgggtaaaaggcttaatatctgggtaatgaaataatctgtacaacaaacccccatgacataagtttcctatataacaaacctgcccatgtacccctgaacttaaaataaaagttaaattaagaaaaaaaaaaagatagggctttctttctttcaactcctttttcttctctgctggagttctaagccagaatctgttacaacatacaagggaatatattatttcctcttgtccctccttccacctggctgggccaggactagaccccagttgtggccccagttgtggctgagggaaagcacattcatgtcatgtccctctgtggtgtcttccagccaggtcctgacaggtgt

SEQ ID NO: 278325 - DNA, 543 bp, Homo sapiens
ctagaggccattatccttagcaaactaatgcaggaacagaaaacagcatgttcacacttataagtgggagctaaaygatgagaacacatggacacatagaggggaataacacacactggggcctattggagagtggaggatgagaggagggagaggatcaggaaaaataactaatgggtaaaaggcttaatatctgggtaatgaaataatctgtacaacaaacccccatgacataagtttcctatataacaaacctgcccatgtacccctgaacttaaaataaaagttaaattaagaaaaaaaaaaagatagggctttctttctttcaactcctttttcttctctgctggagttctaagccagaatctgttacaacatacaagggaatatattatttcctcttgtccctccttccacctggctgggccaggactagaccccagttgtggccccagttgtggctgagggaaagcacattcatgtcatgtccctctgtggtgtcttccagccaggtcctgacaggtgtgtgttaggtcagtctct

SEQ ID NO: 278326 - DNA, 543 bp, Homo sapiens
ctagaggccattatccttagcaaactaatgcaggaacagaaaacagcatgttcacacttataagtgggagctaaacgatgagaacacatggacacatagaggggaataacacacactggggcctattggagagtggaggatgagaggagggagaggatcaggaaaaataactaatgggtaaaaggcttaatatctgggtaatgaaataatctgtacaacaaacccccatgacataagtttcctatataacaaacctgcmcatgtacccctgaacttaaaataaaagttaaattaagaaaaaaaaaaagatagggctttctttctttcaactcctttttcttctctgctggagttctaagccagaatctgttacaacatacaagggaatatattatttcctcttgtccctccttccacctggctgggccaggactagaccccagttgtggccccagttgtggctgagggaaagcacattcatgtcatgtccctctgtggtgtcttccagccaggtcctgacaggtgtgtgttaggtcagtctct

SEQ ID NO: 278327 - DNA, 482 bp, Homo sapiens
tcttgtccctccttccacctggctgggccaggactagaccccagttgtggccccagttgtggctgagggaaagcacattcatgtcatgtccctctgtggtgtcttccagccaggtcctgacaggtgtgtgttaggtcagtctctaatgagagctctaagatcaggatgtgtcctgggtgacatgttagggggatgggggaggaggaagtgatgagtgagagaaagaaatctgaacttacagcttccttggtctgaagccatatgktctaagtggcttacagaaaaaggagggctccataaagcagaacccaccttaccaggccctcttaaaatagggatgagagtctgagccacaacaaaaattagaatgagactttccttttctcaccattattcctgtacattgacctcccttagagatcatagggaaagggctggctatgagtaaactctagattccatggtcacagtgacctctaata

SEQ ID NO: 278328 - DNA, 544 bp, Homo sapiens
aacatacaagggaatatattatttcctcttgtccctccttccacctggctgggccaggactagaccccagttgtggccccagttgtggctgagggaaagcacattcatgtcatgtccctctgtggtgtcttccagccaggtcctgacaggtgtgtgttaggtcagtctctaatgagagctctaagatcaggatgtgtcctgggtgacatgttagggggatgggggaggaggaagtgatgagtgagagaaagaaatctgaacttacagcttccttggtctgaagccatatggtctaagtggcttacagaaaaaggagggctccataaagcagaacccaccttaccaggccctcttaaaatagggatgagagtctgagccayaacaaaaattagaatgagactttccttttctcaccattattcctgtacattgacctcccttagagatcatagggaaagggctggctatgagtaaactctagattccatggtcacagtgacctctaataaaagcctccttaatgaccatgggttgctcaaataga

SEQ ID NO: 278329 - DNA, 536 bp, Homo sapiens
atgagagtctgagccacaacaaaaattagaatgagactttccttttctcaccattattcctgtacattgacctcccttagagatcatagggaaagggctggctatgagtaaactctagattccatggtcacagtgacctctaataaaagcctccttaatgaccatgggttgctcaaatagagttaaacaagaatctaagtgcttctgatttctctggagcctagaaaccctactgcaaaacaatctaatcatctctctccacaattagactattgakattcaaataatacatgatatgtctagtgtagtggctggggttgggaggggtcacagaagccagaagggaaaaataagtgctccttaaagaaataagaagtaaggaaagtctaacacagtggacatcaccacaggacatgaatgtcagaaaaagtggggtttgtagggacatgtgaattcagacttgaactcttccagctcacactcaccagagagccaatgcatcctgagaaggaaaaggctgaatgaggcagaagggg

SEQ ID NO: 278330 - DNA, 391 bp, Homo sapiens
ggctctcaaagctacacttttatgtagtagagaattctaccaagataagcaaacttaacctaaaattaacaaacttgtgagacctagacaaatttaactcatacacaatttaaatttaaatttagaggcattttagtcctttatcatagattgcacaaaaaaycagaattatagtttattatttttctagctctggaaatacctgtttcattgttaaaggagaaattaattccaaaatgtagcattgcttataatgacaaaaaaaaaatgaaaacacaatatgcattgtgaagggaatggatacataaaatgtggcgtgttgctccccggttccaagatggccgaataggaacagctgcagtctacagctcccagcatgaacgatgcagaa

SEQ ID NO: 278331 - DNA, 602 bp, Homo sapiens
actaattaatctatattttataagatctcactccacttattctgtgatatctcctggtctctgatttctttccaaatgactgaatgtatacaggcatactttgttttattgtgtttcacagatactggattttttacaaattgaaggttcgtggcaattatgcaccaagcaagtctatcagggccattttttccaacagcatgtgctcactttgtaagtctgtgtcacttattggtaattctcacaacatttcaaactttttcatttttattatctctgttatggtgatctatgatcagttatctttgatttactattgtagatgtgttggggctcattaactgcacctgaacttaatcgataaatgtgtgtgatctgacttycccactgactaaccattctatctctctctctctcctccagcctccctagtccctgagacacaagaatattgcagttaggccaattaataacccaacaacggcctctgagtattcacgtgaaagggagagttgcaccctgattagtcagcagccatcaacatggaggcaaaaccctccaccagcaagaagattatgactcactgaaggctcaggtgattg

SEQ ID NO: 278332 - DNA, 568 bp, Homo sapiens
aaatgctggtgaggatgtagaaaaaagggaaacctcatccactgttggtaggaatgtaaagtagtataaccactaaggagaacagtttggaggttcctcagaaagctaaaaatagagctatcatatgatccagcaatggcactgctgggtatacacccaaaagaaaggaaatcagtatatcaaaggaatatctgcactctcatgtttgttgcagcattattcacaatggccaagatttggaagcaacataagtgtccatcaacagatgaatgaataaagaaaagtgatacatatacaaaacatagtattattcagccataaaaaagaatgagatcctgtcacttgcaacaacatggatggaatttgaggtcattgtgttaagtgaaataaaccaggcacagaaagacaaactttgcatattatcacttatttgtgtgagctaataattaaaacaaytgaacttatggagatagtaggagaattgttaccagaggctcagaagggtagtcatggggatggggggaagtggggatggttaatgggtccaaaaaaatagaaagaatgaata

SEQ ID NO: 278333 - DNA, 598 bp, Homo sapiens
gctacacagaccaggataagtaggtgaaagctatcaggagacaattttctagcagcaagagatttctaatgatggaaacataagccttagaaaagggtgagggtgtaggtttggcaatctctgtgagagagttaaagagttttggactagatgatctttatmgttccagagccttctagcccagtgattaagcggccgtaatgaaaaactcgtttgggggaaccaattctattccctatacctacttcctggacccatatttcacagtgaatttcatcagatctcttcaatccaaatccaaaagacagtgctaatttatatcattttaaataatgagtacactaaagtagatcttttaaagggaaaggagatagttagaatgtcttgtcttatttagctgggcgttcatgtttcattactacatgatatgataagaaaattcttcacaaatcaaatccaaatttgttcaactattctgcctaacccagactctgggaatccatccaaaaatctgctaaattacatgcagttccaaagtgtccatcttttacagcccccagtaattcttggcttcactggtcagttatcaaaagcatca

SEQ ID NO: 278334 - DNA, 531 bp, Homo sapiens
ccattccctggctccaaccaagcccactggctcctgggctttggtcaccctactctcacacaactcagtttatagcaagcttcagtctgtggagttttcttaccttttttttacttgttgttaattgctgcattctgtgtttccatctagcatctatagtttttctagagttgattttgggggagggatccagcagcctgtcctagattaactcttggcaggaatcagaactgtcttacaatttctcttcctgtagccctgacctcattaatacttgttcaaagtgtatgaagcaaatatttgggaggtaatttatgaaktctatttattttcatccagcaaattatataagcagttggggacccctgtttatcctcttagtaggaaaaagaagcttcatttgggcagtgacatgtagtagcaaaacttcccgcgttctcttttatttttcaaaagacatctagaaaacaaattttacactggataaaagtaaagcagctcagctggaataggagaggggctgcactaggc

SEQ ID NO: 278335 - DNA, 621 bp, Homo sapiens
tctaagctagtttttattctgattttgttaacttcacagtgatagaaataatgtatctgaaaaatcgctcccaggtattgtgttttaggcaaaggccagcaaagcaagcaccagcctaatgataggttttccagataactttgaacaactgaaacatgttagttttaaargacattttaaacagttctcttgtggaatttatggcttctgatgcaattttacactgttcatacttttaaaataaagtactattaaggccataaaagtgtctaggacacacaaaacagaaactttgaatgatgttgaaggcagattctaagatgacctccaatgactcttacccttgtctgatcccctctcatataagtgtgggtgaaacctatgactataatgagaaattactctcatgatatgttatatgacaaaagaaagattatctgtgggaggaggcttgaagacccctgtttagaggcattttataacttcctcctttactaagaaccaaaattgtgagttacataatcacactttgaatagataatccaaaagagaaaactagaattcaaaagaaaagtgacaggaaatacctaaagcaaggaaggaaaaggaagcaaggcagcc

SEQ ID NO: 278336 - DNA, 585 bp, Homo sapiens
acctggaggcccaagaatcagcttgcttggacacactaactccaggtaccagcatatcccttctgggtcctggggacaggcaagctcagctcaccactgacaccattggggcytgaagactggcccaactggcatcctagtccccagaaaaacttcaccacagcttccactaataactgcatcctaagccactgaggaaatcacagatatcactgatgttattatctgaagaaatcacacagagactacattcctgcatgcacccagaattgaagccaaagtgccctccttaaccaacatcatagattcatctccaggaaatagtcccttcatatgaaagtaattcaaaaaatttgaagaagcaatggttacaccagatgaagagatatcaatattagtacactggaagcataaaaaaacaagggacatgacatctccaaaggaacataaaaattctctagcaacagattgcaaccaaaaataaattcgcaaaatcccagaaaaagaattcaacttactgattctaaagaagctcattgagatactagataattttgaaaaataataaaaagatatcagaaaaac

SEQ ID NO: 278337 - DNA, 585 bp, Homo sapiens
acctggaggcccaagaatcagcttgcttggacacactaactccaggtaccagcatatcccttctgggtcctggggacaggcaagctcagctcaccactgacaccattggggcctgaagactggcccaactggcatcctagtccccagaaaaacttcaccacagcttccactaataactgcatcytaagccactgaggaaatcacagatatcactgatgttattatctgaagaaatcacacagagactacattcctgcatgcacccagaattgaagccaaagtgccctccttaaccaacatcatagattcatctccaggaaatagtcccttcatatgaaagtaattcaaaaaatttgaagaagcaatggttacaccagatgaagagatatcaatattagtacactggaagcataaaaaaacaagggacatgacatctccaaaggaacataaaaattctctagcaacagattgcaaccaaaaataaattcgcaaaatcccagaaaaagaattcaacttactgattctaaagaagctcattgagatactagataattttgaaaaataataaaaagatatcagaaaaac

SEQ ID NO: 278338 - DNA, 585 bp, Homo sapiens
acctggaggcccaagaatcagcttgcttggacacactaactccaggtaccagcatatcccttctgggtcctggggacaggcaagctcagctcaccactgacaccattggggcctgaagactggcccaactggcatcctagtccccagaaaaacttcaccacagcttccactaataactgcatcctaagccactgaggaaatcacagatatcactgatgttattatctgaagaaatcacacagagactacattcctgcatgcacccagaattgaagccaaagtgccctccttaaccaacatcatagattcatctccaggaaatagtcccttcatatgaaagtaattcaaaaaatttgaagaagcaatggttacaccagatgaagagatatcaatattagtacactggaagcataaaaaarcaagggacatgacatctccaaaggaacataaaaattctctagcaacagattgcaaccaaaaataaattcgcaaaatcccagaaaaagaattcaacttactgattctaaagaagctcattgagatactagataattttgaaaaataataaaaagatatcagaaaaac

SEQ ID NO: 278339 - DNA, 558 bp, Homo sapiens
tgaccttttctgtaagaggaaaggcaaatggaaacaccttatgtccaagatttcttttcattgaaagagaatacacaactatgcaaagcttgcaatttacatcccacaggaggacctttcagcttacccccatatccttgcctccctatagctctccttcctattaatgataarcctcttctaatctcccctgcccagaaggaaataagcaaacaaatctccaaaggaccacaaaaacccccaggctattggttttgtccccttcaagctgtagggggaggggaatttggcccaacctgggtacatgttcccttctgcttctctgatttaaagcagatcaaggcagacctggggaagttttcagatgatcctgataggtatatagacgtcctacagggtctagggcaaaccttcaactttgcttacctggtatcttagtcaagtaaatgatagaatgacagctgaagaatgggacaaattccctactggtcagcaagccatccccagtatggatccccgctgggaccttgactcagatcatggggaagagagtcgtaa

SEQ ID NO: 278340 - DNA, 558 bp, Homo sapiens
tgaccttttctgtaagaggaaaggcaaatggaaacaccttatgtccaagatttcttttcattgaaagagaatacacaactatgcaaagcttgcaatttacatcccacaggaggacctttcagcttacccccatatccttgcctccctatagctctccttcctattaatgataaacctcttctaatctcccctgcccagaaggaaataagcaaacaaatctccaaaggaccacaaaaacccccaggctattggttttgtccccttcaagctgtagggggaggggaatttggcccaacctgggtacatgttcccttctgcttctctgatttaaagcagatcaaggcagacctggggaagttttcagatgatcctgataggtatatagacgtcctacagggtctagggcaaaccttcaactttgcttacctggtatcttagtcaagtaaatgatagaatgacagctgaagaatgggacaaattccctactggtcagcaagccatccccagtatggatccccrctgggaccttgactcagatcatggggaagagagtcgtaa

SEQ ID NO: 278341 - DNA, 359 bp, Homo sapiens
tttttttgcttttgttttgtctgttttatctgatataaatatagccattcccactagcttttgttttccatttgcatgggaactttttccgttcctttcctttcagtgtataaatttcctaaaaggtaaagtgtgtttcttataggcagctgataattgcatcatgtattttctttttaaaaatccattcagctagtctatacctctaagtgcataatttaactsattcacattcaaggttattattgatctgcaaggttttgtttttctcatattgttaattctttttgtttttaaaaatatattctttgttcctttctttttctcttattgtttttcattgtagtttggctgttatc

SEQ ID NO: 278342 - DNA, 549 bp, Homo sapiens
tttagtttaatatagtcccatttgccttttttttgttacctgtgcatagccataaaatctttgttattttctctatccctgtatcatgatataatatatcatatatatcatatatatgatataataattttctttgtctttttttgcttttgttttgtctgttttatctgatataaatatagccattcccactagcttttgttttccatttgcatgggaactttttccgttcctttcctttcagtgtataaatttcctaaaaggtaaagtgtgtttcttataggcagctgataattgcatcatgtattttctttttaaaaatccattcagctagtctatacctctaagtgcataatttaactcattcacattcaaggttattattgatctgcaaggttttgtttttctcatattgttaattctttttgtttttaaaaatatattctttgttcctttctttttctcttattgtttttcattgtagtttggctgttatcygtagcggtaccatttgagttctttctctttctcacttgtgtgtttgcttta

SEQ ID NO: 278343 - DNA, 597 bp, Homo sapiens
agcagtgggcatcaacagcatactataagacagaaagagtgaaaactagaagaactataaaattagaagcaagaagtcaataagcagggaagtctcaggatgtttagcactgtggccaacagacgatgatacttttgtgcccctgatggcaggaataagcttaataagaaatgtacagaacattttttaagaaaataacaatacattaccaaaacatagtttttaaaaacattctaaaaattaacagatattctatgtttctgaatgagaagattcaataaagatgttagtgtgtcctaaattaacatatatgttatgcgactacaactgaaagtctaaacaagattattattttattttgtaaagcgattctacatatkaaaataatgaatacattttagaaaaagagagaaggaagtagaaggactcatgcttctgaataccataacattttaaaagaatgtactgatttaaatagtttagaaagggggcaagagtaaaacaaaacagaaagctccaaagtagaccctaatattataaaaatttaggattttataagaaaacagaatacatggggaaaggaaagatcatttaaca

SEQ ID NO: 278344 - DNA, 597 bp, Homo sapiens
agcagtgggcatcaacagcatactataagacagaaagagtgaaaactagaagaactataaaattagaagcaagaagtcaataagcagggaagtctcaggatgtttagcactgtggccaacagacgatgatacttttgtgcccctgatggcaggaataagcttaataagaaatgtacagaacattttttaagaaaataacaatacattaccaaaacatagtttttaaaaacattctaaaaattaacagatattctatgtttctgaatgagaagattcaataaagatgttagtgtgtcctaaattaacatatatgttatgcgactacaactgaaagtctaaacaagattattattttattttgtaaagcgattctacatatgaaaataatgaatacattttagaaaaagagagaaggaagtagaaggactcatgcttctgaataccataacattttaaaagaatgtactgatktaaatagtttagaaagggggcaagagtaaaacaaaacagaaagctccaaagtagaccctaatattataaaaatttaggattttataagaaaacagaatacatggggaaaggaaagatcatttaaca

SEQ ID NO: 278345 - DNA, 594 bp, Homo sapiens
ctaaggatggcagagcaaaaagctaaaaggaacctgggattcctatacagcccttgacagcttccctgccaatttggtattagggagctataaatcaaatcccagtcatatcagccattaagcagttaggtcttctgttacttagagatgaatgcatttctaactgatacatgaatccacaacaatctgccatgggctcatgtgattacattctgccttsctctccagtatcacagtcaaggtctgagtttaggacttctgcagggacaaaatctaatgactcttctaaatcacttttagacatcagcagttatgcatagcaccgtgaatgatctgctgtttatcacacaggatcatgatcttgccttttcaccatctttaagactgacaatggaatctcaaggtatatggaagatattaactccatttcttgtttattttttttcctagttgacctccatgtcaaatgaagttaaacagtctttcctgaaagtcaggcaagtttttgacagaaatgtgttcattatatgtacaataatctcttaattacacaaaaaaagagcaagctctcttagctttgaaaattgtatgata

SEQ ID NO: 278346 - DNA, 594 bp, Homo sapiens
ctaaggatggcagagcaaaaagctaaaaggaacctgggattcctatacagcccttgacagcttccctgccaatttggtattagggagctataaatcaaatcccagtcatatcagccattaagcagttaggtcttctgttacttagagatgaatgcatttctaactgatacatgaatccacaacaatctgccatgggctcatgtgattacattctgccttgctctccagtatcacagtcaaggtctgagtttaggacttctkcagggacaaaatctaatgactcttctaaatcacttttagacatcagcagttatgcatagcaccgtgaatgatctgctgtttatcacacaggatcatgatcttgccttttcaccatctttaagactgacaatggaatctcaaggtatatggaagatattaactccatttcttgtttattttttttcctagttgacctccatgtcaaatgaagttaaacagtctttcctgaaagtcaggcaagtttttgacagaaatgtgttcattatatgtacaataatctcttaattacacaaaaaaagagcaagctctcttagctttgaaaattgtatgata

SEQ ID NO: 278347 - DNA, 594 bp, Homo sapiens
ctaaggatggcagagcaaaaagctaaaaggaacctgggattcctatacagcccttgacagcttccctgccaatttggtattagggagctataaatcaaatcccagtcatatcagccattaagcagttaggtcttctgttacttagagatgaatgcatttctaactgatacatgaatccacaacaatctgccatgggctcatgtgattacattctgccttgctctccagtatcacagtcaaggtctgagtttaggacttctgcakggacaaaatctaatgactcttctaaatcacttttagacatcagcagttatgcatagcaccgtgaatgatctgctgtttatcacacaggatcatgatcttgccttttcaccatctttaagactgacaatggaatctcaaggtatatggaagatattaactccatttcttgtttattttttttcctagttgacctccatgtcaaatgaagttaaacagtctttcctgaaagtcaggcaagtttttgacagaaatgtgttcattatatgtacaataatctcttaattacacaaaaaaagagcaagctctcttagctttgaaaattgtatgata

SEQ ID NO: 278348 - DNA, 618 bp, Homo sapiens
ttggactgttagaatccagagctcttgacttcttccagcggaaatagactacagtcttttcctcaactccccaaccaacggcttttgatagtctcacttaatgctctccgcataaacagttcaccatcacatttattacttattgcatttttccatatattattttagtagaaatgccacaaatagctttgaaatactgcaagtagcaaacttgttttaaatgccagcatggaagttggacttgaggcaaatagcctttctagtagaaatgggcaccctgataactccaggctttcatgaggcacaaagaacrggtcatcttgagggtcattattgtgagacatattcaccaactgaccctttatttttaaaaatttctttgtattataagagtccaggtttacacaggtggtgatgtttccattttaggaactccttttaatgtggaataaccacgtggctggtctctaccacgtggttaatgcacatcttgaggattcagtgatgattatttgtgcattgagtcttcctcatagactgtacattcctggagagcctgacctgtaacttacatttcccatgacttccttatggcataacacacagatgcagagccct

SEQ ID NO: 278349 - DNA, 593 bp, Homo sapiens
aaataatatcttaaacattatgttaaattgatgagaagttaacactgattgcatgatcaaacaaacaataggaaaatgaaaaaaaactcaacactttaactttgtccgcctgctttttaacttttcatagtttctatttatagcttattgtactgtctatttcttgaaaagttgttgtagttattatttttgattggtttaccttttagtctttctacttaagagtagtttatgtaccacaattacagtgctataatattttgtgtttttgtgtgtacttagaattaccagtgagttttttatcttcagaaaatttcttacattcattaatttttttttctttctgattgaagtactccctttagcatatcttgtaggacaggtgttgataaaatccctcagcttttgtctgggaaagtctttatttcaccttcaggtttcaaggatatttttgctggatataccattctaggataaaagttttttcccttccagactttaaatatgttaygccactctctcctgatgtgtaaggtttccacagaaaagtcttctgccaggggtattggagctccattgtatgttatttgttt

SEQ ID NO: 278350 - DNA, 569 bp, Homo sapiens
tttatttttctcactgcctttattacttccttccttcttatttaagtttattccgtagccctttccgtaacatcttgagttgaatgactcatcaatttatttttaaactttcttgtatcttgacaaatgtaaagttaaaatttctttgagtactgctttaggtatgtccaacaaaggctgaaaagcaaagtttgtattaytcgtcagttctgtatattgcttcttttcctctttaacacacggacaatttggtaacatatatttccaaacaggtgagatttttttttaaagctctctgtttgtttgttagtagtaactaattttaatgcattggtgctaggagaatgcagtatataaaccattgatactgtggaatgcatggaaccttcccttatagacaaatacaagatttaactttttaagtgttatatggtatgcttataaagatccaatattctctgttaggtgaaaagttctctattgtctaatagttggagcttattgtctaaattcttcaggttattgatattactgcatatttttttttctggctgatatattagtctcta

SEQ ID NO: 278351 - DNA, 569 bp, Homo sapiens
tttatttttctcactgcctttattacttccttccttcttatttaagtttattccgtagccctttccgtaacatcttgagttgaatgactcatcaatttatttttaaactttcttgtatcttgacaaatgtaaagttaaaatttctttgagtactgctttaggtatgtccaacaaaggctgaaaagcaaagtttgtattactcgtcagttctgtatattgcttcttttcctctttaacacacggacaatttggtaacatatatttccaaacaggtgagatttttttttaaagctctctgtttgtttgttagtagtaactaattttaatgcattggtgctrggagaatgcagtatataaaccattgatactgtggaatgcatggaaccttcccttatagacaaatacaagatttaactttttaagtgttatatggtatgcttataaagatccaatattctctgttaggtgaaaagttctctattgtctaatagttggagcttattgtctaaattcttcaggttattgatattactgcatatttttttttctggctgatatattagtctcta

SEQ ID NO: 278352 - DNA, 492 bp, Homo sapiens
ggcccagggccttgctgctctgtgcagccttggagcatggcaccctgcatcccagccactccagctccagctgtggctaagagagaccaaggtacagcttgggatgttgcttcatagagtgcaagccccaagccttagtggcttctacatggtgttgtgtgtgtgggtgcatgcagaagacaagaagtgagctttgggaacctctgcctatatttcagaggatgtatgaaaattcctggatgtccaggtagaagtccactgcaggggcagaaccctcatggagagcctctaccatgggaaatgcagaggggaaatgtggggttggagcccccacaaagagtcctcactggggcactgcctagtggaaccgtgagaagagggccaccgtcctccagaccccagaatggtagaccgaccaatggcttgcaccgggcacctrgaaaagccacagacactcaatgccagcttgtgaaagcagcaactggggctttc

SEQ ID NO: 278353 - DNA, 614 bp, Homo sapiens
agtgattaaaataccacaggcataaggagaaaaggagtatatgtagtagtaataattactagtataaattatttcttcacatgctatgagtaataatattaaaaaactcattttaccattaagattccttatgctgaagctcttccatttagaatactgtcaatgtcatttactggtatgaactaaagtcccccttcttttccactcactgggaaccttagtaaaacaccagcatatcttacctctctttctgactggccgatgcttccagagactgaatgttgggaaaacctagtagccaaacaattctaggacagaataacatttttatatttggttccaccatcttattacatttagttatagttttaaaaaagaaattcaagcccattaaaatatgtctggtcaatgaaatgcttccttttattgtgttgtgctattgtrctttgtttttcaaaacattgtaaaaatagtatctttggtttagtattttggattatatattataatctgaggagtgttttgcttatgtagaatccagatatatttctgttacctaggagatgttacttacatatgtaatactgtatcctgcacatggaaatattcagaat

SEQ ID NO: 278354 - DNA, 565 bp, Homo sapiens
atgtggagtcaatctctttggtacacaggaagctttataaaatttcattcacgaatctcttattttgggaagctgttttgcatatgagaagaacactgttgaaataaggaactaaagctttatatattgatcaaggtgattctgaaagttttaatttttaatgttgtaatgttatgttattgttaattgtactttattatgtattcaatagaaaatcatgatttattaataaaagcttaaattctcatctatttattatgtgttctttttattttagcataaagcatgtctatagcacacctcccttatttaagcttayttatgagaaacaggatatttgaggctagcttagagtagggattattgtgttgcaaggtagcaacataatgaagttgaagaaatttgattaccagcctcctttacctccccgctcagtggagaggtaagtaatacacaaattaaaaaaattaatgtgaggtgagcactcacttaatctctggaaattatatagaagtatatagaacacatagtttttatacacacaggaaaatggaggcacagattg

SEQ ID NO: 278355 - DNA, 566 bp, Homo sapiens
ctcttctccttcctactactgcctgtgcaaycatttctactatagtgaattcacaaatgggaccatgaagaagggaacaatttattcaaaatcattggtgataaatcaaaattatagagattcagatataggaatattgtgccccctgatctagttacgttgtcctgtcagcctgtataggaacatgaggcctcactgcccagactttgacagtgtcctatgctagctgaaaaacttgtgggtggattctcactgctttgtttaggctatctccctcttcttccctacagaaatcccctactttatctctttctccattctgaaattcccacgttttccacttttcctgtcagttactatgtttcaaaatcagcaagtcccaggtctccctttttcccttaagttttctgtttgtttcatggaagttgtgggccaaagctttctgtcttctgcccatctactgctaggtcatatccctagggtaaagaggtgatgaaagaactttggatgattctccactctgattggtagttggcttttattcccttttatgttattccaattat

SEQ ID NO: 278356 - DNA, 554 bp, Homo sapiens
actttggatgattctccactctgattggtagttggcttttattcccttttatgttattccaattatctaaaaggtcaggcaactgtgtgagttcaggatgagagagaaattaaattgcagcacccatgagaaagacttgatggttaagaaaagtatgagtcagtgacaagggagcaaatgcttcccgttttcacatgaaggagggtattagttctgcatgtttcagggtattatgtccagttactratgtcacaatttaggaaagtagaccaactggagtccacatggagcagagcagccgtaatggtgtcaggatgaaagattaaaggatatgcagaggctcagctggtagaagagacaacccagactctaacgcttgtcttcaaatatccgaaagactgctatgagcaagctcaagtcgcagaatcattccaagtgggtagagtttggctcaatattaagaagaaccaaatggagcatccctgaatcagaaggtagtgagtacatggtccctgaagttggttagtagaagctgatgctaattagtggctgac

SEQ ID NO: 278357 - DNA, 513 bp, Homo sapiens
agatcacttgaagtcaggagttcaaaaccagcctgggcaacaaaatgagaccctatctccacaaaaaattctcatgaaattatctaggcatggtggcatgcacctgtggtcccagctactcaggagcctgcagtgggaggatcacttgagcccaggagttggaggttgcagtgagctacgattgcaccactgcactccagcctaggcaactccctgaggcagacaggctctcaaattcagatctgggttgaatttttttaattatactatggaaatttctaygtatttcatatctggcatgaaataaagatttagttatgaaggccttcatcaggctcgtcattaatagcaactctctaaactgattttatacttatgtctttctaatggagataaatatatggttgccatgttaaactcattcagggacacaaaaagttgaaataacaatgaattaaagaaaacatacttaaagtaaggtagacacctgaatacaaaacacagtggttttgt

SEQ ID NO: 278358 - DNA, 561 bp, Homo sapiens
tcagcagtgtgaaaacagactaatacaccccattacaagattgctaagatcaatgctatactcaaaggtgttttagcccctctgagcctcagtaggtcaagtacatggaggacatggacatatatatatacttcttcctgctgatcagttagtaggaaaaagcctgacttttataaaggaaggaggattttagaaacacatgtgctgacttggctatatttttgttggtgtaagggatgagtccttctttttgaagatatttacaaatgtttccttgaggaaatatttgccacagaagtgacattttagcagctaagatrtttcacactgaacaaaacatgtgagctgaaacaagtgttttacttaggggaaaggaaaacttgccgacatagatgaagctgcaaatactttctagattcaaggccagcttgaccatgtgagcagcccagcagctatttggtggaggaggggatggtgtggggagcccggagcttccccaaaaggacttttaagaacagagatttgtgcagagaagagagaagcccccagatatcaaatggc

SEQ ID NO: 278359 - DNA, 624 bp, Homo sapiens
agagacttaactgtagcataacattttaatacagctacaactagattacattctcacattctgttttagactgtggagtggaaaatacatccatcacttagaatgtgtgtaacccttatttaggttataccaggttgagccatttcacttaggacttagaggttagcccaacctctgacttctggtttycctctccaattttttttttgtttttgtttttgagacacagtttcacttttgttgcccaggttggagtgcaatggcgcgatcttggctcaccacaacctccgcctcccgggttcaaatgattctcttgccctagtctcctgagtagctgggattataggcatatgccaccacgcccagctaattttgtatttttagtagagatggggtttctccatattggtcaggctagtctcaaactcccgacctcaggtgatccacctgccttggcctcccaaggtgctgggattacaggcgtgaaccactgcacccgttttaatccctgtcgttgtcttctattaacagtcagactcatttggtagaaaatgaggaagacaggaaaagcctcatggagtggcctgactttgaagatgcagatttctctgcagttgaggaaag

SEQ ID NO: 278360 - DNA, 624 bp, Homo sapiens
agagacttaactgtagcataacattttaatacagctacaactagattacattctcacattctgttttagactgtggagtggaaaatacatccatcacttagaatgtgtgtaacccttatttaggttataccaggttgagccatttcacttaggacttagaggttagcccaacctctgacttctggtttccctctccaattttttttttgtttttgtttttgagacacagtttcacttttgttgcccaggttggagtgcaatggcgcgatcttggctcaccacaacctccgcctcccgggttcaaatgattctcttgcccyagtctcctgagtagctgggattataggcatatgccaccacgcccagctaattttgtatttttagtagagatggggtttctccatattggtcaggctagtctcaaactcccgacctcaggtgatccacctgccttggcctcccaaggtgctgggattacaggcgtgaaccactgcacccgttttaatccctgtcgttgtcttctattaacagtcagactcatttggtagaaaatgaggaagacaggaaaagcctcatggagtggcctgactttgaagatgcagatttctctgcagttgaggaaag

SEQ ID NO: 278361 - DNA, 566 bp, Homo sapiens
atcttctcaagattcttagagatagtaattggtattatccctacttaatggtagacaaaatcagggcaaaaagaggttacatgactttcctggtagcacatactggtaagtaacggagctggaattcaaaccctgcattctggctctaaaatttgtatcactacaccagctccccaaatgcatgagctgggatcatccaactgcagcccagcagaagaggtgtgcttcgtttgcttaattgtctcccaaaactacctcaacctatgtttttgtgggatccagaaacactcatatcagaaggataataaatgcaagccagtatactataggttaggaagacaataaagataaatgggtttgctaccaacaagctcagagtataaagagaaagacaccacagtgtattttaataayataaaggttgggaatatttaaactgccctttcaaaagatactttcagttacccctaaaataaaacaaacatgttttctcattttttatatttcttatttacattaatgttagatagccaatgataatcaaagtaagcactaaaaagaaagtc

SEQ ID NO: 278362 - DNA, 599 bp, Homo sapiens
tgctcatcaagtggcccagcatcccagctcccaacggcattgctcttaacaaccagttcaaagatggcagccaggcacactggctcattcctgtaatcctatcattttgggaggctgaggtgggaggattgcttgagcctgggaggggaatgtacaccattgcatgcacaatatttttagcattaaaaataattttaaattatttaattttgtaaaagaataatttgttttagaaagaaagacaaacatgccactgcatgccagcctggggagtcagagtgagaccctgtctcaaaaaaacaaaaacaaaaacaaaaaaacaatggctcaacccctcatctgcacacttcagcctgcctaaaatgggaaggaggacatagacagccagcaattttctttcaagggtacaacagagcagtttcacaagacatttcgttcttaccctataggccagaattcagtcaaatgggtacacctacctgcagctggggaaaaagtccatgataatggccttacactcatctaaaacagacaagagaaaatgagatattagcrggaaaatctgaacgcctgcctctgtttttttaccttataaaaac

SEQ ID NO: 278363 - DNA, 441 bp, Homo sapiens
tcccacctcacaggctgaatcccaggtaccacccaggaagagaaggagccaggctcctccctcctgcaaatggcatgagcttcccgagactccacactcctcccagtgtgcaggccagtcagaggttctccaggacccctttatacgtggctgtctcagagggcagtctacggtggaaggatgtgaacctgggagtcagagaaacttggctttaaatccagacgccagcatttaactagcgatgtgaagttaggcagatcacttaacctctttgagccccagattcttccattcacatgctatgaacctgataccrtcatcatggtgggtgcttcatagtcaacgcagggaagtcagatggagactgatccatgagccccatgacccagctgtcctgctcctgggagtggaacccatcccagcattgggtgtggtggtgag

SEQ ID NO: 278364 - DNA, 608 bp, Homo sapiens
tgtgggcaccatttatgtataaacatacatatgtgtatatatgtaaacatgtatgtatatatatgcttatacataaacgtatgtgtatataaggtacatatacagacagarcaaggaaatttggggtgtcttatgagaatgcatacaaactcaaggatgtcatcgaacacaatactgctattgtttatgggttgtgggaggaaaatggaaggggaaaaggagataaaagttaatgaacacatgagtgaagggcttggcacaaacttgtaacgatagcgtgctatgagttgaggagtatgacttactcaatgttctgtcctgggtctaaaagaaaaagaaaagttcaacaaaaaagtcaagggaagggggagaatataattctcagtaatgctacgggggcttcagggtctgggtgtgaggaccggcacccatgtggctatggaatagctctctcccttggctctctctctctctgttgagagtgggaagaaatttcaggagaaatataaggcatggcccaagatactcatttgctcttatgtgaactctcggtctctcagtttctagttgcctaaaggcacttctctaatttttcccaattctcattg

SEQ ID NO: 278365 - DNA, 608 bp, Homo sapiens
tgtgggcaccatttatgtataaacatacatatgtgtatatatgtaaacatgtatgtatatatatgcttatacataaacgtatgtgtatataaggtacatatacagacagagcaaggaaatttggggtgtcttatgagaatgcatacaaactcaaggatgtcatcgaacacaatactgctattgtttatgggttgtgggaggaaaatggaaggggaaaaggagataaaagttaatgaacacatgagtgaagggcttggcacaaacttgtaacgatagcgtgctatgagttgaggagtatgacttactcaatgttctgtcctgggtctaaaagaaaaagaaaagttcaacaaaaaagtcaagggaagggggagaatataattctcagtaatgctacgggggcttcagggtctgggtgtgaggaccggcacccaygtggctatggaatagctctctcccttggctctctctctctctgttgagagtgggaagaaatttcaggagaaatataaggcatggcccaagatactcatttgctcttatgtgaactctcggtctctcagtttctagttgcctaaaggcacttctctaatttttcccaattctcattg

SEQ ID NO: 278366 - DNA, 566 bp, Homo sapiens
agtttctggcaccatctgggaaacacacagcattctcttccatcttggcttcccatgtcttcccagaaccttgtgttccaaagttctttttagtccagaccctcagcagtgttggacataaattcacgcagatacgtgttttggggatagcagggtaggaagtttgtagccccataagtcttagcacatgccacactactattaatatgtttccttttgacggatggctcaggcatagagtgacaatttgatctcagaatataaatagacccagaggttttataaaaagcttcttttgtgattttgtggtgatgactgtattggacttttaataaatttaccacctatagatgatggctgtagatacagacaccaacacaaagagtgaataagaattaaaggaaatctgtgaaagatcaaaataacaaggagatcatcatggtatttttccggggtggttcagatattggagaggcrtgggagtgttcagtagtcagtgacttctgcatgatatttgcatagagagaactttaaaaaggttgcatttcttttctgctttcatattt

SEQ ID NO: 278367 - DNA, 579 bp, Homo sapiens
gctcaaggccaggctgccaccatgagctgccgaggaggattaaaacattaaggaaaatgcttgttgttgttgttgttcttttttcctcagaatctttcaaaaatgaatttcattttctatttaccctccttccacccgctcccaagttttccagatatacgttcctcttaaaacctttttaatcgctcaggttattatcaactcttctgcaaaaggaatcaggtttgcccaggaacttcactgaataaagatgagtttatatcttaaaaaggaaacagctggatggcaaaagccagggcgggaggcagctcttgtttcattagtgaagggaaactcgagggcccggagagaacaactgggctggcagccacggcggggagaagaaaaggaaacacacgatcataaagaactaatcatgaaaaatggaaagtgagaaagagccaagaacaacaagcaataaatagatttggaagggggraaaagatgaggaggaatgaaaagctatgctcaggaaagaagcaacaagagcatgtgcgtttcatttgaaaaaaattaatgattctgaaaatcattaaaaag

SEQ ID NO: 278368 - DNA, 541 bp, Homo sapiens
agcctcaggcatgtcagaaggctgctctgagagtgggttttacactgatttttatcagccccagataattcacttggcaaagaaaacatctattactagatgtatctcatatgttactgaatgtttactaaattttactactgtcaaaacacattgtaaatgaacagaccctcagaagaacgagggaaatctattcctcagaagagaaaatggttgtctgaggacctacaaagatttttgcccaaggaaattaatgccagtaaactatgaccaagatttaaatatgctttcagccaagttttatgcttaaatcacctaattacatctttctttctttatttgcctggtggagaattatattcattacatgttatggtaaacagaataattasttaatatttacggattaattaaatacaatcattttatctaattcagtaataacggtgctgaattttatttttcacatttctgaacatgatgccaaacacccagatgaaacctaggaggagaaaagagtcaaaaatccagatgttattaa

SEQ ID NO: 278369 - DNA, 541 bp, Homo sapiens
agcctcaggcatgtcagaaggctgctctgagagtgggttttacactgatttttatcagccccagataattcacttggcaaagaaaacatctattactagatgtatctcatatgttactgaatgtttactaaattttactactgtcaaaacacattgtaaatgaacagaccctcagaagaacgagggaaatctattcctcagaagagaaaatggttgtctgaggacctacaaagatttttgcccaaggaaattaatgccagtaaactatgaccaagatttaaatatgctttcagccaagttttatgcttaaatcacctaattacatctttctttctttatttgcctggtggagaattatattcattacatgttatggtaaacagaataattagttaatatttacggattaattaaatacaatcattttatctaattcagtaataacggtgctgaattttatttttcrcatttctgaacatgatgccaaacacccagatgaaacctaggaggagaaaagagtcaaaaatccagatgttattaa

SEQ ID NO: 278370 - DNA, 566 bp, Homo sapiens
tcatcagatgaggtctatgtcaaactgtccttctcatctataaacatttattcacaatcttggattataataastttttcacttcacctttcctaatccccattcaccatttctttatcaatatcaatcttgaaaatgatggcccatatcatatcttgaaaatgttggcccagatggctgaagagtaaatattttagcacatttggatgctaatttagctaaatagtgaccagtagttctaatatgcagttcccttagtttgttgttgctgaagaaggattctataaaatagaataggtcctgaaatacaattttgttttcaatggcattcaccaaatttttatttctcctgtactataggcaataccatatttccttctgtctctattaacattgtagctaacgattcattaccgggggtagctaaagggtcagttaacttagtcctctggatttcattgagaaattaacggagaactgtaggacttaactgagaaaattaacataaggggttcttttcataaggcatctgagaaacgaaagcttgctgtcagcttgggtcttcc

SEQ ID NO: 278371 - DNA, 586 bp, Homo sapiens
tataggcaataccatatttccttctgtctctattaacattgtagctaacgattcattaccgggggtagctaaagggtcagttaacttagtcctctggatttcattgagaaattaacggagaactgtaggacttaactgagaaaattaacataaggggttcttttcataaggcatctgagaaaygaaagcttgctgtcagcttgggtcttccgtcagtcggcactttctgtctcatataaactagtatgagactgtaaactagcctaagaattttatgtgtctcttacttatgaggggaaaaaaaagataatattatgcactgggttgaccagttgtttctttcaattgactgaaataatcaggtgttctgaaatcacattatctgatttgtctagaaatacaggcaacgtgatcttagaaaccacagacaccagtagacctagaaaagtaatctcataaagcttgcttaaaacaattgaagtatctgataaatttcatatacaaaaaagataaatatgccttagtacaacaactgaattatgagaatataaagttgtgaaaatattacaatcatctgattgtcaaa

SEQ ID NO: 278372 - DNA, 586 bp, Homo sapiens
tataggcaataccatatttccttctgtctctattaacattgtagctaacgattcattaccgggggtagctaaagggtcagttaacttagtcctctggatttcattgagaaattaacggagaactgtaggacttaactgagaaaattaacataaggggttcttttcataaggcatctgagaaacgaaagcttgctgtcagcttgggtcttccgtcagtcggcactttctgtctcatataaactagtatgagactgtaaactagcctaagaattttatgtgtctcttacttatgaggggaaaaaaaagataatattatgcactgggttgaccagttgtttctttcaattgactgaaataatcaggtgttctgaaatcacattatctgatttgtctagaaatacaggcaacgtgrtcttagaaaccacagacaccagtagacctagaaaagtaatctcataaagcttgcttaaaacaattgaagtatctgataaatttcatatacaaaaaagataaatatgccttagtacaacaactgaattatgagaatataaagttgtgaaaatattacaatcatctgattgtcaaa

SEQ ID NO: 278373 - DNA, 602 bp, Homo sapiens
tatttcttatctttagtacttctagaatctgtgttcctactattaccctaccttcttttatgtatttatgattattatttagaaacagagtcttactagaatgcagtggcatgatcatagctcactgcagcttcaaactccaagagctcaagcaatcctcctgcctcagcctcccaattagctaggactacaggtgtacaccaccatgcccagctaattttttatttcatttttttaagagatggggtttcacttgttgcccaggctagtctcgaactcctgccctcaagtgatcttccctcctggacctccccagatgctggtattaacaggcgttagtcaccatgccagcctctcttctttcttttaaaacaagttttcttaaaagagtactctaatgtggtgtctcctgttcatcattttccagatttcctcttataaaagtgcaccagccayctttccatctcctccaacctttgttactctaatacttttaaatacctttattgacgtacttaaggattacagataacttttgtttactagtctgtttcccctactactatactctgaactcttcgcaagaagaacttttttgtttt

SEQ ID NO: 278374 - DNA, 451 bp, Homo sapiens
attcccagcgacagtatatgtttccttttctccatatccgcatcaatatctgttgtttttggtgttttactaatagcctttattgataktataaaatgatacatcattgtggttttaattttcatttctctgatgattagtgatgttgaacacttttttcatgtgtttgttggttgtttgtatttcttcttttgagaagtgtctgttcatgtcctttgctcagcttttagtgaagttgtttgtttttttcttgttgagttgtttgtgttgcttttaagattctggatattagtcgtttgtcagagtcataatttgcaaatattttctcccattctgtaggttgtctgtttattctgttaattatttctgttgttgtacagaagtttatgtgcaggtcttatgtcaagatggtcattaatccattttgacttaatttttgtatatggtgaga

SEQ ID NO: 278375 - DNA, 1165 bp, Homo sapiens
gttatttgcttctgttttttgaaagtttcagtaaactcaaagaaacatatcttaaattcaacccaaggtttccttatatccttttattatcaacaagactgagctattttgcatcaggttaaaggttagatttttgtcactcatagtatccttatcttattttagttcttgccatgaatttataatagagaaagcagcttccctacctggctactggataatatgttatattaaatttgtcactgctctttcactgtttaaagtgaaatgaagaattcgttagcaaaagaaatactttaaggtctaaataatatatcaaatatatatgtaatacaacatgaaatttcctttatgtcataagaaatactttcttattattttagataaattacatgaaccagatgtgacactctggattatcatcttatctgccatttaattttaattttgaattccactcataccattttccttttaagatcacaaagaacaccaatcacaatgccttgtacrtgccaaatgaccaaagaagatttgatgatattttaaaattctcacacgacttttatttttcagcattttwgttatttgcttctgttttttgaaagtttcagtaaactcaaagaaacatatcttaaattcaacccaaggtttccttatatccttttattatcaacaagactgagctattttgcatcaggttaaaggttagatttttgtcactcatagtatccttatcttattttagttcttgccatgaatttataatagagaaagcagcttccctacctggctactggataatatgttatattaaatttgtcactgctctttcactgtttaaagtgaaatgaagaattcgttagcaaaagaaatactttaaggtctaaataatatatcaaatatatatgtaatacaacatgaaatttcctttatgtcataagaaatactttcttattattttagataaattacatgaaccagatgtgacactctggattatcatcttatctgccatttaattttaattttgaattccactcataccattttccttttaagatcacaaagaacaccaatcacaatgccttgtacatgccaaatgwccaaagaagatttgatgatattttaaaattctcacacgacttttatttttcagcatttt

SEQ ID NO: 278376 - DNA, 535 bp, Homo sapiens
catacacacagtgtatgtgtgtatcatgtacatatatgtatttgtgtatgcatgtgtatatgcttgtatatatttgtgtgtgtatatatatagtcccagagtcttgtctgacctttctcctacctccactcaaactgcatttcttttcattttttttagtttaattttttttgaggcactgtcacccaggctggagtgcaggggcatgatctcggctcacagcaacctccatcccccaggttcaagygattctcctgcctcagcttcccaagtagctgggattacaggcacgcaccaacaagtccagctaatttttgaatttttagtagagacggtgtttcaccatgttggcaggctggtctcgaactcttgacctcaaatgatctgcctgccttggtctcccaaagtgctgggattacaggcatgagccgctgtccctggtgaccaactacatatttttaatgcataaattatacattttatattttacaaaactgcaaaagcaaatcctaaacatttggttaagatccttctg

SEQ ID NO: 278377 - DNA, 923 bp, Homo sapiens
catacacacagtgtatgtgtgtatcatgtacatatatgtatttgtgtatgcatgtgtatatgcttgtatatatttgtgtgtgtatatatatagtcccagagtcttgtctgacctttctcctacctccactcaaactgcatttcttttcattttttttagtttaattttttttgaggcactgtcacccaggctggagtgcaggggcatgatctcggctcacagcaacctccatcccccaggttcaagtgattctcctgcctcagcttcccaagtagctgggattacaggcacgcaccaacaagtccagctaatttttgaatttttagtagagacggtgtttcaccatgttggcaggctggtctcgaactcttgacctcaaatgatctgcctgccttggtctcccaaagtgctgggattacaggcatgagccgctgtccctggtgacmaactacatatttttaatgcataaattatacattttatattttacaaaactgcaaaagcaaatcctaaacatttggttaagatccttctgwtctggtccccttccacactgtggaagctttgttcttttgctcttcacaataaaccttgctactgctcactctttgggtctgtgccatctttaagagctgtaacactcactgcaaagatccacagcttcactcttgaagtcagcaagaccactaacccaccagaaggaaccaaatccagacacawcctgggggctcgtccaaggtattgccatgcagtgagtatctttggactcctttcacttactattctgtcccattttcccttagaatttgggggccaaacaacgggcacctcttggccgccggactaaagacacgggtgtcaggctttctgggaaaggcgctctaacaatccccgactcttcagagttaggagtgttggtttgc

SEQ ID NO: 278378 - DNA, 408 bp, Homo sapiens
tttcaacacttgttggtctgtgctgatacctttacaaattggatagaagccttcccctgcaaracagagaaggctcaggaagtggttaaagtcctaattcatgaaataattcctagatgtgggcttccccaaggcttacaaagctacaatggtccggcttttaaagccacggtaaatcagggaatttccagggcgctagggatacaataccaccttcactgcatctggaggccacaatcctcagggaaggtcaagaaggcaaatgaaacactcatgaggcatttacggaagctaacacaagaaactcatctcctatggtctactctcttgcccatggccttgttaagaatccgaaattctccttacaaaatggggctcagtccatatgaaatgttgtatggacgacct

SEQ ID NO: 278379 - DNA, 629 bp, Homo sapiens
ctctttgtgttaatttcaaataattatttttatttctgcgttattatttctaaccaagtcattcaggagcaggttgtttagcttgcatgtaatcgtrtggttttgagatattatcttggtgtttatttctacttttattgcactgtggtctgagaatgtggttgatatgatttcagtttttttgaatctgttgagacttgctttatggtggaggatttggtcaatcttgagtatatgctgtgtacagataagaagaatgtatattctgttattgctgggtggagtgttttttagctatctattaggacaaattggtattgaatttaagtccaaaatatccttattggacttctgccacaatgatctgtccaatactgtcagtgtgatttcaaatcacactattcctgtatggttatctaaatcattttgtagatctctaagaacttgttttgtgaaaatgagtgctccaacattggatgtatatgtattaaggattgttaagtcatcttgttgaattaaacactttgtcattatctgatgcctttctttatccttttgaatggtcattgttggtcaaagtctgttttatctgttataataatagtgatgcctgctttttttaatttttg

SEQ ID NO: 278380 - DNA, 508 bp, Homo sapiens
gaaagactatctctttttacttttgaaaggtaatttcacaggatatagaattttaggttggtagtttttgttctttcaacattttaaagaaataactatttttcaactagattttcttttgtttatgtggtttccataaagaatctgatgtttctgttattcttcctctatagataaggtgttttcctcaactctgggtctatttagaagttgatctttgtttcctgtttcctggagttttaatatatgtttaaggtgaaaggtttttggtgttcttgtttttgtatttattttgctggatgttctataaccttcctgaatctgtgatcgattgtcattaattttaaaaagttatcagcatccttacttcgcaactttctgctccattcactttttattctcctcatgatacycaattacacatatactacatcattttcattgttcaagagtacatagacattctgttctatttttcatccccccaacttcaccttttaatttcatt

SEQ ID NO: 278381 - DNA, 568 bp, Homo sapiens
actacagggacttggtgagggagtgcagcttctaagctagtggagctcctacgccaataggaatttttgatagaaatccacatttatagttgtatatcttcactgcattttaccatgggtcttattgcagacaccaactcgttttaggtagatctgtttaatacaagcaaagagtttgatatataactcactgaatcatgcagtagttcttataatgtcaacataytcacttttgataatcagttattttattggccaaatattctatagttttaaacatatatcgtcattgagaatcaatgcattttcttgacggtgggataagaaaaatagtgttatatttcaatagaccactgtaagtgatttattgaagtattattctttaaaagttaggcaatgctaattaactaattatcaatcaattctgcaatatgtgaaattgcaaagcaggttatagtttacaatgatcttacatggttctcttaatctaattgtatttttttctttatcattttctctactaaacactgaaattacaagtttgttctcttgaataaaaaaatgttaa

SEQ ID NO: 278382 - DNA, 1022 bp, Homo sapiens
actacagggacttggtgagggagtgcagcttctaagctagtggagctcctacgccaataggaatttttgatagaaatccacatttatagttgtatatcttcactgcattttaccatgggtcttattgcagacaccaactcgttttaggtagatctgtttaatacaagcaaagagtttgatatataactcactgaatcatgcagtagttcttataatgtcaacatattcacttttgataatcagttattttattggccaaatattctatagttttaaacatatatcgtcattgagaatcaatgcattttcttgacggtgggataagaaaaatagtgttatatttcaatagaccactgtaagtgatttattgaagtattattctttaaaagttaggcaatgctaattaactaattatcaatcaattctgcaatatgtgaaattgcaaagcaggttatagtttacaaygatcttacatggttctcttaatctaattgtatttttttctttatcattttctctactaaacactgaaattacaagtttgttctcttgaataaaaaaatgttaawgttttaatcatgtacacatggttttttgaagtatctatcatattgtggaatgcttaaatatagctaaaaaacaaattcatttttgtgatttgataacacacaaacttcacactctttaatctttttaaaaatagaatgtatcataattatagtcaccttctgtgcaatagatttcttgaaatatattccttctatgtaattgtagttatgtatcttttgaacaaaaaggatatttttcgtatgtaataaaaawttttagtttttattttttaattattaaatttttctgtataaaataaaactcttcatgtgatttttaaaattttcttatatctaagagcggtgaacagatctaattataatagtatttggggacaaatttacatttgtaaatataaattagttatttgtttgtttctggataagtccacaaacatatccaaatattttttg

SEQ ID NO: 278383 - DNA, 547 bp, Homo sapiens
ttctagtcattttactcttctttgaaattttttatttttgaaatttttttctgaatgcgcagttattttaagtttttgacatcttggagcatttgccataaagttgtccacagggaaaacaaaaagtaaaaagcaaagcatcttcatggagcttgtcttgaaaatttttttkttgttgttgttcaaaagaatcacacaagaaaagagtgcttaagtgtttaagtaatttttaattatttacataaacctggggtcaaaaataaaaattctgtattttttaaaatgaagtacagtgagccaaagtttccatgtgtctgagtttaaaggttttcctcacatagactgagagctttcatgtgtaattttcaaagttttaaataacgattgtcaatataagagatgtcacaaatctcttaaaatgaaccaaagacaaaccaaacaaaaaattctttcactttgtttaaggaataggtggccttgcaaatttaggattttcaggcccagccccaacagcattttattgtgcccctttctaaatatgttccat

SEQ ID NO: 278384 - DNA, 547 bp, Homo sapiens
cccagttgatgataagtatgttatattgaatttgtctacatgctgtgtctttagaatgctgagcaactatgcataactcagtcgtctttaatctccaaaatttcaaatatttctaaggcaaaatattcatagttcaatactcaattccaaatacttccacttaaatatatatttagagacatagatataaaggcattgctattaytgatttttataatccactagagtttaaaactgagattctaattaagttggttgttggactctaactcaagtgttggcaaactaagaccaggaagtcagatttaacccatcacttgtttttataaataaagttgtattgtttcacaaacaaaaatttatctacatattatctatggctgcattcacattacagtagtagagttgagtaattgccatagagcctgcatgtcctataaaacttaagacatttactctcttaccctttacagaaaaaaagattaccaacttacttgaagatatagagaagattttgagttttttcagtgtacatatatttaataag

SEQ ID NO: 278385 - DNA, 547 bp, Homo sapiens
cccagttgatgataagtatgttatattgaatttgtctacatgctgtgtctttagaatgctgagcaactatgcataactcagtcgtctttaatctccaaaatttcaaatatttctaaggcaaaatattcatagttcaatactcaattccaaatacttccacttaaatatatatttagagacatagatataaaggcattgctattattgatttttataatccactagagtttaaaactgagattctaattaagttggttgttggactctaactcaagtgttggcaaactaagaccaggaagtcagatttaacccatcacttgtttttataaataaagttgtattgtttcacaaacaaaaatttatctacatattatctatggctgcattcacattacagtagtagagttgagtaattgccatagagcctgcatgtcctataaaacttaagacatttactctcttaccctttacagaaaaaaagattmccaacttacttgaagatatagagaagattttgagttttttcagtgtacatatatttaataag

SEQ ID NO: 278386 - DNA, 447 bp, Homo sapiens
cccgggtcaagtcatgctcctgagacctgttcgtgagaaaggcatctgttgcttttctaattttagtcaaatttctcatataatgctctaatctctcaggctgtcattcctctccaggattagggtgctctccctgtcctcacatgagtgtattaaaacaattgatttgtggtgagaakaaatatatttagaagggagagtaaaattgtaaagacgttaataaatgggtaagtgaggtaaaaagaaattgggagaagttataaatcatgttaaggattcttaaactagggccagggagagacaaaaacctcaaagcaaaatttatattttgtgatttgtgtgatgagccattcaccaaatccaagctgttatgttttgtggaaaacctacaaatgaggtcaagcaataggaagaaaaaacaataaacattgatgatatctttctaac

SEQ ID NO: 278387 - DNA, 524 bp, Homo sapiens
aacacatatttgtttaattagtatatggccacagagaatggaaagaaaagacaaatcagtttcctagttaagaggacaagggaatattttgggtgtggaatgtgggtcaagaggtatgtctctgactctggactttctgtgagaagcagaggctttgtttaactttcctttattacaacctttgaatgtgctattagtctgatgatgtggtcactgagtgtttcttgattcactgactaatggaatgattgcttgggaaccctatggggaggcatccatttggaagcctcttcacgggtaatgaaaccagaaatactctcctgcctgccacaagaggtaagcacactggaaacagctacaaggatcctgctcattttcttccttagagcccctacatcttcttccccttaaatgccatcytaatttccatttcccttatttcaaggaaataaaggagaccataaaattagaatattgaggtggagcctcaaattacttcacagctttctttcttttgtgttgac

SEQ ID NO: 278388 - DNA, 583 bp, Homo sapiens
gcacctaattagcacttggtgctaatttcaatccaatgagaatgctactccacacagcaatgaggacctcaactctagatccaaatgacccttggcctccaaggacatttccccttccccctrttctgctgtgggtctcctcacgtcctcacttctcatcctaggattcatatctccccagaatgactgacagtaggactatcccttcctctcaggagaaagctcacgcccatccacagaaatgtgacctttcactataaccttggcaacaatcattcaaaagtcggacatttgtacatttctcaaattcagcattatccagtctaagtaacactattacaatagtttaatccaaatagggtgtgccaagctcagaaaagttcccttccagtatctccttgttaattaatgagtcaagatctcttacaatggggttactcttcctccactaaaatcttcagactcctttacaaatatcctcttcttcaaccagtccttttaaggagggaggagcaatcttccagtaacttcccactggctggaaggaatggtaatttccacacaaaagacaaaaccctattgt

SEQ ID NO: 278389 - DNA, 535 bp, Homo sapiens
ctcaaaggtgtgggaagtttcagctgcacctgggccagaactgactaaggcctgttacgtccacaagtgacgttacacatttaggagcattgtcatcaagaggaatcgttttgaactttggctgcmtgttggtgtctcttggggagcttttaacaaacaccaaccaccaggccccacctcagaatccacctcaaaccaattacatcagaatctttggggatgggagctctatattgtatgctttatgttatttaaaagcttccctggatactctaatgtgcaggtcagggaggcaattcttgttctagataaattattctcaaaatgtgtttccataaccattagcatgtgcaccactgggaacctgaatgttctttactgactaaaatatgatgacagagatataagacccacgaaatgatgagaccaattttggaagaattctggtctctgggtttttgtaagaagatgtttcttaaataaccctttttaaagaattgttttattttgatttagaagcaacgtctccattcac

SEQ ID NO: 278390 - DNA, 628 bp, Homo sapiens
tttcctgggaaagatttgctgagataccaactttggttggagacttgaatgatagaagagattgatgatctggagtaaaagcattctagcctgaaagaactgcaagtgtaaaagccctgtccaaatagctgggtatgttcagagaacatagagaagcccacaagtgctggagcagaatgaagtaatgaggggtactagaamaagaagtagaaaaaaaaaaagataaaaaacaactcaatggcctaaagaggttaggttttgttttaatctcatctgttcttaaaagccactgaggatttagagggtggcatgatctaatttatacatttttaaaatcacttatggttgttgcaagaacacaggttgcagagggcaacaaatggcagatgaagtaaaacttggatttgtaatataacgtgaagttagacctcacaggacggactgggttatagattggagatggattgtgagaaaaagaaaagactaaaactaaagggtgcctttcaagggacttggactaattgtgtgaatagaatgaataaatggggaatattgtgagtgaaaataatttgggctaagaatcaaggggttttatttgaacacatgaaatttgagatgcctattatag

SEQ ID NO: 278391 - DNA, 628 bp, Homo sapiens
tttcctgggaaagatttgctgagataccaactttggttggagacttgaatgatagaagagattgatgatctggagtaaaagcattctagcctgaaagaactgcaagtgtaaaagccctgtccaaatagctgggtatgttcagagaacatagagaagcccacaagtgctggagcagaatgaagtaatgaggggtactagaacaagaagtagaaaaaaaaaaagataaaaaacaactcaatggcctaaagaggttaggttttgttttaatctcatctgttcttaaaagccactgaggatttagagggtggcatgatctaatttatacatttttaaaatcacttatggttgttgcaagaacacaggttgcagagrgcaacaaatggcagatgaagtaaaacttggatttgtaatataacgtgaagttagacctcacaggacggactgggttatagattggagatggattgtgagaaaaagaaaagactaaaactaaagggtgcctttcaagggacttggactaattgtgtgaatagaatgaataaatggggaatattgtgagtgaaaataatttgggctaagaatcaaggggttttatttgaacacatgaaatttgagatgcctattatag

SEQ ID NO: 278392 - DNA, 626 bp, Homo sapiens
tgttaagctttatcttagcattgtattagaatgctaagaggacaattaggtgcaacataatgaatctagttttccagtctgctttttcaaaagctttagaacattatttaaatgtgctgttccaagatgaaacatattttaatgcagagggcacaaatgcctaatcctcaatccctttctcttaaagaaaatgtttagaaatgttaaygttttaattaaaaaaatgattaaaactgaaagtgttgcctttttttttcttttctgcttaaacctaaaatgtattgcagggttaaaattattaacgttattcttggaagaaatagcatatctaattataattgtagaaaatgaagttgtatctgcgagttaaatcctgctctggtctccaggaaagcatccaaattatttcatcatcctagaccttattgtttacagccgtgtgagactatgaatccatcaaccatacagagggtttcaggattatttttattatgtagaagcgttcttataatcgtatgtatcttcataagatttctatgtgttaggcaacaaagaggaatttaaattaactgatgattgtataaaaattttgtgtgagttgcattaacataactgaaaatgactgg

SEQ ID NO: 278393 - DNA, 626 bp, Homo sapiens
tgttaagctttatcttagcattgtattagaatgctaagaggacaattaggtgcaacataatgaatctagttttccagtctgctttttcaaaagctttagaacattatttaaatgtgctgttccaagatgaaacatattttaatgcagagggcacaaatgcctaatcctcaatccctttctcttaaagaaaatgtttagaaatgttaacgttttaattaaaaaaatgattaaaactgaaagtgttgcctytttttttcttttctgcttaaacctaaaatgtattgcagggttaaaattattaacgttattcttggaagaaatagcatatctaattataattgtagaaaatgaagttgtatctgcgagttaaatcctgctctggtctccaggaaagcatccaaattatttcatcatcctagaccttattgtttacagccgtgtgagactatgaatccatcaaccatacagagggtttcaggattatttttattatgtagaagcgttcttataatcgtatgtatcttcataagatttctatgtgttaggcaacaaagaggaatttaaattaactgatgattgtataaaaattttgtgtgagttgcattaacataactgaaaatgactgg

SEQ ID NO: 278394 - DNA, 626 bp, Homo sapiens
tgttaagctttatcttagcattgtattagaatgctaagaggacaattaggtgcaacataatgaatctagttttccagtctgctttttcaaaagctttagaacattatttaaatgtgctgttccaagatgaaacatattttaatgcagagggcacaaatgcctaatcctcaatccctttctcttaaagaaaatgtttagaaatgttaacgttttaattaaaaaaatgattaaaactgaaagtgttgcctttttttttcttttctgcttaaacctaaaatgtattgcagggttaaaattattaacgttattcttggaagaaatagcatatctaattataattgtagaaaatgaagttgtatctgcgagttaaatcctgctctggtctccaggaaagcatccaaattatttcatcatcctagaccttattgtttacagccktgtgagactatgaatccatcaaccatacagagggtttcaggattatttttattatgtagaagcgttcttataatcgtatgtatcttcataagatttctatgtgttaggcaacaaagaggaatttaaattaactgatgattgtataaaaattttgtgtgagttgcattaacataactgaaaatgactgg

SEQ ID NO: 278395 - DNA, 595 bp, Homo sapiens
tatgataatgtgagatgatacagtattttctttttgctttcaatttaatcatttactgtaaatataatatgttcagtgaaaactttatttattaaagctaagatgaaaaggcttttcttcacaggcctgtaagctccccaaattctaaagcctgtgagtttttcttgctctgyatttcatttacatgaacttttccctcaatgttataaattataaatgcttgtggtaaaatgaaaacatggaaacacacaatgaataaatatttcatttaccgaggatttatcactcaatatcttagtgtattacagatagtctcatatttatttaaatgtgagattataataatttggaaacctatcctagttttaaaatactactatagtttatgtcttttcccatttaattaaagttttcaaaataaaatgattgcatgatattccatcatcatatcacaatagtgatagctgctggttattgatatactgatgagccaagcagtaagctaggatctttatgtgaattatataatttattcctaatttgtccttatttgatatgctagaaatttgaggtttctgtgatttcccaaggtaac

SEQ ID NO: 278396 - DNA, 581 bp, Homo sapiens
taagaatcaggagtcatagtaatgctgggaatacaagcatgaacaaaaaaagggttactacaatcatggaaatgtagtctttgttgagaaacaagtattaatcaaataattatttgaacaaatttaacattgcaattgtgacaagtgctctaaatgagaggcagcagtttaatgtggaagatttgaccaggtggggaagaaaataaaagttgagatttgtagggtgaatgggagttaaccaggccagagagatagaaaaagattctgggaaagaggaaagggcatgtacaaagtacttacagcagaaggagccttgygagtgcaagggtttgaaacaatgcagatgtatttgtatatagcaatatttagaggcaggctgggtgcggtggctcacgcctgcaatcccagcagtttgggagccgagagagacagatcacctgaggtcagaagtttgagatcagcctggccaacatggtgaaaccccgtctctactagaaatacaaaaaaaaattagctgggcatggtggcgggcacctgtagtcctagttactcaggaggttggggcagaaaagtgattactt

SEQ ID NO: 278397 - DNA, 583 bp, Homo sapiens
taatatgttcagtgaaaactttatttattaaagctaagatgaaaaggcttttcttcacaggcctgtaagctccccaaattctaaagcctgtgagtttttcttgctctgtatttcatttacatgaacttttccctcaatgttataaattataaatgcttgtggtaaaatgaaaacatggaaacacacaatgaataaatatttcatttaccgaggatttatcactcaatatcttagtgtattacagatagtctcatatttatttaaatgtgagattataataatttggaaacctatcctagttttaaaatactactatagtttatgtcttttcccatttaattaaagttttcaaaataaaatgattgcatgatattccatcatcatatcacaatagtgatagctgctggttattgatatactgatgagccaagcagtaagctaggatctttatgtgaattatataatttattcctaatttgtccttatttgrtatgctagaaatttgaggtttctgtgatttcccaaggtaacacagcaagaacaaagctgagatttggatccacgtctttctgactgcgaagtc

SEQ ID NO: 278398 - DNA, 584 bp, Homo sapiens
  misc_feature (1)...(584): n = A,T,C or G
tctcccagcctaacatggaaaaagctcgtagatgtatgccactttctttgctttgtggtttctcaagatattttttgaagcaaggcctgacttacaacattttataaataactaatgggaattttggcaaactcataagaatcatttcttgaatttctaaacataagtggtttttagttgcttttcctcaggtggttagagagtggccttttggttaaaaaaaaaaaattcactgcagtgtttgaacctggcaatgatgaagtgacagtcgcaaacataattttcacattggctaaaaattttcaagttgagaaaaagaattctttaggcaatatgcagtctgatcttagycaggtacctaacacacatgtgcatttattcattcatccatttattcatcacacaccaaatatattcagtgtctactgctctacatgttaggcatacagtggtcaagaagacagaggagaaccctgggggttacatttcaatatggggcaattattggtggctacaagtaggttcgtgcaattattggtggtnnnnnnnnnnnnnnnnnnnnnnnnnnnnnnnnnnnnnnnnnn

SEQ ID NO: 278399 - DNA, 499 bp, Homo sapiens
gtcagtaaactttgagtaaagaaattactcaccataatgtgagtgggcctcatccgatgagttcaaggccttaaggacaaagactgcacttcccttagtaaatagaaggaattctcatataaattctgyctgagtttctggcatgctgccctggggaattcagattcaacagtacaacaacaactacaaggctataacatcaactcttattgaattttcagcctcaccagttcgcacaaatgaaggagccaattccttggtctctctctctctctctctttcagctgcttatttccagaaagaagcatttcatcataaaagtctgttttccagggtatttcccattttcttagtctaggttctcccgcaagcagagcttgagacaaggtagagccttgcatgtaggtttatttgggaagcggtcccagaaagcaggaggaaagggcagaggagagaaacatgtgagaaggaaaagacaacacacagctgtgttgctgag

SEQ ID NO: 278400 - DNA, 499 bp, Homo sapiens
gtcagtaaactttgagtaaagaaattactcaccataatgtgagtgggcctcatccgatgagttcaaggccttaaggacaaagactgcacttcccttagtaaatagaaggaattctcatataaattctgcctgagtttctggcatgctgccctggggaattcagattcaacagtacaacaacaactacaaggctataacatcaactcttattgaattttcagcctcaccagttygcacaaatgaaggagccaattccttggtctctctctctctctctctttcagctgcttatttccagaaagaagcatttcatcataaaagtctgttttccagggtatttcccattttcttagtctaggttctcccgcaagcagagcttgagacaaggtagagccttgcatgtaggtttatttgggaagcggtcccagaaagcaggaggaaagggcagaggagagaaacatgtgagaaggaaaagacaacacacagctgtgttgctgag

SEQ ID NO: 278401 - DNA, 589 bp, Homo sapiens
acaacacattatttagtaatatggtggcaaatagcagaagaaatagttaaaggagttgaatgtagttgtttctaaggtaaaagagaattgggatttgggagcagagacaatacactgatatatttttgtaaatcagtgtatttgatatttacacactacttttacataggtaaaaaktaaatttaaaaagggataaagaacacagctgcaaaagttacaatagataaagttcgatgaagctgcctctcttccaagcaaaataaatacaaaataaatacatgtagagatatactggcaaaatttttctactccaggatgaaaaaaatcttaaaagagttcaggaaaaaaataaataataaaacaaactaaaacaaaatgattttgaggaaaaaaatcaataagagctatgttccaagcctattataccctaaaaattgtctaccttgtatgaagtcaatagaaattcaatttcaaatattttcaagtttacaaaatattatccatgtacctactttgaaacaaaaaaagtatttttgtatttaacagaattgacagccaaatttcacagattacgtaactgatttgcaga

SEQ ID NO: 278402 - DNA, 507 bp, Homo sapiens
tggtcattaaaccttgtatgcaggtatcaaaatatcacatatacttcataaacatatacaattatgtatcaataaaaagttttaaaggaaagtcttaaataacaaatatatatttatacacatagaataagctcaagtttaattgttaggggaatgggcgaaatgcctttggagattttaaatactcagaatatgcttgggacttcttccactttgtttcttccgttcgttttacttctctacctattccaaaataaatacatgaaatgacaagcagaaggaatagatacacccatttgtagtcaygaaaacatctagaaatgtctctaattctctactttttcttctaaatttctatagtgattaacaaattgaagatgcactcattatgattttattggttcttgttttggagtggtattcttttagcacattttttatctaaaccggtagatctcattcttggtagcacattaaaatcacctgtaatcattttttaaacacatg

SEQ ID NO: 278403 - DNA, 575 bp, Homo sapiens
gcagcatctgagccattgagtttatggtttgtttgttcgattaaccttaggtaagataaattcttaagggcattttatgaaacactattcagaaaccaatcmatagagattcatttttgttacgtccaaaacaaggtgcagaaaccttgaggatttggttttatatttagttcaatagcaaagaaatagaaatggtttctttgagtatgcaccacatttgctatacaagtaacaacacctgcatttcaatctagccaacaaatcaatttataatgctctgggtgagttttgtggttgttagttccaaaaatgccaatagtttctcaggaaagattaggttttcaaccaacttataaaacaaaaattcgatttcactgtcatcggattcaatcacaaacatataataaaaggctaggtattaaaaggagtaacaactttctgatctcaaaggaaaccccatttaagagagagatttacttgttaacttctttggtttattttaaatgttataattttctcatagttccaaatacctgctgaggtattaaaagtgcatagaggccaggtgctgtggc

SEQ ID NO: 278404 - DNA, 575 bp, Homo sapiens
gcagcatctgagccattgagtttatggtttgtttgttcgattaaccttaggtaagataaattcttaagggcattttatgaaacactattcagaaaccaatcaatagagattcatttttgttacgtccaaaacaaggtgcagaaaccttgaggatttggttttatatttagttcaatagcaaagaaatagaaatggtttctttgagtatgcaccacatttgctatacaagtaacaacacctgcatttcaatctagccaacaaatcaatttataatgctctgggtgagttttgtggytgttagttccaaaaatgccaatagtttctcaggaaagattaggttttcaaccaacttataaaacaaaaattcgatttcactgtcatcggattcaatcacaaacatataataaaaggctaggtattaaaaggagtaacaactttctgatctcaaaggaaaccccatttaagagagagatttacttgttaacttctttggtttattttaaatgttataattttctcatagttccaaatacctgctgaggtattaaaagtgcatagaggccaggtgctgtggc

SEQ ID NO: 278405 - DNA, 575 bp, Homo sapiens
gcagcatctgagccattgagtttatggtttgtttgttcgattaaccttaggtaagataaattcttaagggcattttatgaaacactattcagaaaccaatcaatagagattcatttttgttacgtccaaaacaaggtgcagaaaccttgaggatttggttttatatttagttcaatagcaaagaaatagaaatggtttctttgagtatgcaccacatttgctatacaagtaacaacacctgcatttcaatctagccaacaaatcaatttataatgctctgggtgagttttgtggttgttagttccaaaaatgccaatagtttctcaggraagattaggttttcaaccaacttataaaacaaaaattcgatttcactgtcatcggattcaatcacaaacatataataaaaggctaggtattaaaaggagtaacaactttctgatctcaaaggaaaccccatttaagagagagatttacttgttaacttctttggtttattttaaatgttataattttctcatagttccaaatacctgctgaggtattaaaagtgcatagaggccaggtgctgtggc

SEQ ID NO: 278406 - DNA, 575 bp, Homo sapiens
gcagcatctgagccattgagtttatggtttgtttgttcgattaaccttaggtaagataaattcttaagggcattttatgaaacactattcagaaaccaatcaatagagattcatttttgttacgtccaaaacaaggtgcagaaaccttgaggatttggttttatatttagttcaatagcaaagaaatagaaatggtttctttgagtatgcaccacatttgctatacaagtaacaacacctgcatttcaatctagccaacaaatcaatttataatgctctgggtgagttttgtggttgttagttccaaaaatgccaatagtttctcaggaaagattaggttttcaaccaacttataaaacaaaaattcgatttcactgtcatcggattcaatcacaaacatataataaaaggctaggtattaaaaggagtaacaactttctgatctcaaaggaarccccatttaagagagagatttacttgttaacttctttggtttattttaaatgttataattttctcatagttccaaatacctgctgaggtattaaaagtgcatagaggccaggtgctgtggc

SEQ ID NO: 278407 - DNA, 502 bp, Homo sapiens
tcccttctcccttgggatagtgagaggggcagacagaaggggtagtgtctgaatattgtggttcaggccagctcaaatcctaccaccaataattgcacgaacctacttgtagccaccaataattgccccatattgaaatgtaacccccaagggttctcctctgtcttcttgaccactgtatgcctaacatgtagagcagtagacactgaatatatttggtgtgtgatgaataaatggatgaatgaataaatgcacatgtgtgttaggtacctgrctaagatcagactgcatattgcctaaagaattctttttctcaacttgaaaatttttagccaatgtgaaaattatgtttgcgactgtcacttcatcattgccaggttcaaacactgcagtgaattttttttttttaaccaaaaggccactctctaaccacctgaggaaaagcaactaaaaaccacttatgtttagaaattcaagaaatgattcttatgagtttgccaaa

SEQ ID NO: 278408 - DNA, 603 bp, Homo sapiens
accctgttttcacagaagcaatttataattttgaagttttggaaagtagtagacctggtaagtctgcttttaagaataaaaagaatcattttaaatatgtctgtgtacattttaaaagacatagagctttttatactcaaggccagatcagcctgagataacgctgaactagaatctacttaccagaaaacacttaatcccatcactttcaatcaacatgtgccttgcccagatagtacagaagtttctgtcattgtcaatatgataytaattaactgtaaagggagctaacagttattcaagctttgtgtaatattcagtttatatattttatttcatttcctcgtgggtttttcattattctcaactccaagagaggacatgcagggtggaatgaacaataaaactaaaatcggtatagtttttttctttgagcttttatttaggaaggtgttaaatgacatccactaagggtacagttttttttatgctcctatttatattatcttcttttaaaactactacctcactacttccaatttagaatgaataccggaataacttcagagaaacttacatcaaatgttctctattctaaacact

SEQ ID NO: 278409 - DNA, 999 bp, Homo sapiens
tttctgactgcagaactagacaaatrtaaaaaaatccacggcatacacattgtactaacactgtagaactcaatttagggtactataaaagctacctaaatatattaactacaaaaggacaatcgttaatcgacagaacaagaagcatcagcaagaagagataccagaagataatgggttaatagctgcacagtgccatgggaaagaagctgttgactcagaattttaaaccaagtcaaagtgtcacttaagtatgaggccaatattaaaatatttttcagaacaacaaaactgagagagtttaaaattcacattccacaattgaaaaaaatatagtaaaggatgtacttcagcaagaagaaaaaagagctaggagagaaaacaatgagaagcaggaaacaacgcaactaccttccatttttggacaactttgaaaaagagtatttacattagaaaaaggaagcaggtggataatatatatttcatgtatctggcatatgtttctattcattagagcagaataatttctgtccctcaawactactccgcaaatctcaatttcaagcattccgccccatgaccaccatcttttactttcacagctccctccctctattctctcagtttcaacgaatcttagactgctctagtaactaaattcgtagattctaccagttttactttctctcaccccctttacggccccattttgctcctcatccagcttaactttcctgataaccattatagtctgtctagtaatcactctttgcatatacctcttctctattactgtcctttatagcttcattattctcccttttcagggtcactccctgatcagtctawctctccacttagctagctgctacgcacagttgaatgtggctagagataaactcatattcaggctgaggaatttcaccttaagctcatcattagtacctcacataggccttcatcctgccctggaatcttactctatttgtctagcccatt

SEQ ID NO: 278410 - DNA, 598 bp, Homo sapiens
tttctaaaatgacaccctacttcagtagagaagaaaaagaatggaaatttatggaatgtcttaaatgtgaagaggatcttctggattaaacacaataattacagaattttaaactcttcatttctcctgtggccataagtcttctgcagaatggaaatattacctttcaaattcttaccacttcaaaggtaaattgcaagatttactgctctacattctcagtacttaaatgagtctaataaatttgtttccacccaaactcattgtaagatgggaattccagctatcatactttcagcggaaagtatgattaactacaggtcaccacagataccatatatggtacaggactgccatgggaattrcaacaggatccaaaaatgtgcatgagcttacatttatttattcagaacgtgcttccgtatctagctgtatctcaacaggaacatcaacaatctccttttaataaggtagctgataatgcatcaatctaaatatacgtatactataattttgacttttttaagcttgcagttttaaaactagttttcatctacttcctttatttgccttaatcttcttgtcacaaatgtaaaag

SEQ ID NO: 278411 - DNA, 341 bp, Homo sapiens
gtctctttaaaatgaaaaatgtttytaaaatgccgtgtcattaatattatattgaaaagttgagagtcgtatgagtcaaaaggaaggaaatacatacatgagatggtcaagagaagtgttaatttacccatccggtccgaaattgcaagtgtttgtaaactgacaattgcagatgaaatagtcattttctgtgcactttccggtatttaagtctccagatacagcatttaacctaaactcaacggaattatttaaaaaaaaaaatcttaaacgagtatgtgctagatcaaagctgaagcttcctccgtttagatttacgcgcaccttcttccttgccacag

SEQ ID NO: 278412 - DNA, 517 bp, Homo sapiens
aggcatgattgtgttttgaaatgtgaggacatgagatttgggaggggccggggtggaatgatatggtttggctgtgtccccccacccaaatctcatgttgaattgtgatcctgagtcttggaggtagagcctggtgggaggtgattggatcatgggggcagatttcccccttgctgttctcatgacagtgagttctcatgagatctggttaagtgtgtagcacttccccctttgcttgctctctccctctgccatgtgaagaaggtgcttgctttcccttcgcccttctgccatgactgtaagtttcttgaggcctcgcagccatgcttcctgtacagcctgcagaactgtgagttaattaaacctcttttcttcataaattatccagtctcaggtagttctttatagcagcgtgagaatggactaacacacgcatcactggagacaaaatgagtcagacacttagycctagaaggcgttatgatgtggaaggcaaataatggttgtacaggcgtgc

SEQ ID NO: 278413 - DNA, 611 bp, Homo sapiens
taggaggcgaaaagaaaagattcttttgctctaaaaaatgtcaatggcatgcaaatgcctatccaactaagtataaagacttcagggtcttataaatattctccaagctatccttacagccttatctctcactacttcccaaaactccagtcaaaatgatgttccccaagcatacactgtgttttcctgtctcagagcctatgctgtttcctctggaggactctggaggactgcccctactatctccatctgtcaaaattgagctgtttttgtcaagacccttctcaagtgccacctcctaggtgatacctttcmtaatttttcccttttttgaatgcccattgctctttgtttaatcccctttttgaatttaccatgtctttcctagttttagtagttcatgtttagattgtaaattccttgaaagcaggcactttgctttccttatttttgtaatccattcagaagcgagggcttgagcatttgtaatcagtgttcaaccaacacttgtcaacttgaattaaactgggaactagaccatgacaacagctttggttggctgtgagggcttctgaggaataagacagtaaccagttaacaccaagttataa

SEQ ID NO: 278414 - DNA, 629 bp, Homo sapiens
agcagtgagaagcatcatatgatttaaaataaagctttgggtcaatatttactgaagtattacatcaatatatttcctgtttsgctgacaagagttaatagctgattttaaacttgtttatctttgctcctagacaaaagttttgttcgaggagattctaaattacgtatttctttcttgatactgctatggaggtgaagcacatagcaagccactttatcttatattttgtattggtaaaaaattttataaattctatgtaagaatacaaaaaaattaaaagaccactgttttttgtcaatcacttgtccttactcttaatggttttatatagtttgcatgtatatactagattggcttatgattttgaaagtagagactccctattataatgaaatactgagaatgcagaaaatatcatagcacaatactctcattgttccagggagttatgttacttaactaaacctggatgtcgttgtatggagattaacagtattaaaaggggtatgccacatggtttgatcagtaataaacctcacctctaaataatgggcattttaaaatgcactgaattaaacatctttatgtctgactgaggtcaagaacattaatatgcagttgcttag

SEQ ID NO: 278415 - DNA, 629 bp, Homo sapiens
agcagtgagaagcatcatatgatttaaaataaagctttgggtcaatatttactgaagtattacatcaatatatttcctgtttcgctgacaagagttaatagctgattttaaacttgtttatctttgctcctagacaaaagttttgttcgaggagattctaaattacgtatttctttcttgatactgctatggaggtgaagcacatagcaagccactttatcttatattttgtattggtaaaaaattttataaattctatgtaagaatacaaaaaaattaaaagaccactgttttttgtcaatcacttgtccttactcttaatggttttatatagtttgcatgtatatactagrttggcttatgattttgaaagtagagactccctattataatgaaatactgagaatgcagaaaatatcatagcacaatactctcattgttccagggagttatgttacttaactaaacctggatgtcgttgtatggagattaacagtattaaaaggggtatgccacatggtttgatcagtaataaacctcacctctaaataatgggcattttaaaatgcactgaattaaacatctttatgtctgactgaggtcaagaacattaatatgcagttgcttag

SEQ ID NO: 278416 - DNA, 582 bp, Homo sapiens
tttgtcttttcaaaaaatcagctctttgtttcattaatgttctttgttgcttttctgttttcaattttattgatttctgctcttatttttctctccttccttctgcttgttttgggtttattttgctcttcacttttatgttcttgaggtgtaaacttagattactgatctgaaatttttcctaatatatgaatttagtactatacattcccytctcaacacagctttagctgtaccacacaaacattgatatgttatatttttattttcattcagttcaatgtgtcttttaaaatttccctaggggcttctctttgattcattgattatttagaagtgtattgtttagtttccaagttttaagggggatttttctgttattgatttctagtttaattgcactgtggttgaataacatactcagtatgatttcaattcttttaaatttctggaggtttgtttcatggtccaggatagagtctatcttgatgttctgtgggcacttgaaaagaatgtgtatttcgttgttgggtggagggtcctataaatttcaatttgatcctgttggttgatgatgttcta

SEQ ID NO: 278417 - DNA, 1037 bp, Homo sapiens
tccacatactgtacaattcacccatttaaagcatacaatttaatgacttttagtgtcttcacaaggttgtgtaatcattaccactatttaattccagaacattttcaccaccccccaaaagaaaccccatatcttagcagttacaacccagtctgccttccccctaggccctggaaaccatcagtctactttctctctctgtggtatctattctagataattcatataaatgcaatcatataatatgtgtcatttgggtctggtttctttcacttagtgtaatgttttcaatttttcatcagtgttgtagcttgaacccgtacttcatttctttttatggttgagtaatattccattatatggatataccacattttatttatccattcatcagttgatggatatttgtgttgtttacactattgggctactttgaataatacaactatgaatatctgtrtacaagtttttgtgtgagcatacatttaaatttcttggcagtatatacctaatgtggaattcctggatcatatggtatctctatatttaactttttgaggaactgccaaactgttttgcaatattactgcawcaagaagggcaaactctaacataaacatttcccaaaaatgcttcctgctaaaacataagctcagtctggctagaaattwagctcacttcataaaaattagttggtagctaatctttgcatgctgttctctgaacttgagtgaaagctgtccatcaggcatacagggaatgacggaaaaggtgacaacagaagatgaatgctatgtcactaaccttcaaagatgacctgccttttctttcaaattcttgatatcttaagacttcattaattcatctctctttgcccttggttcaacattgtgctataccaaaactcatgtaaaacaatgatctattgtaataaaaatggcatttttctttcatgtagatgcaagctatctggcatttttacaatcaacatacttccgttgtcaatttttcattctgtattggaactaattgatagg

SEQ ID NO: 278418 - DNA, 445 bp, Homo sapiens
caagaagggcaaactctaacataaacatttcccaaaaatgcttcctgctaaaacataagctcagtctggctagaaatttagctcacttcataaaaattasttggtagctaatctttgcatgctgttctctgaacttgagtgaaagctgtccatcaggcatacagggaatgacggaaaaggtgacaacagaagatgaatgctatgtcactaaccttcaaagatgacctgccttttctttcaaattcttgatatcttaagacttcattaattcatctctctttgcccttggttcaacattgtgctataccaaaactcatgtaaaacaatgatctattgtaataaaaatggcatttttctttcatgtagatgcaagctatctggcatttttacaatcaacatacttccgttgtcaatttttcattctgtattggaactaattgatagg

SEQ ID NO: 278419 - DNA, 445 bp, Homo sapiens
caagaagggcaaactctaacataaacatttcccaaaaatgcttcctgctaaaacataagctcagtctggctagaaatttagctcacttcataaaaattagttggtagctaatctttgcatgctgttctctgaacttsagtgaaagctgtccatcaggcatacagggaatgacggaaaaggtgacaacagaagatgaatgctatgtcactaaccttcaaagatgacctgccttttctttcaaattcttgatatcttaagacttcattaattcatctctctttgcccttggttcaacattgtgctataccaaaactcatgtaaaacaatgatctattgtaataaaaatggcatttttctttcatgtagatgcaagctatctggcatttttacaatcaacatacttccgttgtcaatttttcattctgtattggaactaattgatagg

SEQ ID NO: 278420 - DNA, 270 bp, Homo sapiens
ttgtctaaccctcaataaatttgctttcatcaaatattgtatttgttaccccaaaattactatcatgtttcttttctccaaataactaacattsggagaaatagccagctgaatctgtaactcaaaagaaacaagtgatccttataccatataagtggccatttcattttgccttcttccaccaaatcttagcaacctcaaccattgccatgagccactgtaagcctaccgtctacaaacaaacaagtatcttttaaaaacacttcatac

SEQ ID NO: 278421 - DNA, 541 bp, Homo sapiens
ttgtctaaccctcaataaatttgctttcatcaaatattgtatttgttaccccaaaattactatcatgtttcttttctccaaataactaacattcggagaaatagccagctgaatctgtaactcaamagaaacaagtgatccttataccatataagtggccatttcattttgccttcttccaccaaatcttagcaacctcaaccattgccatgagccactgtaagcctaccgtctacaaacaaacaagtatcttttaaaaacacttcatacwttgtctaaccctcaataaatttgctttcatcaaatattgtatttgttaccccaaaattactatcatgtttcttttctccaaataactaacattcggagaaatagccagctgaatctgtaactcaaaagaaacaagtgatccwtataccatataagtggccatttcattttgccttcttccaccaaatcttagcaacctcaaccattgccatgagccactgtaagcctaccgtctacaaacaaacaagtatcttttaaaaacacttcatac

SEQ ID NO: 278422 - DNA, 546 bp, Homo sapiens
ttctacagctttgacgacatttacatcctaattttaattattaatatgttggagyagtgcatacaactagattccgatcttcctttttaatgagtaaaaatatgtcctttgagacagcattaaagaaagagcaccttgtataaattcaatgccaagagacaagatattcttgattctgaaatcttgttcttttatacagcaatgtaattaataagaagaaaagcaggacatagatgtggagcctattttaataaaaaattgtctatagattttgatgataaaattaaaaaatctactatatttagttagttacaaaaaactaggttgtgggaacatatttggtcaataaaacacccctaccaagtgctgacaagaaaaaaagttaggtaccacatttcttctctgcagatggcctgagatgggttaatttgaaagaatgcttccaaacctgaggtgacccctgagaacagcataatccactgctgtctcccacattcagtttctcagtttgtgctcttttaattttgcggggagggaagccaggcc

SEQ ID NO: 278423 - DNA, 546 bp, Homo sapiens
ttctacagctttgacgacatttacatcctaattttaattattaatatgttggagcagtgcatacaactagattccgatcttcctttttaatgagtaaaaatatgtcctttgagacagcattaaagaaagagcaccttgtataaattcaatgccaagagacaagatattcttgattctgaaatcttgttcttttatacagcaatgtaattaataagaagaaaagcaggacatagatgtggagcctattttaataaaaaattgtctatagattttgatgataaaattaaaaaatctactatatttagttagttacaaaaaactaggttgtgggaamatatttggtcaataaaacacccctaccaagtgctgacaagaaaaaaagttaggtaccacatttcttctctgcagatggcctgagatgggttaatttgaaagaatgcttccaaacctgaggtgacccctgagaacagcataatccactgctgtctcccacattcagtttctcagtttgtgctcttttaattttgcggggagggaagccaggcc

SEQ ID NO: 278424 - DNA, 546 bp, Homo sapiens
ttctacagctttgacgacatttacatcctaattttaattattaatatgttggagcagtgcatacaactagattccgatcttcctttttaatgagtaaaaatatgtcctttgagacagcattaaagaaagagcaccttgtataaattcaatgccaagagacaagatattcttgattctgaaatcttgttcttttatacagcaatgtaattaataagaagaaaagcaggacatagatgtggagcctattttaataaaaaattgtctatagattttgatgataaaattaaaaaatctactatatttagttagttacaaaaaactaggttgtgggaacatatttggtcaataaaacacccctaccaagtgctgacaagaaaaaaarttaggtaccacatttcttctctgcagatggcctgagatgggttaatttgaaagaatgcttccaaacctgaggtgacccctgagaacagcataatccactgctgtctcccacattcagtttctcagtttgtgctcttttaattttgcggggagggaagccaggcc

SEQ ID NO: 278425 - DNA, 546 bp, Homo sapiens
ttctacagctttgacgacatttacatcctaattttaattattaatatgttggagcagtgcatacaactagattccgatcttcctttttaatgagtaaaaatatgtcctttgagacagcattaaagaaagagcaccttgtataaattcaatgccaagagacaagatattcttgattctgaaatcttgttcttttatacagcaatgtaattaataagaagaaaagcaggacatagatgtggagcctattttaataaaaaattgtctatagattttgatgataaaattaaaaaatctactatatttagttagttacaaaaaactaggttgtgggaacatatttggtcaataaaacacccctaccaagtgctgacaagaaaaaaagttaggtaccacatttcttctctgcagatggcctgagatggkttaatttgaaagaatgcttccaaacctgaggtgacccctgagaacagcataatccactgctgtctcccacattcagtttctcagtttgtgctcttttaattttgcggggagggaagccaggcc

SEQ ID NO: 278426 - DNA, 418 bp, Homo sapiens
aaggagcataaggtttatattgatttgtagcagatgtattaatagcccagcccctattccttacctgtagctgctgkgaagaaaaccattcttaacactctacaaggtctcatctccagaatttgcacctgtttctagctgaggactttctctagcagaacgggagcttgttactggacatgaagtgggaagaaaaggtgaggataactaagaagaatctccccggattcagtgatgtaattctgaggcatgttccacatagcttcccatagaattaagcccagatatatacacaggaacttgcctcttaacacgtgtggtattggcttttctatctttcctgttttattttgttctctcttccttgtctcacttttgctgtgtcctcactcctgctttaagaatacccaaacaaata

SEQ ID NO: 278427 - DNA, 418 bp, Homo sapiens
aaggagcataaggtttatattgatttgtagcagatgtattaatagcccagcccctattccttacctgtagctgctgggaagaaaaccattcttaacactctacaagrtctcatctccagaatttgcacctgtttctagctgaggactttctctagcagaacgggagcttgttactggacatgaagtgggaagaaaaggtgaggataactaagaagaatctccccggattcagtgatgtaattctgaggcatgttccacatagcttcccatagaattaagcccagatatatacacaggaacttgcctcttaacacgtgtggtattggcttttctatctttcctgttttattttgttctctcttccttgtctcacttttgctgtgtcctcactcctgctttaagaatacccaaacaaata

SEQ ID NO: 278428 - DNA, 418 bp, Homo sapiens
aaggagcataaggtttatattgatttgtagcagatgtattaatagcccagcccctattccttacctgtagctgctgggaagaaaaccattcttaacactctacaaggtctcatctccagaatttgcacctgtttctagctgaggactttctctagcagaacgggagcttgttactggrcatgaagtgggaagaaaaggtgaggataactaagaagaatctccccggattcagtgatgtaattctgaggcatgttccacatagcttcccatagaattaagcccagatatatacacaggaacttgcctcttaacacgtgtggtattggcttttctatctttcctgttttattttgttctctcttccttgtctcacttttgctgtgtcctcactcctgctttaagaatacccaaacaaata

SEQ ID NO: 278429 - DNA, 418 bp, Homo sapiens
aaggagcataaggtttatattgatttgtagcagatgtattaatagcccagcccctattccttacctgtagctgctgggaagaaaaccattcttaacactctacaaggtctcatctccagaatttgcacctgtttctagctgaggactttctctagcagaacgggagcttgttactggacatgaagtgggaagaaaaggtgaggrtaactaagaagaatctccccggattcagtgatgtaattctgaggcatgttccacatagcttcccatagaattaagcccagatatatacacaggaacttgcctcttaacacgtgtggtattggcttttctatctttcctgttttattttgttctctcttccttgtctcacttttgctgtgtcctcactcctgctttaagaatacccaaacaaata

SEQ ID NO: 278430 - DNA, 612 bp, Homo sapiens
ttctgaatttctaaacgaagaaaaatattcatcaacctatggctaaataacatatttagagataaaaaacaaaacgtcaccagcagaattccactaaagaaactacagagaaactctgaaaatattcttcagaaaggtcraagttctgaaatcaaagaatgaacagagagtataatatattgcaaacatacagatagaacaaataagaaactgggttttgaaacaaaaatatatttaaaattagataagcactgcaatatgtatgataaaaagaaaattattagggctgaagtattcaaagaacacttaattgtctgacaagagcagaaaaatgagtatgactttgcaactctttctttttcgaatggaatggaatggaatggaatagaatgaaatggaaaggaattgaatggaattgaatccaatggaattgaatggagaggaatggaatggaatgggagatgagattgtgccattgtgctacatgatgggtgacagagtgagacactcttgaaagaaaggaatggaatggaaagcagtggaatagaatggaatggaatgcagtggagtggagtggagtggagaggagaggagtggaatggagtggaatgg

SEQ ID NO: 278431 - DNA, 612 bp, Homo sapiens
ttctgaatttctaaacgaagaaaaatattcatcaacctatggctaaataacatatttagagataaaaaacaaaacgtcaccagcagaattccactaaagaaactacagagaaactctgaaaatattcttcagaaaggtcgaagttctgaaatcaaagaatgaacagagagtataatatattgcaaacatacagatagaacaaataagaaactgggttttgaaacaaaaatatatttaaaattagataagcactgcaatatgtatgataaaaagaaaattattagggstgaagtattcaaagaacacttaattgtctgacaagagcagaaaaatgagtatgactttgcaactctttctttttcgaatggaatggaatggaatggaatagaatgaaatggaaaggaattgaatggaattgaatccaatggaattgaatggagaggaatggaatggaatgggagatgagattgtgccattgtgctacatgatgggtgacagagtgagacactcttgaaagaaaggaatggaatggaaagcagtggaatagaatggaatggaatgcagtggagtggagtggagtggagaggagaggagtggaatggagtggaatgg

SEQ ID NO: 278432 - DNA, 553 bp, Homo sapiens
tgttctcaccagaaattttaaaaaagaaaggtaaatatgtgaggtgataaatatgttacctagcttgattgtggttatgatttcacaatgtatattaaaaacatcaaattttataccttatatatagataattttttgtcartcatattcagtaaagctgaaaaagcgctggggagaaaacattaaataatcatgctattggataagtaattacaatctgagattctgtacaacaaatctgtgagtacctactgttttggtaggtactgttctggtcactggacatattccaataagtaagctttcttcatacagtttacagtcttgaggatggcagaaataaaaaataatttttaaaagataatctcagatagtgataaatattggatatacaacaaaaataaaagtgagtagctaccttgaaagacatggccagtaaatatttctttaataaggttgtcacctttgaagtaagacctgaaaattgtaaaggtaccagccaggaaaagatttgaagtcagaatcttcaaagatgagaaaaaaacaaatatag

SEQ ID NO: 278433 - DNA, 629 bp, Homo sapiens
agggtaaactttattccaaagaccactataaactgggccattgaccaagtccatctttgtcagaacctatttgtccaggactcaatgcgcttctgagggcattgaggaatggaggactcatgccccagtatagcaggccaaggccttcttagccagctttagcctgtgatgtatctgaatgtctaacaaaaactgcctcktgctttcgcaataattttttagttgtagctactattagcaggactatattttatccttgatttggatgacataacttctgtagtagtatggcattaaagattttctggaaaactcttttaaaaagattccagaggaaaaagatgcattttgtaagatagagctgtacttaaaatgatgtatgtgcagaacgacagaaagaaacctaaaagctaagcacaacactataccaagaaaaataaaaactgaaatgattaggtagtgattcattgccccagaaataatatctatgtgaatggttatggaaacatgttaacaatgctgtacttgtgtttcctttttaagtacctggaatacattctgaccaagtgaacatattatctgaattctactacccacctaaggattttaataaggctacattggttaca

SEQ ID NO: 278434 - DNA, 556 bp, Homo sapiens
ggtttagtttttattctagcatagccatatattatatataacatgctgttgtgtttagtatggctctccataaatacaacgagctatagcacctctgtgactttgtcactattttatatacctaatggctgaactattccattacactgaaatgatagtacacaaacatgtcttccattagctacagtttctgtgatttaatgatttatttaatatagagtatatctcattgcaagaaattccaggacattctctggggaatacaagtctggaaaggaaatacaaagctactggagggacttgagcaaagaaaaaggctgcttaaagagaataagaatcaagagagaatatactgagatttcttagcttgttccccaaatggagaaactagttatttccctaaaagaggatatataattaatataattacttcttatatgtcagctaaataaagttgctaaaacaaaaacaaaagctttcctcatgttaactgtaatgttycaaattattcttcttaaatgaaacaatgttcctaggtcatagagttgattgctaa

SEQ ID NO: 278435 - DNA, 546 bp, Homo sapiens
tcatacttttattatcataggatagattcatagaagtgtaattcatgagtcaaagaatttgacatcagtttgtgatttcacatcacaaaggtcatgtgattttttttaaatactgaaaattactttccaaagtgttgtagcaatttagaattcttctgaacgaataagagtgcccattgattttacttagctgtatctgctgggtatcattttaatattttccaatacaattatttgtaaaagcacctgattattgttttaatttttataacttgactatgtgagatgcctggcattattttatatgttcattagccattttcatctctttttctgacaattgcctgcttgtgtccctagctctttattggcctgggatatagaacctattattaaccagggacattaatattaccctaccatctctatctggaaatgtataagatggtctcttttatcttatatgttcccgatatatgtctaagaatatgtctttttaatattaattctgaccagcttrccatgtatccctgagaatagaaaact

SEQ ID NO: 278436 - DNA, 631 bp, Homo sapiens
cataaagatgaataagaaactttgaggacttcagagtaagtagtataatgatgacaaaaggaacttttccaaaacaggtagaattaaaacaaactgctagtattaccaattttcacaatacacataaccagcattacaaactatacataaccattaataagggcaagacaaaaacttacctcactcccataattctactgaaatcatagtggcagtgcacaaaatgcaatgcatatgaattggcattgataataacaggagagaactctagagattttggtgaatatgtgcaaatagaaagtgaattgttttgaatgggttgatgaaccagaaaggcaggacrtacagctcaaaaaatccacaagaaaaacagttgggagccactcttctagaaacaaagaaattctgaatcagcagacagaatggaactaagaaggcacaaagaaatcagagtgactgagtggaggaatttctaccaaacctgtgttgcctaccctactcacttctttctcatatttcagagccactggaaatgatgacatatatcctcagggcaaaaggggaagcaggctttctaaagaagtaaatcaaggtacctgaaaagcaatagagctaatgtgtatgctgtcac

SEQ ID NO: 278437 - DNA, 606 bp, Homo sapiens
agtctgaaactggaagcctaaattcaggaatggattctgggatggacagaagagggcatatagtgctgttattgcatataaacatatcacctatgtcacggcaaggagtcagcatttagggcagtaatatcacttgttaaaaaatactgctgccaggatggcctggaaactcaataagccctaatcaggaaagagtagaagcagagggaccaattagcagactcttgcagtagtcaaaattaagtgtaataagggccagaggtggcatggtagaaaaaagactataggggttgacacaaagaagattcaggagaaaaacmctccttaaaaaaaaaaaaagttttaaagttaaaaccctctcatttgaagcaattgcatatgttaggcaatttctccaaaatttaagtgctaattgatagattctgaagctgtcttgcaaggaagttcttgtacccttagaaaagtcattctctcagtgacctggttgctgcattatcatctcaaatgccatttttttcttactgtttcattacattgtcaccttcaaaggacaaaattacatgtaagtcataaatcttatttccctaagaccaaaagaaaatcttc

SEQ ID NO: 278438 - DNA, 606 bp, Homo sapiens
agtctgaaactggaagcctaaattcaggaatggattctgggatggacagaagagggcatatagtgctgttattgcatataaacatatcacctatgtcacggcaaggagtcagcatttagggcagtaatatcacttgttaaaaaatactgctgccaggatggcctggaaactcaataagccctaatcaggaaagagtagaagcagagggaccaattagcagactcttgcagtagtcaaaattaagtgtaataagggccagaggtggcatggtagaaaaaagactataggggttgacacaaagaagattcaggagaaaaaccctccttaaaaaaaaaaaaagttttaaagttaaaaccctytcatttgaagcaattgcatatgttaggcaatttctccaaaatttaagtgctaattgatagattctgaagctgtcttgcaaggaagttcttgtacccttagaaaagtcattctctcagtgacctggttgctgcattatcatctcaaatgccatttttttcttactgtttcattacattgtcaccttcaaaggacaaaattacatgtaagtcataaatcttatttccctaagaccaaaagaaaatcttc

SEQ ID NO: 278439 - DNA, 557 bp, Homo sapiens
gagctgatttgttaagcacatgtgaaaatttctttccttttttataatttcaacttttattttagattaaggaatacatgtgcgrgtttgttacatatgcaaatgtttaatgatccttaatttacaacatagagatatttaagggagattgctacaatatcaaatttaaaaagatattttgtttcccagagtttaagtcaagcttgtccaacctgtggcctgggagcctcatgtggcccaggatggctttgaatgtgacccaacacaagttcctaaagtttcttaaaatattatgaggttgtattgcgattttttcttttcttctcttttttttttttagctcatgatctctcgttagtgttagtgtattttatgtgtggcccaagacaattcttcttctaatgtgccccatagtagccaaaagattggacaccccttgttacggattaaatatatattttttaggatgatttgaaaactgattatgctgtaggggccagtttactgtaatcagaatgcttcctcagttgatcaagccagaaggaagcatgcaggcc

SEQ ID NO: 278440 - DNA, 569 bp, Homo sapiens
tattgatgcaataatttatatctacttatattgtgtatgctaacccattgtttatagctataattgtttaaatacatttgtttttttaactattatactaatgagtgatttacataacccctttacggttttagtatattctcaatttgagtatatgtttacctttagtagtaagctttatacttccatatgtttttatattttacttattttccttttatttcaactcaaacaattcccttaagcatttcttataaggccagtcccatgatgatggatttcctcagcttttgtttgtcttagaatgtcttgatctcatttttcatttctgaaggactgtgttgctgggtgtagtatgttttgttaacttattttttagcactttcaatatgtcatgccactccctcctggcttgcaaggtttctgttgagaagtcatgtrtagtcctatgggagatcatttttatgtaataagtttcttctcttttgctgccataaagcttctttgtttttggctttaatttgattacaatgttaaaatcagaaaccaatgagatttaaggcagcaag

SEQ ID NO: 278441 - DNA, 616 bp, Homo sapiens
accttggtcttttgtaaaccatctagtaaggtaaatgtcctgtgtagccattttatagctcaagtcaaaggtttggaattaataattttacaaggcttccacttagccttctttttttgtcattttgttttgaaaggctagtgtcatttcttataattcatagttagtgaaccaaaaaggcttttgatatacatatggaccaaatttccattacttctttttttagcttaaattgtcattatccaatagtatttattgaaccagatttgtgaggaatctgtgaaatttgtttattgtaggtacccatgacaccacattgtgaagggtatcctctaaatgtttgtagaatcagtgacatgcaatttttgttaattctcctcaagaatagcagcttatcatctaccagttatagtgtcatctaccatcatatttaaccttttaaggacactgaatcgccagagttatctgctttaataatgcacatttttcggcaagaaagtttgagggcagtgatttatattatggtccatagatctttgacagtttctragctattcggttggtgggcttgacatcagtgattctccattgaagatctagaaagaaatatagcaga

SEQ ID NO: 278442 - DNA, 623 bp, Homo sapiens
  misc_feature (1)...(623): n = A,T,C or G
nnnnnnnnnnctcgtggttttccaccagaccctgctacgcaggctgttactcaccttttttgtccccatatccaaagttttcttttacttttatgttgaacttttgygttccttcttggatagaagttctcagtgtgaatgtctatgcactattctgctatttccaagtaggttaggcatcctggcaaagcctctattctgtcattttggaaacaaaacaaaacacaacaaaatgcatggcttttaatgctggatcatagaaagtaatacagctttcatctgcttctctctctagggacacttgcccttggaaccttgtcttaaggaaacccagatcgaatgcacagactacattggttgttgtggttgacagttgcagctaagattcaagcctacagccagtatctagaccagatatatgaatgaatgagcctttcttgcctccagccttggtctgttctaccggatactgaagtgggagaaataagttgtccccactaaggactgctcaagttacagatttatgagcaaagtaaatgttgtcatggatttcagtcactaaattttgggtggttcattatgcagcaataggtaacacaaactattaaagtctttattagtat

SEQ ID NO: 278443 - DNA, 573 bp, Homo sapiens
tgagtacaacctatacattacatagtaggagtaccaatgttaaatttcttgaatgtaatctttatactgaggatatgtgggagaacatccttgttttaggacattcatgcagatgtattgaaacataaagagggaaagatccagcttgtgtggcaagaagggagcagttggtgactcatggtggatgtatgctgttcattgtactcttctggaaagtttatgtttgaactttctcaaagtaaaaaattgggagaaaggtaattttctgagtaaatatattattcattatgctttaatatcataatcttaatttttgtaaacattttcagaagacagacactaccactgacccatggcctatgaaatttcrtctatgttctatggtaataataattattatgcttataactgatcactaaactatgccatataccatgctaaacacttcaaaacatattatctcatttgcctcttatggaaacaatattgtgattatttctacatttcacacaagtaacttagagtttagtgagataatgttaacctgtccacaaggcagaattaacatttgca

SEQ ID NO: 278444 - DNA, 573 bp, Homo sapiens
tgagtacaacctatacattacatagtaggagtaccaatgttaaatttcttgaatgtaatctttatactgaggatatgtgggagaacatccttgttttaggacattcatgcagatgtattgaaacataaagagggaaagatccagcttgtgtggcaagaagggagcagttggtgactcatggtggatgtatgctgttcattgtactcttctggaaagtttatgtttgaactttctcaaagtaaaaaattgggagaaaggtaattttctgagtaaatatattattcattatgctttaatatcataatcttaatttttgtaaacattttcagaagacagacactaccactgacccatggcctatgaaatttcatctatgttctatggtaataataattattatgcttataactgatcactaaactatgccatataccatgctaaacacttcaaaacatattatctcatttgcctcttatggaaacaatattgtgattatttctacatttcacacaagtaamttagagtttagtgagataatgttaacctgtccacaaggcagaattaacatttgca

SEQ ID NO: 278445 - DNA, 604 bp, Homo sapiens
ctccgcatttgcttcaatttttgttatcaacataaacagccagcattggagtcaggtgtttactgcctacatgaccagctttcctgctttttcttcaagcatcactcctcttattgagaggtatatgtgcatattatcaaccctcatgtagcaaaaaagaaaatcctttattcttactatactaaaaactaagagaagaattgatttggaaaaaaaattacaatttctcataattttatcattcaaagaaaatcagttttaacaaccrtatctatactatactttttccatatatatttatgtacatggaatatgtgtgtgtatatatatatgaatatgtgtatctatattgtgtatatgtctttatatacctttttacaagtatcgttaacttgatttttcagtttaatatactgtggacatatttcactaaaaaaatgtacaactacattggcacatttgaaggctacgattttctagattaggagttggcaaacttcttctgcaaagggacagatagcaaacattttaggctttgtggaccacatgtggtctttattggtaaaactgcaccctcctcctcctctttctcctcctttcttct

SEQ ID NO: 278446 - DNA, 573 bp, Homo sapiens
gcagcaattggatgctgaaattcagcaatgcaaactttcactagcttagctataaaataattgaagcagtttaataaagtaatacaaataagttactgcagttttaaaagtttgtttgagaagctcaatcaagtatatgagaggtctgtgccatgataatgtcaaattttcataagccaggctgttttccttgtaatgttgaagtaccatcactgtacaagacgaaatraggctttcttcaaaggtgagtgtcaccgactggttttctggattttccccctaggtattccctttagtgcaaggatgggagttgagagtgtgtacctgaatgcctgtttaatgttattattttctatattccacaatgtctccacttattttaggctttagcagtcactgttaccgaaaagtctccattctctaatctagcaccagaactgcttccaatttaggtgggagaggttttctaagtcaatgccaaacgtatgtgggttattcaattagtgtttgttaaattgaacagccaattgtcttacttgttccttagttgttctcacccaactaaccatgtgt

SEQ ID NO: 278447 - DNA, 573 bp, Homo sapiens
gcagcaattggatgctgaaattcagcaatgcaaactttcactagcttagctataaaataattgaagcagtttaataaagtaatacaaataagttactgcagttttaaaagtttgtttgagaagctcaatcaagtatatgagaggtctgtgccatgataatgtcaaattttcataagccaggctgttttccttgtaatgttgaagtaccatcactgtacaagacgaaataaggctttcttcaaaggtgagtgtmaccgactggttttctggattttccccctaggtattccctttagtgcaaggatgggagttgagagtgtgtacctgaatgcctgtttaatgttattattttctatattccacaatgtctccacttattttaggctttagcagtcactgttaccgaaaagtctccattctctaatctagcaccagaactgcttccaatttaggtgggagaggttttctaagtcaatgccaaacgtatgtgggttattcaattagtgtttgttaaattgaacagccaattgtcttacttgttccttagttgttctcacccaactaaccatgtgt

SEQ ID NO: 278448 - DNA, 1114 bp, Homo sapiens
  misc_feature (1)...(1114): n = A,T,C or G
tgttctctgtttttgcctaatgttgtatttctgttccaggatcctatccaggatatgacattaactttagttgtcatgtcttcttaggctttttttggcaatcatagtttctcagactttttgttgtttttgatgactttgaaagttttgaggagtataggacaggtaaattataggatgctctctcttggaatttgtctgatgactttcacatgatcagatttgggatacccatttttggtagtgatatggtttggctgtgtctccccccaaatctcattttgaattcccacatattgtggaagggacccagtggcaggtaattgaatcatggggcaagtctttcccatgctgttctcgtgattgagagtaagcctcacaagatctgatggtttaaaaagaggagttcccgtgcacaagctctctctcttttgcctgttgccatccatgtaagacatgacatgctcctccttgccttccaccatgattgtgaggcttcaccagccatgtggaactgtaagtccaattaaacctttttcctgtattaattacccrgtctcaggtatgtctttatcagactaatacaggtaggaagagcacagagaaaaagtgccatcctcatcacatctcatcaaggatwagttcccgtgcacaagctctctctcttttgcctgttgccatccatgtaagacatgacatgctcctccttgccttccaccatgattgtgaggcttcaccagccatgtggaactgtaagtccaattaaacctttttcctgtattaattacccggtctcaggtatgtctttatcagactaatacaggtaggaagagcacagagaaaaagtgccatcctcatcacatctcatcaaggatacatactatcaaaatgacttgtcactgtggatgtaatccttgatcacctcacggagwcagtgtttgtcagatttctccactggaaagctactctttttgatcctttccatgctgtatgtnttcttcagaagggagccgttttatgcagcccactcttcagaagtgcagcattatgctccatctcctcgggagcagggtatctacggaaatcacttggaatttttatttccaggagattt

SEQ ID NO: 278449 - DNA, 575 bp, Homo sapiens
  misc_feature (1)...(575): n = A,T,C or G
gtccaattaaacctttttcctgtattaattacccggtctcaggtatgtctttatcagactaatacaggtaggaagagcacagagaaaaagtgccatcctcatcacatctcatcaaggatacatactatcaaaatgacttgtcactgtggatgtaatccttgatcacctcacggagacagtgtttgtcagatttctccactggaaagctactctttttgatcctttccatgctgtatgtnttcttcagaagggagccgttttatgcagcccactcttcagaagtgcagcattatgctccatctcctcgggagcagggtatctacggaaatcacttggaatttttatktccaggagatttgtccatttcctcttatttaatatttaatgatttatatcaacataggttcatggttttaaaatatattttgggttataatccaaccttactttattcattttgttcaaatgactcttgccactgtgatcatttgacacgtctccatctctgtgaattgttggaggttttgttttggtttttgagcactttactttctggcactacggggtgttctagg

SEQ ID NO: 278450 - DNA, 542 bp, Homo sapiens
atcaatcaggactgcatttaccaaagactgaaaaacagtggtttaaactagatgaatgytttaccttcgtcatagaacaagaaatctcagtgctggagtccagagttaaggccctgttcaaggaatcagggtgctctgtcctcctgctgaagcatctttagaatgtagctacaagatggctgtgttgcctctaggcaatggtgaaagttccaggcagaaagaaagggaaaattcctcttctttttaacaggaaagtgaaggaagcttcacccagtagaattccacttacatttctttgtcctaaacaaggttaaatggcataattatgtcactaaaaataatcttactgaatatttaaggagaagtaaagattagttatagtagatttcctgttgcaagaatatgtctgacttgatcatttaaaaaccttctttaaaaaagcacctacagcagtggcaacaaaagcaaaattgagaaatgggatcttaattaaactaaagagcttctgcacagcaaaagaaactatcatcagagtgaacagg

SEQ ID NO: 278451 - DNA, 542 bp, Homo sapiens
atcaatcaggactgcatttaccaaagactgaaaaacagtggtttaaactagatgaatgttttaccttygtcatagaacaagaaatctcagtgctggagtccagagttaaggccctgttcaaggaatcagggtgctctgtcctcctgctgaagcatctttagaatgtagctacaagatggctgtgttgcctctaggcaatggtgaaagttccaggcagaaagaaagggaaaattcctcttctttttaacaggaaagtgaaggaagcttcacccagtagaattccacttacatttctttgtcctaaacaaggttaaatggcataattatgtcactaaaaataatcttactgaatatttaaggagaagtaaagattagttatagtagatttcctgttgcaagaatatgtctgacttgatcatttaaaaaccttctttaaaaaagcacctacagcagtggcaacaaaagcaaaattgagaaatgggatcttaattaaactaaagagcttctgcacagcaaaagaaactatcatcagagtgaacagg

SEQ ID NO: 278452 - DNA, 542 bp, Homo sapiens
atcaatcaggactgcatttaccaaagactgaaaaacagtggtttaaactagatgaatgttttaccttcgtcrtagaacaagaaatctcagtgctggagtccagagttaaggccctgttcaaggaatcagggtgctctgtcctcctgctgaagcatctttagaatgtagctacaagatggctgtgttgcctctaggcaatggtgaaagttccaggcagaaagaaagggaaaattcctcttctttttaacaggaaagtgaaggaagcttcacccagtagaattccacttacatttctttgtcctaaacaaggttaaatggcataattatgtcactaaaaataatcttactgaatatttaaggagaagtaaagattagttatagtagatttcctgttgcaagaatatgtctgacttgatcatttaaaaaccttctttaaaaaagcacctacagcagtggcaacaaaagcaaaattgagaaatgggatcttaattaaactaaagagcttctgcacagcaaaagaaactatcatcagagtgaacagg

SEQ ID NO: 278453 - DNA, 542 bp, Homo sapiens
atcaatcaggactgcatttaccaaagactgaaaaacagtggtttaaactagatgaatgttttaccttcgtcatagaacaagaaatctcagtgctggagtccagagttaaggccctgttcaaggaatcaggstgctctgtcctcctgctgaagcatctttagaatgtagctacaagatggctgtgttgcctctaggcaatggtgaaagttccaggcagaaagaaagggaaaattcctcttctttttaacaggaaagtgaaggaagcttcacccagtagaattccacttacatttctttgtcctaaacaaggttaaatggcataattatgtcactaaaaataatcttactgaatatttaaggagaagtaaagattagttatagtagatttcctgttgcaagaatatgtctgacttgatcatttaaaaaccttctttaaaaaagcacctacagcagtggcaacaaaagcaaaattgagaaatgggatcttaattaaactaaagagcttctgcacagcaaaagaaactatcatcagagtgaacagg

SEQ ID NO: 278454 - DNA, 566 bp, Homo sapiens
gcctcttaatatgagttggcaaatggtagctgtttttcccctactcttaaagggtttgtgtaagattaccatttcttccttgaatgtttcttagaagccatctgagcctggagttttctttattgtaacattctaaattatatatttaacttttaaaatagttggagatyattcaaattctctattctgttcctttacttgaagtatttttcaaggaatatatccattttatttatattttaaaatattgttttataaagttgtttaaaacattttttaatgattttgtaggtctgcgggacctgtagtaatgtcttctttttcattcctgacattggttgtttcttttcttgttttccttgaacagtttcaccaaggaagctgatgaatccaatatattttatcttattaatttatgttctaactttattatttccttctctctgctttctttgagtttaatttactgttatttttctgtcttcttggatagactcttaactcatcaatttttaaagcccttcctttttttatatagtactctgtatacagttaaaatgataaag

SEQ ID NO: 278455 - DNA, 563 bp, Homo sapiens
gggtgttcttggcacctgctgagttaggtttacaaactttttatgtattaggccttttctttttatagactgtgcatgaacctaattgcttttttatttttcatatgctattatttgtgttatggacttttttaaagtattttattaaaaatagcatatcaacgttattttttcttttttcccctamatgttctacccagtactaaagcagtaaattaaaaatagaatatcagaatttctttttcttttctctttctctctctttttatagcaatcatgctacttagtattctgttctatgggccaaaaacaggactttacaatctgcagaagcatgagggctctatcagtatgggtttatgtgttctaccatagataaaaagccaaatccaaggacttaactaaaagtgagttttaaccttaagcactcagaaggaaagtggtaggtagttgtgggttttggctcactggctcaagattatcagggattgcatttccttgattcttttggccttttcctcataattataagatgacaactaagctcaaagaccatgcccata

SEQ ID NO: 278456 - DNA, 563 bp, Homo sapiens
gggtgttcttggcacctgctgagttaggtttacaaactttttatgtattaggccttttctttttatagactgtgcatgaacctaattgcttttttatttttcatatgctattatttgtgttatggacttttttaaagtattttattaaaaatagcatatcaacgttattttttcttttttcccctacrtgttctacccagtactaaagcagtaaattaaaaatagaatatcagaatttctttttcttttctctttctctctctttttatagcaatcatgctacttagtattctgttctatgggccaaaaacaggactttacaatctgcagaagcatgagggctctatcagtatgggtttatgtgttctaccatagataaaaagccaaatccaaggacttaactaaaagtgagttttaaccttaagcactcagaaggaaagtggtaggtagttgtgggttttggctcactggctcaagattatcagggattgcatttccttgattcttttggccttttcctcataattataagatgacaactaagctcaaagaccatgcccata

SEQ ID NO: 278457 - DNA, 500 bp, Homo sapiens
aaaggtgttctaccctcgtaggtcagcggcagaactcaaagtacaacagggacagcggagartctcggatccatccggtgtcttggtacatgcgtttcccaccagccactcccaaaaaagaccagggaagtggatttgatatttaaaattgagaaggacttagggcactgtggtagcaatataaagactaatgcccacctgttataaaaggaacggtgagggctgagcacggtggctcacgtctgtaatcccagcactttgggaggcggaggcaggtggatcacctgaggtcaggagttcgagacaagcctgactaatatggtgaaaccccatctctactaaaatacaaaaattagctgggtgtggtggcacatacttgtagtcacagctactctggaggctgagacaggagaatcgcttgaacctcagaggtggaggttgcattgagccgatattgcaccactgcactccagcctgggtgacagagcgaggctctgtct

SEQ ID NO: 278458 - DNA, 660 bp, Homo sapiens
tgagcatatggaaaaatgctcaacatcactgataatcagggaaacgcaaatcaaaaccacaatgtgataccaccttactcttgcaagaatggccataataaaaaaaataaaaaataatagatattggtgtgaatgtggtgaaaagggaacactttaacactgttggtgggaatgtatactagtacaaccactatggaaaacagtgtggagrttcctttaacaactaaaagtagatctaccgtttgatccagcaatcctactacttgttatccaccccaaagaaaagaggtcattatacaaaaaagatacttgtacatgcatgtttacagcagcacaatttgcaattgcaaaaatatggaacaagcccatatgcccatcaatcaaagagtggataaagaaaatgtagtatatatataccacgcaatactactcagccataaaaaggaatgaaataatggcatttgctgccacctggatgtaattgaagactattattctatgagacgtaactcaggaatgaaaagctaaatattgtatgttctcactcataagtgggagctaagctatgaggacgcagaggcataagaatgatacatcggaatctggggacttgggggaaaagggtgagagtggggtgagggaaaaaagactacacattgg

SEQ ID NO: 278459 - DNA, 630 bp, Homo sapiens
gttgaccttggaaactaatttcccaggctccctgatccctgacttccacgtaagatgagccaatagaaggcaccggcagacacttgaagggaaaaagaggatccagggcatttcctcctttctcagcttctagtggtgtctggggaagggctgtgtatcctccaaggtgtcacttccgcggagatcccctgcccccaggtcccagctcccagcaggtgctcctgattcctgggctttggtaacatcataccctcctttgttccccaggcctggggatgttggtggccttccatgttgctgacctctgggttgtcctgccatcctcatggtcttttcagctcttcgaacacctttgtaacaagttcccctcttaaacctctctctgcagagctacctcttgtgcattctttttttactaactccacctgactgacacaacctctaaaaagaaaaaataagagaatatcattatgttaaaattaagaaagtgaagatgaaccccaaastgggagaatctatttgtaaagtgtaacggacaaggaattgatatgaagagcatttaaaactcatgctaatgaataagatttgaaattattaaaaagtatcaaacagaaattctggagttgaaaa

SEQ ID NO: 278460 - DNA, 513 bp, Homo sapiens
tgttcatttttatcctaaccactgtaaactcactgtttaattctagaaatgttatttcacatttatgaatcatatcttctacatctgtaaaatgaaagggctaaactggttgatctgtaagattctttctggtcctaaaacattttgattcttcgtgtaacctatgttaggttggtggtgagtgcactaagagagtggaaaagaatttcactccccrtatttgaagatcctcagcaaaaataaattttttaaaaatgaaactttaaaaaaagagaactagtacagctccctaaagtcattttgaagatcatattttccacctaggaggtgtgagaccagccacctttgattcaatggaaagtatttagatttttttcttgcctttccataagatctcgaattttttagtgtaatttttgagtgcagaatctcgagattttgaattttgggtgtagttggctaacaaacaaaggctgaaaaggaagaatggaagggagggaggaaagaagggag

SEQ ID NO: 278461 - DNA, 604 bp, Homo sapiens
tttctgtcttttttctttccacttttttctttattctattattttgtgttaaacaaatacattctaagaaatctataaaatagaaaaatatgattcatttttcactgtgttatgaaaaataaatgtgagtatatggctaaaaatttatagtattattttgaatcaggtctagttgacctatctaattactttgggggttggtttttttctagtgttttaagaagaaaacttatattattaatcagaaaatyttcttttttctgatataggtgttgaaagatgttaaaatttatgtcataaattttatatcatctgtataaatttatatcatatatgaaattctctatatgttccaacacttacatcttcctgtgtgcctgtaatcatgccattctcagtaaaaagagcaaagctagaggcattatattgtacgatttcaaaatatactacaaactataaaccaaaacagcataatattgataataaaacagacacatagaccaattaaacagaatagagaacccagaaataaattcacatatttatagacaacttattttttacaaatacaccaagaacatacattggggaaagcagatttctt

SEQ ID NO: 278462 - DNA, 618 bp, Homo sapiens
atttatagtattattttgaatcaggtctagttgacctatctaattactttgggggttggtttttttctagtgttttaagaagaaaacttatattattaatcagaaaattttcttttttctgatataggtgttgaaagatgttaaaatttatgtcataaattttatatcatctgtataaatttatatcatatatgaaattctctatatgttccaacacttacatcttcctgtgtgcctgtaatcatgccattctcagtaaaaagagcaaagctagaggcattatattrtacgatttcaaaatatactacaaactataaaccaaaacagcataatattgataataaaacagacacatagaccaattaaacagaatagagaacccagaaataaattcacatatttatagacaacttattttttacaaatacaccaagaacatacattggggaaagcagatttctttgttaaatgatgataggaatactggatatctacatgcaggagagtaaaactagacccctatctctcaccctatacaaaaatcaactaaaaatggattaaagacttaaatctaagactagtaactgtaaagttactagaagaaaacatagtcgatac

SEQ ID NO: 278463 - DNA, 458 bp, Homo sapiens
tgatatatttaaaacgctgaatgaaaaaacgtttaccatgcagtagtatatccagcaaaaatatctttcaaacatgaaggagatataaaaacttccccagacaaacaaaagctgagggatttaataaacaccagacctgccctacaagaaatgctaaaggaagtacttcaatcagaaaataaaaggatattaatggrcaataaggcatcatctgaaggtacaaaattcactggcaatagtattgtattagtcagcattctcttatatatatgaaagtttattcaatattaacttacacaatcacaaggtcccaaaataggctgtctgcaagctaaggagcaaggagagcccgtccaagtcccaaaactgaagaacttggagtcccgtgtttcagggcaagaagtatccagcacaggagaaaaatgtaggctgggaggctagccccatctgtctttcac

SEQ ID NO: 278464 - DNA, 991 bp, Homo sapiens
tgatatatttaaaacgctgaatgaaaaaacgtttaccatgcagtagtatatccagcaaaaatatctttcaaacatgaaggagatataaaaacttccccagacaaacaaaagctgagggatttaataaacaccagacctgccctacaagaaatgctaaaggaagtacttcaatcagaaaataaaaggatattaatgggcaataaggcatcatctgaaggtacaaaattcactggcaatagtattgtattagtcagcattctcttatatatatgaaagtttattcaatattaacttacacaatcacaaggtcccaaaataggctgtctgcaagctaaggagcaaggagagcccgtccaagtcccaaaactgaagaacttggagtcccrtgtttcagggcaagaagtatccagcacaggagaaaaatgtaggctgggaggctagccccatctgtctttcacwagctgaatgttattcaccaagacaatggggaaaatatctccaggcatgtcagagacctttgctacagcccttcccatcacaagcccaaaggcctagcwggaaaaaatggttttgtgggctggacccagggaccccctgctctatgcagcctcgggacatggtgccctgcatcccagctgcttcagttccaactctggctaaaaggggccaatgtacagctcaggctgttgtttcagagggtgcaagcctcaagcctgggcaggttacacatgatgttgggtctgcaggtacacagaagacacaaattgaggtttgggaacctctgcctaggtttcatcaaggacagaaatgccttgatgtccaggcagaagtctgctgcaggggtggtgccctcttctgtccaggcagaagaaacacttagagggcagtgcagatgggaaatgtggggttggagctgccacacagagtccccacttgggcattgcccagtggagctgtaaaaagagggacacagtcctccagacccagaatg

SEQ ID NO: 278465 - DNA, 524 bp, Homo sapiens
gaataatggactagcttgagacttaagacctttaaagatactaatctaatcacttatagagtaggctgcatttgtcttcctacttgagcctaaacaaatgatctttgctctaaaaatgactgatttgtgctagaaagaaagggaaagaatgagcaaattattagacaatatgagagccttaaggaaaataaaaaaaaaggagtttataccaacagcaacaaaaataactgctctgaaacagaagaaaattagaaccagtgaaacaaaatatgtgacaaagagaaaaaaaactgtttgctcccagatatttaaataacacaagaggcctctctcctggccttagtaggtcagtcttacccttacaagaaagcatccmcaaagcaaaaaaagaaaaaaaaaaaaaaaaaaaaaagacgccaaggcaaacaggaagaattctgggcctagtctttggaataaaatatgtgtagtgatggtcagtgacactcagtgacaggcatttataggctaaacaggagatgcag

SEQ ID NO: 278466 - DNA, 648 bp, Homo sapiens
tgagggcatggtgaaattaattgcccagccaaactagcaagctcaactgaagagtggtattttgttctaggttatgtacacatacaaaaaatgtaccagaccccaaatggaaaatggacacagaagaataggaaaagtatatggtgcaaaaactacatagcaaataaaaataaaatgaccttaatatgatcttgattcttttctcactgaaaaatagagagtttttaataggcccaaggccaactggatttagactgcctsagctcagtgcctgatctgtctacctactagctgagtgatctgtggcaaaaaaatgtcagattcctcatctgtaaaacaaggcttattgatacttacctcagtacaatattgctattctaatggcacctcttcaaaaaagcctttctaactcccttaatggaactagtagctaagcattgctttctaccctgctttagttttcttcattgcctggcattctcattacctgaaatcatagtaaataaacaatatttgtttatttattttctttccactaagatgcaagccaaatgggggcagagatctttttcctccctactgtatcctcagaacctacaagagtttgacacataagcactcaataaataatgtccatattattgttat

SEQ ID NO: 278467 - DNA, 1193 bp, Homo sapiens
taagtagcacaatcttgagtccaaaaaacttcaggttgaactttgaaataagggaaaatgtactgamaataagtagttggtagcagtagctcctagtactcctacagttagtgatgaatcctaaaaagtctgtggaaatgtatttatcacttcatgtggtaccttatattttaaatatttttccttaacaatttaatgctggttgttttatcacccatagcaaaaatctatctgttttatagctacatttagatgcttagttacacacattttttcctctcctgtagtttggtaatttctcagtagagggatattacctgacttatgacattagtttatttttccatgtcggaaaaaccatttgctactccaccttttattgtaaatggtaattacctagtcaatccactttaggtttcatatagatcagttttataagccagcataatccacatataccctctattaaataaaagcagagaatgtgaaatatcacatatgggttttaatatatgatagtccttcagtaagctgaatcgaatttatttttattactgttttggttccagtgtataaactaaaattwactgtgttacaagcaccattctaagttgtttacataattaccatatttcattatcctatggactctataaagtaaaggcagctatcatatgtcttttatagatgaataaactgttgcaatcaggagttatataatctttctgaggataccagttaataaacaacagatctgattcaaacttagccaacccaattcttggtcctttgctgttatccactctgctctattgaatcccagatgctcatgattagtgcatgtccaggtttcaggaagggcatgtactgagttagcttcagggatctcatattatttttcaggtcctggcatcaacacaactcactctactgactgtcagtttcaaagtcctaaggtaaagaaataattggcttattattaataagctatggccaatggttcagagatataaaataaagacatgttatttgggggtaattcttgtggtatgaatccatcaccagagaaaagataattgttgtaagctgaaaatccactctaagaattatttaatacctaatatgtgaaatattagagatattgtctatagatttaggawtatgaaaatattaacaagcaaaaaatgagagaa

SEQ ID NO: 278468 - DNA, 650 bp, Homo sapiens
cctttctggtaacacttagattaggtgatcagaaaagatctttctgatgaggtatgtgatgagagacatgaagaaattgaggaaatgtgtcatttggatgtctggggctaaaggcatccaaggcagaaggaacatgagtgcagaggacttgaggtgggggtgaccttgacacattcaaaaaggagaacatatggtgtgtctggagagaaggaggaatagcatgtaagaaataaacttggagatgtggttgggatcagatttcataagacccagcaggccatcgtgaagacactgggtttaagtctgagtagaacagaaagacatgaaaggatttgagcagaggcatgacttgtaactggctcattaaatagtgcctacactgggatgagagtagccaaactggaagctgttgaacattgaatgtctgcatggaggctgacagtaacactgtgtgctgtgccctatgctaatgaaacagtctacataggtgtttcccatttaaactttacaacataaacttttgagcaaaatgcaaggttacttttgcatacyttgcctccatgagctatgatatcatcatctaaaaaattcatttttgcatcaaggaatgcaaaattattgctagataggggaataaactctagtatcca

SEQ ID NO: 278469 - DNA, 1076 bp, Homo sapiens
aaaggaatggtagaaaccacaattacttttgcacctacctaatattagtagcagtagaaatagcaggacaaaagagatgttgaacaatatccatagagccagattagagagcataatggatgcaaataaatttatacatgattctatagttctgtggtctccaaaatagtgtgagatgattcattgacatgtttagaatgacattactggaatgtctgtttatgtataaaaatagaaaaacattaaactttttctggtatttgataccaattgatatagcacatatgtacaaatgataaaataatgaatgaataagtaaatatactgatgatacatactctctaattttttctaactaatattaagtgtacaattttaaacaatgaaaactgttgcctcaattaatagcataggagagtggggataggactgaaatctttttctgtaatttcacaagttgaacytaagcagtaattctgagattatatgctttacttgattaggctttttttttttgtaattaaatgtcacacaaggctggacgcaattttacccagcacacaaagattaattatgctwaatgtcttgtatttgtattatatcaaaacatatccttttttgtttcaatatgtcaccaaatagactaatacatatttaatataatcataattgtgtaagaatactttggatcattttactttaaaccaattttgcctcctttccctactctaggctgtagctattcctaaaattagccttttaaaaacaaaatcaatagaaatattttataattggtgactattttcacatataagaacattttataattgaaawttttgaaaccaggtatgatttttagttttacacttttaattataataattaactacaaacaataagtttcagattctttttcagtgaatataaaatatgattatgtggtcaatgtaacaataacaaagaacaattttagccagtattatatttataatcagaacctgttattaaacttcagtgttttcttttacataaacattgatttcactaattagattcaactgatcttttccccaaca

SEQ ID NO: 278470 - DNA, 605 bp, Homo sapiens
ttttgtttgaattaaaagctctccttttctgaataccatccactaatgaataggtaacagtttcctaaaattactgttgaactcataaggtaattccttccaaggtaagttttattttcatctatcagaagtacatgtgcaggctgaagccttggtttttcactgtatcttattgcccaggaggycttcagatgtgccacaattttaatggaataaaaacattccattagaaactatggctgtccatgttgctaaaatattactcatcgtgacatcttctctatcccctattttctgctcctgctttttgggttctacaactatttgttttatttttactttttaaaatacatacttcacttttttaaaactgtattctaatttctgtggagataataatttctgtatccagtgtgtcctatattctttattttggtttctttgggaaaatatttctgactgctgttgtcttgatgagagtggtcaatcatagttctatgttgcttgccttctactgctcccccttgccacacaaagacaaattcaatccaatcagaattacttgctggaactatctaaaggctctctcatgctcaggttggaag

SEQ ID NO: 278471 - DNA, 430 bp, Homo sapiens
cagtgtgtcctatattctttattttggtttctttgggaaaatatttctgactgctgttgtcttgatgagagtggtcaatcatagttctrtgttgcttgccttctactgctcccccttgccacacaaagacaaattcaatccaatcagaattacttgctggaactatctaaaggctctctcatgctcaggttggaagctatatgcatgtggacagtcatgaccatcccacctggcacatagatagagcctgcctgcaataagagtgaatgaagccaaaaatagaaagaaaagcagaaggagcagcagtaagaatggatacagaaaaaaatctttacctcatgttagcatacttacatcccaaaatagataaaacagaattttattcctgggcttttggtaatgtaagccaatacattcctattaatttgag

SEQ ID NO: 278472 - DNA, 387 bp, Homo sapiens
ttacaataagttttgaaatcacgtggaataagaatttgttcttctatttcaaatttgttttggctacgctaggtcctttgcattttcagataaattttagaattggtttgcctaccaaaaaagaaaagactttctggaattctgattgaatttgtcttgaatttacaggcaatttttaagactatatttaatattagcatttaaagatataaatttccttctaagtattactttagctgcatcccacacatttcgttaggttgggttttcattatcatttagtttaaaatactttacaattttccttgttctttcttctttggtaartggtttatttagaaatatgtggtttaattgccaaataatttgaatttaaaaatgtttcat

SEQ ID NO: 278473 - DNA, 629 bp, Homo sapiens
ataaagcaggagtccccaacccctgggccatggactggtaccagccttactggtaccagcattaccacctgagctctgcctcctgtgagatcagcagtggcgtttgattctcataggactgagaaccttattgtgaatggtacatgcaagagatctatactgtgctctccttatgataaagaattttgagtgccattaaattttataaaacataattgcaagccacggccttgccttttttagaataatagaatatcaaggctaaaagagcttctggagatttaacagaatgaaaataggaaaccataagcttaaaacctagcattagaaattatatcacatataaatggactaagcatgacatattaaagaaagatagtaaaaagcgaatgaaaaccagatctcaattaggttgtttataacagataaactttaactataaaaacacaaaaaatattcaaagtaaacaagataagtggggttatatcatgtaaacactaactccaaaaaagctgatgtagatgtattaatatcagataattaatattctaagtcaagaagcatcaataaagaaaagtatcacataataataacaggaamattccaacaatcctaaaattacataaaac

SEQ ID NO: 278474 - DNA, 601 bp, Homo sapiens
caaaagacacagaatagccaacttactattgaagaagaacagcaaagtcagaaaactgacactatccaacttcaagactcaatataaagctacaataatcaggactgtgtggtactggtaaaagaaaaaaaatcgttgaatggaacagaacagagcgctcataaacagactcacataaatrtggtcaactgatttttgacataaagcaaaggcaatctaaaggagaaaagataatcctttgaacaaatgatgctgaaaaaactggacatttatgtgcaaaaggaggagtctagacatatatcttatgctcttcacaaaaattaactcaaaattgatcatagacctaaatgtaaaacacaaaactaaaaaatttctagagataacataggagaaaacttagatgatcttaggtatagcaataactttttagccagaacactaaaggcacaatccattaaagaaataattgatagacaaggctttattaaaattaaaagctactgctctgtgaaagacactgttaagataatgaaaaaacatgccacagactgggaaaaaaatatttgcaaaagacatatctgataaaggaatgttagccaaa

SEQ ID NO: 278475 - DNA, 515 bp, Homo sapiens
tctgttatgcctgcagaattccgtgccacagagtaaataaaaacgcctgcttcagaattgtaaaattttctggggaatcaaggtcaataagcacgtctactctttctcagaaccagaacatagaattttcaacattcatgtgcaaggaatgacaagtcagacacttcattgcagaggcagccactgtgaaaatggccacacaggrtatacctgtgatacttctagtcatagagatctttataagtctggtactatgccgttaacttataaacacacggttccagatatggtctcactgttcttctttcattaattcattcggtaaatacatatatgtatatgcttgacactgttctagcttctgaggataaagcagtgaacaagataaaatacctgcccttatatacttgcattctaagtcaaattaaaccacctctaagatttattccaactctaagattcttaaattgcaaacatccctggtagaaggacaatttgagcatttaaaggaaagg

SEQ ID NO: 278476 - DNA, 598 bp, Homo sapiens
tccaaatgcaccctccctcacaccatgctagatttatgataggctagaagagacagtatacatactgagatctttaatgatgccactggtggcccaagtcattcacaaagttatgacacaaagcgtaaccacattttctcccttggggcttaaaggaaagaacctactcccaaagtacagatagtactgcgtatccacagtatgaagcaaaaggaagaaagagaatagcccagtgaagtgcaagatttatctcagataactttcccaggaattataaatcaccttggaagactgctctcaatctcaccctcagcttagacacatcacaaaataaaatgcatgatttacaaattctaggagcttatcaccacaacagtgtgaatcaaaatggcrcaatggctaaaatttccaaaggactaaacaccaatattagcataaagagaaactgttatctggcaccttgaggtttgtatatatacaaataatacatgtacattataaaagtaactttcctaaaaagcattaaatctaatacagtagggaaagtcttcacttatcatcagtgggttcttggaaactgaaactttatataaaacaa

SEQ ID NO: 278477 - DNA, 522 bp, Homo sapiens
accacaaaggacaattcacgatatgcagttctatatgtctacaaaatgtaaagcagtaaattctagacacatgcytaaaagagagatgtgtcagcagtcaatccaagcaaacgggtccttcttcagtttctgtcccactgtttcagatgccctgtcttacctcactcttcctttcacactttgttttgttccattggtctaacttccttcttggggttactctttcactactaaataaacttaaactcctacaatattagatagttcttatcatctgtaacatcttcccttacagctctagaaacagtaaatcttgcaagtaagtgatgcagtatcacacttgagaatttaatttataggtttctataatttccagagatacaatcatacccaggcattgtcaattttttattgcaaaagtttgtaggttttctggttgatatgtgcttaactctaatccttaagaataaaagtaaacaacaaatacattgaataaacacatatgtgtatacatattatatg

SEQ ID NO: 278478 - DNA, 590 bp, Homo sapiens
tatatcaataataacaaatggacaaacatatacacaattatgaaaaatggtagccaatggatgcttcttagtataagagaattgctgtatggcttactttaccggccccataactactattagtaaaaccaggcaaattataattgttctgcaagtttatcaagagcttgccacaaacaagggtgatttcctatttcagatactgacaatatcaataatcattcacattaaaaacaaaagaatgaatgtacttctgctttttaaaatagttcaatacaattgaaagtcatgatccaaaaatcagagtgactttacttccctcaacaaacatcctcttattataaagtgaattggctccttccaatagcaatgtctatgattgttgcttcagtttaaattaatcatgacaaaactcaaaatgaaaacagtctcttaagaataatttcaactataaactgcaccagtgaacaatagtgcacaatcctaattaaatacaactctgcagctgtaaaaatagactaaatctatgagktgagtttaaaggatggtttgttagaatgttttcttaaggaaggctgggtcctcagtct

SEQ ID NO: 278479 - DNA, 552 bp, Homo sapiens
acagaatgacaacagattggaaaggatttcaaatgcaattcaaaatagtttgggttttatcctctgggaaataggaaatcattggattaacatagggagtagtaggtctgaatttcccttatgaaaaaaaaatctccagtggccttaggaaggatgactcatccaaaaggttgtatatatrtttatgctcctgtcatttgtatttatctgtgcctacctgtccttttcttatcttgtccttggtgttctgctcgacatgtgatactgaccagttcctctctacctctacgttctttcaagtctccattttaagtctctacaaatgccactgataaatgttgttgaaagaaggtagatgaagcgagtagggaacgaagaggaggaaataatatgaataatcacaaaggaaatatcaaagaagaagagagaagttatactaataaaaataacaacctaatggctaatggtactgagtgcatactatgcgacaagctcattactttatgcttcacagtacctcattaaatctcaaaacaaccccacaacaaagct

SEQ ID NO: 278480 - DNA, 1098 bp, Homo sapiens
aaatataaattgatacattttattttactttatagaaaagaagaaaccaaggtagaattagaggagttgctgaatcccaaatcaatgtttatttttagcattagggataatatttgctaaaagatttcccttaaggcttaaaaactggagaggagggacattatgaaaaattaagaggctttctcattatgtctagtttataaaagctacatatttatttttaaaagaaacagttggctttctgttttgaaagataagggcattatacactttctcccaaatctctactgcccacttctcagtttttgttaattattttacttttgcattgtttaggtttataacatttacattctttttgtatttataattcccatagttgttcaatgtttattctatatgtatatgaatttagtcatcactcctaattcttttaccacagcttctctttttctgactttttttyactttttcttttagttggcagaatttcattgttaagaacaaggccctcttcttacagccccctaagggcttaggagtgtagtattcccaaatttctataacatttgtatctacctgtttwccactttttacatttatatgcaaataaatttgaaaaccaatgtaatgtggatcattttctagagaaataaaaataaccaaaattgactctgttaaagwtagaaagcctaaagagattgatttccatagaggagataaagaaagttatcacagaaatactcttaaagcactaggcccagaaagttttacaggagaatgctatcatatcttcaaacaccagatagtcccagtgctccataaatcattccagagcactgaaaatagaggaaactttctaaatatgtttatgaagtaactataacgttatacctagactgagaaaacagtaccataaaagtaaattgcagaaattcacataaatattgatggaaaaatactaaataaaatatgagcaagtataatcaaataccacattaataatagattatacaaagttcaagtggaattattccagtagtgcaagcttggatattccttaatagaatatattatatttatggatctaaggaaaaa

SEQ ID NO: 278481 - DNA, 554 bp, Homo sapiens
attcacataatttttttcatggaaaaatgtacagcatattattatttttgatgttaataagcatggagaggaatatttttgtgataatgtttcatgacctgtatatgatattgtgtgtaatgattatctgctagattgtaactgtagaaaggacagataaacttatatattgttggtgatcttgtctgcagattacatacaattttttggtgcaaattatgtatagctacttgtatcaaacagataaattgcaacgtacatgttattttgagccttcccttccttacttttttttcttttgctttagagtataatttagaaakgagttattatcatcactggatacctgagtgtatagtacctactaaagttccaggcacaaggactaacttgtgaataatgtagttaagatccctgttatcatagaacttatagtctagtagtatggcagacaataaagaagtcttatagagtgagacaatttcagacaatgataagtactatgaagaaaattaagtaagaacatgtgatagagaattactgctttaaaaaga

SEQ ID NO: 278482 - DNA, 552 bp, Homo sapiens
aagttagaaacagtggtatagctttcatctggctgtctctgggacatgcacctttggatctctgagacaccacgtaagaaagaagtttcactatcctgaaactaacatactgtagagaagagaccatgcagaaaggtcatgtagagctagagtaagatgtccaagaaaccctagttatctcagccccgaactcttaaaatgttcccagcccaagtaccttatctgtgagtaaagaagcctttggccttagccactgacttaactgtaacctcatgggagactttagacagaaccacccagcccagatgctccaaaattcctgacctacagatagcattaaggataataaatgattggttttgttttaagyactttgtttttggatgatttcttatacaacaatacataagtaatacaagttacttcttggtaattcttggattaaggtgaataataaagtgtaatttttgcctcaaatgtagataaatctcctttctggaaatggatggaaacaaaaagacttagaaggtagtcatcattggcattgtggca

SEQ ID NO: 278483 - DNA, 504 bp, Homo sapiens
ccattctgaacccttgctgaagaagtaatatggttatttggagaagggagggcactctggcttcttgagtttttagtattcttgtgctgattctttcttacctttgtgtgcctatctacctttaatctttgaggttgctgacctatgaatgggagtttttgtttgtttgtttgtttgtttgtttttaactatttggccattctttgtagagctgctgcagttagttgggcatctgccccagttcctagttcttggatttttcagtatctggaggtatcaccactgaaggctgtgaaacagcaaatatagcagcccactctttsccttgggagctccatccccaggggaggtgcagacatgttgctggcccaaacacatctggaggaggcgactggagatcccagttagaaggtctcacccagctaggaggaacagaattggggacccacttaaagaagcagtttagccccactttaatagagcagccatgctgtgctggggtac

SEQ ID NO: 278484 - DNA, 504 bp, Homo sapiens
ccattctgaacccttgctgaagaagtaatatggttatttggagaagggagggcactctggcttcttgagtttttagtattcttgtgctgattctttcttacctttgtgtgcctatctacctttaatctttgaggttgctgacctatgaatgggagtttttgtttgtttgtttgtttgtttgtttttaactatttggccattctttgtagagctgctgcagttagttgggcatctgccccagttcctagttcttggatttttcagtatctggaggtatcaccactgaaggctgtgaaacagcaaatatagcagcccactctttgccttgggagctccatccccaggggaggtgcagacatgttgctggcccaaacacatctggaggaggcgactggagatcccagttagaaggtctcrcccagctaggaggaacagaattggggacccacttaaagaagcagtttagccccactttaatagagcagccatgctgtgctggggtac

SEQ ID NO: 278485 - DNA, 557 bp, Homo sapiens
gtcattacagtcaattaaccaatcccaggagattaaaatcagccaattagtttagcccaggtgastccagtcagccgatatttgagcccagatgattttaactggccaataagctcagcccagctgatttcaatgtcagttagctcagcccaggtggattcaatcagccagttctctaaatttcaactgtagattaatcaagactggcccccagtggtgcatgagaatagctcatgcatacactgagaaggaaagcaaggtccagaaatgttaacctgcacagaaagtgttacatgactttactatcagcttatttcccaaaccttgcccctgaaagtgaagctttgtctatacaaaaaacattctatacctatgttccattctgacatgctactgagccagagaagagaaataattctacatctgcacccttagaatatgctaagagactgaaaaatgtctttggaggaacaatttttgtgtacatatttacatagaaatactcatataatcttgtatatgtatcaatctttgtatatatattcatacagaacaaa

SEQ ID NO: 278486 - DNA, 624 bp, Homo sapiens
ttctgcccacaaagaaaagtgtaacatattgctgcactcaacacaaagattatgttactcttttttggttctgctctcaaaacgtattgtgatgtattccttgtcctacctctattgtgatgtgagtcccctgcctggtccctgtccacaaggggcaatgtgatatatctctgggcccatcaaccacttgatgtgactctgctctcttacccgagcattgcccaaaaaagagattggggcctatctgcgaatccagagcttaggtgatatgacccttctctcctgcctgggccatgcctaaaacagagagagtgacgtattgcttagtccagcayacaggttgtgtgatacttcttcctgacctctgcccaaacaagtaacagtgactaactcaggttttgttacctaaatgatgtgattctctttttctggggacctgtccacagtgaaggttgtgacaaattgcttggtccagcacctatgtgatgtgactctactctcatgcctgggacctgtccactgggtgattgtaacatacagctgagctcagctcctagattatgtgactctctcctttttcctgagttgtacccacagggggtactgtgagatatctctgggccc

SEQ ID NO: 278487 - DNA, 624 bp, Homo sapiens
ttctgcccacaaagaaaagtgtaacatattgctgcactcaacacaaagattatgttactcttttttggttctgctctcaaaacgtattgtgatgtattccttgtcctacctctattgtgatgtgagtcccctgcctggtccctgtccacaaggggcaatgtgatatatctctgggcccatcaaccacttgatgtgactctgctctcttacccgagcattgcccaaaaaagagattggggcctatctgcgaatccagagcttaggtgatatgacccttctctcctgcctgggccatgcctaaaacagagagagtgacgtattgcttagtccagcacacakgttgtgtgatacttcttcctgacctctgcccaaacaagtaacagtgactaactcaggttttgttacctaaatgatgtgattctctttttctggggacctgtccacagtgaaggttgtgacaaattgcttggtccagcacctatgtgatgtgactctactctcatgcctgggacctgtccactgggtgattgtaacatacagctgagctcagctcctagattatgtgactctctcctttttcctgagttgtacccacagggggtactgtgagatatctctgggccc

SEQ ID NO: 278488 - DNA, 624 bp, Homo sapiens
ttctgcccacaaagaaaagtgtaacatattgctgcactcaacacaaagattatgttactcttttttggttctgctctcaaaacgtattgtgatgtattccttgtcctacctctattgtgatgtgagtcccctgcctggtccctgtccacaaggggcaatgtgatatatctctgggcccatcaaccacttgatgtgactctgctctcttacccgagcattgcccaaaaaagagattggggcctatctgcgaatccagagcttaggtgatatgacccttctctcctgcctgggccatgcctaaaacagagagagtgacgtattgcttagtccagcacacaggttgtgtgayacttcttcctgacctctgcccaaacaagtaacagtgactaactcaggttttgttacctaaatgatgtgattctctttttctggggacctgtccacagtgaaggttgtgacaaattgcttggtccagcacctatgtgatgtgactctactctcatgcctgggacctgtccactgggtgattgtaacatacagctgagctcagctcctagattatgtgactctctcctttttcctgagttgtacccacagggggtactgtgagatatctctgggccc

SEQ ID NO: 278489 - DNA, 500 bp, Homo sapiens
atcactggagccagcagtaggtaatgtgcctttgctgattgggtctagccacagaagactttgtgacatatcgttaggcccagcaaccaggtgaagacactctgctgccttagtcctgctttcaggaggggattataccatatccctggctgaaaacacaggtactgtgactctcttgctggtccctactctcaggaaaaattatgacataaccctagcccagcaacaacgtgatatgactctcctgcctggtcactgccctcagagayggttgcaaatatctctggcacagcacccagatggtgtgattctcctgctcactccctccttacccaattgtgggactgtcatatatatcttagttcagtttacaggtgtcacaatgactctcataacttgagccagccaatatgaaagatactatctctcttagctgggcttaggaaaatgggtcaaatctaggtctcatttttgtatgaaggtcatagagaattaaccac

SEQ ID NO: 278490 - DNA, 1271 bp, Homo sapiens
agatattctctgcttttctgaaatatatgtaaatcatatttacagctaaagaaaccttttgtcattctttctgactcaggattgtctttatctaggacctcagaaccattgcagtgtttttgctttggcaaaggtttttttgttttttgttttttgaggyggagtctcgcttccaggctggagtgcattggcgtgatctgggctcattgcaagctctgcctcccgggttcacgccattctcctgcctcagcctcccaagcagctggtactacaggcgcccaccaccacatgcggctaattttttgtatttttagtagagatggggtttcaccgtgttagccaggatggtctccatctcctgacctcgtgatccgcccacctcggcctcccaaagtgctgggattacaaggttttgttgttgttgttgttgttgttttcagtctcttaaagtagatacagatttgtctagattaaagctcattttaagagcacacaaaaagtggagcacaaagataggattaaacttagcaatacagaatgataaagactaaaagatgcagaggaagtttctttgacaaaaaactgattatccagtgtaattatccaatatttgcaggctgaagtacttacactgcwagatattctctgcttttctgaaatatatgtaaatcatatttacagctaaagaaaccttttgtcattctttctgactcaggattgtctttatctaggacctcagaaccattgcagtgtttttgctttggcaaaggtttttttgttttttgttttttgaggtggagtctcgcttccaggctggagtgcawtggcgtgatctgggctcattgcaagctctgcctcccgggttcacgccattctcctgcctcagcctcccaagcagctggtactacaggcgcccaccaccacatgcggctaattttttgtatttttagtagagatggggtttcaccgtgttagccaggatggtctccatctcctgacctcgtgatccgcccacctcggcctcccaaagtgctgggattacaaggttttgttgttgttgttgttgttgttttcagtctcttaaagtagatacagatttgtctagattaaagctcattttaagagcacacaaaaagtggagcacaaagataggattaaacttagcaatacagaatgataaagactaaaagatgcagaggaagtttctttgacaaaaaactgattatccagtgtaattatccaatatttgcaggctgaagtacttacactgc

SEQ ID NO: 278491 - DNA, 635 bp, Homo sapiens
agatattctctgcttttctgaaatatatgtaaatcatatttacagctaaagaaaccttttgtcattctttctgactcaggattgtctttatctaggacctcagaaccattgcagtgtttttgctttggcaaaggtttttttgttttttgttttttgaggtggagtctcgcttccaggctggagtgcattggcgtgatctgggctcattgcaagctctgcctcccgggttcacgccattctcctgcctcagcctcccaagcagctggtactacaggcgcccrccaccacatgcggctaattttttgtatttttagtagagatggggtttcaccgtgttagccaggatggtctccatctcctgacctcgtgatccgcccacctcggcctcccaaagtgctgggattacaaggttttgttgttgttgttgttgttgttttcagtctcttaaagtagatacagatttgtctagattaaagctcattttaagagcacacaaaaagtggagcacaaagataggattaaacttagcaatacagaatgataaagactaaaagatgcagaggaagtttctttgacaaaaaactgattatccagtgtaattatccaatatttgcaggctgaagtacttacactgc

SEQ ID NO: 278492 - DNA, 578 bp, Homo sapiens
ctacattatttctttcaactttgtctatgttcccccttcttaaaagtcccttttgtccattgctttcaggatttccactttgcattgaattaatagtattattaaatatgctgtcaggatttccttccatttgttttcactcctatcatttacctagttttctaaatgtatgtcatatttaatatttttactaaaaaacttcatagtcttgagctgtctcacaaaggaattttttgcatattcacttaaactaaaagtaattaagtttctaattctgcttgcattgtaaacattaactgttggatatttacatgttttgagtggcaaatgctatgattttgagtttccttattttatttacacacagggaaattctaaatcgtaacatttaccatttttcttatgaacaaattgtttaaaaataaaagtattttttattggtgatgctttatattccygtatatgtccctaccattaacaaataagtacatatgccagttccttgcccacaagctgattttacacgtggggaacactgaatcattatcctggcagactctagacttaagaaacccagc

SEQ ID NO: 278493 - DNA, 653 bp, Homo sapiens
gtaacagaatctcataatgaaatgatctgtacttgccaaggtttgccaaagcacactcgttatgtctagaagttaccttgacaaggctagttcacatgtgctcatatttcaagctattgtagctctgatacttattaaaaaggcaaaggacaagaacataagtcagaacaccttggctgaattaagttcaaggataggtacttggcttactaaacctagaatcaagtgtccactgatttcatgttcctgaatcaccattacattctttaaattgcctcacttaccattgtttaagaaaatagacagcttttggtgaatgtgatttgctaagtttttctctctcaatttaaacatgtgaggcaaaaaatacatgatatttacaaattaatattcatatgacattttgcttatcctcttagccatttttatagaagtaatgtcaacttacaattattagtcctaagctttttcctaaatacacttagcattcatcattaaaatacatgtagattatccaggattgttatttgataaccttttaatttatgttayaatttaatttttttctaaaacaatgtttatctcacacataacattgtctttttaaactgttattaaattagttgagtctttcatatctaactactattaaa

SEQ ID NO: 278494 - DNA, 563 bp, Homo sapiens
aaaaaatatgtttaaaatattactactcattcacaatgtccccagtcacctaagcactctgataatgatgtacaaaaaattaatgttttaatacctgctaacacaatattcattccttagcatatggatcaagaaataatttttactttcaagtcttacgatttaagaaatatatttcataaagctatagctgccatagatagtaatttaattgatggatgtggacaaagccaactgaaaaccttctggaaagaattcaccattctaaatgtcattaaaaacattttggtttatggagagaggctaaaatatcaaaattaatagggatttggagtatatacttcaaycctcatggctgatgtttaggggttcaagaactcagtgcaggaagtaactgcagatgtggtagaaataacaagagaactagaattagaagtagatcctgaaaatcggattaaattattgccatttcataataaaacttgaacaagtgaaaagttcattcttatggatcagcaaaggaagttgtttcttttttttctaattaaactgaagagcttctt

SEQ ID NO: 278495 - DNA, 323 bp, Homo sapiens
caggagaaagagaaaaacatggaaaggtttcttcagaagattcagttttagaaatgaagactcaattctaaggaacaggaaggaggaatatagatactatggaaagccagcagaattagtaagatagattgcattagtccgttttcatactactataaagaactgcctgagactgagtaatttataaaagaaagaggtttaatttactcacagttcagcacggctggggaggcctcaggamactaacaatcatggcgaaaggcaaagggggagcaaggcactttcttcaggaggtggcaggaaggagagtgctgagcgaagtg

SEQ ID NO: 278496 - DNA, 565 bp, Homo sapiens
tctttttctgatttttgtttcttctatcttcttaaatcccagtgattctcagaatggttttagctctctgatctcactctacattgttttcaaaattttctcatgcctttctatatatcaaccattatcttcactctcacagctgctatactttaagagccaacaagtccatgactgctctctgcttacccagttatcacccagacttctctactargatgtctgagcagcacatcaaccgcaacatagacatgaacaaagtcttcatgaactcatcattcctgcctcaccctccacatcaacactgcccctcttttaatgttccctgtttcataaatgacacgcaatctgctcatgtgttcaggtcacaaataagaaagtcatccttgactctaccatccccttcctcaataccacctccagttacaaacgcttttgattttccttaaatgcctctttacctgtttgcatatctattgccatcaactagtaaaagctaccagttttttcccctttctctttactgaaaccacgttttaactaaacttcctgggtggattagaga

SEQ ID NO: 278497 - DNA, 578 bp, Homo sapiens
aaaccaaacaccacatattctcactcataggtggcaatgaaacaatgagaacrcttggacacagcgcggggaacatcacacaccatgacctgtcatagggtggggatctgggggagagaaaacattaggagaaatacctaatgtaaatggtgacttaatggatgcagcataccaccgtggcacatatatacctatgtaacaaacctgcatgttgtgcacatgtaccctagaacttaaagtataaaaaaaaaaaatagaagatggccaactagtcacagcaagaaggaacatctccctctgagggactgggacatcaagaagactggcacactcttagcaaatagtaaaagggaaggcactgagagggtacaagggaagacacatgcttgggttaagcgggaggaaactgggaacactgcacgaggctaccacacatcaagacttgttcctgaccctcaatgactctttgggaaggggtgagttgaacaggcaaggagaaacctgctcttgccatgggcctctggaatccccataggaggagacccctcaaccaccacagacacttgagttgacaggga

SEQ ID NO: 278498 - DNA, 524 bp, Homo sapiens
aatatccaaataaatgtatttagaaatgacaaagaatattaccagtgaccccaaagaaacacaaataaccatcagaaactactatgaacacctctatgcaaactagaaaatctggaagaaatgtgtaaattcctggatacatacaccctcccaagactgagccaggaagaaaytgaatccctaaacagaccaataatgagctccagtattgaataagtaagaaatagcctaccaaccaaaggcaaggaccagacagattcacagttgaattttaagagatgtacaaagagctagtaccattttcattgaaactgttccaaaaaattgaaggggagggactcctccccaactaattctatgagtccaccatcatcctgataccaaaaagtggtagagatacaataagaaaagaaaacttcaggccagtatccttgatgaacattgatacaaattactagcaaaccaaattcaacagcacatcaaaaaatgaatccactatgatcaagtagactttatcccttgag

SEQ ID NO: 278499 - DNA, 597 bp, Homo sapiens
tgcccgaggcagctttattgagccttgggggactgactcctgacagatcctaggcttctgttgtcccttgcctcctatctgtaagtaataaactctcttcatgtaccttgctgccaagcttaagtgggcaatactcgacaagctgccccaaattcgactttgcattcagggtcaaggaggaaagtttggaatagataatcttgaattcttgtagttagttcactggctaaatagtaaaaatatcaaataattgttgagtatgatttaaggtgacataatcattgtgagtaggcatccagatattgttgatgtgctgagggaatgtgccagaaaaatgtatggaaataagtctataagtgaaatcatgctaagggmaagtcatattgagggagagttagttaggatgatactaatataggtctaagcctggatgacatgagagaatatttcttgggtggatttattcaatttgagaaagggaaggtggaaaaaaacagtttcaactatgggttcttgggggagatgcaaactcaaacatgtgggacgtagagcaaaggggaaataaaaaaatcacagattcagtgaacagttccagtt

SEQ ID NO: 278500 - DNA, 573 bp, Homo sapiens
caacttagccttacatggttggtaggaaaataaatttaaacatttaactctttgtgttttcataatgaagtgtgtaaatttgggatgacattgagataattgaaaggtaaacgttcccctaatgttggtattagaatttctgttcattaaaatacactattaattgtcttaacagctccagactggaggaagatatttgcaatacatgtaaatacaaaaggattcatgtctagaatgaaatataaatccataatccagaagtcaatagaaaagaccgaaggacaattaaaagctgagaaaaaaacttaaacaggatatccaactgggattgaacatgtattcaatgtcagtcatataaggagaatttaaattaaaaccacaaagtgatattatcatgaactcactagaataacttaaactaaaagaaaataaaagatactgacagtacttactccattattggtaaaaatgcagaatagctgaaattctcaaatactttggtaaatacataagcataaatttctacaacacttggaacatagtttgrtattatctactgaagttaatcatatg

SEQ ID NO: 278501 - DNA, 480 bp, Homo sapiens
ggaatgaccatattccatgttctagtaaaatggttcctcctctttggggtactgatataattcatatgcacagcagttcactagggtggtttcctgttttcctgtccattatcttctcacaagatggtcaaagctcctcatagcattctatatggatgttgtycaagagaaatattattcatgctatgtttgaaattctaaattttctagtagccacactaacaaaagtaaaaactgaagaaattcacttaaatatgtatttgatttaaaataatatctaaaatattattttaacacaaaatctataaggacatcatacatgattattttatattctttttattttcatgctaaagttaaaaaatctggtatgtagctggcacttatttcaatttgaactacccacactacaggtgttcaatagccacatgtgcctaatggctaccacactggagtgcacagctctagataatagcagca

SEQ ID NO: 278502 - DNA, 488 bp, Homo sapiens
tcatagcattctatatggatgttgttcaagagaaatattattcatgctatgtttgaaattctaaattttctagtagccacactaacaaaagtaaaaactgaagaaattcacttaaatatgtatttgatttaaaataatatctaaaatattattttaacacaaaatctataaggacatcatacatgattattttatattctttttattttcatgctaaagttaaaaaatctggtatgtagctggcacttatktcaatttgaactacccacactacaggtgttcaatagccacatgtgcctaatggctaccacactggagtgcacagctctagataatagcagcatatctggttatttctctccttcatgtgaccacagtcctaaatctagcaattaggtattttgtcaaggacttcctccatttacacacactgagaaccctggaagtgaatgtccatgtcccctaagtcaaatacaatatattctatt

SEQ ID NO: 278503 - DNA, 609 bp, Homo sapiens
catccagaagtgggatagctggatcacacggtagttctatttttaattttttgaggaacttccatactcatacacatacatccacacacaatggctcatctaatttacattcccaccaacagtgtacaagtctacccttttctccaaatccttgctaacactttagtttttgtctttttgacaaaagccattctaacatgtaaggtgatgtatgattgtgggtttccttctcatttttttctagtgcatgttctcataatcactaaaaatcaagtaatatttttctttattttgttagtagaaaggctacactgcattcagattataatcccctaaataccttagctgatatgtttcataaatcacctaataataagaatgatagtgattctatagaagatgtgtttagggagagtattttttaaaaattcmaacgaaattggcatttgaaatttcattttatgattttattttatatttggatttataggccatacaattttaacgtgattattgttagtatatgtattgaggtatgtttgatggtttctaatagaaaattcaagatgactattatttttctgtttaatgatcagcagtgccagaaag

SEQ ID NO: 278504 - DNA, 565 bp, Homo sapiens
ccaaactagatccacctgggtctaattacttcagacattctttcactgtgtgtatcttgatacatcaataatcttaataggatatacatgtctgtatcatttatgtttgcagagatttagccaagctggagctaacttctacattgcattgtccctgtgggcaggaaatatattttctgcttcattttaaaactcctgtggcaacattggtatgaacctttagtagactattaatatgtatcttgctgttttttagatagcagtactatatatgaggagaattaagattcacaaaacagtttgagtaatttagggagaaaatatatttcacagtcatcttcatttacaataaaacataaagggatctcaaaaataggtgattaatgcaagaatgatttaatactttcctagtgccacayagaagtaaagacagatggggactgttgaggtaccctcaaaaacatcttacacacatttcttccaccagtattatctacagatttgttcaacaaacatttatggagcatcggtgcttcacttgggacacactgatggataagtaaag

SEQ ID NO: 278505 - DNA, 531 bp, Homo sapiens
gttattatttataaatcatagtactggtagaaagttggaaaagcaaatcactgcataaaattagtctagaaataaagctaaggattacatacttagcttataaattattaattaaacagatatttattaagaatcttctaagagccaggcaccattctggacaatgaacataaagcagtgaacaaaatacactaaaaaaaaaatgccctcattaagctcacattctagtcaaagagacaggcaataaacaaataagtaaaacatggtatgtttcagatgttcataaatgctattaatgaaaattaactaagcaaggggaatatgaagtgctagctctgatgtagcaattttgaatgggttggccaaaaagaccrtactaaaaaggtgagatttgagaaaaactgagaaagatgagggagtgaacaatagagatacgtggggaaagatgactccagacagtaagaaaggaagggtcctgaagcatctgtatgttaggctgattagaaaacacagaagtgaagcagtttgagt

SEQ ID NO: 278506 - DNA, 603 bp, Homo sapiens
aatctctcaaactttcaggagcatatcattatatgaagaacttatctaataaaatgcagatttttagttctcctcattagaaattctgacgcagaatctgcctgtttaatgtgtatcttcatgtggccatgaactgagataccatctctatgcatgagatcactcyggcccatcaacatttactttctgcttatactcacccagggatgggagtgttgccagacagttaaatatgaaaaccatcatatcttcttgctcatttttttaaaattatagcacaggccaggtgcagttacttgtgcctataatcctaacactttgggaggccgaggtgggaggattgcttgaggccaggagttcaagaccagcttgggcaacatagtgagactctatctctataaaaattaaaaatatatatatatagcataaagaacattataaaaacattaaaataaacttgcagaaagaaaaaaaatccacccatggcccagagctccatcaaaccatctatctactttcccttccatgtttggagaggttatccttgtatttagataactatcaacctaataattattttatcttatttttacttcttttggc

SEQ ID NO: 278507 - DNA, 673 bp, Homo sapiens
tcttcttttccaaactgccttctagacagcagacaaaagacagaagatgcttggcctgcagctcttcatccccatgaagaagggagaactacacaggaaacaactaaaggacaaaaataacaactgttcttaagcacaaaaatgtgccctaaagatacatagtgctgcagggaatgagagtggggcaatatctatgtgagcaggaaaccttaaayacaagggagaaaaatgggacacgatcctaatggcagaggctgctattataggtttggggccagcagaattacttggtgagatgaaaagtcacagagagccacaatccgccaagaagccatccattttagctgactctccaagcagacccttggccagatccactaaacatttcagatttgactctttctctccagagctgataatcagcacagacaggatcccagatggtaggaaaaaggggtgacaagctagagaatcaagctctgagtaagtgcagatgccaccaggagcaaaacttttttccagaaatgaaacctccattgttgctagagagtttgagttctaaaagctttgcttatgatttccctggagtttcttgagggtctcccatatccaagtacctgcgatactttctgtcttcaccatgcatttggcacttagcattagctaatgccat

SEQ ID NO: 278508 - DNA, 673 bp, Homo sapiens
tcttcttttccaaactgccttctagacagcagacaaaagacagaagatgcttggcctgcagctcttcatccccatgaagaagggagaactacacaggaaacaactaaaggacaaaaataacaactgttcttaagcacaaaaatgtgccctaaagatacatagtgctgcagggaatgagagtggggcaatatctatgtgagcaggaaaccttaaatacaagggagaaaaatgggacacgatcctaatggcagaggctgctattataggtttggggccagcagaattacttggtgagatgaaaagtcacagagagccacaatccgccaagaagccatccattttagctgactcyccaagcagacccttggccagatccactaaacatttcagatttgactctttctctccagagctgataatcagcacagacaggatcccagatggtaggaaaaaggggtgacaagctagagaatcaagctctgagtaagtgcagatgccaccaggagcaaaacttttttccagaaatgaaacctccattgttgctagagagtttgagttctaaaagctttgcttatgatttccctggagtttcttgagggtctcccatatccaagtacctgcgatactttctgtcttcaccatgcatttggcacttagcattagctaatgccat

SEQ ID NO: 278509 - DNA, 553 bp, Homo sapiens
cgccaagaagccatccattttagctgactctccaagcagacccttggccagatccactaaacatttcagatttgactctttctctccagagctgataatcagcacagacaggatcccagatgrtaggaaaaaggggtgacaagctagagaatcaagctctgagtaagtgcagatgccaccaggagcaaaacttttttccagaaatgaaacctccattgttgctagagagtttgagttctaaaagctttgcttatgatttccctggagtttcttgagggtctcccatatccaagtacctgcgatactttctgtcttcaccatgcatttggcacttagcattagctaatgccatcatttcatgtgctgcccatcaccatcgctccatgacatttactacctgtgcactgcactgtgccaggcacagaagacatttgtaagtctctgccactgggtgtgtacagcctttctgggtagacagggcacatcttaatgcctattaacagcccttacagttcactgtgatctcagtagactttattataaggtgaagcag

SEQ ID NO: 278510 - DNA, 555 bp, Homo sapiens
aagacaaaatcccaactcctctgcttgacacttaagaccctcaaaaatctggcccctttcayctggtctataatattcccccactgttctttgccaggattcctttgcttatatctgtcaaatcgccatcaaaaactaagaccatgtccacaatcacacagccagtggcaggcggggttctccccatgtctgtctgactccagggcacgttcccattccctctgcagtgctcttgttttatcatgatacctgttatttctgccacccccgcccccgccacctcctttttctttgactccatgagaaatgtaagcccttattttctgctgcagcccagactttcctgtggttcaggatgccttgccaaagcatgtggaccaagccagagtctgccctcatgactcttcccctttgagttcgtgatctcttatctttccctctgactgccactaacctaaagaacaagaagatccaggaggaagtgagaccagactgagacatgggacagaggctgccatgttcgctggagcaggagagtggcaaccaggtgagctg

SEQ ID NO: 278511 - DNA, 547 bp, Homo sapiens
cattgggctagtgtggaaaatcagtgactctggaggaatgacagagtcacatttgctggtataggcatggatcctgcaggaaccccaataatgtgtgtgtgtagacataggagagtttaggaggatgaggagggcagggcacacgcaggaaattggcatgacaagagcccctctttgttgtggtcacagggtgagaggagatgtggatgtcccttaaccaagtaccttagtggcttataggtccctaatgcagccrctttgactctgggacagaagacacaccagggagatggaagctggtagagctggctgagctctggggtggctgatgactcctcaccctggtcagcatcaccttgagaacagaaatgacaggggagaggcctgggccagtggtcatggcccatgggggactgacctgtctgctgaccggccacatctgcttgccaggttcttgcagtaactatctgtaacctccagattagtggagggtgatgcagcccctctccactacctccttaccaggaggtaagacacaatttaagca

SEQ ID NO: 278512 - DNA, 552 bp, Homo sapiens
attaattatttaatgtgtgaaaaggcagggacaagacagatcaaggtaaactggtaagaagaccagtagtgttggttagtgaatgaagcgggaggactgtttgtctgggattcttctcctgttgtaagtgatgtgatcgagttagaaattcctggaggacagccgctatttcttgcttatttttattaccttcacagtgcttggcatgcagtaggtatctaatattaaacccagctgactccattcagaagatcaagttttaaggtctaacatatcttggaggttttagctgggaagaaaggggtgttgtggtagtggttggaggggccgtgaaggcccaggaagcttttaaaacccaaaaggatgaatgtgtragagtgaatttttaaacacagagggactaaaaaagttgtttcattgtcccaaatctcactacttgtttttccccccagctcagcttcttcaaagagatagagatgctttaatatgtgatccttcctaatgctgtgccacttttatatattttcagagctctaactacttaatacctca

SEQ ID NO: 278513 - DNA, 551 bp, Homo sapiens
aacttcttgtaaatagaatcatttggaaggtatgtttttttcctggatttttcattcactattakgttttggagattattttgcatatcttgggtttttaatcctttgtattgctgagtattattccatttttcaaaatcataccacagtttgtttatccattctgctttcacggaactttgggttgatttcaacttgggattattatgaataagctgctataaacattctcatatgagtcattttatggacacgtttgcatttctcttgtgtaactaagagtaaattggttgggtcatagggtatgtatgtttaaccttataagaattgccaaacagttctctaagataattgtatcactttatactcccaccagtactctagaagtgttccagtcattccatatccttgccaacatccggcgttgccagtctttctgattttagctattctagtggctgtgaatagtatcccattgtggttttcatttatatttcccttatgacaaatgatgttaaatccttgactggccaattgtagatcaaatgtct

SEQ ID NO: 278514 - DNA, 551 bp, Homo sapiens
aacttcttgtaaatagaatcatttggaaggtatgtttttttcctggatttttcattcactattatgttttggagattattttgcatatcttgggtttttaatcctttgtattgctgagtattattccatttttcaaaatcataccacagtttgtttatccattctgctttcacggaactttgggttgatttcaacttgggattattatgaataagctgctataaacattctcatatgagtcattttatggacacgtttgcatttctcttgtgtaactaagagtaaattggttgggtcatagggtatgtatgtttaaccttataagaattgccaaacagttctctaagataattgtatcactttatactcccaccagtactctagaagtgttccagtcattccatatccttgccaacatccggcgtygccagtctttctgattttagctattctagtggctgtgaatagtatcccattgtggttttcatttatatttcccttatgacaaatgatgttaaatccttgactggccaattgtagatcaaatgtct

SEQ ID NO: 278515 - DNA, 582 bp, Homo sapiens
cttttgaatggactcagactgagccactactggcttctttcttccacaccttgcagacagtttgtcgcgggacttcgccttgtgattgtgtgagccaattctccctaataaactccctttcatatatatatatatcctattaattctgtccctctggagaaccctgactcaggtagtgtgagtcctctaacatttttcttttgcaatattgttttgctattttggatcttgtgcatgttcatacaaattttagaatcagcttgtcaatttcttcaaattagccttccagggttttcactgggactgcatsaatctataggtccttttaggggagtggatttagttgtcattgcttataacaacaacagtaataattcccctttatggagctcacactacaagtcctgccctttgcttattcttcacaatgagccagggagtttaggattcgttccacttcacaaatagaggactctctgctcagaaagactgcgggttatctgctgaagcatatacagctaggaagtagggaagctgggactccagcccaggtagggctgactgtaaatctcaggtgttttt

SEQ ID NO: 278516 - DNA, 611 bp, Homo sapiens
ttgctcaactgaatccaaagcctgcagaagtcaggccaattattgtgccaatatgaatttgaataagcattatcacgtttaaaaagaagaccttcattgaggaaaatgtcctgatttcaacttctactgtcaagaataggttccttaaatggacaaaatgcacagcttgtgtggctatttcccagcagatattattgacttgtcaaggaagagaactaacctttcctaaatgcctatgatatgctgagctctgtgctttgggagactgtatgmtttaccagccaagcggaacacttatgagagtgaaaagggacatagtaattatgtaaggacgacaagctgcactgagactgtccctggcgaagcagaatgcattgtccctctgtctctgcacagctcatattagggctttgatgaactccaagggcaacagaattgctaatgcacactcaaatttttgcatatatataacattattattccattccagtgatatatctgtgtttacctttcagctctaattttagcacagcagtaaagctcattaattgctattgagaaaggttcctcattaacttgtataaggtgtggtgagctggactgacaggtcc

SEQ ID NO: 278517 - DNA, 581 bp, Homo sapiens
cttcatgaccaaggccattattaagctactgacagaggctttattcccaagaactgctccttcctcatcacagctagtcagcctgccctgggcatcaagataggcctattataggctgaaaaatgtggaagacagggagaaacactgaaatagaggaactggatctggatttgccatttctcaatcaagttcttaacatcctggacttcagtttccttctttttgcagggaagcaatcttatgcagtgttatcttatggagttgccatgaaaattaactataatgatgcatctgaaagttctctggaaacaacaaagagctacataaatatattggcaatgcaaatttgcaggtgagaggactaactaaacgcayaggacaatggaagctccagctgtgaattttctgttaattacaatttgaactcttgtacccaattctctcagcgcaattaagagctaacaaaagcatgctcaggaagtgagaatgtggttggatggactgaaactgaaagagaaccatttctagccacagccaattggtgaagtgcctctttgaccagattatttagatttaaacga

SEQ ID NO: 278518 - DNA, 551 bp, Homo sapiens
gttttatatggattatcttattttctcctcataaaagttatatcattattactccacatttgcagatgaggactctgaggcctaaatacattacgttttctgcccaactctatgtacctagtaaataaatgcatggctggaattcacacccaggctggctgactctacatctaacagttttcagcacttcagcaccaagaactcaaatacttttagatctgttatcctcaagcagaagaaggtaattttccactttaattttttggtgaccctacccccttataatttscatttttataggatgtctctttcagaatactttgttcaaaatcagtgatactggtaatattgaaggtctcttagctaagttgagctagccaaatcacatagctttgacaaactaatgtcaattagaaagttgctcagaaattgtgttttctgacatagaaagtcataaattaaattttaaaagcctcttttgtgcaaacattgtaaataattcaagttccttatgaatggatataagatgtccctgtacagagcaggtatcc

SEQ ID NO: 278519 - DNA, 757 bp, Homo sapiens
ctcagctaactttgtctgaactccctgtggctttcacatatgttattgaaaaggcagcatattatctcttattagcagacaagatggtctcgaaataactggaaaaaactcaaatccacataaatggaaaatttgacaaaagaaatacagaaaatggccctgatgggtctcaaataactatatctctttagaaaaatcaccttaagagcccaagttactgataaaagaaatttgggcttgtacctaaagtgaatcatgcyggaggaattaatttacttcatctcaggctgaaagttttcaaatgtcatggttcataaattcttatggctggtagggctttctggccattctgcctccaaaaataatcatggaagggcacatcttctaggagaacagaaaatttgcctcttcaaaattaattaattcatttttcatttcttccaaaggctcggtcacaatctagaattacctgggagtggggttacagatttgttcttttatggacagttactgaaatcgaattggaggatwcggctgtaacgctgcggcgagcgagcggcgggggccggagccccggctaagtcgcaccaagtccctggcwgccaggagccgcaacgcccgggcgccaggggagggggcgggcccctctctcggccccgagccactctgggtcctctggctcgggggcttcggcggaggacctttccccgcctgggaccccaacccgggtaccctccttttgagctgcgggctctgc

SEQ ID NO: 278520 - DNA, 317 bp, Homo sapiens
ctgaggcaggagaatcgcttgaacttgggaggcagaggttgcagtgagcttgcgatcacgccactgcactccatcctgggtgacagagtgagaatctrcctcaaaacaaaacaaaaaaacaaagaaattagaaagaagggaaggggatttttaggacactgaaactattctgtatgatactgtactgctggatacatgtggtacatttgtccaaatccataaaatgtacagccccaagggtgaagtataatataaactatggatttggggtgatgacgttgtgtcaatataggttcatcagttatagcgaatgtatc

SEQ ID NO: 278521 - DNA, 317 bp, Homo sapiens
ctgaggcaggagaatcgcttgaacttgggaggcagaggttgcagtgagcttgcgatcacgccactgcactccatcctgggtgacagagtgagaatctacctcaaaacaaaacaaaaaaacaaagaaattagraagaagggaaggggatttttaggacactgaaactattctgtatgatactgtactgctggatacatgtggtacatttgtccaaatccataaaatgtacagccccaagggtgaagtataatataaactatggatttggggtgatgacgttgtgtcaatataggttcatcagttatagcgaatgtatc

SEQ ID NO: 278522 - DNA, 317 bp, Homo sapiens
ctgaggcaggagaatcgcttgaacttgggaggcagaggttgcagtgagcttgcgatcacgccactgcactccatcctgggtgacagagtgagaatctacctcaaaacaaaacaaaaaaacaaagaaattagaaagaagggaaggggatttttaggacactgaaactattctgtatgatactgtactgctggatacaygtggtacatttgtccaaatccataaaatgtacagccccaagggtgaagtataatataaactatggatttggggtgatgacgttgtgtcaatataggttcatcagttatagcgaatgtatc

SEQ ID NO: 278523 - DNA, 505 bp, Homo sapiens
cagtaattaatagggaaatgcaaattaaaaccacaatgagataccactttgtactcattargatggcctttagaaatatatatatatatatatatacacatatgtatatataaaattaaaaaaaaacaaaaacacaaaacaacaagtgtaatggcaaggatatggagaaattggaaccccgtgcaatgctggtggaaatgcaaaatggtacatctgctgtggaaaacagtttggtggtggttaatcaaaaagttaaacattaaaaataaataaataaataaaaattaaaattaaaaagttaaacatataattatcatataaatccagcaattccactacaaggtaaatacccaaaagcattgaaaacagggacttgaaagatatgtttacaccaatgttcatagcagcattattcacaatagcaaaaaggtagaaagtacctgacagataaatggataaataaaaggtgatgtatacacacaatgcaatattagtcagccacaaa

SEQ ID NO: 278524 - DNA, 503 bp, Homo sapiens
tttcaaaaagttagctttttaatttatttagcttattctttttcatttctaaattagcaatgtttgatggctctaaaaatgtctttaatatgtctgaaacttgtaatgtctcctccctgccccctttggcttgcttaaagttctatccatgtacctcagaagcttctctccctctggacagctttctcatggtttcttgagtgtcaggaaggatttttgcttgttagctcttggctttagtggactaagtattttgaattttatattgcgcatctctagggcaatagacagaaaggaatattcagagatcrtacagtatagaaatcatctggcaatttagtaaacgtttattaatttagaataaatgagagaacagcaaatctgtcttaatgtatagtcttaatgcagaatattctagctgaaatgcggttttaatatcttacagacacagtacatataataaactaggctacaaatggataatacataaaatcatgtaagtt

SEQ ID NO: 278525 - DNA, 195 bp, Homo sapiens
cagaaacttggtctgtaaagcaaggaacacrctcagaagttacacagatgttccaattagatacactggtatatatatctaactatatatagtgtgtgtctatgtaatctagtcataaataataattttatttattagagtataggattaaacatgtctggagcccactaaaatgaaacacagtttctataaaga

SEQ ID NO: 278526 - DNA, 561 bp, Homo sapiens
ttctatgttccatatcacttacatggccatgttttcctaactaccattgatctgaaaaagttccaatataaatatttatttgctgaacgaatgaatgaggagggttctgccttctatcattagcactattgtatacgaattcattttgatagcccttttctggagtcaatatcctttcctttctgaggtatgtatactataaactgaattattgtggacattagaagagaaaaacgagaagaaacagtgacaaaataggaggaaatacaggattttgcatgcacaaatgctaaaagccctgagaaaaacaaaatatcatgagaaaaattaaatcaggcattataattgcaatctagtctctatcagtgaagaaagaggtagatgtaaagccagcagatgtacttaagagggattattacattyttatgaactaagctaatgtagtcctggattgcaaattccatgaacactataattgctgaatgcaagtttcacaagggcaaagtggatgtcagcctgtcacatggtggacactcaataaatactggatggatgaatgga

SEQ ID NO: 278527 - DNA, 594 bp, Homo sapiens
cacacccgagtccttatctggcatccaggaggaatgaggttgcatgcacaaattaaaggatgatgaatgcaaaggattttattgccaatgaaaatggctctcagtggraaggggagctggaagggggatggagcaggaagatgatcctcccctggagtcccgtgagggactcttctccaaagtcctgatgtcaagtcgtccccctgaagtcaagctgcttctctctgatgtccagctgcttcatgtcttctctctttctatgccttctgccagttgggtcagggggttttatgggtacaggactgggggcaagtccaattattttggatgtaaaattatcttggtgatccatggcatatcaaagtgagtttgaaagtccaagataattcacaggtattcaatattaaagcaactggtgacaagaataaagaagaatgggttttattctcatgttctcactcgtatgtggaagctaaaaattaaaaccattgaactcaaggagatagagtaaaatgatggtttccagaggctgggaagggcaaggagtgggagagagtggagatagttaatgggtgcaaaaatatagttagaatg

SEQ ID NO: 278528 - DNA, 589 bp, Homo sapiens
aaacagtcaaacagctttaggcttcacgggacactaactaatcattttggccagaaagcccctctccccatggagcataatgtcttccaaggaagatttggatgaaacatttcaccagatggatccagtacctacattaagactctgccacccacacccttatgtattcatttatttctccatgaaatatttgagagtgtgttgargtagcagagcctgtactaacagtggactaaagaatatgttgt[341 bp omitted]

SEQ ID NO: 278529 - DNA, 531 bp, Homo sapiens
cataaaacatagcatgacagcagtcatgagtacagatctggaggtaggagacatagactcctcccaatatgatatggcattttagcatttggcttctagtgtcaaataaacaggtttgaaatccagtcatggtagttaatagccaagtaacgttaagtcacttaacctctttgcccctcggcttcctggtctgtacaatgggaatagtaagagcatcaatctcaaagtcctgctttgaagattaaaggagataagatgtgttagtgattagtccagggcttggcacatatgaagcacccaatacacattagtattgtcgtttctaaagacacaaccctgtgtgtggacacaataagaatttctctttttttttttttttttttttttttttgggacaggggctcactctgtcacccaggctaragtacaggggggcaatctcaactcactggaacctctggctcctgggttcaagcaattctcctgcctcaacctcccaagtagctgggatcacaggggcccaacaccatg

SEQ ID NO: 278530 - DNA, 531 bp, Homo sapiens
cataaaacatagcatgacagcagtcatgagtacagatctggaggtaggagacatagactcctcccaatatgatatggcattttagcatttggcttctagtgtcaaataaacaggtttgaaatccagtcatggtagttaatagccaagtaacgttaagtcacttaacctctttgcccctcggcttcctggtctgtacaatgggaatagtaagagcatcaatctcaaagtcctgctttgaagattaaaggagataagatgtgttagtgattagtccagggcttggcacatatgaagcacccaatacacattagtattgtcgtttctaaagacacaaccctgtgtgtggacacaataagaatttctctttttttttttttttttttttttttttgggacaggggctcactctgtcacccaggctaaagtacagkggggcaatctcaactcactggaacctctggctcctgggttcaagcaattctcctgcctcaacctcccaagtagctgggatcacaggggcccaacaccatg

SEQ ID NO: 278531 - DNA, 531 bp, Homo sapiens
cataaaacatagcatgacagcagtcatgagtacagatctggaggtaggagacatagactcctcccaatatgatatggcattttagcatttggcttctagtgtcaaataaacaggtttgaaatccagtcatggtagttaatagccaagtaacgttaagtcacttaacctctttgcccctcggcttcctggtctgtacaatgggaatagtaagagcatcaatctcaaagtcctgctttgaagattaaaggagataagatgtgttagtgattagtccagggcttggcacatatgaagcacccaatacacattagtattgtcgtttctaaagacacaaccctgtgtgtggacacaataagaatttctctttttttttttttttttttttttttttgggacaggggctcactctgtcacccaggctaaagtacaggggggcaatctcaactcactggaacctctggctcctgggttcaagcaattctcctgcctcarcctcccaagtagctgggatcacaggggcccaacaccatg

SEQ ID NO: 278532 - DNA, 612 bp, Homo sapiens
ctttgttccattgatctatatctcttcatttgttccaatgccacattatcttaattaatgtagctttataataaatcttgaaatcaagtagtacagtaaaacaactttgtttctctttttaaaattattctggatgtactaggtttttttgcatttctatatgaatttccaaatcagcgtatccatttctacaaaaaacgccacattgaattttgaatgtgatgatatttattaagctatagatcaatttgaggagaatttacatattaagagtactgaatcttttgaatgaggaacagagtacatctttccatttacttacatcttctataatttttctcagtgatgttttatagttttcaatgcactcactggtcttttactcttgttcagatttattcttatttcaatttttggatgctttggttaatgacattgtttttttaaatatcaatgtccagtggttctttgctactacatagaaatctaattttgtgtattgatctcatatcctgtaatcttgctaaatkcacacatttgttctagtggatagtttttagttttaatttcattgaattatatacatagactcttatgttgcctgaataaaga

SEQ ID NO: 278533 - DNA, 573 bp, Homo sapiens
accctcctctcacagctccaccaggtgtgccccagtggggattctgtgtgggggctcaaacctcacatccccttcttcaatgccctagtggaagttctccattagggctctgcccctgcagcaaacttctggctggacatacaggtgtttccatacatcctctgaaatctaggtggaggttcccaaacctcaattcttgacttctgtgcacccacaggctcaacaccactgtaagccaccaaggcttggggtttkcaccctctgaattaatggcccaagctgtacattggccctttttagccatggctagagctgagctgctgggacacatgggaccaagtctggaggatgcacagagcacgggggccctggacccagctcaggaagccatttttccctcctgggcctccaggcctgtgataggaagggctgccatgtaggtctctgatgtggcctggagacattttattcattgtcttggtgatttaacatttggctcctcgttacttatgcaaatgtctgcagcctgcttgattttctcccccagaaaaatgggtttttctttcctatcac

SEQ ID NO: 278534 - DNA, 573 bp, Homo sapiens
accctcctctcacagctccaccaggtgtgccccagtggggattctgtgtgggggctcaaacctcacatccccttcttcaatgccctagtggaagttctccattagggctctgcccctgcagcaaacttctggctggacatacaggtgtttccatacatcctctgaaatctaggtggaggttcccaaacctcaattcttgacttctgtgcacccacaggctcaacaccactgtaagccaccaaggcttggggtttgyaccctctgaattaatggcccaagctgtacattggccctttttagccatggctagagctgagctgctgggacacatgggaccaagtctggaggatgcacagagcacgggggccctggacccagctcaggaagccatttttccctcctgggcctccaggcctgtgataggaagggctgccatgtaggtctctgatgtggcctggagacattttattcattgtcttggtgatttaacatttggctcctcgttacttatgcaaatgtctgcagcctgcttgattttctcccccagaaaaatgggtttttctttcctatcac

SEQ ID NO: 278535 - DNA, 337 bp, Homo sapiens
aattgctttgtggttggggtcattgtctgtgtggagtttacacattctctcttgtctgtacaggttttctctgggttctctgatttcctcccacatcccaatgttttgcaggttaggtgaggttaactgatatatctaaatggtcccagtgagagtaagtgtgcatgggtgtgagtgcaccttgcaaygggatggcgtcctggacaggattggttcccaccttgtgccgtgagctgccgggagaagcttcagccatccatgaccctgacctagaataagcaagtaaataataatcttacttgtttgtattcatctttcttaaatgtatgtatagctc

SEQ ID NO: 278536 - DNA, 602 bp, Homo sapiens
tgtccttcaattgcatacattactaatccattttgataaactataaatatgttcttatttrctctcgcttttgtagtttctagaatgtacacattcagtcttctcctgaatacgctagttctctacattgtcttaaaaatctttaaagtttctaaattcactgctctaaagaattctctatctggtaactaatatgatatatcagccttcttcgatgccttatgtaacactatctctctcccacatctctttttaaatttcttaacttaaaaaaatccgatgttatattaaagcccatattttcctcttcagattaatattacatacaatattcctggacatatatactattgctatctgcatgttgtaatgttatttaaggcataagcccctctttattttacatctagtctagttctattgaagattagtttaatattttgtatttagtttccattgtcttcttctaatgcctaacactattctatgacagaaaagcttggctatttttaggaaaatgcttataatgacttcagagtcccttcaatagaggctagctaagagccacttctgccagatgtatttttgaaataatattttcc

SEQ ID NO: 278537 - DNA, 517 bp, Homo sapiens
gtgcttctggcactgtgtgtttggtgctggtcatatagcaataaaagatggcatttttgccctcaaggagtctataatctaatacaaacaattattcagattctgatgctcttctagtttttcttcattggcttagtatttactaccagaaaaacttagggttaaatgcaaactgagagttttaattacatactttctgatttagatcatttattttaaaaagtaaaatacttttttttttttcaaaatggctaactggaagcrttttattcacacctcatccacttaagaaaaccaaaatagtgtgaagacaatcatactttgaattcttttttcaagcgagaacatgagagttcaacagaaaagtgacaggaaacatcaaaaactaggaaagagagggaaaagaggcagtctgcttggctgggaccagcagggagctagaagtgattccccagtacaaggagagggtgagtgagagtatttctgtggtctacctttccactggggaaatcataca

SEQ ID NO: 278538 - DNA, 481 bp, Homo sapiens
tgacaggaaacatcaaaaactaggaaagagagggaaaagaggcagtctgcttggctgggaccagcagggagctagaagtgattccccagtacaaggagagggtgagtgagagtatttctgtggtctacctttccactggggaaatcatacaatattagggagctgagaggctcagaaggaactgctccaggcagggagcttgctctgtgacccacaacctttctgaaacctaagtggttacagcaagatgtcatggctgccaatgctggaaagcaggcactgtyactgggacttgagtgggatgcgagttgccatggagacttggtctgagctgggtgggtgcttctacagcccagagctgagttacaggctaggcatggagtaacagatttgatgggccagctgggtctgctgtgacagccaggacaggggagcgagccccactagggatggggtgtgagagggatgtctgtctcccacc

SEQ ID NO: 278539 - DNA, 584 bp, Homo sapiens
tagagaaacaagaatagtggtttccagagcctgcaggagaaggggaatagggagtgactgctaatggatatagagcttcttttggagggatgaatttttctagaatttgatagtgaggatgaatgcacatttcgtggatatacgaagaaccactgaactgtacactttataaatgtcaattttgtggtatgtagattataactcaatacagttagtatttaacaaaaaacaatgggggtataacagctggccccttagcacaaatcagggtagtagtggtagtggtactgaactctgtacttgcagtcactgtattctatatgccactcactcacagtaagaaaayagaagtcaggctgggcgtggtggctcatgcctgtaatcccagcactttgggaggctgaggtgggcggatcacctgaggtcaggagttcaagaccagcctggccaacatggcgaaaccccgtctctactaaaaatacaaaaaagttagctgggtgtggtggcaggtgcctgtagtcccagctactcggtagactgaggcaggagaatcacttgaactgggaggtggaggttgcagtgag

SEQ ID NO: 278540 - DNA, 584 bp, Homo sapiens
aaaatagagaaaatcgaaaagcaaaaaactaaccaccccacccaaaaatttataacttcaatatctagagaaaaacacccttagtattttcatgttcagccttctttcaaatacgatgtatttctatactttaagaaattatttgggaagtyttataacacgcttttttacttaatatattttgaacatttttccatatctttaactgttcttataaaatgtgattttaaaataaccacatgcatttactcctgtgaacccaacaatttatttactcaatccatcattgatgggagttttggttgttccattgttccttttttgcaatcgtaaataacattcttacttaaaactatttacgtacatgttaggttaaaatcagatttctgatttcaggtgtgtgtaattttaaaggcctttaaaagggggctagttgttttccagaaatcttgaatgaacttaagtctacactagaatggtgtatacctgtctgtttctccaacctgatggaaacattggataataccctataaatatttttttaaagaagttttgctcatttggtagggaaatatggcattgta

SEQ ID NO: 278541 - DNA, 587 bp, Homo sapiens
aatgttagaatttaaaaaatgttctaattacttgagaatgatgaagagagtgtttgaaaatgtttctctggtgaccagaaatgcttattgttttcatcaaagtaaaaaaaatgtacattttatcatccgaaaaagctataagacaaaagaagtttattatcatacagaggaaccatatttctagtaggtatttactgtataatgttgatctcagtttggggccatcagaaaatcttctaagaaaggaaattggaggtatgttcaacttaacttaactctctgggaatggaatttgacaaatgtcaaatattataaatatgatttatgaccaggattcaaaacaagaaaattctgcccagttttgccgtatttgtttcctttatgcagctgtaagaataggctgcatctcagatayaagcagagtctccacttagtgaaaatcaatggaatgtacagcattgaatatatctaccgaaactgattctttagtggctgaaattaaacttataaagagactaaatatatatagaccaaatccacatgattaaattaaaatgaattagaaatcccctatgaatttagagttt

SEQ ID NO: 278542 - DNA, 551 bp, Homo sapiens
tatcaacttaatgatctgtttttaaaagaaggccaaacctaatataagaaaagaaaagatgcagaaagtgttcatggcatctattccttggagtccttagccaatgctgttagcctttcctggcactaaattcacaaatgtaagaaaaattaaaaataaattacctcttcccctttttatggtttcaacagtaccactgtctttgagtgttccccaaagagggtacatggrgtcagtttgcacataactagcaaggttgaaacactatttctgttttgttgcaatctttcctttatgagaaggctagcattccaatattattaaaaatgcaaaccaataagacataaaatggcttgcttattgctaacatttatgcaaaaccacttaaaatgttaaaaatattaatctcctaccctatgtagcaattaatgctgcacagacgacgacaattgtttttttccactggaaaatcaccagcaatccacattctcctcttctacttaattaacgcaactatatatatccttcaaagtcacaggaaactggtgtaa

SEQ ID NO: 278543 - DNA, 567 bp, Homo sapiens
ctattggctagaatagtattttgtgaattagtgtgtcctgggacctggaggactgttacagggaactttggaatttcacctggaaggagcggatgacaattgggaatgattggctgactcatcaatgaagacagacagctgaggtaggatacaaaagagctattgatggcttttgtctatgtcagacagaagcctaagggaagggtgactgctctcgcctggtgtcatggatgtcacatgatagaaagttttatgtttgtttctgacattaggcaaacaaaaaccttttgagggctgaattaggcttttgttttgagcctgcaagctgctactcattcytattgatgagtactgatctgatttcagccttttcatttttatggtgttaactgtgtggggaatgtgtgtagaaggccggacacaggaccaccgaccccatctcccttgagttcacatatcttttggaatttcctttttttttcttttctttttttgtttcgtttcaggaggggggctgtctcaggagcttcgcaatctctttgcttaaatgaacaatatgagttaggc

SEQ ID NO: 278544 - DNA, 510 bp, Homo sapiens
tttgctaggtttgggggaggaaagtgaacaatggagtattgaaatgtaaatgtcaacgtcgttttttgtgtatttttttaaagatatttaacttctttcaataacataggaattattatgctattttaatgtgatagataaaatgaaatcatctaaatggaaaatgaatatatggttgttctgtttggaaaggcaatatttgaaaaattaggattttgaaagaaaaacactgtgtttcaattgcgtctctgctacttgctagccaagtaagctttgaaaagttataaaaatctatgaatattagttttcttatctacaaaataagartaactttttcacaataatgttatgagaattaattgttatgcacgtgtaaagtacttgtaatctgtaactgcagcatagttgttatttataaaggaatgaagtgtggaaagtggacaactctaatatcaattgtgtatgggaccagagtgtttcagagtagctgaacttcaaaacatcatcatc

SEQ ID NO: 278545 - DNA, 616 bp, Homo sapiens
tttcttttaccccttctgagaaaattaactcactaaagactttccgcatcatattcctcaaacataacattttatatcagcagaactgagaagacattatgacctccagagaacacttcaaaataaatcactctttctccaaattaagccatcagaatactgaggcgaaggatatatatcaaataggagttttgatgagagctgagttctacctgccttccctattttgatagtgttcaatcgtcagtctcttctacaggttaaacaaactgactcagcctcatcactgcaggayctttcagagcctttgatgggctaacatgtgacatttccaaatctatttgacttacagaaaactttcaaaaattaccccttcccctgcatacttatcagtctcttccatagcagtaatactatttagtaactacttcccatatatttatgacctggaggttgtcagtccatgtgtattgtacagtcctctgatgtttcagtaggaataaattttcaatgaagtattatccttaaggaaaccatcttattaaatctaaaaagaaaatctttgaaaaatctcatgtgacatataactttttaaattttaatttataatttcaga

SEQ ID NO: 278546 - DNA, 613 bp, Homo sapiens
agtagcataatagaatgtttaaagttaagacttgaggccaggcatggtggctcatgcctgtaatcccagcactttgggaagctgaggcaggtggatcacctgaggtcaggagtttgtgatcagcctggccaagacagtaaaaccccatctctgctaaaaataaaaaaataaaaaaattagtygggtgtggtggcacatgcctgtagtcccaactactcaggaggctgaggcacaagattcgcttgaacccgggaggcagaggttgcagtgggccgagattgtgccactgcattccagcctgggagatagagcgagactcttgtctcccctgaaaaagagaaaaaaaaaaaaagacttgaaaaactacaatttaagtagataaggatatttttacagagctttacaccataccaatccttttccagccctcaggcctgcagaacagggaaaaaaaaaaaaaaaaaaaaaaaaagcagctaagaatcacaatgttttgcagtctcctatttggccaccccttctcagactttcagacactccacacaaccaatactcaccaatggctgactatggcattgctcagaggaactagcagggaatcaaaaaggccagt

SEQ ID NO: 278547 - DNA, 613 bp, Homo sapiens
agtagcataatagaatgtttaaagttaagacttgaggccaggcatggtggctcatgcctgtaatcccagcactttgggaagctgaggcaggtggatcacctgaggtcaggagtttgtgatcagcctggccaagacagtaaaaccccatctctgctaaaaataaaaaaataaaaaaattagttgggtgtggtggcacatgcctgtagtcccaactactcaggaggctgaggcacaagattcgcttgaacccgggaggcagaggttgcagtgggccgagattgtgccactgcattccagcctgggagatagagcgagactcttgtctcccctgaaaaagagaaaaaaaaaaaaagacttgaaaaactacaatttaagtagataaggatatttttacagagctttacaccataccaatccttttccagccctcaggcctgcagaacaggraaaaaaaaaaaaaaaaaaaaaaaaagcagctaagaatcacaatgttttgcagtctcctatttggccaccccttctcagactttcagacactccacacaaccaatactcaccaatggctgactatggcattgctcagaggaactagcagggaatcaaaaaggccagt

SEQ ID NO: 278548 - DNA, 581 bp, Homo sapiens
ctgagggacaatcccctgttgtcatttttattgtctgccctggagaaggaggcagcttgggatgcctaatggaatcttgattctatttcacagctacagagcacagccagaggcccgtggtgcttttgtgagccagaatccacggaggctaattttggctgaatagaggctaaagagaattcatttttccttgttacatttatttcactaaaattgttcaaactcacaagatgttgctggaaggacaccagcaagcacttcttaattggggccccattcagtagcaaaactgactttgcaggtaccaccacagaggtgatgaggatttcrggggcctaaacgcatggaaattaaccttaacacaggagacataaacgttatctgtacttagatgtggaatataatctcgaggcttctgtttcacatacttgctggaaactgtaaccatggctctcatctttcagttgctacatatgaaaggcttcatgtcctgacatcaccagtgggttctgctgcgcatgctcaggaagataattgctattccccccaaaacactgggagtctctagagataactagcag

SEQ ID NO: 278549 - DNA, 581 bp, Homo sapiens
ctgagggacaatcccctgttgtcatttttattgtctgccctggagaaggaggcagcttgggatgcctaatggaatcttgattctatttcacagctacagagcacagccagaggcccgtggtgcttttgtgagccagaatccacggaggctaattttggctgaatagaggctaaagagaattcatttttccttgttacatttatttcactaaaattgttcaaactcacaagatgttgctggaaggacaccagcaagcacttcttaattggggccccattcagtagcaaaactgactttgcaggtaccaccacagaggtgatgaggatttcaggggcctaaacgcatggaaattaaccttaacacaggagacatmaacgttatctgtacttagatgtggaatataatctcgaggcttctgtttcacatacttgctggaaactgtaaccatggctctcatctttcagttgctacatatgaaaggcttcatgtcctgacatcaccagtgggttctgctgcgcatgctcaggaagataattgctattccccccaaaacactgggagtctctagagataactagcag

SEQ ID NO: 278550 - DNA, 527 bp, Homo sapiens
ggtgtggttttgatttgcatttctctgatatttagtgatatagagcattttttatatgtttgttgggcacttctgtgtcttcctttgagaagtatctgttcatatgttttgcctaccttttaaatgggttgtttggtttttgtttgttagattgtttaagttccttatagattctacatattagactttttcagatgaataatttatgaatattttctcccattctgtagattgtctgtttactctgtcgatagtttattttgttttgcagaagctgtttagtttaattaggtcccacttgtcaatttttgtttttgttgcagttgcttttgagggcttattcataaattatttcccaaaggcaatgtccagaatggtatttcctgggttttcttctaagattcttatagtttgaggtcttacatttaastctttactccatcttgggttaaattttgtgtagggtaaaagataggggtccagtttcattcttctgcacatggctagccagctatcccttccctgaa

SEQ ID NO: 278551 - DNA, 589 bp, Homo sapiens
taatatagattaatttttaagtattaataggtatatacagaataacaacaatgtaaagtgtgactaaaaaaccacctaagtgaaaaagacaaagaattgattgtgcatttgtcatactgatggctcattacagaagttactatgaaacaaataccgttgacattttcaattaagaaaacaagaaaaagcaaaaatgaatgctcacatgggttttctgaaggggttaataataatgataattcttatcggggtttctgttttataaaatgaatgcatgcttattatagaaaatatgataaaagctatagcaataataacatgtatttaaagacttgyatattctggaatgttatgttattgtattagttctcacaacaaccttatgaggtagccattataattatttaacatattataaaagagaaaactgatatataatttcactttttacgtaagttacacagctactaaggggcaaggctgggattcaattatatctctctgaatctatattataaaccctctaaaaagtaggaaaaaaagaaaataaaaattgcctacattaccacaattttgatatagatacata

SEQ ID NO: 278552 - DNA, 1098 bp, Homo sapiens
ttgactgttgaaaaacttaggcaaatagctacagactgagtgcctgtcrcttatatactgggagcactgtgcatgatccagcacccttaccgagcatgggacgacctgggagcactgtgcgtgacccaggaccccttaccaagcatagaatgacctgggaacactatgcatgatccagcaccccttactgagcatgggacagcctgccttgtagccagtgtctgttggttctcacttatggatgaatttcttctttttcctctttgtgattgagaaggtgtactgtattttggagctactttactgagggatatttatgtacaataaactatacatattaaggcatacagctttatgaattttgatgtgtgtgacacccttgaaactgttaccacagttgagatacagaagtttttctgttgctgctcaaaggtttcttgtgcttctttgcaatccattcctccctctcctgcgcccctcaaccaccattgatctgttttatttatgtaggtggcatwccctgccttgcgccagtatgcccaggatgtgagacatggtgtcaaagattaatwtggagctttaaggttcattatctgccttgctgggtttcatactgcatgaggcccgttgcccctttcttttggctgatttatctcttttggaatgggaatgtttacctaatggtacagcaccattttattttggaagaaataacttgtttttcattttacaggctcacagctgtatggaaattacctgcaagtctcagatgagactttggactttgggctttagagttgatcctggaacaagttaggattttggcgggctattgggaagggatgcttgtattttgcaatgtgagaaggacgtgagatttgggggggccaaggggaccctaactggacacatggtttcaatttttatcatattattttgtaaaactactcagggtttatttattcatttgtctattgcttatcgatcagtcaatttttaatgtggcttcatgatcctagagaaacattagacacttagctttgtttcttgtctagaaaatgctcaattctattttgagtcagggacccccagaatctg

SEQ ID NO: 278553 - DNA, 596 bp, Homo sapiens
gtctctactaaatacaaaaaattagccaggtgtgatgccaggcgcctataatcccagctacttgcgaggctgaggaaggagaattgtttgaacctgggaggcagagcttgcagtgagctgagatcgtgcccattgcactccagcctggacaacaagcgtgaaaccccatctcaaaaaaaagaacaagaaaatgctgcttctattaaatgtgctactaatgagatcttcgtcatataacacaagcaggtgtttctctgccaggaacatttagtaaatgtctgttctcagtgcctcctattgggatgttagcccattttaattgacctcattagtaaattcacactctaggcttagacacaagtccaggatacatgggagaagggacaagtgtcagagcaggactgcagacaggcgtctgccggaagctcctggaaggttggagcaggagacacaaggagtctttgaaaggaacggggcagggagtcaaatcctgcttctacatttataagcctatataataatcttatataatctcatataaagcctattgttgccaayacaaagttgtgtaagtcctactattggtaaacaacatc

SEQ ID NO: 278554 - DNA, 502 bp, Homo sapiens
acctgctctatgattcagccattgtattccaagatgtaacactaacaacaacaaatgttcacattcaccaaacatacataatagaatgggcatagcagctttattcataatggccaaaactagaatcaacccaaatgtgaatygtgaatactagataaattgtaaagcattcatgcagtggaatactgcagagcagtattccaaacaaacagccactacctgcaatacaagtacatggaggaactcacagcaaaaataggctgggcacggtggcttatgcctgtaatcccagcactttaggagaccaaggcgggcggatcatctgaggtcaggagttcaagaccagcctggctaacgtggtgaaaccccgtttctactaaaaatgcgaaaaattggctgagcgtggtggcatgtgcctgtaatcccagctactcgggaggctaaggcaggagaatcgcttgaacccgggaggcggaggttgcagtgagcggagatcacgcca

SEQ ID NO: 278555 - DNA, 368 bp, Homo sapiens
tttctaacaagttcccaggtgttcctgacgctccmggtcgggactcccactttgcgaccctacgcactagacatttgctgcacggataaaggtcagagagcggtgccggacactcacttctcaccctccaacgtcagtcctcccgggctggtccgcccacctcgccctcgcacggcctccaggctccaggtggttcccctcccccaactccgccagggaggcgccggccccgggatcccccactccgcccagagagggtcgcgctccccccaggggtggaggagcacggggagaagccctctgccgcacccgcgggtgtcggtgcagggcccaggtgccggaggattccttccccggacgctcgccgc

SEQ ID NO: 278556 - DNA, 368 bp, Homo sapiens
tttctaacaagttcccaggtgttcctgacgctcccggtcgggactcccactttgcgaccctacgcactagacatttgctgcacggataaaggtcagagagcggtgccggacactcacttctcaccctccaacgtcagtcctcccgggctggtccgcccacctcgccctcgcacggcctccaggctccaggtggttcccctcccccaactccgccagggaggcgccggccccgggatcccccactccgcccagagagggtcgcgctccccccaggggtggaggagcacggggagaagccctctgccgcacccgcgggtgtcggtgcagggcccaggtgccggagrattccttccccggacgctcgccgc

SEQ ID NO: 278557 - DNA, 536 bp, Homo sapiens
tttggttgaagtagatgaagaaaatttggccctgcatagaaaatgatgccacaacttagctaggactataataatatastatttgaaaaagttctgtaaaacacagtaacataaataactaatacttataaagccaagggaaaaaatagttatcatattttttacttacaaaacataattttgccaagtttctttggagtgaattcctcctttctgtgagtcagaatttatgtgtctgtcttttcaaaatacaattgatttttattacttggggattccatatttgcaaattcacctactcactaaaatttacttctactccaaaagcaccatgcccagaagcagcaaaaaagttgagttgctcagtgtccattttcccagctgagatctaacaaggtgatgctcggccttcttgttttaagttcttaaactataaacagaggttgtcttcactatctatttagtgccgtgttttgtgctttttgttggtgattttgctgtttaaaatgtcccccaagcaaagtattaaagtatta

SEQ ID NO: 278558 - DNA, 601 bp, Homo sapiens
ttataattttatctttgattcatgtgatttagaaatttttgtttaatatccagatattaggtcaggaagagactttgtctggtttcatctttaaaagttgctaaggtttgttccatagcccagaaggtcttttaatgttctatgtgcactaacagaatgtgtacttggctataattgggcagagtgttgttttttatttttatgttttttgagacaaggtcttactttgtttcccaggctggaatgcagtggcacaaacatggttygctgcagccttaacctcctgggctcaagcgtaagtagcctaggtagctgggactacaggtgcatgccaccaaacccacctgatttttgtattttttttgtagagacagggttttgccctgttgcccaagctggtctcgaactcttgggctcaagcaattctcccatcttggcctctcaaagtgctgggattacagacatgagccactgcacctggccttattctgcttgttctatttattactcttgatcttagccaaaaggccgagaagcgatgtttgttctatttattattgaaaagagaggcactgaagtctacaagtataattatggattt

SEQ ID NO: 278559 - DNA, 579 bp, Homo sapiens
tgtagtttgtagacagatatacagataaatgtagatagacatacagatcaagagaatagaactgagagtcaaaaataaacccttgcatctatagtgaactgattttcgacaaggaggccaagacaatttgatgagggaaagaatagtctttttaacaaatggtgttaggacaactggatatccacatgcaaaggaataaagtgatatgcctttctcacaccatatacaaaaattagctcagaatgagtcaaagacttaaatgtaagagttgaaactacaaaactcttagtagaaaatataggtgaaaatccccatgattgaaaaatatctagtatttgatagcacaacagggtgactgcagtcagcaataatttgttgtaccttcaaaaataactgaggaagtacaattggaaygttcatgacagaaatgatgaatgcttgaggtgatggaaaccccatctaccctcctgtgatgattacatcgtatgcctatatgaaaacatctcatatacctcataaatatgctaattatgtacccataaatttttttttaaatcctcatgaccttggattacacaa

SEQ ID NO: 278560 - DNA, 412 bp, Homo sapiens
tgcagtcagcaataatttgttgtaccttcaaaaataactgaggaagtacaattggaatgttcatgacagaaatgatgaatgcttgaggtgatggaaaccccatctaccctcctgtgatgattacatcgtatgcctatatgaaaacatctcatatacctcataaatatgctaattatgtacccataaatttttttttaaatcctcatgaccttggattacacaatgatgtcttagatatgatataaaaagacaggcaacaaaagaaaaaaactacacttcaaaattaaaacgttttgcttsaaaggacaccagcaagaaagtaaaaacccacagaatgggagaaaaatatttgcaaatcatggatctgacaaggactagtataggctatataaagaactacaactactcagtt

SEQ ID NO: 278561 - DNA, 502 bp, Homo sapiens
atactagcattggctaataataatattgtagataggtagattcccagttgatcatttatgaattatcaagctcatttctgatataaccctactacaaatagttggtgtgcgtaactatctatctacttgtcaatgctagtatatatgtgctggaattttataataaatttgatcccattttgaatttagtatcttaaaaatatatcaaactagtctcatccctgaagaaaatacagttttcatccagaattatgcagatactttcatagagttgttgcagcagcctttgggaaagcagcagcatggaataagctttcctagtaattactgttatttaagtttgttgtattctttatttgctatactagactttyggagcaagaatttgttctgtaaaagtgattttttattttttaggatggtaaatgaaatcctattgtatgatactttatcttcttttaaagtttgttttcagtgattatattttaaaactagtagatga

SEQ ID NO: 278562 - DNA, 616 bp, Homo sapiens
ctcagtattccagagaagtctgtaatttagttctgtaggcagtttggtagtctgtgtagctgcctttagatayagagatagtctagactataagcagtgcctaatgtgaattatcccctctatctctaaggagagagggaggcatgtgttttttgtttgtttgttttgttttgttttgttttttcataattatccaggagtttgtctttaatatatttatgaactttgaataggaagtattcattttgtagttttaaatttagtttaaaaattggttaaaattaatttttattgtataatttttttttaacagaaaagcagagcaaatgtttggagagatggaagtttggaatgcaatatcagaacgtgatcgtcttgaaatctatgaagatgttttgttctttctttcaaaaaaagaaaaggtattctttattcttagttattggtatttatagataacacaagatgtttcctcattcggatgaggattggttttataatatgtacatttttctggcttagtttatccagtttatgtggtatagcagatttatttattggaagtaaaatttaatgatggaatgtatagcttctgtaataatcttctttatcgttc

SEQ ID NO: 278563 - DNA, 554 bp, Homo sapiens
tccttgtctaaaaaaaaaaaaaaagttgacttaaacattttctttaacagttgtcttttttttctaaattcagtctttctcttgcttttttttccctgctattgaggaagtattttgccttccctactcactgagaagtattgacttcgtggtacacattctaaagcatttctgatttgaatatttttgtacatttttatcaattattaaaccttctcttctagtgtgtactagtatttatttctacttaaactgctcagctctaaagaaattgtatgatcaytttaaaggtactaaatccctgaaattttgcttcatcttacccacaccgctagtttactttccttttttaatatttaagaatattataaatcagtgcatttgaggtccctagatttgtttttcacctatgaattttttacagactattttagagaggctgtggtttgaagacagaatactctttacatgctaacttttgaaggttggtaatgtaatttatactattttccttcagtgcaggagattttttaagtaaataagtaaattttagc

SEQ ID NO: 278564 - DNA, 575 bp, Homo sapiens
tccacatgctaattcctgatcctgttgactatgctgccttatacaataaaaagataatctccccatctgaagttccttaatttgatcatatctgcaaaggtatgatgatatctgcaaaggtatgatcaaattaagggacttcaggaggggagactgtcttagattattatggatgggcccaatgtcatcacaagggtccttaaaggaagaaggacagagaagtcagagagaaaaggcaatgtgtcaakagaagcagagagacagagacaagatgctatgttgttggctttaaagctggaggaaggggctggaagccaaagaatctaagtggcctctggaagctgacaaggccaaggaaatgaaatctctcctggagccttcagagattaccaccctatacactcattttattcttctggtctacagaactgtagaataataaactggtgttggtttaagccactaagtttgtagtcatttgttacagcagcaatgggaaaggaatacacctggttaaccttgttcaccctaaactctgttcaggcaccctctcctataaggagcctccttgagag

SEQ ID NO: 278565 - DNA, 586 bp, Homo sapiens
tagggactgtgccatgggttagcatgtacattaatcaattcttcatcatgcatattttatggaatctgacaatttttgtaactgtatatttggtttctttgctttaattaccatgtgagtaaatgactactttaaaaaaaaaaaaaaacaggttttgaattcagctccaacgcatgatgttgataccatgtattttttggagacaagggtctcactttgtcacccaggctgaagtgcagtrccatgatcacggctccctgcagcctcagattcctgggctcaagagacaatgcccagttaattaaaaaaaatttttttttgtagagacagggtcttgctctgttgcccaggtgggtatcgaattcctggcctcccaaagtgctgggattaaaagcatgagccactgcgccctgcagaagctcacactatctaataaccacttccctgaggagatggctttactgaccctaaaacagcaacagaatgaggatttacaagatattagccactttaccacaacaagaacacctagacaaggtaagcaatctagaggaaatggcctctggtgctcaccagccacaggaaa

SEQ ID NO: 278566 - DNA, 611 bp, Homo sapiens
tggtagctcaggttgtgtgctgtgggtgttttcttagccataggtacagaatgctgtagtgataatttttattagtgagatgccattaaccagtgttcctttgattagatatgcttcacttgtcaacctttttttttttttttgagatggaatctcgctcttgttatccaggctatagtgcagtggcacaatcttggctcactgcaccctccacctcccaggctcaagcgattctcctgcctcagcctcccaactggctgggattacaggcacctgccaccatgcccagctaatttttttttgtaattytagtagaggcagggtttcacaatgttggccaggctggtctcgaactcctgacctcaggtgatctgcccaccttggcctcccaaagtgttgggattacaggcatcagccaccacacccggccagttgtcaaccttatattttctcctaagtattccctttctcatctcttctggctaaaatagtaccatgctaagggaggattggtgctgaccacctgtactagtaatgggtttaatattgctgaggttgttcattcactcatacctacaatcattcattcactgaaaaatatttttgtgctt

SEQ ID NO: 278567 - DNA, 546 bp, Homo sapiens
cattttttccttaaaatttttttgtcttcttttactttcctgaatatgcccatagtttacatattcccattgcaacggtttattttcaaataatatcttttctttaaaaacaacaccaaggtccacattgcctttaatacattaactaccattaatatttcttctacactcctccagagtaagagtttgtttttcttatgatgatgatgatgatgacgatgattttttgagatggggtcttgttctgttgcccaggctggagtgcagtggcaygatcatagctcactacagcctcaacctcctgggctcaagaaatcgtcccccttcagcatcccaagtagttgggcctacaggtgtgtgccaccacgcctgcctaatttttaattttttctgtagagagacggtctcactatgttgcccaggctgctctcgaactcctgggctcaaacagtcctcctgctcagcttctcaaagtgctgggattacaagcatgagccaccatgcctagccaagataattactttaatggaatggcatttcatgaat

SEQ ID NO: 278568 - DNA, 564 bp, Homo sapiens
tggcacataggaaccgctcaatgcgtattggctgaacaaatgagtgaatgatttggttcctgtgagggttggtgtgataagcccattttgtggatgacaaaaattgagaagtttagatatgtaaagtsgtttcctaagctcacatacgctcctgaactatcctgaacccaggccccctaataagagtctatggcttactcaaaggcttaataagcttagctttctatcataaattaggccctctccagtagtagttggtgagctcctcatcagatttcgaacaggcttatttgcatctctgctgatgttatgaccctgcatcagctggacagtcaactttagaggggctggatgaatcacagattggctggctttctcattgctgaggtgattaaaaacagcttttcacacttcattttctccctttctcctctcacctccccaccttttctgtgtatcttccattcttcccagatctctgaaatgtctctgtcacacagttcctctctctctctgtttgcccctccagttgggagaaaagctgttgtattagcctgttcacac

SEQ ID NO: 278569 - DNA, 564 bp, Homo sapiens
tggcacataggaaccgctcaatgcgtattggctgaacaaatgagtgaatgatttggttcctgtgagggttggtgtgataagcccattttgtggatgacaaaaattgagaagtttagatatgtaaagtcgtttcctaagctcacatacgctcctgaactatcctgaacccaggccccctaataagagtctatggcttactcaaaggcttaataagcttagctttctatcataaattaggccctctccagtagtagttggtgagctcctcatcagatttcgaacaggcttatttgcatctctgctgatgttatgaccctgcatcagctggacagtcaactttagaggggctggatgaatcacagattggctggctttctcattgctgaggtgattaaaaacagcytttcacacttcattttctccctttctcctctcacctccccaccttttctgtgtatcttccattcttcccagatctctgaaatgtctctgtcacacagttcctctctctctctgtttgcccctccagttgggagaaaagctgttgtattagcctgttcacac

SEQ ID NO: 278570 - DNA, 541 bp, Homo sapiens
cttacttataaaccaaatcttacctaaaacacttttctttgtttatagagatttatcagtattaaagctagtgcaactgtggtatcccttcctgtgttacatattgcttaaatgtgaagggttttcataaggaaaatgtgctgttgctgaatataagayaagagctgtttatagataggagctaaaggaaagcatatttctctccagtgtaagttctatattctttagtccagcacatgtttttgaccagctactttgtatcaggcactgtcctagacactgataatataaagtcaaataagagaacttaaagtctgacgcagtcactgcaagaaaggcccaaggcatggctccagggaaaagaaatgtgaccatgaacatcagcaactgctgaatttttgagatggatttttgtcccattcatggacaaagaccatgaaggttttcctcttgaatatttctatttttttctccttacagatagtgctggtcctagatggaggcttccagtctgcagtgcaggaatgctgcaaagaggcca

SEQ ID NO: 278571 - DNA, 578 bp, Homo sapiens
gcatccttgtgactaactcatcaggcacatccacgattatttcctaggccttttaaatcaggtagatcctgcattgatgcagacttaccataacctgcagttgatgaaaatgaacctcagatatttctgttcttttcctggaattgcaaacgatctctctttgcactcatcgtttctcctcctcactgaatttcggcagccttctagcttttaacattttcagcattaagttgaaaaccagtttcctaattgttacatataccaggcattayattatgcactagcgcataagatgcaatgcatgggagcatctccccaccttcaaattgcatgcagttcatctgagaaaacaaacaagaggaggatgatcacaataccatctttaagtgctctgtgattccagagagcaggctgtaagccagattgagtagttaaagaagctgctcagagagctgatgggccacctatgcttcacctggagcaatgactgtgatcagccggaacctggtgggggatggggtagggagagggggtcacttccggcacatgaaaagcagttttcacagtattccaaagga

SEQ ID NO: 278572 - DNA, 563 bp, Homo sapiens
agaatccctgaatcaactggcagaattccaaattggttccctgacctgtgaagtgagggttattattgtagsaaaggccaagtggaagccactataaatgtcactacttacaaaaacagtaaagcaaaagcaataccatgtctctggagggattgtagagattggtgcccccatcaataacttcaaagatgcagaggcagtgtgattcctatcgcatctttattcaccttacctatttggcctgtggaaaacaaacagatcttggagaataatagtggattactataaaattaatccagtagtgactcgtgttgcaaatgctgttgcagatgtgactttgctccttgagcaaatgaacatgtcccctggtagctggtatgcagctattgatctgtaaaatgcttttttcttgatacttgctagtataggccaccaaaagcagtttgctttcagctggcaagtccaggagtacaccttcactcacctacccagtgcacatcaactctctagttctatgtcataatatagtccatagggactttgatcacttctcatatacataa

SEQ ID NO: 278573 - DNA, 575 bp, Homo sapiens
tgaaacatgtgtagatcctgtgttagggctgatttgttatgggaccaaccccctgcccactggatactgaaattacaattygaatgttctgaaacattttcaatggtgcaggtgcacagcagacggacttgtggaggatataatggccagagatttcccaagtctctaccacttgcctttctctttcttctcagaaaaaccagctttccaaggatccacaacgggactggtgttgcctatttttctgaagtatccagagtgtagcagaaagaactaacactttctagcatctgcgtttgaaagtccatgtgtattagattgtttaatcctcaaaatatccccatttgtattttaaaaggatttttactctattttataatgttaaaatgaggatgtgtggaattacatacatttctcaaggggatagaagtttcagaattttgtttatcccacctgtttctggctccagaatctggtcttttttccacaccaggctgtgccgaggtctgtgttgatgcttaataaagtatctactgctaatattaatgttactaacttttatttatcaaacactg

SEQ ID NO: 278574 - DNA, 624 bp, Homo sapiens
tctgcctccatctccacttctgtgtatggagggagatgcattatcgaaattcccaggctttctccgctctcaaatcctaaaaacaaaggtgcagagagaaagagggaggaagagaatgaggaaaagaagtggtttctggaaaggactgaaggagataaatatgagaggcatcgggaaatgtgaagtgggagcacgtggcatcacrctcacctctcccatgtgctgccatacaggggcttcttcaccagcctgccctgctctgttaccaagtaccagaggccctggaagctgtcacagcacaactaggggaagtcagtttgccctggctgacactgtccacctcattcagggcccctcctggatgctggatctgcttctgttctgctctgaaatgtcagtgcacacatgcactgactctactctctgcccccaagacccttttgagggaaggggcttcaccgtttccacctctgcatcatctgcacttagcaccatgcgtggttcctcatgggggctgaaccaatgatgagtgaatggatgaagaaatgaacaggcagatggtgtgaatgcattcagagaatgtagaactgtctcggagccatgatggcttcagcaagcactcag

SEQ ID NO: 278575 - DNA, 622 bp, Homo sapiens
cctaaagattgatggtacaattttgttcaattcaatccagggcaacattcctatctctcccagcctgaagagttcgggaaaaactaagacaccaaatttgtcccctatctacccaatttagtagttgtcatcgtcaattagtcaagagagaaataattacccatggctggcttgaatttgggaacaaagtctcgttggcaacaacaacaaaaaaagggaacaagagaacaatcagttcatatgagaaatgtgaggtgagtaggtggtagggttataggacacagggcaggtctacacccaaaatatctctgactcatgtctgaaattctgccatttgtgattcatccctttgtgttgtacattgctctcttcctggatttgttttaaaatatccaaagtccaagaaaggtaacaaaagcagtttctaattcaaccaatgtatgtttattgagcctgttctatggatcaagtktgatatttcaaaaagaaataagatacaagatttcttgtatcttgctcacctcgcaagatacaagaagtctcatatcttagaaggcactctcctgacaccccacccctttaattaccactctcctccttcctttcttacgcaagcacattg

SEQ ID NO: 278576 - DNA, 605 bp, Homo sapiens
ctggcttccccaaaaatctagccttggctgtagtccaccaagatctggggattagcaaagcaaaataccccatttggggtctgagtctcagatgtttcctgctgtccggggaagatttccagcctgggcgaaggtccactgagcctgagaaatttgtctgaatccatcaaagtcatactgggacataaaactcaaaacccctctccccagcaggaaggctccattctgccaagacaccagcatgccatgccatcagcaataattgccaacaagaagagaagaaccgtgtaagatcaaaaagattttaaattgttcagccatccaaaattgtctgtggtgatggttttcaggagtcagaggtagggaaggagacccgcccctctgaaattcacctgctacccacaccatacacacacatgccctgaagatctagatttttgctacctgttacccatactgtgctctgcctgggctgttccttgctcagcctagttaaaattaacccctttatamcttggccaacctgcaaggtggagcatttaaagggcagaagtgggtaaaagaaacaaaaggaagagaagagctgtttgtgtttaccattgtgt

SEQ ID NO: 278577 - DNA, 645 bp, Homo sapiens
ttttcttgcttatttgcatgtacctcaggggcttgtgcctgaatgactcctgtaagctttatcttacggggtcttcaccataaccctgagagstgggggtcagggagaggtgttattataatgacttacaagtacaaacagaaagggagattctggaaaaggaaagaaaggaggaaggagaaagaagggaaggagaaaaaacctttgaagtttttggtgtgtcaggcacttccacatttactacctcatttcatcctgcctacccatggggctggaattattatccccttcttcagatgaaaaagggaggtcctgaggatgtagacaacttaccacaagccacatgtgtaataagtggcaaacctagacctctgaggcagattgcatgactataaggtcagaccaaattaatcagttttggttttttggagttttattcatgttgctggtttcccttctggaagaaagaggaggatattacaattaagagcagaagtgatgtttttaagttatcctttctggaaaaataaacaaacacaaccttttgaaataaagccaaagtgtggggggaattgctgaaggtggaagatagcttttattttttaaattatttcattatatatattttttgtagacacagcatcc

SEQ ID NO: 278578 - DNA, 645 bp, Homo sapiens
ttttcttgcttatttgcatgtacctcaggggcttgtgcctgaatgactcctgtaagctttatcttacggggtcttcaccataaccctgagaggtgggggtcagggagaggtgttattataatgacttacaagtacaaacagaaagggagattctggaaaaggaaagaaaggaggaaggagaaagaagggaaggagaaaaaacctttgaagttttyggtgtgtcaggcacttccacatttactacctcatttcatcctgcctacccatggggctggaattattatccccttcttcagatgaaaaagggaggtcctgaggatgtagacaacttaccacaagccacatgtgtaataagtggcaaacctagacctctgaggcagattgcatgactataaggtcagaccaaattaatcagttttggttttttggagttttattcatgttgctggtttcccttctggaagaaagaggaggatattacaattaagagcagaagtgatgtttttaagttatcctttctggaaaaataaacaaacacaaccttttgaaataaagccaaagtgtggggggaattgctgaaggtggaagatagcttttattttttaaattatttcattatatatattttttgtagacacagcatcc

SEQ ID NO: 278579 - DNA, 638 bp, Homo sapiens
gtacttcaagattctctccaaggtccctactgcagggagccttccctgcccacacaggcgtgtttggggagcatcctctgagcacgcccaggacctcctggttgccctagcagagcactttgtctgctgcctgcccgtatcacccattagcacatgaacgtatggaggacagggaccatatattcatattagtctttcatgtcttccactgagcttgtctcagaagaggaagttagtacttttttagtcgtgggcsagggagtgagtgaatgaaaccacaactccccactaacactgtagacaggaatttgttctgtatgggagcatctcatagagagtagcacttcagaatagactgcaaatcagcatggtggagagcagagaaacagccctccaggactgcaaatacagagcacccaggcctgggagatgcagtgaggtggggcattgggggttaaacagtctgtgctgggtgatgagagcaggacctccggtaagtctgaaacttaccttctcctgggagagacggacacaggcgatggacaaatgagcaaaacagatcaatgtaaaataattacagattactgtaagagttttgaaggaaacaaacctgggaatttgaatagtatggtcacaaa

SEQ ID NO: 278580 - DNA, 570 bp, Homo sapiens
tgttttgacataataatgtgatgtattatatcaacagatattcaaatcttaagttctctcgtgtcttctagggttgaatcttagttggttgaagcaaattactcttctttctgtaatcctgaatagtttccaatgtgctaacattttattaattcacattatgtttatgtttatatttgtgaatgatattcacctataatttgtgcctgtgcatgtatatctgggtgagtgtgggtgggggggaattgtcagtatcagggtgtacatatttcagctgtttactaatctcaccttcactagcctttgaaccccctaagatgaaaaactgcrtctgattcatgcttgactctctggcaccaagcacagtgctcagtactgagatggcactcaatatttgtttgaagagttgagttggtggtagataaaataaagtgttagtagtataagcctattcctaaaaccataggaggtatacttatactgaataattatttattgcctatctgaaatgaagattttaactggatgtcttttactttttttgctaaatctggcaactctagtttttgg

SEQ ID NO: 278581 - DNA, 672 bp, Homo sapiens
gtctttgtcataagacatatctgctatcaacatgttctctcaatctttgtctgggaatgtctttatttcacttttatttttaaaggacagtttcactggatatagaattcttgtctgatttttgttagtactttgaaaagttcattccattgcattctggcctccattgtttcagctggacaactagacattaattgtatcaatacttctatatatgtgatgatatgtggtgagttatgaacctcttggatctgtttattagtgggkttttttttaaaaaatcaaatttgggaagccattggccactcttccattatttttcttcccctttctcactcttctctgtgtctggaactcctatcacatgtatgctgatatgcttgttgctgttctacagctgtctttctttaatccatttttattcattttctttaattttttgctctcttgtttacactgaattatttctgttaatccttctttacattcactgattctttcctttaccattccacattcagtggttaaactcatccagtaaagttttcatttcagttatggtattttataactccaagatttatactatttttttaatagtttctatatctttattgagaatacctatttgtagagtcattttaatcatgttttaatttaattctttgaata

SEQ ID NO: 278582 - DNA, 569 bp, Homo sapiens
tgtttcttagaatgtaatgtgataattgtacagtaaaggtgagctcttcatttaatcagcaaatacttagagttgtayaccctttacgcactcagaggaaaatagatgacacattccaatagactgatttgagaagactttaataaagggccattttacaggtaagtgcaagggttggtaaagttaatttaaaaaggggtacattttcctaggagtaacagtagcgagagtgatgacagcctctaggcctgactcaactctcaatgtcccttactccgaaaccatccactctgccttctggaaatgcttcttagtcagcaaactccttgtcatcctgaacctcttttccaaataatctttcaccttcttgccctaagtgagaaccagctctcctcttaggatgtcctgtggggcctcccaggtgctgtttactctctcttatcaccatacctcaggattgggaagcgaggggtaaatggtcttttttccctattgtagaatatcttggtaaacctgttttccactctatgcacattacattctaaggaacacatgtccagttctcaatg

SEQ ID NO: 278583 - DNA, 594 bp, Homo sapiens
aagcccccattagaaaacctactcctgcctctctgggtccagaggtgagacacacrtgttccccaggcctccttctcctctcacatgtgcttttacagtttcaggattctatttgctttccggaagtccttgggttgcagtgcatctctctttcctatgagccatctccatgtaggtaaactgatgaagaaaaaccaacaatcttgacgtcaatcctggaaattttttagaaatccaaaagagcagagctctggtgtggaaagaaagcaagggaagaaggaagttaagtaggaaaaaagagaaactggaaacactcctccaactcagctcagatcacactggttaaataatacttgatggttagtgaagaatttagagacagaaaggctgataaagtttttaataaaacagtgcccactcaaacgacaatgaagaggaaaataaattccagtagctttacaaatagagcatcagacatatgacaacataggtgaatcttaaaaacacaatgttgagtgagaaaagcaagtcccagaagatatgtttcaccatgtttatggtgctcagaaataaacaaaagaaaacgtgttttta

SEQ ID NO: 278584 - DNA, 594 bp, Homo sapiens
aagcccccattagaaaacctactcctgcctctctgggtccagaggtgagacacacatgttccccaggcctccttctcctctcacatgtgcttttacagtttcaggattctatttgctttccggaagtccttgggttgcagtgcatctctctttcctatgagccatctccatgtaggtaaactgatgaagaaaaaccaacaatcttgacstcaatcctggaaattttttagaaatccaaaagagcagagctctggtgtggaaagaaagcaagggaagaaggaagttaagtaggaaaaaagagaaactggaaacactcctccaactcagctcagatcacactggttaaataatacttgatggttagtgaagaatttagagacagaaaggctgataaagtttttaataaaacagtgcccactcaaacgacaatgaagaggaaaataaattccagtagctttacaaatagagcatcagacatatgacaacataggtgaatcttaaaaacacaatgttgagtgagaaaagcaagtcccagaagatatgtttcaccatgtttatggtgctcagaaataaacaaaagaaaacgtgttttta

SEQ ID NO: 278585 - DNA, 553 bp, Homo sapiens
agtggtatccccagaatgggtcatcctattcgcttattaaaatcctcctctgctgaggtcacctgctggtgagcactcacgtgggatacaaatatattcacagtttttgaccactcagagaggtccatccacatacctcttccccaaatttatttctcatcaattttccaatcatgcttcttccaagaccctgaccatctacccaaaccattggctacagcccatgaatcagtatataattacacatctagtcacttcttcttccatgcaaagtgcacaaccaggtgaactgctccaagttctgcctactgggaagatttccctttgtcactgtccttcagasatatcctagaaaggggctgtagtgctgcagctgtccactttcgggtggtgcctgcatatcattcagagccttctgtaaaccaggctctagtcttctcttcctctgtcaactgatcataggcaactcctcataaggccatcagtgcaggcttggggagagaaggcagggtgacaggagtggagactatgggcatttgaaccatttcctcat

SEQ ID NO: 278586 - DNA, 553 bp, Homo sapiens
agtggtatccccagaatgggtcatcctattcgcttattaaaatcctcctctgctgaggtcacctgctggtgagcactcacgtgggatacaaatatattcacagtttttgaccactcagagaggtccatccacatacctcttccccaaatttatttctcatcaattttccaatcatgcttcttccaagaccctgaccatctacccaaaccattggctacagcccatgaatcagtatataattacacatctagtcacttcttcttccatgcaaagtgcacaaccaggtgaactgctccaagttctgcctactgggaagatttccctttgtcactgtccttcagacatatcctagaaaggggctgtagtgctgcagctgtccactttcgggtggtgcctgcatatcattcagagccttctgtaaaccaggcyctagtcttctcttcctctgtcaactgatcataggcaactcctcataaggccatcagtgcaggcttggggagagaaggcagggtgacaggagtggagactatgggcatttgaaccatttcctcat

SEQ ID NO: 278587 - DNA, 584 bp, Homo sapiens
ggatgtagtggaaatcaccacccctgggtctttcaagtctttgatggtggcactaatctccacagtkcctccagggatatgatattgttttttatttactatttttctaagtaaaggcagctctaatggcttccatttggcctttcccatcatagcagccctcaccctcccagtcatggagccaacatgggggttctgccagctgctaagtatatctctgataattacacatctggcactggggaaataaccacaggatgagtccaggcacccactggacccactgtaagtcagacctgagctttcattaattacatgaccttctttaactggaggaccacaatgacgttttggattcctggaatcaacctcagttcagagccagtgtccattagtccctaaaatgtctgattatttccccttccccagtgtacagttaccctggtaaaaggccggaggtctccttggggaaggatgggagaaagattaacgtgtaaattgtcaggaccttgaaactgtggcaaatcaaatgtccccttgaggaaggacctagtctcaccttcattcaaggggttttgtgtctg

SEQ ID NO: 278588 - DNA, 601 bp, Homo sapiens
tattgctataaccggatacaggaagaaggccagagataattccaccagaccaactcaaagtgttacaattttcttagtgcttacgtaggttggagttatgtgcctacttgcagtatagcatttgcctaagtctattggtaactagttttgtctcaactagaaggtcagaggcaaaggatgcttgtgaagtctgattaaaagggccccagtaccttcaaggcctgtctactgtggtaccagagtgatagttccccagtaccttcaaggcctgtctactgtggtaccggagtgatagtttctatcttatctcctttacagcttggtctgggcctgtctactgtggtaccggartgatagtttctatcttatctcctttacagcttggtccagagagctgccttagactctccaatgaatctattcaaacagctgcctatgttcccttgacttgtctcagattccgttgacctgaggcaggtcctgacactagaaatgtaaggctgtctctattattttggcttgctccaggttaggagaagcctatgcaagtcccctactaacattatgtttcatttctagctttgatgtctgggcactgact

SEQ ID NO: 278589 - DNA, 615 bp, Homo sapiens
ggctccgtataccagatttctgagtctcacccaagagtttctgattaggtagacctgaagtaaaccaaagaatgtgcaattttaacaggttcccaggtgacctgtgtctgctaggccagggaccacacttgtagaaatattgtcttacccatcacaaagtttcccaagctagaaactcagattaattattgcctcctctgttgttcacctcccatacactcatccactcacctgatctctgagtccagtgggttccacctcaagacatctcctgagttacttcccaaccctcctctgcatccctgctggccatgctgctcacaggagagcattcagctctcctgtgctagcaccatgctggtaccaagagggaggtgctcttctcatttctcccccagtcaaaccccaaagtagcaccaatttaattacacttcaactcttcctttttgagaatgaagtgctcccctgacctacagaatggctttcacttcttagcayggcagctcccttcccaagcactccgctgcactcccactacccctacaccatgactccttttgctaatgctgtcccctttgtgtggatggagggtctaggcagggcctgacctgtcac

SEQ ID NO: 278590 - DNA, 620 bp, Homo sapiens
acaatgatagaatggggaaatatatttggtagacatatatttttatatatatgtatatacatgtatgtatatatgtacmtatatatgtgtatatttaaaagtctacgtcttttatctgattcaaaaagactacaaaagctaatgaaaaagttagaagattttaacataattagtattatgttaaggtgcaatgtaagcataaaaagctataaatatagcttatagattttacaaaaataactatttacaacctatggaaataaaaaactaagcaaaagagcaaaaaacacagtagttcagtgaaaatgcatttatataaaaataagagaagtaattctatgtcattaatcatttaataaaataaattaaatttataattttttaaaaaagctattatcagctgagacttattttataatccagaactaacatgcttacaagtgacacatggacaataaatgtataaagaaagggagaaaatgaagggaatggataaagattaaccaggcagataatatactaaaataaagaaaatgtagtaaataatcaaaaagctaaattttaggtaaaaattatgaagagtgatgaaaaaagcaaatgataaaacaatagaacacaaa

SEQ ID NO: 278591 - DNA, 620 bp, Homo sapiens
acaatgatagaatggggaaatatatttggtagacatatatttttatatatatgtatatacatgtatgtatatatgtacctatatatgtgtatatttaaaagtctacgtcttttatctgattcaaaaagactayaaaagctaatgaaaaagttagaagattttaacataattagtattatgttaaggtgcaatgtaagcataaaaagctataaatatagcttatagattttacaaaaataactatttacaacctatggaaataaaaaactaagcaaaagagcaaaaaacacagtagttcagtgaaaatgcatttatataaaaataagagaagtaattctatgtcattaatcatttaataaaataaattaaatttataattttttaaaaaagctattatcagctgagacttattttataatccagaactaacatgcttacaagtgacacatggacaataaatgtataaagaaagggagaaaatgaagggaatggataaagattaaccaggcagataatatactaaaataaagaaaatgtagtaaataatcaaaaagctaaattttaggtaaaaattatgaagagtgatgaaaaaagcaaatgataaaacaatagaacacaaa

SEQ ID NO: 278592 - DNA, 620 bp, Homo sapiens
acaatgatagaatggggaaatatatttggtagacatatatttttatatatatgtatatacatgtatgtatatatgtacctatatatgtgtatatttaaaagtctacgtcttttatctgattcaaaaagactacaaaagctaatgaaaaagttagaagattttaacataattagtattatgttaaggtgcaatgtaagcataaaaagctataaatatagcttatagattttacaaaaataactatttacaacctatggaaataaaaaactaagcaaaagagcaaaaaacacagtagttcagtgaaaatgcatttatataaaaataagrgaagtaattctatgtcattaatcatttaataaaataaattaaatttataattttttaaaaaagctattatcagctgagacttattttataatccagaactaacatgcttacaagtgacacatggacaataaatgtataaagaaagggagaaaatgaagggaatggataaagattaaccaggcagataatatactaaaataaagaaaatgtagtaaataatcaaaaagctaaattttaggtaaaaattatgaagagtgatgaaaaaagcaaatgataaaacaatagaacacaaa

SEQ ID NO: 278593 - DNA, 480 bp, Homo sapiens
tcatgatacccaagctcttttctagtctccatatgtatgattccaaataaatggttataatggactgaataaatgagatatatgtggaaaagcaaatatttgacccagattttatctgaaggaaatttgaatgttgtgttgggtatgctcttgttaacagtcaagttaacagtctgcttcccataatgggcagcaatggagggaactaatgtttccaggaagacaggcagccyggtagaggccatggtggggctccaccatgtctgaagcaagcactgcatgtcccagtctactgctaacaaagcaaagggcctaggcaaatttatgtcccagaagaggggagagaattatctgcaggaggcagagtttgggagcaatgtcctaaggaagtgtggtcactgggagtgggctctctgctgcagtcagcagccccttgataccccagggacaccttggagcacctgggcaggcaataggatt

SEQ ID NO: 278594 - DNA, 601 bp, Homo sapiens
caattttcagaaataagaaaacatacagattggtagaagtgttccaattgccataactgtaaaggccaagtttctgaagctcatggcactctccttcctttttattctcttgaatggacagtattcaggaaatggctttcatttcatggaagattcaatcattctgacaagacagtcttttttcccacttatgacaacatgcataaaatgaaaatgagagtaaaamattgattttgactaaaaactaaatgggcaagtgtaattagcatcttgaatgcagtaagggcttctatgcccttcaccttcatctatccaaactgtcctgtcagagcatcccctgcccggccctggcccacatccaaggctgcacatgcctgtggaagcagcatgggggcagagggcagtgggtcccagctcaggcagtggctgggagcacggatgtggcttgagctcagtcatgctgtgagggtggcccacgtatcgcgatccatgtgggggccccagccagactctacctgcatgtgcagctggtttccaggttctattcctagtctcagttctttcctctttacccagaaactggaaaataaaccctgccagg

SEQ ID NO: 278595 - DNA, 579 bp, Homo sapiens
tgaaaatgagagtaaaaaattgattttgactaaaaactaaatgggcaagtgtaattagcatcttgaatgcagtaagggcttctatgcccttcaccttcatctatccaaactgtcctgtcagagcatcccctgcccggccctggcccacatccaaggctgcacatgcctgtggaagcagcatgggggcagagggcagtgggtcccagctcaggcagtggctgggagcacggatgtggcttgagctcagtcatgctgtgagggtggcccacgtatcgcgatccatgtgggggccccagccagactctacctgcatgtgcrgctggtttccaggttctattcctagtctcagttctttcctctttacccagaaactggaaaataaaccctgccagggtcctggttcctgtcgctgtcctctggggctcctccaggccaccgtgacagggcccactggctgtgccaggttctaccacagctgggtccgaaggtgctgcacacaggatgccacgtgcactcccttgggtcagtagatgccgaatccagaatttcaaattgacctgaggggagggtgttgaagct

SEQ ID NO: 278596 - DNA, 558 bp, Homo sapiens
cttaaataattctttcacgtgaattaactcatttttttcttcacacacactaaaaggctgaggatgcagatagaagaaagaaatggcatttattgaggatgcctactctgtgccagttgtatttttagtccttatagcaatactgctaagaacacatcccttccatttcacagaaggataaactgccacccacagggtgaaggagtatgtccacagtcagggctgtggtgagtgacagctcaactagaatgcagctctccatyctccaaatagcatgattttcctgctttatatgtctgcactcgtcatccaaatgtcactggatgaaagcatccgcagtcttcaccagctggtgtctttggcccctactatgaacctactcatgcctgcagctcaaggaagtttccagaaagcctccaacacaagtgaggaagctaaggttatgacaggctgtctgagcatagggaaagacagaaatttagcctctgagccctctgggcacagatggcatctgaatatcttccaccctaaggaagccctgtaggccatgggagagcc

SEQ ID NO: 278597 - DNA, 561 bp, Homo sapiens
ttgttttctatgagttagactgttttagatacttcatgtaagtggaataatacactatgtttctttctatgactgttttatttcacttagcataatgtcctcaaggaacatctatgttgtcatatattgtaggatttttttaaaagatgaatactattctattgaatatatatcacattgtctgtatccactcatctggcaataaacattttacattattttcacatcttggcagttgtaaataatgctgcaatcaacatgggaatgctaatatctctgagatcttgatttcaattcttttggataaatacccagaaatgggtttgtggcatcatgtggcagtcttatttttaaaattttaaggaagcttcatatggttttccattgctgctgcaccattttgtgttgccaccaatagtatgaaagagttccagtgtctccagtcttcrtgaacacttgtctttcgttttgttgacaatagctatcctaacaggtataaggtgatattgcattgtggttttgattgcatttctctgattattagtgacattgaccatacct

SEQ ID NO: 278598 - DNA, 637 bp, Homo sapiens
ttgattcttgtaaacattttactggcatacataaaccatattatttactgagtgattttggtttactttatttttcctttactgacacaactttttttggctttctgtcagagccacagactgttattttcttgtttgcttttgttttgttttgtttttcctatgttgactttggtaaagttcccactaaatggctattgtattaagccttctactttggggccatagtaactgtttgctgattgtggtrtagatttataatgttgatttattccagaacatggtataagaataccactttagcatggcctttggctaccagatatgtcactgtgcaaattcattttttagtttattcttacagcttgttgcagttacatcatcttatggaagatgctcaaaaagaagcatccttagaagatggcccttggtttctaggttagcctatttggaaacttggttgatggtatccagggaatgtggaaattttgaactacctccatgtgactggggatttgggacactcattttcacccatgaatgtcatgtcaatagaaccctgggccattggctataactgaagccaatgtggttccttttgtaaattttgattccttttctttttccctttaggtcc

SEQ ID NO: 278599 - DNA, 643 bp, Homo sapiens
agtaagcccagggggattttacaaagttgcgagtatcaggaggtgtagatcatgggggacatcttagggattgcctgctaccctgtttttcacttttgcagttaggggattatatgacagagtaggtaaaactaggcaagctgcttaaatgaaataatgcaatgcaaagtgtgttatttggtgtcctctaggagctttaaaataataagaaccctttcttcttccctttggtaattctcattatgacagcagctacccttgaaagaggaccacctctaacttggacaccaagayctttctggcctggcctctgattctcctttgcacccttcacttgtgagccactctggacatttgccagcttctctatgtggtgtgcacttcccctcccctcccatcaatgccccttcatctcctggcaaatcctactcacgtttcagccatcaccttacatttcactttgtctgggacatcttctctaatcttcctaattctgggcttgaggtgttttccttatggattttcattgcatttgatgcttacccttatgctgcagcttctattactattactacagttactactgctgctgaagcttgtacttctactactacggctctcactactattactagtactactg

SEQ ID NO: 278600 - DNA, 599 bp, Homo sapiens
tgctaattaccctcatctgatcactatatattatatgtatcaaaatatcactatgtactccatgaatatgtacaattataatatttgtcaatttcttaaaaaaagttgtccttggccatatagctagtgtttgtttgccttttgcaagcttttctagattgcaagtttcaggagctcaactaccttatttaggttttttgttttggtagattcaaaattgaacacagtgttcaatacagaccacagttggggattattgctgaataaattagaacaaaatattgtaatattttgtgtgaagattttaattgcggagtggcttagttttctcattgtataaggcagtaataacaccatctttgcaggattgcataaactataagtgaatgactgtgtcctgatacatagtaaaygctcagtgaatgctgcaatcattataatgcaaagtggagaactgagctatggcaatacgttctgcaacttaaagtggggtgtctggaatttcctaagggtagtaacattgtttagcatgaggatattattttttccttagacgcaattagaaattagactgatgtgaaaaaggtctcagatgatac

SEQ ID NO: 278601 - DNA, 567 bp, Homo sapiens
tagtttgaaaacataatcgtgtactgccttggcttttagaatttgtattagtctgttttcatgctgctgctaaggacatatctgagactggacaatctacaaaagaaagaggtttagtggactcagagttccacattgctggggaggcctcacaatcatggcggaaggagaaaggcacatctcacatggtggcagacaagagaagagaatgagagccaagcaaaaggggtttcccgttataaaaccatcagagcttgtgagaattactcactaccaygagaacagtaagggggaaacgacccccatgattcaactatctctcaccaggtccctccaaacgagggaattatgggatctacaattcaagacaagatttgggtggggatacagctaaaccatatcagaattggtgcatacagaggcgcttaacctcacaggcaggacttcatgggacgttcattcaaactgtgtcagaaacacagcgtgcccggcgctttcattccacagttgctggagaggcctactaagccccacactgattccaagagaggctgttatctaggaaaa

SEQ ID NO: 278602 - DNA, 576 bp, Homo sapiens
gagttaagaagaaattacttaggcagatagtgagggtactgaagtcctcagcaaggttttccttttagtgaaaagcagctccaaattattttcctttctaakaaacagcagcatgtaaagtcaaactgcagacatagatgctggcagctgtgccaatcatgttcaagatggcagctccatcttcccttctctttgtcagccacatgtacaataaggagcagaccagatggcactggctaagaggaaagttcatttgcttgataagattatgggggggcagccagtcttccccacatgctatgtaaacgtcacacttgatcaaactaatctgtgagcactacgtgaatcagacaccacctcctcaagccagactataaaatctggcacatccaccgccagctgatcttttctgttggaagtcacctctctctcaatagagagagagcgcagttttactttctctttcatctgcctattaaacctctgctcctaaactcctcatgtgtgtccatttcctaaatttctggtgcaagatgaagaaccccaggtgtataccccagataatgtagctgcttc

SEQ ID NO: 278603 - DNA, 528 bp, Homo sapiens
acaggaccttaggcaaataaagggagactcaggccaattttctaatgaccctggtaggtatatagaagttttccaaattttaactgtggtgtttggcctctcatgaagggatgttaggctgcttctaagccaaattcgaactgtggttgaaaaacaggmagctctgcagggagctgagaatttcagagatgagcaatatgtctcctatagtaggccaaaagggaaaagagaaaatagggaaggtgaagcaatagaggaaacaccattgccaataggaagggaatcagtgcctcttgacaactctagttagaacccccaaatttctctatggtattttttcttcttttatggcttaaaatggctcctatctaactttataatgttcttccaacatgggaaacgttaatttcaccaaaccttataatgcttagcttagggttgagctaggaggaagggagcctagaagtctcacatgccagcaaaagagtaaaagattttttttgctgttggtgttgttttttaccaatt

SEQ ID NO: 278604 - DNA, 553 bp, Homo sapiens
aagtattcatttaaaaaatatattcaaaacttcatcattagtgctgacaatttagaatcgatcacattaaactcagcaataatacaaacatgcctattatccctgcttctattaaagtttatactgatttaacaagacaaaagtaaaaaagcaatataagaattagatatgagagagtacaatgtctttttatgtaagtgtgattgtctatagacaaatccaaagtaatcaaattggcctccagcacctttgctgagagtgaggccaatacaaaaatcaatagtcgctttatacactagtaatgaccactgtaacaaagatcccattcatgatttcmacaatacttatacaactctagaaataaaactaccaaatatgtgcaaaatctttacagtgaaaataaaatatgactgaatatttgaatactcattccactttcatagctagaaacagtttaccttaaatctattaatacttcctaagtcagccttctgattgcattaaattgtgatggaaatctaaaacaagtgtttcatagacctttgcaaactaa

SEQ ID NO: 278605 - DNA, 625 bp, Homo sapiens
cctctgtggctctgcagggtataacccccatcctggctgctttcacaagctggctttgagtgtctgtggcttttccaggtgcatggtacaagctgtctgtgaatctaccattctggggtctgaaggatggtggcccttctctcacagctccactaggcagtgttcccgtggggactttgtgtgtgggctctgaccccacatttcccttcttcactgccctagccaaggttctccatgagggccccacccctgaagcaaacttttgcctggatatccaggtgtttccatacaacctctgaatctaggcagaggttcccaaacctcaattcttgacttctgtgcacctgaaggctcaacaccacgtcaaagcggccaaggtttggggtttgcacctctgaagccacaacctgagctgtaccttggcccactttagccatggctggagcatctgagacacagracaccaagtcctgaggctacacacagcaggaggtcccagggctcggcccacaaaaccattttttcctcctaggcctcctggtctgcaatgggcagggctgctgtgaaggtctttgacatgccctggaaacattttcctcattgtgttggtgattaacatttagct

SEQ ID NO: 278606 - DNA, 624 bp, Homo sapiens
gcgcatctttcaaggaggtgcacatgacagaggatgtgtgtcacatacaccagagtgataatgaaacgttaattaaacatatgattaactttgacctgaaatagtaggtgcctctgctaaaatcacacacagaaaaatgatacttggtgtgatttattatttacattgtacaagtgccctaaaaatcaacaaaaagtttaaaataaaatgaggtataagttttggagaagaggaagcaaaattactattatgtgcagtcaatacgattattacataaaaaaatcaagaaaagtgacaaattatatttgggctaaaaagataataaagtggtttattacaaaataaacacagataaattattarcttttccatatagtcatggagtaatagcatttaatggtataaataaagtacacatcacaacagaagcaaaatataaaattctataaatataaaaacctctgtttttgagaaaaaggaaatgtgagatcttgaagaagatagttacctttttcctgtatgagaaaagtaacattttatattaatattctccaaataattctaaaacattaatgccattcatataaatctaaatgatatgttgagcctgaaaaaataatttca

SEQ ID NO: 278607 - DNA, 624 bp, Homo sapiens
gcgcatctttcaaggaggtgcacatgacagaggatgtgtgtcacatacaccagagtgataatgaaacgttaattaaacatatgattaactttgacctgaaatagtaggtgcctctgctaaaatcacacacagaaaaatgatacttggtgtgatttattatttacattgtacaagtgccctaaaaatcaacaaaaagtttaaaataaaatgaggtataagttttggagaagaggaagcaaaattactattatgtgcagtcaatacgattattacataaaaaaatcaagaaaagtgacaaattatatttgggctaaaaagataataaagtggtttattacaaaataaacacagataaattattagcttttccatatagtcatggagtaatagcatttaatggtataaataaagtacacatcacaacagaagcaaaatataaaattctataaatataaaaacctctgtttttgagaaaaaggaaatgtgagatcttgaagaagatagttacctttttcctgtatgagaaaagtaacattttatattaatattctccaaataattctaaaacrttaatgccattcatataaatctaaatgatatgttgagcctgaaaaaataatttca

SEQ ID NO: 278608 - DNA, 545 bp, Homo sapiens
ctttccaactactgcataagctcccagagtcatagttttggggtcctctcccacagtccggatgcctagcctcctgccataagcagctgacatttgccctcatcatattgcaccagggcagttgatgcaagaggagttggcagggttattgctgtaagtaattgcctaatttctgagttagaaatcttgagtttgctttcatgactaaacaaataaacatagatgttgacagcttaccagggtggattggagtgaggctgtggagatattctccttctctctaagtccagcaccatattttaccaccttccagatcacaaagaacagaaatccaaaaaagtaatatccttgcttataatgcagacaaatgaaatggcttggcctcttcccatctcgggaaasttttaaccgtgtgactgctaagggcacagatgaggaggcaggagagtgatcgaagagacacacctacattaggggcctcataacatgcagtgaccagttcattagtgaaacttcctccaatgagtttcctagaattttaccaa

SEQ ID NO: 278609 - DNA, 545 bp, Homo sapiens
ctttccaactactgcataagctcccagagtcatagttttggggtcctctcccacagtccggatgcctagcctcctgccataagcagctgacatttgccctcatcatattgcaccagggcagttgatgcaagaggagttggcagggttattgctgtaagtaattgcctaatttctgagttagaaatcttgagtttgctttcatgactaaacaaataaacatagatgttgacagcttaccagggtggattggagtgaggctgtggagatattctccttctctctaagtccagcaccatattttaccaccttccagatcacaaagaacagaaatccaaaaaagtaatatccttgcttataatgcagacaaatgaaatggcttggcctcttcccatctcgggaaacttytaaccgtgtgactgctaagggcacagatgaggaggcaggagagtgatcgaagagacacacctacattaggggcctcataacatgcagtgaccagttcattagtgaaacttcctccaatgagtttcctagaattttaccaa

SEQ ID NO: 278610 - DNA, 555 bp, Homo sapiens
aggacagagagaatcagagctatattaacaatgacaaaaaataagcayagtcttagtaaactgtgggaaaatgtcaagcaccctaacatatgtgctgttgccacccaagaaagagaagaaagatacaatgagtaagaaaataaaatattcaaagaaacaatggctgaaaaaaaactcccaatatagtgatacccataatccaataagtcgaaaaactcattgaaatctaagcaagtaagaagaaaaccacaactgtccccatcataattattgctaaactataaatttgctaaagccaaagttaaaaagaaaatcttgtgtttacctacagagaaacaacacttttcatttagagaaaagaatgagaggagtatcagatgacttctcatcataaatgatgtagggcagaagacaatggaacatagttttaaggacaaaaatgaatctatagctaatggaaaatatcctggaaaatgaggttgcaaacaacacatcagatttttttaaactgagattattcaccaataaacctgaacttggaaattcctaaaagga

SEQ ID NO: 278611 - DNA, 555 bp, Homo sapiens
aggacagagagaatcagagctatattaacaatgacaaaaaataagcacagtcttagtaaactgtgggaaaatgtcaagcaccctaacatatgtgctgttgccacccaagaaagagaagaaagatacaatgagtaagaaaataaaatattcaaagaaacaatggctgaaaaaaaactcccaatatagtgatacccataatccaataagtmgaaaaactcattgaaatctaagcaagtaagaagaaaaccacaactgtccccatcataattattgctaaactataaatttgctaaagccaaagttaaaaagaaaatcttgtgtttacctacagagaaacaacacttttcatttagagaaaagaatgagaggagtatcagatgacttctcatcataaatgatgtagggcagaagacaatggaacatagttttaaggacaaaaatgaatctatagctaatggaaaatatcctggaaaatgaggttgcaaacaacacatcagatttttttaaactgagattattcaccaataaacctgaacttggaaattcctaaaagga

SEQ ID NO: 278612 - DNA, 562 bp, Homo sapiens
tctgcttcaaagaagcaaagaaaacattggcaaaaaccgtccaaatcaacttatcatcakggcaagtgtgaaaaccagcagcctggcagccactagaaagagctgaagttcccaagtctggagctccctaaaagtccccattcccaaagaactatcattccacctatctggcacatccctgcaagcccagttgcagggcttgtctttatctgacctgacttagagcttgttcaatgttagaggccttttccctgaggcgatgatcaaaactaaccagtgacaactgttcaacatggcggatacccaagacagaaataacaactggggcaaagaagctgaccaaaaataggaaaaaaaaaaggtggggggaaggaggggtagaaattgagatgtccacagcaaactttgaaaacactgacatactcctgggaacctgggaggtcacgtatatgtgcaaggctgtgcacatgcacaggcccaggaaagacccctgaagcctctaatgtccccactggctgactttgacactctgaacaagcaggaagtaaaaaggaagacagag

SEQ ID NO: 278613 - DNA, 566 bp, Homo sapiens
caataggttagtttgaacatgttttctttcatttgtaactcagagggttctgtctgagacacttttcctttgtactccatcctgaattgacattcctttatctgtaatcataacaccacttataatattcagaactttatcatattctctaattatttaatgcaggagaatttttctttctcaagatttccaaaggatgtttgcaagctgtgcaagaggatggagtttggactcactctgatgtgactaaatgtatgaccttgaataagttagttaacttccttgatacttagtttcttcatcgttaaaatggaaataagcctactcaaagttctaggattgcttaagagattgaatgtaatcagccttgtacacaatagtcattcaacaaataccttgatcatttccttgagggccttggctgtagaaggtaagaaaaccaaattaactgatttaagtaaagtgtctttttaatttaaatatatatttttttaaacatttttgtgggtacatagtaaggtgtataraatatgataaaagaagcgtcttttaaaaaatcattaatg

SEQ ID NO: 278614 - DNA, 547 bp, Homo sapiens
gacctcttagtcccttaatatgatcccaagaatctttaattcaagtatttatcaaggcttcttcttttaaagtgaccatgtaaatctttagtagatggctgttataatgttgatatggacgcattatgtatgaaaaatgggtagctgaacacttgcagtgactgatttccacgcattaataacctgaccatttaattaaaatataatgcccgagggtcccaatccgcaacacagaatgacctagagaatgtcctgtcattgagaggtaggagagggataagaagaagtaactcagcracagactggtcacctttgtatctttgcatgacttactataactaaagcctaactatgtctgagcccagaactcccacctagtaggctttctagctctgtgtatggtgtttggattttgtgcattcctttgagctccaaggctgtgagtgcaccacaatgcaacagaaatgtgcaaattccagtggaagtcactggcacttctttggctcctgaaaatacaccatcattgtgatgtcccagaaatagccac

SEQ ID NO: 278615 - DNA, 523 bp, Homo sapiens
agtgaacacatttaggtggtatagagggaagataatttcaggcttgggagcccagtaaacacacagaacaacattgctcaggagattgttcacaagctagttgcccttgcctttcattacttaacccaaagaatttttaaaaattcttaggtttttcaaaaggacctctatgctgtttcttaagtttttctctttttctcccatgacatcattagtgccattgaaggtacgacagtgttaagtcaccttactctttttttactcctccctccatcttgcagcttatacatgacaataagtgttcattrtttaataatgtttaaatatgcaataccatttctatgttgaggtgtgtactttccagagcatattgaaatgcagtgatgtgtaacaaaacttaccttctgtgattattaatacataaacatatctgaagaccatagtaaataattattataatctaaggtgtggccaacatatttgagaaaacaggaatttaataagatattctcttcagttccat

SEQ ID NO: 278616 - DNA, 613 bp, Homo sapiens
aatacatcattctacctttctatttttgccaagcattaaatataataaaagatgttttgactggtcttttgcctcaaagagattttttaagtttagaaaatacatttaaaatatatgtaaagtgcaatataatactcaggctttaatattattcctaaaagtaacagaaataatttgacattttaatggcaatagatatacccaacattacaatgcttttacagtccatggtgggggaattaaaaaaaaatacttccatatatttaattatttscaaccatgttatcattagcgattctcatttaacaaacactgttcttgagacagtacaaatataaagtggaacgcaatctctattgggtagcatcaacctttactcaatcattaaacgatgagaaatattgggctgtttttgttaaggattaagaaaatgctttttgaagcagataaacatttgtccgtgctggaagctccttcagcagtaatgcattactatgcctgaccagccctagaaaccttggaaagacaaaatatgtacatgttggttgttaggcatatgtgatatgttttgctttgtcacctggcaaccaaaagatttttgaactttgccaaa

SEQ ID NO: 278617 - DNA, 616 bp, Homo sapiens
aaatgttacattttgagatagactttataggacttgtttatttacttaagtaaaatgactatattgactactcgggagcttgtttgcttagttgttttatgtccacaggtgcatgaccatctggacttcatattacctttcagaagtactcaccagtagcaaatcactgtccttttctattatatttttagcagttatatccttatgaaaaaaatatgggtagcctctcaaaggtaaacaattccatgataaatatgaatattgatagttatctccatgatctcagaacctttccattatgatgaagaaaagcttattatctcctattctgaacaacttgcagttatacaagatttcatgaaataattttacacattttacaatrataaaattgcacacttgtcaaaaaatagagacaccaatggaaaaagcttgaaatagcaatggcttacacagcatacaagaattagtgttgttctcaaaaccagtaaacttatgagaattttgaagtatattctaccagcagaattaagagaagtatacggttgacataatatgcttttacatatagagaaataaatgtgtgtttattaagaaatgaaattgtataataaca

SEQ ID NO: 278618 - DNA, 661 bp, Homo sapiens
agtttcagttggggtggatctcttgcacagcagagatataaaaatttgagatggtagcatagtgtactttaacacacatagtaagaagcagagaaacccaatctgcagaaaaagaaagataaaaagataagagagagagaaagaagtcattgagtgcaacgaaacattccctgcgttctgatggtgtttttatgtattactatacaccgggctctagtctttctaaagggacttgatgcatttcttatctttgcattataaaaktcccatttatgccagtaagtaattcctcaccaacatctccattaaaatatctacttaatttagctaaggttattatatttcacttgccctcaccgagctctaactctaatatatcttcctaaattattttatcctgaaaccttctttctgtcccctcacagtgtgaaaatatctttacaggaacaaggaaagaaactcacctgtttaacttattatggaaaattattttgtccatgtgattttgacacagttacctcaaattctcaggaaaaatgcttagcaaggcttttcttgtgtcaaaatataaaagaatgtttattttaacaaaggacatgagggaggcctttactcaataagtttgtattaagtgcttacaacctgtaaaaagcaccgtaaa

SEQ ID NO: 278619 - DNA, 562 bp, Homo sapiens
atggatcagctgacaactggaatccagaaaaattgggaatagtatttcactgtggtcagtcttagagatttctttgcagcattgatgatttgggataaaatggagagtatacttggcagatcaggatgggagaccttacaatggttttgatatcactggtaagatccagaccaggagaaaaggggaatgacagtagctgaagggacaacttcctgagcacagtaagacaatcctggaccagttttggcagggtactatgttataaaaaatctgagatccactaaagtccccagcaacttgaactatacaggtactgtgagaaaaagaataagatatcatgaatattcaaaagcaaaagctttagtaggtttttgcagagactggagggagttacaaggatactgggtccctggtgactgtaaagacctcaattcagtcatcttcatagtagggyttcacagtttaaattagtgtctacattctgaagaatttcttatttctatcactatcgctaaatagtttctctgatacagtagcttatagtttgttaagagctcagtct

SEQ ID NO: 278620 - DNA, 426 bp, Homo sapiens
gacaaatactatactttaaacgatggcccacaaaatatcattacaaagatgtattccttatgtcttaaatcacaaatctgtggagaaggagatcaaatagagaaaaaggaggaaagaatcttacttttgaacacttgcacgtgaaagattataggcatccctggaamctgtacaaaggctctgcaattatagattgatctacctgtatattttcagaaccaagtaatgtctaccactccaaggggggacttttttaaaaggcataatagtagttttttagctatatacaaatgataaaagcaaagacatcaaagtgggtagcctttcaactcatgctcaattagaataaaagtttggttgctgttttaaacatttatgactaactaactgtgacagactctcagctttgcaaacgggatgattttc

SEQ ID NO: 278621 - DNA, 597 bp, Homo sapiens
gatgagggttttcaatttattcttggacaagttaaagtgggtaggtcagaagaagttacaacccagaacatactttgataagcttacatttctgtcagaattccaggaggactttaaataaaagtttgtagatctgatgaagaacagaagtgaaaagtggagctgagaagaagattagcttaaaatctatatagggaaaaattagtgtcttcctactctgctatctctatgcaaagaaggaagcaggttggcttcatcccataggcaaattataaatgagtaaatatataaataaatttattatttgggtagtttcaaataacttggagagctttagtgtaggtgctgcttccccaggacaaagccttctgcaaattggaatataagtgtyccaggctgaaagccagctccttcctcatccaactccaaacaaaacctgagactctattgttacttccagccatatttctctcacatgggtgatgactattatggaattttatctgcttgcaaaatagcagaggaaactcacatttcataaatcttaaatataaatggactgtcaagaatctccagatacacacaaaagatacaaca

SEQ ID NO: 278622 - DNA, 573 bp, Homo sapiens
aactaacctctcaatatccatgtataggctatagaaaatgacagtttgggttgttagacaaataaccaactctcagctactattcattaaaatattaatcatccttaaggtaacactcactaaaatacttggtacagacaagatgctcaacaaatattggaagaggaattgttccaaattacctatatatttatctaaaatatatatttgatatgtgccaagtagttatttcaaggttttgactatctgatgcaaagctttcaaaataaaaataaccacagcattaacaaaaaatggtttcgttttagataaatagctgggaatatacaaatctttacaaatttgaatatgaagamcctgattgtttagcttttttcatctcattctattctgcttatcattggaaagatcaaagtggctaacaaagaagttgaatgtgaaattatccaaattgaaagggaggtgaagctcgtcataagtggttcttgtgattacagcaccctatgtttgaatgcaccttttgttttgttctgatgcactttttcctttctgaattctaaatatcctcatgca

SEQ ID NO: 278623 - DNA, 455 bp, Homo sapiens
acatggtggcaggagagagagagarcacaagggagaagtgtcacacttttcaaacatcagatctcgtgagagaacactcactattatgagaacagcaaaggggaaatccgcccccatgatccaatcatctcctaccaggtcccttccctgacacgtggggattacaatttgatatgagattttggtgggaacacaggagccaaaccatatcagttaataataataaatttatcttatacatttcagtaatattacattcttaagaaaggcttactactctaaatgtgacctagcttcttgcttttactgagaaatgggctttaccagatgagaatttattcctagatatctaggttcatggaggtattcagtggaaaccactgaaaaacataagaaacatgcatgaggaaaatggccattctcagatacagaaaaaggttgagtaataatcccaa

SEQ ID NO: 278624 - DNA, 551 bp, Homo sapiens
cacattcatttcctaatggattactcctacttgtttctcctatttggagagttagtattagcaaaatggttaagaagtaagttttcctagccaggcttttatcattggatcaaatcctgatcctgccacttttgaactgtgtaaactcggtcaagtttcataaacatcctaaaccattgttttcttacctgtaaaattggaaaaatcaaatacctacttgaatgaactattgttagcattaaacaatacctgttaagcacttgtcatactacctggcacatggatatattatcattagcagcagtaacagcagcaccatagttagcactcctgtcttttaagccctcacttatttgctaattagttggtgtctgaaactcagactctagctastcctacctcccaaaaatgcttatgagtattgtgaatagtcatttaatccccttcagccaaaaagttttgcttagagacacatactcagaaaaaaaattaggtagtttcatgttgttttcaaattgttaccaaaaggctttgaagttcagtctaggtcc

SEQ ID NO: 278625 - DNA, 564 bp, Homo sapiens
ggctccccgttttgtttatctttcaggtggtctttttccttttttcacccggctgaaattctatctttaaaggcacattttaaatcccttttctggccaactgaaatggactgtcccatatctgtaccttgaaaacacagtatgcaccatttatataatacttattacattaatctgtattgttgttctcttttcatggagatacgataggtaatctgaaagtcaatgttctgtgataaattcatatcagattcatgcaggaaataagtgtgccatgtttccagaatgaacctcccactcatactattaagtacaaaactgttaaggattccatagtctaaatcattttctttgattcaagaggagtttttttttcttaatcaagaaaaaaatattaaaaaccactaagtgtcagagtttactcaagttggtagtgttgtctcatgggtaaaaattakaaaaaaaataaatcactggtgtcatggaacttgtaacctaatggaggaggatagacaacacaaagaaacagaaagatggataatctttcaaactcacaatctcaac

SEQ ID NO: 278626 - DNA, 564 bp, Homo sapiens
tcctgcatttggggtgtgagaggaaaggaaagtcaagaacaaccctaagattttttatttaatttctagaagtaaagaattgtcatcaatgggcatggggctgactggggatgcagtaggatttgggggatgtggtagaaatcagatattaagttggtaacatgattttgcctgtgtccccacccaaatctcatgttgacttgtaatcccgtgtaggaggaggggcctggtgggagattggatcatgggggtggtatctcatggtttggcaccatccccctagtgctgcttgcttaaaggtgtgtagtacctccccctccttccttctgstcccaccatgtagatgtgtttgcttcccctttgccttctaccatgattgtaagtttcctaaggcctccccagccttgcttcctgtacagcctgcagaactgtgagtcagttaaacctcttataaattacccggtctcaggtcattctttatggcagtgtgagaacggactaatacagtttgggatatgttaaatatgagaagcctcttagacatcattgcggttcagaacatga

SEQ ID NO: 278627 - DNA, 713 bp, Homo sapiens
ttcttaatggtaaataatctaatttaacattattttcttcattattattgcttattgtggatctgctccaygatcatgaaaacatcatcttatactatcttctagaacttctattatattatcattgacatttaaacttgcacgtcatttataattgattttgttaatggcatgaactgaggtatcacttttctcttttactgaaaaatcacattttttctcatttatttagggacaatgaagaaaatggaattaattttcaagtttaaactcactttctagtaatacaatttagctacaagagtttttatatgttttattgttgtatgtgttgtattcttttttattcattactggtatgattttataatattttgtttagtgcttttatttgtatgttcactagatacattgttttgaaaatttttccttgtaataacctggtgaggtcctgatattaagattatttggacttagaaaatgagttgaaaaatgtttcctctttttttcttcgctagagaagtgagtttggattgatgctgtttcttcaaatgcctggaaggaaagactgactctgacagtttggatcacatttctgtgcttttcctctgggatactggtctctcaagctccagctctcttggtagctctatgatgctttccaacagatgtgctttgcatgttatctagcatttatcctttttgttggtaga

SEQ ID NO: 278628 - DNA, 1035 bp, Homo sapiens
tcagtctgtgatagtaaagctttgtgaaattgcggaagctgtctttgctggaaagaatgttctttgcctgaacggataatatagaaaagttgatagcctccttatggcctttgcaggcttcactgctttgtttctttctcatttcccaggaaagacagatcacaggagaaaagtctgttgcctaggacacaggyttatgatacatgttgagatcactctccctacagccttctctatttagccagggcaccaccggcaaccacagccagagccccacaatgtgtggctccaggtgggattttagaacaagggaaaatagataccatggtaacaagagggtggggactactgaaccaccgcctgttgtctttcccagaccctcctcatttttaggccccattttaaaaaatatattttctaaatggtctctcaacggagtttacataggaatacttcagcagttatttcttcatgacctactaggtcctgaagatacagaagtgaacaaaacaaaacaacccccatcctcatccctggttccatgaataggtacgggtagttgcttcataaatgccattwttttgtatacttctcacctacttgcccctatttttaacaaattacwgaacaattatcacaactaaggaaacaattccaattatattcctattaactaagttaactaagtccaaatttatttggaaattcctagtttttacctaatgtcctttgatcctgttccaggatcccatctagaacaccatgttccattcagttgacatgtctcctcggcctcgtctggacagtggtagtttctcaggcttttcttatttttaatgaacttgacaattttgagtagtggttattttctagaattcccctccacatggttagacttaggttgtggatttaggggaggaagaccacagaggtcaaatgtcattctcattgtatcatatcaagggaatacattatgaatgtggcttaaagtgatgtaaaactgaatcatctggtggaaacagtgtttctaggtct

SEQ ID NO: 278629 - DNA, 567 bp, Homo sapiens
atagcatgaatattttttcataaccttcccmaaattaaatatatatgtaatggtattgaacatatcaaaatttctctctgtctttttgctgtaccatgttttcctattgactcttacagatacttgtttatagagaaaagatacattgccaagcaggtaaatggtcaaaacctggcctgctgaggcagaagtcccctattgtccccaggaaatacatgttgtattagcttaatctcttctgactttctggctttgtgctttgtaaagtaacttgacagtttcatcaacattgattaggaccttaaataatctagtcttattctgtgttttgagatttatctcccattattctgttaatgaccacattgttttctaggactatttaactattcttcaaacatttatatattaactggaattatcatcacttcaacttcaccttacttttacatgtaaaccatagtacagttttgagatgtactttatattccagatgcactattcaaaggtattacaaatatttagtgaaaatgggaagtggaaaagcctgacaatttttaagggcaa

SEQ ID NO: 278630 - DNA, 641 bp, Homo sapiens
gggaggatcacttgagctcaggagttagagaccaccctggccacacagtgtgactctgtctccacgaaaacaaaaataattcactgagtataagcaagcaaacaaatttaactgggtatagaaggaacataccttaaaacaataaaggccatatatgactagttcatagctgacaccatactaaatgtagtaaagttgaaagcttttcctttaagatctgaaacaagacaaggatgatcagttttaccacttttattcaatatggtactggamgtactagctataggaattaggcaagaaaaagaaatgaaaggcaacagaattggaaaagaaaaagtcaaattaggccagtcctggtggctcatgcctgtaattctagcactttgggaggccaaggtgggaggatcacttgagctcaggagtttgcggccagcctggaaaacatagtgagacatcgtctccattaaaaaaaaaaaaaggaaacatatgtagaaaaagtccaattattcttgggcatgcatgacatactatatttagcaaaacataaagattccaccaaaaatctcttagaactgataaataaactcattaaggttgctgcatacaaagtcagtacacagaagacagtagcacatgtatgt

SEQ ID NO: 278631 - DNA, 641 bp, Homo sapiens
gggaggatcacttgagctcaggagttagagaccaccctggccacacagtgtgactctgtctccacgaaaacaaaaataattcactgagtataagcaagcaaacaaatttaactgggtatagaaggaacataccttaaaacaataaaggccatatatgactagttcatagctgacaccatactaaatgtagtaaagttgaaagcttttcctttaagatctgaaacaagacaaggatgatcagttttaccacttttattcaatatggtactggacgtactagctataggaattaggcaagaaaaagaaatgaaaggcaacagaattggaaaagaaaaagtcaaattaggccagtcctggtggctcatgcctgtaattctagcactttgggaggccaaggygggaggatcacttgagctcaggagtttgcggccagcctggaaaacatagtgagacatcgtctccattaaaaaaaaaaaaaggaaacatatgtagaaaaagtccaattattcttgggcatgcatgacatactatatttagcaaaacataaagattccaccaaaaatctcttagaactgataaataaactcattaaggttgctgcatacaaagtcagtacacagaagacagtagcacatgtatgt

SEQ ID NO: 278632 - DNA, 520 bp, Homo sapiens
tggaatgtgttaagactttgtgagactgttggttcctctaaattttccaaacttttattttctgcttcccctttaaacataagttccaatttccagtcagccagtgaccagggctaagaagttgtcccagaccatgagactcccactgagaaagcaagcagactcacagttttttgggatctctgagatccttcagtggcaatccagttccttcaaagggtctgtggattctcttagctttcctggtatgttcctgaagtagttcttggagcaaaaattcacgatgtgagtctctacatgctgctctgtctgtctgggtgaaagctgctcctagctagtcctgcttctgtctgtcatcttaatctgccactgagccttgaatcgtaatttctctcttacaccacatataaaattaactcaaaatggatcataaacttaaatttaaaaatgaaaactttaaaaccyttagaagtagatataagagatcatctttatgaactggaagccaggcagaagtttc

SEQ ID NO: 278633 - DNA, 1142 bp, Homo sapiens
ccaatacaagtatcccagagttagagcacacagtacggcagctgggagctgagcgttggctccctaaaatttcccaggaatgcagcaagttggttgaatccaccttataccacaatcaaaccctcaaggccatcaaataggataaaagataaaacaacaatccaaaggtcagcaccctcaaagattgaaggtagataagcccacaaatgtgagaaagaaattgtgcaagaatgctgaaaactcaacaagccagactgccttctttcttccaaacaaacacatcacctttccagcaagcgtttggaactgggctaagayggctgagatgacagaaatagaattcaaaaattggatagtaatgaagttcattgagctcttaaagacctaaaaagagacttagactcccacgcaatacagtggtctactttaacaacccactgacagtattagacagatcatcaagacagaaaattaacaaagatatacaggacataaactcagcactggattaaatggacttgataggtatctacagaacactccacccaaaaacaacaaaatatacattcttcttatcaccacatgacacactctataattgatcacataatcagcagtawatgacctacagaatgggagaaaatatttgcaaactatgcaactgaaaaaggactaatatctagactctataaggaactggaacgaatcaacaaggagaaaacaaccccattgaaaagtgggcaaagggcatgaacagacacttctcaaaagacatacaagttgccaaaaaacatgaaaaaatgctcaacatcactatcatttgacgaatgcaaactaaaaccacaataagataccatctcacaccagtcagaatggctatcataaagaagtcaaaaaataggccaggtgtggtggctcatgcctgtaatcccagcattttgggaggccaatgtgggcagactgcttgagtctaagagttcaagaccagcctaggtaacatggtgaaaccccaactctattaaaattacaaaaaattatctgggcgtgatggtgcacaccwgtagtcacagctacttgggggctgaggtgggaagactgcttgagccccagaggttgagactgtggtaagccctatcatgcca

SEQ ID NO: 278634 - DNA, 591 bp, Homo sapiens
gtggcaggcgccggtaatcccagctacttgggaggctgaggcaggagaatggcttgaactctggaggcgaaggttgcagtgagccgagatcgtgccactgcactccagtgtgggtgacagagtgagatcctgtctcaaaaaaagaaaatgtgtttttccaagtctgtggcttgactttccatttcttaaaacagtgttttacaaaaaacagaagttttgattttgacgaagtccagtttatcaatttttttcatttgtagttttgtgcctttttttgtcctattgaaacatgtttgccgaatccaagcacacatgtttttctcctayctcttaagaggtttaggctttggttttacatttaggcttatactgtatttcagttagtttttttggttttttgttttcgggataaggtacaagggaagggttgtggtgcattttaaaataaggatgtcctgatgtttctgactctttgttggaaagagtgaactttccctgttgaattgcttggcatgctgttgaaaattaattgatcatatatgtgtgactttatccctgaactctcaattcaattatattctatcaatctct

SEQ ID NO: 278635 - DNA, 594 bp, Homo sapiens
tatagaatttttccagctaataaatgaatgaggatggatagaattgagacatcagcatgttgcaaccttctaatgaattaatggctctggacagtgttcactaatggctgctaaacaccaaagagagacacttagacattacgtacctcctaacggaagtgcagaacactacatgtgcattaatcttgacaacaaaataattgaacctgaatctggttaagcttctaaatccaactaccaatttacagcttacaatgacagaggaacatgttaaacatcacagggatgccatcagcaaactccaaactgtgggaaattccaagacagccagtttattcaacattaacttaaacaagttgcaaaggggaggtgggagatatggttgagaaacttacaaatttttttggcacgcaaacattcatttgaccgtattttaaaggcagagcagaatcacattcactttcttatatatatataagattatatataatcactataaacaggctggatttcagagctctaagttcrctttggaaacttttgaacagttgatcactagcagcccagcaagctttttccttcccttccaggctc

SEQ ID NO: 278636 - DNA, 561 bp, Homo sapiens
aaagtaacttataaaatatcttcaaaaattgttattgtatcctcccmacaaggtgataagatagatactaatatctccattttactgacaaggaaactgaaacgcaggaagaatacatcccttcttgaggtcttgcagaatcaaggccttaactgaagtccttttccttcaaccccagtgtttttttgccattttggctgcctttatggtcttttactggatttttttttcctttgggtatttcacagtcatctcaaattgaatttatccaaaatggaattcctgatttcttcaaattgcgtccttctcctgttttctatataagaaatctgggagtcatttttgataccttgtctctctcattttcccatatccaatccatcaccacattatgacaattatacctccaaaacacccctcttgctacttctatctggtttaagtactctggatatttatttgttaagtaagtgctgaggtggaatatgtgcaattaagaaggataccaggaagacaaagtagctgggaagtgagctagatttcctcttaaaaataaagatt

SEQ ID NO: 278637 - DNA, 561 bp, Homo sapiens
aaagtaacttataaaatatcttcaaaaattgttattgtatcctcccaacaaggtgataagatagatactaatatctccattttactgacaaggaaactgaaacgcaggaagaatacatcccttcttgaggtcttgcagaatcaaggccttaactgaagtccttttccttcaaccccagtgtttttttgccattttggctgccttyatggtcttttactggatttttttttcctttgggtatttcacagtcatctcaaattgaatttatccaaaatggaattcctgatttcttcaaattgcgtccttctcctgttttctatataagaaatctgggagtcatttttgataccttgtctctctcattttcccatatccaatccatcaccacattatgacaattatacctccaaaacacccctcttgctacttctatctggtttaagtactctggatatttatttgttaagtaagtgctgaggtggaatatgtgcaattaagaaggataccaggaagacaaagtagctgggaagtgagctagatttcctcttaaaaataaagatt

SEQ ID NO: 278638 - DNA, 613 bp, Homo sapiens
ggtgttttagacacgaagtccttgcccatgcctatgtcctgaatggtaatgcctaggttttcttctagggtttttatggttttaggtctaatgtttaagtctttaatccatcttgaattaatttttgtataaggcccaacacctgctatttttcccttatccaggttctcttctttcttcagagtttgggaaaactggctgagttttcttttctttgtttttgagatggagtctcactgtgtcgcccaggctggagtgcagtggcrccattttggctcactgcaacctccacttcctgggttcaagcaattctcctgcctcagctgggattatagtagctgggattacaggcacctgccaccacacctggctaacttttggatttttagtaaagacaagatttcaccatgttggccaggctggttgtgaactcctgacctcaagtgatccaccccactcagccacccaaagtgctgggatatcaggtgtgagacatgatgcccagcctgtgctggcttttcttaagacccatcaaacctaatccctgcttttatatctccaatctagttttcagtatttttattatatgtctttctgctttatgagttctgaa

SEQ ID NO: 278639 - DNA, 613 bp, Homo sapiens
ggtgttttagacacgaagtccttgcccatgcctatgtcctgaatggtaatgcctaggttttcttctagggtttttatggttttaggtctaatgtttaagtctttaatccatcttgaattaatttttgtataaggcccaacacctgctatttttcccttatccaggttctcttctttcttcagagtttgggaaaactggctgagttttcttttctttgtttttgagatggagtctcactgtgtcgcccaggctggagtgcagtggcaccatyttggctcactgcaacctccacttcctgggttcaagcaattctcctgcctcagctgggattatagtagctgggattacaggcacctgccaccacacctggctaacttttggatttttagtaaagacaagatttcaccatgttggccaggctggttgtgaactcctgacctcaagtgatccaccccactcagccacccaaagtgctgggatatcaggtgtgagacatgatgcccagcctgtgctggcttttcttaagacccatcaaacctaatccctgcttttatatctccaatctagttttcagtatttttattatatgtctttctgctttatgagttctgaa

SEQ ID NO: 278640 - DNA, 538 bp, Homo sapiens
cactgttcacggcagtgcaagcagactgccccggcagctccacatctaggggagaggcaggcagcaaacccgcagatgagcaaagcaacagtgttgcctcagaaccagtaccatggagaaactgacgccgggaagggagagaggggctgctggtgggtccacgggggctacactgtctgaccaggygccaggcatagtctctcttctgggctggcaggggaggggcagtggctgagtgagcctgacaacgacctgggggagaccagcagcagggagcacaggagcatgtctgagtggctgcccctgcctgcgggccgacacttagattctgactttttttttttttaggttggagtacaatggcatgatctcggctcactgcaatctccgcctctggggttcaagcgattctccttcctcagccttctgagtagctgtgattacaggtgcgtgccaccacacccggctcatttttgtatttttagtagagatggggtttcaccacgttggccaggctgatctcaaactcctgacctca

SEQ ID NO: 278641 - DNA, 538 bp, Homo sapiens
cactgttcacggcagtgcaagcagactgccccggcagctccacatctaggggagaggcaggcagcaaacccgcagatgagcaaagcaacagtgttgcctcagaaccagtaccatggagaaactgacgccgggaagggagagaggggctgctggtgggtccacgggggctacactgtctgaccaggcgccaggcatagtctctcttctgggctggcaggggaggggcagtggctgagtgagcctgacaacgacctgggggagaccagcagcagggagcacaggagcatgtctgagtggctgcccctgcctgcgggccgacacttagattctgactttttttttttttaggttggagtacaatggcatgatctcggctcactgcaatctccgcctctggggttcaagcgattctccttcctcagccttctgagtagctgtgattacaggtgcgtgccaccacacccrgctcatttttgtatttttagtagagatggggtttcaccacgttggccaggctgatctcaaactcctgacctca

SEQ ID NO: 278642 - DNA, 547 bp, Homo sapiens
tgtgagctatcacaggacaatggggaggcctgaaggttgaatgaaactgaagggggaggaggaggggcactgartgacctccccaggcttctgcttgtataacagactggatggggtcggggaggttaggaggagaagttctgcaagttggggtttgggcaaagtgagtctgcaatgccttttagacattcaggaagatatgtccaggtcatttggctgttctggtctagagctcagaggaagcacctgagctggaggtccaggtgggcccctggcatgtgggcatcacctggagctgtggccgtggtgagaggtcacaggtgtgagccccaggagctccaggacaggaggaaggtcctacagagcagtcacaatggaggaggaaagggaacacaagcaaaggagcagaaaacatcaaggagatgccttcaaggactattgaccatgtagggataagagatgcgaactcacacacactggcttgtaggaggccaaggaaacccaaaaaactcacagaagcagattctgcctgtgaaaacaaggtgcc

SEQ ID NO: 278643 - DNA, 547 bp, Homo sapiens
tgtgagctatcacaggacaatggggaggcctgaaggttgaatgaaactgaagggggaggaggaggggcactgaatgacctccccaggcttctgcttgtataacagactggatggggtcggggaggttaggaggagaagttctgcaagttggggtttgggcaaagtgagtctgcaatgccttttagacattcaggaagatatgtccaggtcatttggctgttctggtctagagctcagaggaagcacctgagctggaggtccaggtgggcccctggcatgtgggcatcacctggagctgtggcygtggtgagaggtcacaggtgtgagccccaggagctccaggacaggaggaaggtcctacagagcagtcacaatggaggaggaaagggaacacaagcaaaggagcagaaaacatcaaggagatgccttcaaggactattgaccatgtagggataagagatgcgaactcacacacactggcttgtaggaggccaaggaaacccaaaaaactcacagaagcagattctgcctgtgaaaacaaggtgcc

SEQ ID NO: 278644 - DNA, 547 bp, Homo sapiens
tgtgagctatcacaggacaatggggaggcctgaaggttgaatgaaactgaagggggaggaggaggggcactgaatgacctccccaggcttctgcttgtataacagactggatggggtcggggaggttaggaggagaagttctgcaagttggggtttgggcaaagtgagtctgcaatgccttttagacattcaggaagatatgtccaggtcatttggctgttctggtctagagctcagaggaagcacctgagctggaggtccaggtgggcccctggcatgtgggcatcacctggagctgtggccgtggtgagaggtcacaggtgtgagccccaggagctccaggacaggaggaaggtcctacagagcagtcacaatggaggaggaaagggaacacaagcaaaggagcagaaaacatcaaggagatgccttcaaggactattgaccatgtagggataagagatgygaactcacacacactggcttgtaggaggccaaggaaacccaaaaaactcacagaagcagattctgcctgtgaaaacaaggtgcc

SEQ ID NO: 278645 - DNA, 561 bp, Homo sapiens
ttgagcagtagctaatagaagttgataactgaataaataatatatttattatgtgcctaggtacttagattaccttatattttaataccatattgtgaattttcatttaaaacaaaataaaattattagtaaagagtgatctattttactttattttttgtaatgctaaactaagacataatgagaaaggcataatggtttggattatgtttacatgttcttcaaaaattaatatattgcaaacacatttaagaatggcataatatatagaaaatcctaaggaatctacaaaaaactgttagaactaatatcacagtgaggctggagaataaaatatcaatttacaaaactcaattgtagacaccagcaataaacaatctgaaaatagaattaacaaaacaaatccatttaaaatattataaaaaagaatatatacttaggaakaaatttatcaaagaagtaccaaacttatactctcacatactctgtaatctgaatattacaaaactgtttaaagaaatgaaaaacattcaaataaatggaaagatataccatgttcat

SEQ ID NO: 278646 - DNA, 535 bp, Homo sapiens
ctccctttcacttcctcactctgaatggatatgtgtggctccctggcctaagcaaggtatagccaccaagggctcagtcctgcaggaatgaagggcagggtcactctggtgactgctgagggagggggcttcagtgtggatgccagaggaggagaggatgaagatcarctgtggtcccaacatgaactgtgcatgacaaaggctgcagctgccccccaaccttgctctccaaagtgacgccacaggaagagggacccagggaaccgtggagaagctgccctcagtcccagaccccaggggacaaggagtggactgtggtggccctgcaacgtgcccctctgactgtggggagagacattgcctgaggacccagctgctgggctatgaaatccatcaccatgcccatcccagggccacgctggccatggctgccggccgctaataacagtgagacagggacggtaaggcggttggctccagggaggtgccgggcaccttggacgggtgaattttgctccaagtctgacggccttgc

SEQ ID NO: 278647 - DNA, 535 bp, Homo sapiens
ctccctttcacttcctcactctgaatggatatgtgtggctccctggcctaagcaaggtatagccaccaagggctcagtcctgcaggaatgaagggcagggtcactctggtgactgctgagggagggggcttcagtgtggatgccagaggaggagaggatgaagatcaactgtggycccaacatgaactgtgcatgacaaaggctgcagctgccccccaaccttgctctccaaagtgacgccacaggaagagggacccagggaaccgtggagaagctgccctcagtcccagaccccaggggacaaggagtggactgtggtggccctgcaacgtgcccctctgactgtggggagagacattgcctgaggacccagctgctgggctatgaaatccatcaccatgcccatcccagggccacgctggccatggctgccggccgctaataacagtgagacagggacggtaaggcggttggctccagggaggtgccgggcaccttggacgggtgaattttgctccaagtctgacggccttgc

SEQ ID NO: 278648 - DNA, 535 bp, Homo sapiens
ctccctttcacttcctcactctgaatggatatgtgtggctccctggcctaagcaaggtatagccaccaagggctcagtcctgcaggaatgaagggcagggtcactctggtgactgctgagggagggggcttcagtgtggatgccagaggaggagaggatgaagatcaactgtggtcccaacatgaactgtgcatgacaaaggctgcagctgccccccaaccttgctctccaaagtgacgccacaggaagagggacccagggaaccgtggagaagctgccctcagtcccagaccccaggggacaaggagtggactgtggtggccctrcaacgtgcccctctgactgtggggagagacattgcctgaggacccagctgctgggctatgaaatccatcaccatgcccatcccagggccacgctggccatggctgccggccgctaataacagtgagacagggacggtaaggcggttggctccagggaggtgccgggcaccttggacgggtgaattttgctccaagtctgacggccttgc

SEQ ID NO: 278649 - DNA, 989 bp, Homo sapiens
ctccctttcacttcctcactctgaatggatatgtgtggctccctggcctaagcaaggtatagccaccaagggctcagtcctgcaggaatgaagggcagggtcactctggtgactgctgagggagggggcttcagtgtggatgccagaggaggagaggatgaagatcaactgtggtcccaacatgaactgtgcatgacaaaggctgcagctgccccccaaccttgctctccaaagtgacgccacaggaagagggacccagggaaccgtggagaagctgccctcagtcccagaccccaggggacaaggagtggactgtggtggccctgcaacgtgcccctctgactgtggggagagacattgcctgaggacccagctgctgggctatgaaatccatcaccatgcccatcccagggccacgctggccatggctgccggccgctaataacagtgagacagggacggtaaggcggttggctccagggaggtgccgggcaccttggaygggtgaattttgctccaagtctgacggccttgcwtgataaatttgctcagtgttggtttgtctgaaggtttttttatataccttaattttttggaggatattcgaagtagatatagaatttttattggcagttattttcttttagtatttaaagattttattccgtcatattctagttttaaccatttctgtgggaaagctacattcttattattgcttctatgaaggtagtgggtctttttccwctgggcctttttttttcttccaccatcttcattttcctgcagttttactatgatgtgcctaggtgtatttttttattgtattattttcagcttgggtatatagactatcactgttgtaaaattcttagcatatcttcaaatattgctcttgctcaattgtccttctctcatactcttctggaaatccagttacatttatgatagacttttctaccatattctatatgtttctttttttccct

SEQ ID NO: 278650 - DNA, 453 bp, Homo sapiens
tgataaatttgctcagtgttggtttgtctgaaggtttttttatataccttaattttttggaggatattcgaagtagatatagaatttttattggcagttattttcttttagtatttaaagattttattccgtcatattctagttttaaccatttctgtgggaaagctacattcttattattgcttctatgaaggtagtgggtctttttcctctgggcctttttttttcttccaccatyttcattttcctgcagttttactatgatgtgcctaggtgtatttttttattgtattattttcagcttgggtatatagactatcactgttgtaaaattcttagcatatcttcaaatattgctcttgctcaattgtccttctctcatactcttctggaaatccagttacatttatgatagacttttctaccatattctatatgtttctttttttccct

SEQ ID NO: 278651 - DNA, 579 bp, Homo sapiens
ttttattactgtttatgttgtgtccataatactcctctttgattactggcatgggtttcacctaaacagattttttagtcttatatgaaaacattggctgttaggcatttcaatttctttcttttttctttcttatgtgtctcctgtagatattaaattactatttctttaaaaatatctgttctgagarcttgtcttttgattagagattagtataattcattcacatttactatacttaatgttatattaagaattatttcacaattattattcacaattttattctcatattctatgtacatttcgtttttccttcctaacttccattgaacagacaatttttttgctgattttgacataatatattttattttgattctttgggtggtcacccataacttcttcagatctatagttatgcttattctccccaacaatttcctaaatttaccatgatctatctcttccctgtaaataagacaagtacctgaggctactctcttatttctctgaacaatctctcacatcccaacctctctcctataccatgcgagtatcacctagaatttcggctgt

SEQ ID NO: 278652 - DNA, 532 bp, Homo sapiens
gctcagctgggaagggctcttcctgctctggaattttaatttgtttggttcttctactttcactgctaatcaatggttttacaactataatctttataatttatcaatttatttttctagttgtgttcggagcagtgaactgttgatatttactctaaactccctagaaactgaaacccttacagtggttagggatagtagatggaccagtttttaacttctgcccagtgctggaagaaggattaaagacacaccaggaaaattctccccacatcctatctctggagtctctttttttctactctaggcaataattcctccctatactaccccatcccagaagcccaagtacccagagttctcaatgttttaagggaagaggtgggtttttgtttttaatggatccactaacttccttctgtttttgtgcattgctgagattgagtttcrgtgcccaaatcagtagtacccatgttaattcgccatttgaattacatcgaaaacccaactctgccacatactatctgtatca

SEQ ID NO: 278653 - DNA, 597 bp, Homo sapiens
tctgcaacagtcgtaggcacaggacactatctccagtttacagaagaggcagttgaggctcagaacaattacaggagttgcctagtctctagaaagatctaggattgcaatccaggtctgtttgtccattaatcactgtttgcattcctagtgagacttatcagagatgaggaaaagaagaaagtgccttccatcaaggaagaaaccacatgcctttgtaggccagagtgcagttatcccttagaaagctgtgctggggaagagagcagaggctcttggcatggttgaagtgtctggagagatgaaagagggaatagttcatccgggaagagtcagaggacccaagccagggcagactgcacagcaaaggacagccagaaacaaagcccacctctcacccagaccaaggaactggcaaagtgagaagagagttaggtgacatattgcagagtccatggtactctctrctcaagtttagaggggttggcagggtagaagggagatgagaggaggtatagacaagtgtgggtgcaaaggaaggggtttgttattcccccaccttagactggaaaattcactgactggccaggccccatt

SEQ ID NO: 278654 - DNA, 574 bp, Homo sapiens
tggagctgggacatgtgtgctcataaggccatggggctcatctgggtgagacgcagtggccagggcagagtcgggcaccttctgccccgtccaggctccacccagctccatgtgtgtggatggatctccagctgcaccttggtgctctgtctgtgggcaaatctttcccatgtataaaactgatgaaactgagattctatgaaagtggaagaggtcagattagaacccaggcagttccaggtgygtgtgtgtgcatgcgcatgtgtgttatttttagtaactttaccgagtggcacctgtcaccatacatgggttttagaacatcttcatttccaagggcccgcttccctcatgtgtcagacagatggctctgtggaattcatttcctttgaaaagcagtgatttttgaaggaacattgttatgaaggcggccacccggctgtccctcatgctctgaagtaggcctgcagcttccactttcacctgcaagtgccagggcatggattctaagtaaagtctaagatgccagaggtcgtgtgcctccccagcatcctacccacagcccacccacatc

SEQ ID NO: 278655 - DNA, 1085 bp, Homo sapiens
cctctctctgggatctcttcggtactgccagctcccttaaaggtgccaggctcttccctgtatggagaagctggcaccatagagaagcgacccagccacacaggtcctggtgccagctctgagctgcctgctctcgtcctgtctcacggcttcccaagctgacggacctgcctggcttctcatgtgactgcccactcactcckggcctgatgcttgacaacacgtctgggactctcctgggccaaggaccctacatctcagcccaggtcccgcatgctctctcagtcctgggatccctgtctcctttcccatgccacctcccagcatccttgttcctgggcaggaggtgctttgcagccctgctcctcagctctgtgacccagccagattggtggccaactgccctcactctggggtcagctaaccacctctctgtcctcctcctcaccctgccacctcacctagtcccttccacctccatggacttcccctggggcctccctccccacatcacaaccctcctttgctgagatgwcagaaatttcatgaggaggtatcagtctagagttacccagggcctcgtggccggagaaactgcccagcagatctgtgaggacctcaggttgtgtataccttctacaggtgagtgcagaggtgacagcagggatacctcctgagggttggagacagcttcccccaggatatatcaaagctgcctccttactcccccatctcccagcwtgggaaagtgtggagaattgagcagatggactttagctagaaatgtttgagaaatactgattagagcttgggcttcagacacaggtggtcgtggagtaaaatctggtctccatctctccctggctgtgtgaccttaagcaaataacttgacctctctgagcttcagtttcttcatctgtgaaggggagatagcaatcctgatttttgagattggaatgagaattgaaggaggtcaccgtgtgtgtggacctgaccctggggaaatgtcctcagactgaggctattcaaggtcatcagaccctcagtcaaactccaatcccagcccagcacaggcccctggggtc

SEQ ID NO: 278656 - DNA, 550 bp, Homo sapiens
cagaaatttcatgaggaggtatcagtctagagttacccagggcctcgtggccggagaaactgcccagcagatctgtgaggacctcaggttgtgtataccttctacaggtgagtgcagaggtgacagcagggatacctcctgagggttggagacagcttcccccaggatatatcaaagctgcctccttactcccccatctcccagcttgggaaagtgtggagaattgagcagatggactttagctagaaatgtttgagaaatactgattagagcttgggcttcagacacaggtggtygtggagtaaaatctggtctccatctctccctggctgtgtgaccttaagcaaataacttgacctctctgagcttcagtttcttcatctgtgaaggggagatagcaatcctgatttttgagattggaatgagaattgaaggaggtcaccgtgtgtgtggacctgaccctggggaaatgtcctcagactgaggctattcaaggtcatcagaccctcagtcaaactccaatcccagcccagcacaggcccctggggtc

SEQ ID NO: 278657 - DNA, 550 bp, Homo sapiens
cagaaatttcatgaggaggtatcagtctagagttacccagggcctcgtggccggagaaactgcccagcagatctgtgaggacctcaggttgtgtataccttctacaggtgagtgcagaggtgacagcagggatacctcctgagggttggagacagcttcccccaggatatatcaaagctgcctccttactcccccatctcccagcttgggaaagtgtggagaattgagcagatggactttagctagaaatgtttgagaaatactgattagagcttgggcttcagacacaggtggtcgtggagtaaaatctggtctccatctctccctggctgtgtgaccttaagcaaataacttgacctctctgagcttcagtttcttcatctgtgaaggrgagatagcaatcctgatttttgagattggaatgagaattgaaggaggtcaccgtgtgtgtggacctgaccctggggaaatgtcctcagactgaggctattcaaggtcatcagaccctcagtcaaactccaatcccagcccagcacaggcccctggggtc

SEQ ID NO: 278658 - DNA, 401 bp, Homo sapiens
tatctgcaattacaatttctgaaatgattcagaaaaaaagggaatacatacgcaaagaatgagtgtgataaggtatataccacatacatgcaatgtggtaaggtgttaacagtggrgaatcctgtttaagggtaaataggggctcctgtttacactgggaggtttggaaggtgtaatctccaaactccatggcaagttgcaagaatgcaactttcaaacttcatgttgaaatgtgatccctggccgggcacagtggctcatgcctgtaatcccagcattttgggagtcctaggtgggtggatcacctgaggttgggagttcaagaccagccttaccaacatgcagaaaccccatcgctactaaaaatacaaagttagccaggcgtggcggcacatgcctgt

SEQ ID NO: 278659 - DNA, 401 bp, Homo sapiens
tatctgcaattacaatttctgaaatgattcagaaaaaaagggaatacatacgcaaagaatgagtgtgataaggtatataccacatacatgcaatgtggtaaggtgttaacagtggagaatcctgtttaagggtaaataggggctcctgtttacactgggaggtttggaaggtgtaatctccaaactccatggcaagttgcaagaatgcaactttcaaacttcatgttgaaatgtgatccctggmcgggcacagtggctcatgcctgtaatcccagcattttgggagtcctaggtgggtggatcacctgaggttgggagttcaagaccagccttaccaacatgcagaaaccccatcgctactaaaaatacaaagttagccaggcgtggcggcacatgcctgt

SEQ ID NO: 278660 - DNA, 617 bp, Homo sapiens
atgcaagttcttaaacatttacctctcctaccccctttttcaagaaactactggaggacgtgttacactaaaatgagggaataaaccaagaaagaggaagacaatgggtagaggaaacaagagatggaacccaggagaaaggcaaaaggagcctgggatgatagtgaagattaggctgtcagctgtgtaccaagcatagagggcattcagtccagactaaggcaggttagaagataccaggagagatttcctcataaggttgatagaacacccattgtgaatgaatgtattgagaggagaaattgacaactgaagtttgaggttgcctaaaaatcttagcaaatgargggggaaaagacctttataaactccagagaaaacaaaaatgtgtgcatgaaagaaaaaacaatcatagtttactacatagctgttttatttcctagtcataataaaatcaactggggagtgatcttaccaaaattttaacattataactattattgtaatattaaaatataatattaagcagatggcgtggggtggataaggggcacacatatgtgatgtgggaagaggaatagagataaaagcaaaaaatgctaattttgcacagtgag

SEQ ID NO: 278661 - DNA, 1200 bp, Homo sapiens
atgcaagttcttaaacatttacctctcctaccccctttttcaagaaactactggaggacgtgttacactaaaatgagggaataaaccaagaaagaggaagacaatgggtagaggaaacaagagatggaacccaggagaaaggcaaaaggagcctgggatgatagtgaagattaggctgtcagctgtgtaccaagcatagagggcattcagtccagactaaggcaggttagaagataccaggagagatttcctcataaggttgatagaacacccattgtgaatgaatgtattgagaggagaaattgacaactgaagtttgaggttgcctaaaaatcttagcaaatgaggggggaaaagacctttataaactccagagaaaamaaaaatgtgtgcatgaaagaaaaaacaatcatagtttactacatagctgttttatttcctagtcataataaaatcaactggggagtgatcttaccaaaattttaacattataactattattgtaatattaaaatataatattaagcagatggcgtggggtggataaggggcacacatatgtgatgtgggaagaggaatagagataaaagcaaaaaatgctaattttgcacagtgagwacctataatgtggtttcatttactccatctctttcaattcttaatgagtcctgtgatgcaactcttactgtctcttttttacagatgagggcaatgatactcagcatctctcatcwtcactgccttgcgtttgaactcagagctatccagctacaaagcccatgcattctttctgctatactatacctgttaaacttcataggtttggcatgtccatagctgttatgatttttctttatttttaaaattagagacaggatcgtactttgtcatccaggctggagtacagtggcaagatcatagctcactgtaacctcaaattcctggactcaagtgatcctcctgtctcagactcctgagtagctaggacaacaggtacataccaccacaactggctaattttttattttttttgtagagacaggggtctcactatgttgcttaggctggtctcaaactcttggcctcaagcaatcctcccaccttggcctttcaaagtgctgggattacaggcatgagccatagtgcccagccaagatttttctaaaacatggagaattctataatgattattgattttgt

SEQ ID NO: 278662 - DNA, 608 bp, Homo sapiens
acctgctgtggcacaaaccatttggggagctaacttggcagttcagacaacccagaaataatctttttccccacttgaaggcttagtcttgccagtggctacaaaagtgtcggttctgcccctctgccagcaaagatagcaaaactggcagtccaaggcctctgtcactgacaacacgtgctggagcagacaaaggtcagggaatgtcagaggcaattaatcagatggtatctgaaagaacggtgcatgcctcctacttgtctatttttcttctggacccaacaatattcctcatgggaggacctacacagttataaacaggtggccaaaataccatgtaattttactcataaaagaaaacaaatcacaaattatgttgcaccctacaattttattttagagtatttcctttcccttgagaagccttggccccatttgaaagacaatagatactctgaggaagtattayagaagaaacacacagtttttgccttgggttctcactagaagagttttcacgtaaagcagatggcaggattttagacttcttggtaattttttatgacactctaaggtaacttcagtttctttccttttgtttttaacct

SEQ ID NO: 278663 - DNA, 605 bp, Homo sapiens
ccaaactatatcatctgggtaactttctaataaactatgtatgtgatgtcaaatgtaattaccatatgtaattttaaattttaaaagccttttacttaacttttatgcactggaattgtgttttaaacctaacaggaagccgttatcattagaatgatcaaaacctgataatagtaaacaaaagagaaagttaatttatgggaataatcattcgggcaatagaataaccagcatatattgctgtcttaaaggggagtagctgtcaacatgtgttactaatagttaaaggtttccagaaaattttcagtatctccctgccaatcaataaagatagcatcacactcatcaccatagctttagttgtcagaaatggtgtatttattgactaaatgcagcactttgaaaaggcaaaaaggagagttaactttgaggaagtagtgattacggaatttcagtagyagtaatttcctctcactctgaataatattacagttatggatatttccctattcttaggactaaatacttatttagtagttatataactttggaaatacagcacaatactttattagttcctatcattaaaaggtccatgaatagaa

SEQ ID NO: 278664 - DNA, 501 bp, Homo sapiens
ttctggctttgggaaggtggccagacaggaatgcaggttgaggtcaaggtattgttacttgcaagtgtacagagctgccttggggaagtggcacgtgtttcagacccacgtgggaaatcggatggagtctgtgttctgtgattctcaactcttaggcctttggatgtctaagggccttggtcgctgtggccaagcaagtggtcagtgggatagccctgctaagatgtaccaagccagcattgaccagctggcatggatggaagggctcaatggcactgggcctgggggaaagcagaaaggggcgggcagcttccagaaccttcctggggcctgacagtcctggccctgctataagtgctttatagccctggactggctctggtcttctaccagccmtgtgggatagccctagccctgttatagagataggacacccatgcatagagaatgttgttacttgttccaagtcacagtttaggaagtggcagtgccaggatttga

SEQ ID NO: 278665 - DNA, 520 bp, Homo sapiens
attctagaatgaaaaatagaatagggccttccagaaatacaaaaggcaattaaatcaagagggagttttctgagatcataaaggataaaagctccttgggttataatacagttgtttttaaaaaacttttactaatatgttattaaaatgctgagtgattttatgtgtgtgtagacatgtatgcatgcatgcgtgtgtgtgtatatatatatgcatatgtgtatgggtatatttgcaacatataatctttagcttttaaagagcaaaaatattttacatgtcaacaaaagtaagtaagtctggatgaaataacaaatcttttcagacattttgttgaactgaagttaaatgacctcattgttgtgcaccttcctttggagcacatgatgaatagatagatttacaaagtaaaaatttgaattgaaaacacatcattacttgagctaaagacttttctgattaatttartttactgatttggagcctattaaacaaagagaaaagttggctgttttcaaag

SEQ ID NO: 278666 - DNA, 568 bp, Homo sapiens
ttcagatattattttgtcagataagttttctgtgccattctccatctcttctccctctgaaattttcttaatgtgaatatttgtttgcttaatggtatctctcataagtcttacaggcattctttgccctttatcattcttttttgtttttattcctctgactgggttatttcaacagacctatcttcaaggtcagaaattcttttttccatttaaattcatcttcttttgaagctctaaattttatttgtttaatttttttttattgaagtgttcagctccttctgtttgtttttttaatgatrtcattatctttgttgaacttctcattccgatcataaattgctttcctgatttcattgaattgtttgtctgtattctcttgtatctcactaagtttccttaagattattattctgaattcttttgcaggcaattcataaacgtgcctttctttggagacagttactggagaattattgtgtttccttaatggtattatgtttccttactttttcatatttcttgtgtctctgtattgataattgtgcatctagttgaatggtca

SEQ ID NO: 278667 - DNA, 568 bp, Homo sapiens
ttcagatattattttgtcagataagttttctgtgccattctccatctcttctccctctgaaattttcttaatgtgaatatttgtttgcttaatggtatctctcataagtcttacaggcattctttgccctttatcattcttttttgtttttattcctctgactgggttatttcaacagacctatcttcaaggtcagaaattcttttttccatttaaattcatcttcttttgaagctctaaattttatttgtttaatttttttttattgaagtgttcagctccttctgtttgtttttttaatgatgtcattatctttgttgaacttctcattccgatcataaattgctttcctgatttcattgaattgtttgtctgtattctcttgtatctcactaagtttccttaagattattattctgaattcttttgcaggcaattcataaaygtgcctttctttggagacagttactggagaattattgtgtttccttaatggtattatgtttccttactttttcatatttcttgtgtctctgtattgataattgtgcatctagttgaatggtca

SEQ ID NO: 278668 - DNA, 594 bp, Homo sapiens
gtgcactcagctcatcccactggaatgcccatgtcacatrttcacgtcctcatttagggagaggggacagggatgcagacatttagtagattctcaaatttctaactttctcctctttggagttctgtagctatgtcagataattttattataatgattccaattgtacctaatcttcgctagatttaggaaaaagaacaccctctctcccccaactaggtttctgagttctggcattagttttgttttcaaagtaatgaccagcactccaagcctggatagccttgctggagaactttccacctggagccctgcccatcggccctgcgggacttccttcagctcctctgtggtgagcaccttctggtttggggatgatttctttaacttcccctaataattccttcccctggccacttccatccatctttcacacactgtctttagcatcatttcccacaggaaaccctcacagccgcacgtgctccttgcccatgcatctatggctccccctggatgactcctaacacacatgcttttggctgcctggttctgctctgcaagtccagggatcatatctatcttttcactgta

SEQ ID NO: 278669 - DNA, 594 bp, Homo sapiens
gtgcactcagctcatcccactggaatgcccatgtcacatgttcacgtcctcatttagggagaggggacagggatgcagacatttagtagattctcaaatttctaactttctcctctttggagttctgtagctatgtcagataattttattataatgattccaattgtacctaatcttcgctagatttaggaaaaagaacaccctctctcccccaactaggtttctgagttctggcattagttttgttttcaaagtaatgaccagcactccaagcctggatagccttgctggagaactttccacctggagccctgcccatcggccctgcgggacttccttcagctcctctgtggtgagcaccttctggtttggggatgatttctttaacttcccctaataattccttcccctggccacttccatccatctttcacacactgtctttagcatcatttcccacaggaaaccctcacagccrcacgtgctccttgcccatgcatctatggctccccctggatgactcctaacacacatgcttttggctgcctggttctgctctgcaagtccagggatcatatctatcttttcactgta

SEQ ID NO: 278670 - DNA, 1143 bp, Homo sapiens
gtgcactcagctcatcccactggaatgcccatgtcacatgttcacgtcctcatttagggagaggggacagggatgcagacatttagtagattctcaaatttctaactttctcctctttggagttctgtagctatgtcagataattttattataatgattccaattgtacctaatcttcgctagatttaggaaaaagaacaccctctctcccccaactaggtttctgagttctggcattagttttgttttcaaagtaatgaccagcactccaagcctggatagccttgctggagaactttccacctggagccctgcccatcggccctgcgggacttccttcagctcctctgtggtgagcaccttctggtttggggatgatttctttaacttcccctaataattccttcccctggccacttccatccatctttcacacactgtctttagcatcatttcccacaggaaaccctcacagccgcacgtgctccttgyccatgcatctatggctccccctggatgactcctaacacacatgcttttggctgcctggttctgctctgcaagtccagggatcatatctatcttttcactgtawttatttggaggtgcagggagatgaggcacattttggggcaaaggtagagaaaatgtagtatttggatagttagatgttttacttagatttttgtttcattagcaactaatggttgaggtgtctatttatttaatgaagtagwggtgtatttcatttaatacaaagaaagcttctccccctccccaagcaatgtagaaattggaacaaagatacaccaaagccctgttaggacattttccacaggattaaaaacaaatcccaaactgtacaatgctgtaagagagagacattacactatgtaagtgtgactagataaaagtatttcaaggaaactttccgttgctttggaagaatttccctcttttgtgcagagaaatcaagagaatttaaaaaaaagagggaatataatacaatagcattatagaagagaataacacacgttcacttggattggtgtcttcgtctttcacttcttcaccttaagaaatgtagtgcaggagtggctgaattccaggacggggcaagaaataaagtgcagtgtagatttg

SEQ ID NO: 278671 - DNA, 600 bp, Homo sapiens
ttagctctttccctgatcttttccattatatatgctaatgcattcttttttaaattaggccagtctctagtgaggttctattacttgcaactgaaggcaatctcactaatctaaaataatttatcagttgtgcaaaattcacagttgttacatctgtagtctgtcaggaccccgatagcttctaaggaatagggagtagaaatagaaagaaaatatgtagagctggattttctccttttgtttcacttccttctctgttcctgatcatctcattatgttgagtattttatacacagagcacatgtaatataacaacttctttctgttgattatggcaagaagtccaagctggagctctccatttacccaatcccaccayaccccaggtttccacagctgtagctgagccctacaacttcatcctcaccactcacaccaccctagagcactctgattgtgcttcatggtagacaatgaggccatctatgacatcatctgccatagaaatctcaatattgagcacccaacctacactaaccttaactgctttattagccagattgtgccttccatcactgcttccttcagatttgatggagc

SEQ ID NO: 278672 - DNA, 574 bp, Homo sapiens
ttgttttgagccagtcaatctgatggtaaaatctgagtcttaccatggtaaatacatggcttgctgcctgttgtaccatgatgttgtaccatgaagtacatggtaaatacatgtacttgctgcctgatgtaccagatgttcccaaatatgtcaatgctggcattgtcaccctcaggaccaaccacagcatccactttgtggattggtgtcccactggcttcaaggttggcatcaattatcagcctcccaatgtggtacccrgtggagacctggccaaggtacagagagctgtgtgtatgctgagcaacaccattgccattgctgaggcctgggctcacctggaccacaagtttgacctcacatatgccaagtatgcattttttcactggtacatgggtgaagggatggatgaaagagtacctcaaagtaaaggctttaagattttaaaaaaggggaagaatctagaaaaagcattctagattaagagccaaattatgctccttaccctgctactaaagagctgttggtgcttgaaaaaagtcatccaactatttctgttcacaccaagaagaaa

SEQ ID NO: 278673 - DNA, 462 bp, Homo sapiens
aggactttaaaaaataaattaaaagatgtactctatattactaagtatcagaaaatagatgtcaaatgtgaaagacacatgtgctaatacaaaaatgtgcagaatgtaaatgtaggtttaatatagacatagtatttaatgcattagtcatatttatttgcagatgtcatccaaaggacttaaataataagcacactttaataaatctagcaaataacatcatattcctaactgtgctcatcmtatctttctttaccctctttaccaaggagtatgttcaaactggctgacgtaaaataaatttcacgtattcatgctttttgaggtattttgtttatttgtttgttgtttgtctgtgtgtttgtttttgccaaaagatgagaagacccattcaaggaaatgccaaatagatgagaataagaataatgatgtgtttgtggccaaagagcaagccaaacgaaa

SEQ ID NO: 278674 - DNA, 604 bp, Homo sapiens
aaggaagggaaaaaaatgaacaaaactggctaaggcaggaggatcgctggagccccgaagctcaagaccagcctgggcagcccagggtgacctcatctctacaaataatttttaaaaaattagttgggtttcatggcacatgcctatggctccagctacttaggaggttgaggcaggaggactgcttgagcctaggaggtcaaggctataacgagccataatcacaccactgccctcaggcctgggtgacagagtgaaaccccgaaaaaaaaaggaaggaagaaagaaagaaagaragagagaggaaggaaggaaggagggaaggagggaacgaaggaaggaaggaaggaaggaaggggagggtgaaagtagaggaagaaattggcaaagtgagaagggttagtaagataaacagaaagaagggaaatgcagagaggctcacagtttcaattatggtcaagttaaggtgaagcagccaactaatgaacaagaaaacatttcttgactcttttactaaatggccctgaaatgttttagttgagctagttctgcaatggcccctatacctcacctctcagaagtgtaggttagagacgtgcaggaa

SEQ ID NO: 278675 - DNA, 532 bp, Homo sapiens
aaggtggcctattttttgtaaagaaatcttgcacttggcaattctggtagagagctctaatctcaaggaaaaagagggtggggaaatcgtcatggctgaaaaggagaagcaaaaggctggacgctcacggtctgctgactactaatcctgactgtgcactctctcattaagagacattaggcaaatcctccattagctgcctttcatgaaggggargaggtgctgagagacaggaggctgacatgcacagtcccagcttttgaaaaaggggaaaggggattttgcatactatagacctgcgagcttaatgtcaatcctgagtgaaactctggaatggattattaagaggacggtttgtgagcccttgacaaaaggaagtggtggtcttagaagccaggatggattcgctgagtataaaccttgccagattaataacttcatttcctttttggatatggttacgtgtcagggagatgaagtgtgtatgaacttctgaaagacaactgatgtggtctctcatgagaaccttgta

SEQ ID NO: 278676 - DNA, 592 bp, Homo sapiens
ctccagaggaaagtctagagatgggaaggtcaaaaatggaaaggctttgattctgtcaggactgggggagcagagatgagcagccaggatagatggagcagtgcagtgaggtgggagccggaactgctgagcacaagcccagccttggccgrggttccggttgacgcagttctcaggtcagccagatcaccgcagccttgctatcgacccaatgcgagcttgaggcttggtccctgagtccttaacgcactaggaagcattttctccctctagtgcctgctagtgctcgccacatttcaaagaggcagctgccagcctgtctcacctctcagacatcaacgtgcaaatcaaagactctggggctccccgcagagaaaaccgagtccagatgcatttgggtgggacccgctttttccctgcccacaggtgagccttaaaacaatctacctccaacacggcctcaaggcctccctatcaagccagagctttgctttcttgaattcttgaagttattaccgccctctccaactccacctccaacctgttccactctgcaggaagcccaggaagccatggaaggaccagacagcgg

SEQ ID NO: 278677 - DNA, 592 bp, Homo sapiens
ctccagaggaaagtctagagatgggaaggtcaaaaatggaaaggctttgattctgtcaggactgggggagcagagatgagcagccaggatagatggagcagtgcagtgaggtgggagccggaactgctgagcacaagcccagccttggccgaggttccggttgacgcagttctcaggtcagccagatcaccgcagccttgctatcgacccaatgcgagcttgaggcttggtccctgagtccttaacgcactaggaagcattttctccctctagtgcctgctagtgctcgccacatttcaaagaggcagctgccagcctgtctcacctctcagacatcaacgtgcaaatcaaagactctggggctccccgcagagaaaaccgagtccagatgcatttgggtgggacccgctttttccctgcccacaggtgagccttaaarcaatctacctccaacacggcctcaaggcctccctatcaagccagagctttgctttcttgaattcttgaagttattaccgccctctccaactccacctccaacctgttccactctgcaggaagcccaggaagccatggaaggaccagacagcgg

SEQ ID NO: 278678 - DNA, 192 bp, Homo sapiens
cagccgaactttgttgttccatgagatagtaaattcctttttctactgaaatgtctctgtgtggatttttctgttatcttaacaggagtcstaattgatatatgggatcttctgagcttgtcagtgagaaatccaagaagaggtgacaataagagctatggcagagaggaggcatcagaaaagtagtatcct

SEQ ID NO: 278679 - DNA, 498 bp, Homo sapiens
aataatattcaaatgagtagtttatactattctataatgcattaatctacatttgtagactcaaattaaaaaattcaattgaaaaggaatcagtgggaaaatgcaatgtggtaagccyacttctgagcaaattgtgtcaggagttgctgagtgagtctttgctataatcttggccttccatttattatttattggggacataattttgcacttgtaagtcatatggacctgaattggactttccagctttttcacttactaggtttgtgaactaagagagttattcagctttcctaagtctcagtcctcatctgctaggtgggagagtaataatatccacggtggagagttatggtgaagattatgtaagacgtggtggataaaatgcttagcacagttacttccatatattattcattcaatgaacagtatccactaataactagcactggatgcctctacctagtattaatataattacgtattaagatgtaggag

SEQ ID NO: 278680 - DNA, 498 bp, Homo sapiens
aataatattcaaatgagtagtttatactattctataatgcattaatctacatttgtagactcaaattaaaaaattcaattgaaaaggaatcagtgggaaaatgcaatgtggtaagcctacttctgagcaaattgtgtcaggagttgctgagtgagtctttgctataatcttggccttccatttattatttattggggacataattttgcacttgtaagtcatatggacctgarttggactttccagctttttcacttactaggtttgtgaactaagagagttattcagctttcctaagtctcagtcctcatctgctaggtgggagagtaataatatccacggtggagagttatggtgaagattatgtaagacgtggtggataaaatgcttagcacagttacttccatatattattcattcaatgaacagtatccactaataactagcactggatgcctctacctagtattaatataattacgtattaagatgtaggag

SEQ ID NO: 278681 - DNA, 576 bp, Homo sapiens
ggagacaactcaaactgcaacttactatggagatggtggtggaaatatgctttggactgaaaactgattatagggatcaatttcttgtacaattatgatggaatttatgagacgaatgggttgctgctgccctctttggtaaggaaaatggaaccttccagtctctatgatctccctctagtgtttgaaatttacggatgctaaaacataattaaaattagctaaaataattcatattcttttctaggcacagcgkccccctgctctgctctgctttcagatcatgcatgtctgtgacatccgtgagcgctgatggtgcacgcttccagtcattttcctggtaagtgtattcagtgatggcatcaaattcagcggttggaagtcttgcctcaggccttggagctaaatacactgaagtcacttgaatatgaaattccttaaagtcgtttaacgtactcattaatttcaaacgtttggacaaaaattgcgaatttggcaagttttctcagaagttgggtacactgagtcctgagtacgactcagcaattaaaaaaaagaatcactcgcaatgtcgag

SEQ ID NO: 278682 - DNA, 554 bp, Homo sapiens
tgtttgttagtattgtagagattccattcaatttaacacgtttattgaccaccttcctgtctctcaccaggcctctgggataaatgatgttggggagaacctggagaacaatcaggtggtttctgcagaagcyctgtaaaacatcattagggaggcagggtcttcctggggaacaagtgggaaataccatcaaagtgcatgtgatccaatgatgaggtggcaaatccaggcaggagcactcaagataaaaaccaggaaaaattggtggagctcagtgcacttggggaatgaggttctagaatggctctggaggacggggtagaatttgggaaagaagggagggaaaacaagggcaatttaaggtgcaagaatatcctgaggtcaagagagacaatgggcctaatttgttcaagggtctgcaagctaaataagcaaagatggtgggaggcagaagactccagttcctgtcctgggtctgacacatccctcctgcatgaccgcagaaaattgagttaacctatttcctcgccagagagatgagagcattacagcag

SEQ ID NO: 278683 - DNA, 554 bp, Homo sapiens
tgtttgttagtattgtagagattccattcaatttaacacgtttattgaccaccttcctgtctctcaccaggcctctgggataaatgatgttggggagaacctggagaacaatcaggtggtttctgcagaagctctgtaaaacatcattagggaggcagggtcttcctggggaacaagtgggaaataccatcaaagtgcatgtgatccaatgatgaggtggcaaatccaggcaggagcactcaagataaaaaccaggmaaaattggtggagctcagtgcacttggggaatgaggttctagaatggctctggaggacggggtagaatttgggaaagaagggagggaaaacaagggcaatttaaggtgcaagaatatcctgaggtcaagagagacaatgggcctaatttgttcaagggtctgcaagctaaataagcaaagatggtgggaggcagaagactccagttcctgtcctgggtctgacacatccctcctgcatgaccgcagaaaattgagttaacctatttcctcgccagagagatgagagcattacagcag

SEQ ID NO: 278684 - DNA, 554 bp, Homo sapiens
tgtttgttagtattgtagagattccattcaatttaacacgtttattgaccaccttcctgtctctcaccaggcctctgggataaatgatgttggggagaacctggagaacaatcaggtggtttctgcagaagctctgtaaaacatcattagggaggcagggtcttcctggggaacaagtgggaaataccatcaaagtgcatgtgatccaatgatgaggtggcaaatccaggcaggagcactcaagataaaaaccaggaaaaattggtggagctcagtgcacttggggaatgaggttctagaatggctctggaggacggggtagaatttgggaaagaagggagggaaaacaagggcaatttaaggtgcaagaatatcctgaggtcaagagagrcaatgggcctaatttgttcaagggtctgcaagctaaataagcaaagatggtgggaggcagaagactccagttcctgtcctgggtctgacacatccctcctgcatgaccgcagaaaattgagttaacctatttcctcgccagagagatgagagcattacagcag

SEQ ID NO: 278685 - DNA, 564 bp, Homo sapiens
gataaactctattaatcaaaatagctgattaaattgggtctgtaggcaacttttctatgatgatttaaaattttcagtaaatatttgtgtkttttttagtgtagtatgacatataataattaaattatcagatttaggttttacgttatggttgtaactacaaacacaattaagagaatagctaaaaatttcaagaccaacgaataaacttcattttaacatcgcctgtctttaggagaatttcaaatagaaatagtgtggtcggaagaaaccagaaattgtatgaatgttatgatatgtgtaaagataattgctgtcaatgtaagtaatgtggctttgctgagtaaaataagatgattgccctcggttttccaaaaccccctaaaattgcttctataccacatgtaaccacatgtggtataaataaaatgtgagtcaaaggaatgaggaaagataaacatataattaaaaacagctcatagatacttaggctcattcatttcaatgctggcatctgcagtttatggagcggttatagacccgcaatagatcggcgttgactac

SEQ ID NO: 278686 - DNA, 564 bp, Homo sapiens
gataaactctattaatcaaaatagctgattaaattgggtctgtaggcaacttttctatgatgatttaaaattttcagtaaatatttgtgttttttttagtgtagtatgacatataataattaaattatcagatttaggttttacsttatggttgtaactacaaacacaattaagagaatagctaaaaatttcaagaccaacgaataaacttcattttaacatcgcctgtctttaggagaatttcaaatagaaatagtgtggtcggaagaaaccagaaattgtatgaatgttatgatatgtgtaaagataattgctgtcaatgtaagtaatgtggctttgctgagtaaaataagatgattgccctcggttttccaaaaccccctaaaattgcttctataccacatgtaaccacatgtggtataaataaaatgtgagtcaaaggaatgaggaaagataaacatataattaaaaacagctcatagatacttaggctcattcatttcaatgctggcatctgcagtttatggagcggttatagacccgcaatagatcggcgttgactac

SEQ ID NO: 278687 - DNA, 647 bp, Homo sapiens
gtactcccgggctcagaagatcctcccacctcagcctcccaagtagccaggactataggcacacaccaccatgcctggttaatttttttatttttatttttagtagagatggggtctttctatgttgtccaggctggtctcaaactcctgggctcaagcgatcctctgtcctcagccttccaaagtgctgggattacaggagtgagccaccatgcctggcttatatttttgataaaagttctttgtcagacatattgtaccctattttgtggtttttcctttcattttttaagtcttttgaagaatatttaaaatattttgatgaaatctaatttatttatttmtttctttaatagtacatacctccttgtcctttcaccattgcgttgccttggcatctctcttaaaaattaattctttatatatttctgggtgtgtttctggatgctcagttctgtcccactgaactctttgtataacttcatctcaatatcatgctgtttttagtattgtagttttgtagtaaatcttgaaaagaaatagaataagttttctaaatttgttatttttttcaaaattgctttgggtagtcttggtcctttgaatttttatataaattttagaataacttgtctatttctttaaac

SEQ ID NO: 278688 - DNA, 539 bp, Homo sapiens
ctggggacacagagccaagccacatcagcgtttattagataattcactttgtgccaggcatggtactaggtcttgagggtatgggatgagtaagaaatggctcttgcactggaatagcataggttccagaatgaggatctcacaggaaatgttaaagaaaaaaaaatagaaaaagggaatgtagcttaatgtaaagaasacttaaatgagatgtgtagttcctgtctccagatggtttcagagtttccatataaaagacacatcagacctgttctggaggataccagcaagcagaattttaatcaaagggtgaaattccagctttttttatgggggcgtaaagggaacagtcttagagtagaagtaactgtttttgggtggtaataagctccctgtcactaatagtatccaagttgatattggctgagccattggggaaataacagaatgttgtggctaagagcgcggcatttaggatttaagtcccagctcctcttgatttgccaagtcattgactttctctgtttcttcctgtgtaa

SEQ ID NO: 278689 - DNA, 543 bp, Homo sapiens
gaactctaaaatcttatgactggaagcttataaattataagtattgaaaaattaaacattcctaataactacagatatccataaaaagttgcccaaaattaagggcaaatttcttcagtgtcagcaatactgacagcattagtttcatggtcacagagatttttgttattattgttaacatattccaaaatttaacacaaatttaatccatgtgaaagtagagcttagacaataaaagatatcagaccttggggtattacaatgactttttaaaaaagcttattatcatatatttcattataataacaggacgccaaaaccattagcatgaataataacctgagattgtaaggattatgtgtaartgtgaaagaagagataattatgtttatatatctaatggtcacccttaggtattatgtgataacatgtggccttatccactgaggacaagagggccatttcctaccttggattaggcattcccagggcgattcttacagttacctcttctttctgttcagtatttaagcactgttagtt

SEQ ID NO: 278690 - DNA, 543 bp, Homo sapiens
gaactctaaaatcttatgactggaagcttataaattataagtattgaaaaattaaacattcctaataactacagatatccataaaaagttgcccaaaattaagggcaaatttcttcagtgtcagcaatactgacagcattagtttcatggtcacagagatttttgttattattgttaacatattccaaaatttaacacaaatttaatccatgtgaaagtagagcttagacaataaaagatatcagaccttggggtattacaatgactttttaaaaaagcttattatcatatatttcattataataacaggacgccaaaaccattagcatgaataataacctgagattgtaaggattatgtgtaaatgtgaaagaagagataattatgtttatatatctaatggtcacccttaggtattatgtgataacatgtggccttatccactgaggacaagagggccatttcctaccttggattaggcattcccagggmgattcttacagttacctcttctttctgttcagtatttaagcactgttagtt

SEQ ID NO: 278691 - DNA, 380 bp, Homo sapiens
ccagatgcgaggagctggggtttgggagtgcgaatgtgagaacytcccccagaggagaaaggggggaggtatgagagttggaagggaagggggcaaagagggcgggttaggaaggatggggctgtgacagtggcacctggaaggcattgtcctaacgagcgacacctgtcaatctccgctccggggtcccggggccgggggcggggaggccgcgggtctctgtggtgatgtcatctcagcgtcctttcccggctaagggcgggaaggctgggaggggcgcggagctaggagaaggatgggggaggaaaagagaaaataaacagaagtcgctctcactcgccacatcctcggttcgcaatttacagggaaatcaataatcc

SEQ ID NO: 278692 - DNA, 550 bp, Homo sapiens
cccggggaactcttccccggcttaggcttggagtgcaggcagggacagagtgcggtgaagtcactgtgaaaaggatggcgtccctaagcccggctaagactgaaattgcaatcgtagggaactgagatctccaaaagaatgtggaaggtttactttaaaacacccaaccagttcatttttctcagaaggcattctggatgcccctgacgggggcatgccgggatgggacccttctcccctccccasaagaacttcagacacctgctctatcctgccttcagcccccaggcccctaggaccgcagacccctccttcctgggtttccctcacagaagagagtcatttaatgttatagataactcagccccagctcaacccacccacccctggagaaatttagtctcctcatcttcctcaccctgctgccaccatttctaaaggtttagtagagtcagggcgtcatgcaggccctgggctttccccaaccggatggaagaaggaagtagacgccctcaaccagctggggagctgggctgggcgccgatctata

SEQ ID NO: 278693 - DNA, 550 bp, Homo sapiens
taatgactcctggattagagtgagattgagactgggagaaaaagaaaaagagagaacaagagacagaggaagggaggagagagaagaatgtcattagagaacgaggaaaatcactgtataatcasctctaataatctaatcaggatattttcagatttcaaggttctctccatgcttaagagtgtgagctagagagagaccattatccttttaaacaccacaaaggtttttttgcatgttaataactattaattatgtttacagccagttaagtgaagaactctcctttggaaagaaactttggaaaacgcttaatagcagattaaagccttttcctggagccgaggtcgcttggagggaggtgggggccgggtaatcacccaagggtgtgcggacccgaggcggctagcagaggctcaacgcccccgccagtggtcgtgcacacaaatgtgcaaacgcctgtgacgggctgcggggacccagggtgccccgtcggacccgtggcggaactcctaggcgcagccagccgcacgggctcggcttccgctcg

SEQ ID NO: 278694 - DNA, 529 bp, Homo sapiens
ctaatttattttgaataccaaatattaatagaaacactgaaatggctttttaaaatttaacttctttttgaaaaggtaatagaaccatgcaaaaagtagaaaggggtgaaaatactcttccagttctatctcccagccccscttactcaagttcaccaatgtcccctttaaaaaatcaatagacttttttttggtaaggagttttaggtttatagaaaaattgaatggaaagcatagagatatatatttcctcatcagcttcccctattattaacattttccattagtgtttgtttgttacaactgatgagccaatattgatacattattattaatgaagattcatagtttgcattagggttgacttcttggtgttgtacattctatggatttttacaaaggtatagtgacatatatccatcattacagtatcaaagaaaatagctctactgatttaaaaatcatctgtgggccggacatggtggctcacacctgtaatccctgcactttgggaggctgaggggggagg

SEQ ID NO: 278695 - DNA, 529 bp, Homo sapiens
ctaatttattttgaataccaaatattaatagaaacactgaaatggctttttaaaatttaacttctttttgaaaaggtaatagaaccatgcaaaaagtagaaaggggtgaaaatactcttccagttctatctcccagccccgcttactcaagttcaccaatgtcccctttaaaaaatcaatagacttttttttggtaaggagttttaggtttatagaaaaattgaatggaaagcatagagatatatatttcctcatcagcttcccctattattaacattttccattagtgtttgtttgttacaactgatgagccaatattgatacattattattaatgaagattcatagtttgcattagggttgacttcttggtgttgtacattctatggattttkacaaaggtatagtgacatatatccatcattacagtatcaaagaaaatagctctactgatttaaaaatcatctgtgggccggacatggtggctcacacctgtaatccctgcactttgggaggctgaggggggagg

SEQ ID NO: 278696 - DNA, 580 bp, Homo sapiens
tgtgcagttactaaagctctgggaagtcagccttgtatgtaaatcttttgtttacatcatttatcacgttagaaaaatgaaatcatagtcaatttcacaatagtccagccggctaatgagctatgcttatcattagttctctttcagtcttgagcttctctctttcaccatcaaatgaaagaaagaaaacagcatgctacaggacattattttaaactttttaaattcagggagacttcgtatgtagaaaacaatgttaggaagtggcaatatattcaaacctatactgatttgaagctagcaaccaccaacaattataatgcaaataataattaatgtaagatgaatacaaatagagattcttgttgtcctaacaagatgttcctttttaggctgttctttgagtggatcgtgataaagcaaacatactgttttaaggacgatggggcagtgcytatgctgctttctttctggcccgtgttgggcctcttagggtcactctacaggatggaggagaaagacaatacaagagggaatacaagaggggaagtaaaaggagccagatagaccccattcacac

SEQ ID NO: 278697 - DNA, 538 bp, Homo sapiens
tcacttaacttttctttagaaaattttcatctgctttatagataaaaatggtcttcctttccaacttagattcggcagaatggctcctgcaaagaagggtggcgagaagaaaaagggccattctgccatcaatgaggtggtgacccgagaatactccatcaacaagtgtccccttgggcactctaagagattcgaaaatttgccatgaaggagatgggaaytccagatgtgcacattgataccaggttcaacaaagctgtctgggccaaaggaataaggaatgtcccataccaaatccatgtgcggttgtccagaaaacgtaatgaggatgaagattcaccaaataagcactatactttggttacctatgtacctgttaccacgtgaaaaaatctacagtcaatgtggatgagaactaatcgctgatcaaatacattaaatgaagttgtgaaattgtaaaaaaaaaaaaaaaaaaaaaaaaaaaaggacccaaatcagttttaggaaaatgattcctgtcacaagcatggttattttt

SEQ ID NO: 278698 - DNA, 584 bp, Homo sapiens
gagcgctttttctttgacccactctgcagtgtgatggggtagtgttgttagtttatgtgagagaaaatagcataggctttctgaaaaaaagtggaattggattagggcctttgtgcgcgcctcaatgctgaggggaattagcaagagttgtaggcacttaaaggggccctcatgctgaagcttatcccagattttgcacaataaacatttgaatatcaacagtgttttgcaacttgcagcactaatgtataaacttctctcttttgaaactcccaaatccttccaaatgtctgtaacaccctctacataaacatataggagctagggtagaaaacacctagtcaatgatgtaagtctgcttttaaaaagatctttctccttttccatcttcagaatctagaatgttttataatggttcgttggtttaaggactttagtagatgctctatttaattttaatcattccactttctttcaggctttgcattctgatatgggggaggggcagtgtccagsaatggataaggatgtgtggttgagtttagaactgtttcaccaagatttttgttgttgttgttttacat

SEQ ID NO: 278699 - DNA, 523 bp, Homo sapiens
agagtcttttgttttagaaagaatccttctgagggtttcaaaagtaaattcacctctgcaagaaaagaatgattttgtctgttaaagtctgctgactacctcattgggaatccacatattcgagccagttcccaccctgaaaactaatctgatactcagtyatcctaactgaagatagtaggctgattttgtagtaagagcgtccaacatcaaacagttatttgatgttcctgacattaagcaagctctatttttctctttaaaaatttcaaactcccagaagtgaattcaaaatattgtagagccttgatggagggtgaaaggcattaatttctctcttctgaaatcgatcagcagacaggcataatattttgttttctgagaacaggatatttgcttttggttgctggtatagcagaattcttcccttcagttctttgtgtaatccattatagcaatggtgtcactttataagatttgatgctcttaattttgtactaaagcaaacacttgggatgcaagc

SEQ ID NO: 278700 - DNA, 523 bp, Homo sapiens
agagtcttttgttttagaaagaatccttctgagggtttcaaaagtaaattcacctctgcaagaaaagaatgattttgtctgttaaagtctgctgactacctcattgggaatccacatattcgagccagttcccaccctgaaaactaatctgatactcagttatcctaactgaagatagtaggctgattttgtagtaagagcgtccaacatcaaacagttatttgatgttcctgacattaagcaagctctatttttctctttaaaaatttcaaactcccagaagtgaattcaaaatattgtagagccttgatggagggtgaaaggcattaatttctctcttctgaaatcgatcagcagacaggcataatattttgttttstgagaacaggatatttgcttttggttgctggtatagcagaattcttcccttcagttctttgtgtaatccattatagcaatggtgtcactttataagatttgatgctcttaattttgtactaaagcaaacacttgggatgcaagc

SEQ ID NO: 278701 - DNA, 612 bp, Homo sapiens
tagcattttaaatataatagaatttgaaagtaagggtatagaaaaagatatatcatggaaatattataacaaacaaagtagacttcaaagcaggaaccattgctagaaatcagaaaaacaaatcagtcctaaatgtatgagtacctaataacagctttaaaatacatatagcaaaaattgacaaaactaaaaggagaaacagatgaattcataatcataatggtagactttaataaacttctctcaataactgacagaataaacagacaacagaagcaggaaggatatggaagactataattaacaaactagacacagctgccatacataaaaatactgcgttcaaccattgcaaamtacacatttttttcatgtgcaccccaaataattaccaaattagatcaagctttgtcctaatgaaattcccaatatacttcaaaaatcgaaattcattttaactatagtccctaattatagcagaattaagctagacatcaacaacaaaaagtaaaaataaaaatacccatcagcttagaaattaaacaatatacttgtaagtgatccacagggtcaaataaaaaatcaggaaaaaaaatcttgaactaaataatg

SEQ ID NO: 278702 - DNA, 527 bp, Homo sapiens
tgctgcagtccagcttctgagtctgtgcattgtgactgactgaagaaatgaatgaaccaggtattaaaagattaatttcaactttgagggaagtttttatggtaatactctagcctctgtacttggccatggcctacacaaaattcaaataacaaatctaagatatagaggatgtcaactgatttttaaaatgatacaaaattggaaggaatggctgaaacattcctgtttatcatggggcaaaatgcaaggktctaaaacataacagttggctggagtgatatgtcagaacttacatattgaaatttaagaaagatgaatataaaatcctacctttgtgttctagtcattgcacaagtaaaggcccggggacacttgtctcaaactcaacggaaggagagtcagtagcaagtaacctgcatttgacctagtgattaattaatgtggctcctaaaattgctgatgccaccttagactcccttaatggataaacggggcccaaccaaggcaggtgcaggtctcacagt

SEQ ID NO: 278703 - DNA, 556 bp, Homo sapiens
gatttgaatgaaataataaagtatatctgtatttgataaagacattatgagaaggcagaactgacattgtgtctgctgcataaacctgtctattttggtctctgttccaaagttattgtttccccaaatttttgtttattaccctgtcatgtaaagatagaagaatgatgaaacttgcaaatcaaagtatataataattatgagagaatggttttcttagcctgggcaacatggcaaaccccatctctacaaaaaatacaaaaattagckgagcagggtagcaaatgcctgtagtcccagctgcttgggaggctgaggtgggaggatcacttgagctgggggtcgaggccacagtgagccgtgatcacaccattgcactccagcctgggtgacagcgagaccgtgtctcaaaaacaaaaaaaaaaaggagttttcttgaggcttcatcactagaccattattctgtaacatcttcagagagttacctttactccctgtctccactcttcacctccctctcactcatcacctcattgttacggctttcagccccatc

SEQ ID NO: 278704 - DNA, 429 bp, Homo sapiens
tgacttaaggaacagtatcaggcagtctcacataggtgtaattagagtctcagaaggagagcaaagaggaaatttggcagggagaaggaggaagctatgaagaaataatggacacagtttatccaaatttgatgaaaaacaacaagcctcatatccaagggtcatttcatagtaatatgttgtttgattgatcaaaaagayataacacctctaaatgtatgtgcatctaatgattccagatccatgaagcagcaatatatagaactaaagaaagcgacaaatccaaatccacagcagtgtagatcttaatatcaggttcttagtaactgatagaacatatagattaaaaatcagtaagaacatagacgatttgaacaatactatcaaccaacttgagccaattgatatttaaaggacaacacacccaac

SEQ ID NO: 278705 - DNA, 315 bp, Homo sapiens
tggcatctacataaatgcccttccccttgcccccaccgttttcttttttcttttytttttttggaaggaaatacaacagtgatcagagtgattggctctattttgtgcttgagacaaaggggcattttgctttattttgttttattttgaaatttgtttcattttatcctgctttctaatattttccagttttttagtagagatggggtttcaccatgttggccaggctggtcttgaactcctgacctgaggtgatctgcctgcctcgccctcccaaagtgctgggattataggcatgagccaccacgcccggca

SEQ ID NO: 278706 - DNA, 547 bp, Homo sapiens
ctgggtaatttatacagaaaaagaggtttaatgggcacacaattccatgtggctgaagaggcctcacaatcatggtggcagatgagagaatgagagccaagtgaaaggggaaaccccttacgaaatcatcagattttctgaggcttattcactaccatgagaacagtatgggggaagccatccccatgattcaattatgttccacctagtccctcccacaacacttgggaattatgggagctacaattcaagatgagatttgggtagggacacagccaaaccatatcaaagctcacccaatatctatgtgytcctctacattgtccagctttccttgcagtttggttgagatcatgggactgggttctgatggcaatgatgtaagctatttccaggtctctttcttaaaaacattctgtataacgctgtggcccttgcttcatcagccacagtgatgttggaggccacctttccaagtggcatagcttcaaggtgtaagatggctgctcatctgcaacagacttcaatgaatcagaaataaaacccc

SEQ ID NO: 278707 - DNA, 565 bp, Homo sapiens
gcaatgttccacaatgagaggatgatcggccccctgcacaaggggactcaccatcccagagtgcgagtagggtacaaaataggtgtgacctatatcacctgttttaggcccttcccccatggggtgagaaaactgaactggtaggggctggtttgctatttctggggctacttaatgatgtggtccctggtgggcaggtcatgtggtaagggcaacagcaggttgccttgagccccaggctgggsgaaaggtgtgtcaggaattgggccctgtcctcctgtatgaaggggggaacctgtagagtccagtggtctctgtcaaagactgtccttcagttgtgacataaagtgacagggccaagcaccaaatggaacttggtgctcaaggggctaccagtcaatgtgctcttctgttgcaggcatgcatggcatctggccacagtctgtgtctgggtattcccagacctcagtctctgaaaagcatcctccagccaacctgccatggggttctgagtgtgcatcagcatgaggacaccctccacaccatcctccactagttgcaagac

SEQ ID NO: 278708 - DNA, 565 bp, Homo sapiens
gcaatgttccacaatgagaggatgatcggccccctgcacaaggggactcaccatcccagagtgcgagtagggtacaaaataggtgtgacctatatcacctgttttaggcccttcccccatggggtgagaaaactgaactggtaggggctggtttgctatttctggggctacttaatgatgtggtccctggtgggcaggtcatgtggtaagggcaacagcaggttgccttgagccccaggctgggcgaaaggtgtgtcaggaattrggccctgtcctcctgtatgaaggggggaacctgtagagtccagtggtctctgtcaaagactgtccttcagttgtgacataaagtgacagggccaagcaccaaatggaacttggtgctcaaggggctaccagtcaatgtgctcttctgttgcaggcatgcatggcatctggccacagtctgtgtctgggtattcccagacctcagtctctgaaaagcatcctccagccaacctgccatggggttctgagtgtgcatcagcatgaggacaccctccacaccatcctccactagttgcaagac

SEQ ID NO: 278709 - DNA, 475 bp, Homo sapiens
gttttgtttagttttgttttattgattgtatgaattatttgcaaataaaggaaatttgtcctttttcatttgtgtggcagtttaaaacaattttaccatttgggttataacttttacaagttttgtttattaatgttgaaaaaaatcaacttattgaggtataatttacataaagagatgtaygcattttaaatgtacaatgtgatgagttttaacagttgtgttcacatgtataattaccatctcaatcaagatacagaacaattctatcccaaatagtttcttcatgttctctgaagataattccaccattcctggccctaggaaagaactcatttgcttttagttatacaaataagcttgcctttttctagcagttcttctgtggaatcataaagtatatactcctctgactagggttttgatcatcatgaagcttaagattcatccaaactgttacatctattagtagctt

SEQ ID NO: 278710 - DNA, 475 bp, Homo sapiens
gttttgtttagttttgttttattgattgtatgaattatttgcaaataaaggaaatttgtcctttttcatttgtgtggcagtttaaaacaattttaccatttgggttataacttttacaagttttgtttattaatgttgaaaaaaatcaacttattgaggtataatttacataaagagatgtacgcattttaaatgtacaatgtgatgagttttaacagttgtgttcacmtgtataattaccatctcaatcaagatacagaacaattctatcccaaatagtttcttcatgttctctgaagataattccaccattcctggccctaggaaagaactcatttgcttttagttatacaaataagcttgcctttttctagcagttcttctgtggaatcataaagtatatactcctctgactagggttttgatcatcatgaagcttaagattcatccaaactgttacatctattagtagctt

SEQ ID NO: 278711 - DNA, 566 bp, Homo sapiens
tacagaacaattctatcccaaatagtttcttcatgttctctgaagataattccaccattcctggccctaggaaagaactcatttgcttttagttatacaaataagcttgcctttttctagcagttcttctgtggaatcataaagtatatactcctctgactagggttttgatcatcatgaagcttaagattcatccaarctgttacatctattagtagcttgtgccttttaattgctgagttgtattcattatgtaacacattttacctgtagagtcacctcttgtttgctggggcttctgtaacagattaccacaaactgagtaacttaaaagaacagatttattctcacagttctgaaggctagaagtctgaatgctgtctctaaagactctaggggaagatcctccctcacctcttctctggcttttggtggttgcctgaagtccttggcattctttggcttgcagcagggtagctggaatgcctgactccatctttgtgtagcactcttcctctgtctctgtatctcttctcttcctataaggacactagtcacccataaca

SEQ ID NO: 278712 - DNA, 486 bp, Homo sapiens
gtttttataatcaccagtgacttgccagatgcagggaccagctcacagatttatattattctgtatggacaacatagaagttcagcccccatatatctttatggaacagatggggctcgatttcaggttggccatgaagacatatttactgtaagtaataaaactgagtataaactgttaatataagtgatacacctagtaggtactttggaatgaacatagtctatccctttagtaacaccatgtgccctgtagaagaycattcaaaaataatttatggaagtttttgctcaagcagatttaacacaagtaaatctgcaatatgggaagagacagtagctagagagaaatactagatggtaaacacttatttttatgtggacagacatcaggagcaagggcttatgcctttctggctctccagataaggctcaaagtcaagctcaaaaagggaaaaataaaattgtcaaacaaggaaggcaaaaa

SEQ ID NO: 278713 - DNA, 547 bp, Homo sapiens
ttcttttgtcaaccattttctctctcaataaacttgcttttacaaataaaaagcacctttttaaatcttaatttactacagatttgttaaaacccttccatttggaagctcaaagctgagcaaagatgtytttgctctaggctggattcttcttacgccaacacaatgagtattgttgatttagtaggtaagagagccttggaagaattagcaatgagaatatattagttaaataattcacaaatattatccttacttgagttagatctaggaatgaggtgatggggcctaaaatctgggaagtaatgacaaaactggagagtttgagtcaaatttgatagatcatgtggattactgaatattaatggctgattgaatattggtggtgaaataaaaagactaactttcagtaaactatgaatagatgggaactttctcaacttgattaagaatacctacaaaaaacttgcagctaatattatacttaatagtgagaaactggatgctttttctttaagatcaagaacaaagcaaggacatctctcac

SEQ ID NO: 278714 - DNA, 508 bp, Homo sapiens
gaaactggatgctttttctttaagatcaagaacaaagcaaggacatctctcaccactccaatattatataggaagtcttagctaatcaataagacagaaaaaggaaacaaaatgtatacagattgggaaggaagaaataaaactctcttggctcacagatgatattagtctttatgtaggtaatcccaaagaatcaacaaaacaatttcagaatcagtaagtgtttatagtgaggttgcaatgtacgaggctaatatacaaattttcattgcattcctatatactagcaatgaacaattggaatttaaaattaaaaacataattccagttatattagtataaaaatgtacaaatctaacaaaatatattctggatctctatgtggaaaactagaaaatrctgatgaaaaaaatcaaagaaaatttaaataaatggacagatattccttgtttatatattggaagactcaaggttgttgtcagttcttaccaactttatcatagattca

SEQ ID NO: 278715 - DNA, 630 bp, Homo sapiens
ctttgcatcatttgtgtgcatgctgtttatgaaaattcaatctggaaaatgcagaatagcacagaaaattggtttacatttaaatgtaaattgacttatggtaagaatagcacttttcccaccattttagagtattttctaaaagaaaagttccacattttaatgttctacattcacccatagaggtgagcaactctaaaatgaaatacagcatatacaacactctccttagttgaagctcttatgctattcagagttttttgtccaaaggcatgtgtccttgcctcaacccatcatgtggtctctgtttctggatcttgtgaaataggatgaagcacacagggcaatttacgtaaaaaggctctagatttatcatagtgattcgaaacgagacaaaattatattcttttaaaacgactggttttaaattctgtcttttaggacttgctcacatttattgaatcattttgtattgattgtagggtacaggagatgttgactgtcattttaaaattaagaagaacttgaagaatgcatccataagcctggaatctaygaagagcccaggattgtttgttggacttcagtcagatgggcaggcaaaaccaatgatttataccaaggatgaga

SEQ ID NO: 278716 - DNA, 564 bp, Homo sapiens
tttactttggctcttgttgagtacctgtgaagaagaaacacattcttgatccaaagtttccttctgaatgtagaaaagcccttatccagtttatccattttgccaaattagatattggtttgaaaattttctgttcaattcttataatacagtttagaagtttgaaatttgaaattttaattaatcaacttgtatggggatttgaacagaatcactgattccatgatagcaacaataatacatttccataaaataaccacattgctttagaaacttaatcttgatttttttcaagtttagttagggaagattacaaaataaaaagttcaaaatgttaggttattttctgcttctcaaatgatcagctttgggccttaattaaaataatcaaatcagacagtcttggcagtaataaccttgcaaacaataatttttctcatgggttctcaggaagcctttctaaaastgacattacattgtatcagaatcacacttaacatgcatttataaatgtgaattcctgaacctgtctgagtctcacagaccttagtaggatcaggtact

SEQ ID NO: 278717 - DNA, 498 bp, Homo sapiens
tcttgaggttacagataaacttcacattgctaaagcccatgcttacttctcagcactcctcttacttgatgtatgagtaccatttgacacagctcatcactacctccttttgaaacacttctttcctttggcttccagaacactactctgttgatgcaccttttcctcataaactcctttgctggagtttgctgatggttcctcacygtctctgtggctgctatctttgcagtgctttgggatctgatcttgcaccaattctcttctctatttacactcacttcttggaagttctcatccagattcttccaagttttaagcaccatcagtatatcagtgcatcacgtttatacctttagcttgaacctttagtataatgcctttagtatacttaagaatcttcagtatactgcctacttgatatttctatttggatgtctaatatgcttttcaaggtgatattcactatcacctcccactctcttgactggtacttct

SEQ ID NO: 278718 - DNA, 597 bp, Homo sapiens
aattaattacaatttaccagccaagccttcctctggaagctgcaagcattcagatatacttcagagttccaaaatattaacttcagacagtttctgctagtacaatttttgtccaagtggggagatgagttcctggcactgcctactctgccatcttccattggatataccagtatttttaacatcattgtcaaagtaatccttggaagtgtgagatcattacttctcttctcaaaatccttccttggtttctcatctcacttaaagttaaagccaaagtatttaccaacggctacagaccctgtataatttggtgccctgctttctagccacactggtcttcttataatttctcaaatacttcaaatacttcccacaaacctttgcacttactctctctgccaggaacacacttctgtcaaatatctgaacaccatttcccctgactacttttagatttcttctcacgtcacttctcagtgaggttttccctgacctctaccackgccactcctactttacctcacttttctccatagcactttataggatctaacatgctgtagatttgctttttttattcatagtttgtctctg

SEQ ID NO: 278719 - DNA, 564 bp, Homo sapiens
gggtatggtagctcgactggataacagggatacctggtctctgtccttaactggagttgtgggagtggaacgtatactacgggagatgctcagaaatggagagcccattttgtgctgtcttatatgtaagaaatgttatctttcctaaaagtgctccaaaagaaaccttttttggttcttttgattcttttgatgctgatgcttctggccctggcccacctttgataagtgagtctaaggaatgccaaaagcctcactggcmgaaattctttcagtgtcaaaacagaactgatcaatgtgaattgtttatcagacatagattatagaattaaagataaagtcaagagaaatgctgcattagtccttagctatttaatggcagatcatatctgatcccaaactttttgaatttgtacttcaatttggagctggtaatgatacaattcatgcctattgctaccctgtaaacacaaatttccttactgatttaatagccatgtctgtgtgtagacagtgataattataaatggaggtttgtatcaaagctggacactactgtttctc

SEQ ID NO: 278720 - DNA, 447 bp, Homo sapiens
aatgatcctaataatgacatatgtcctaataatgacagactttcagattttccaagtccacaaaaggcagcctttggtcattgtgaaaacaatcattttcttttttggaaatagtattttcttttggctttcagactgaagcatcgtctagtatttttctatcaatactaaaaagacccaaagccttgacttttgctttagctctgatgcagaactgccaaatgtgagtactatgaaagagtcgatatggatgagaaaaagtgcactgatattaagcttcaaagccaaactttatgttggggtagatgagaaatagaaaaagrgttaatttccaaaaccattttttcactgaaacatgcattcattttccttgaaaacaaacaaacacagtgcttggaaaaaaaaaaaaaggaaaaagaaacagcagtgcctttatcacataaaata

SEQ ID NO: 278721 - DNA, 593 bp, Homo sapiens
ccaggcaatgcccatcctgctggcctggagtccacaagactctacactcctgggggcttccatgtgtagacccaatctccaccactgaggtaataatctaaagctattcacacttcacagtaaatgacagaggccagtagaaaacatatcctgagccatttaccagcagagggagtccttggtgcctgtaatctgtcatctgtagagcacttcccatctaccaggtgcagcgcacggcacacaccttcccaggcattctttaaactacacagcaaggcttttaagtgagtattattacccaccttgtrctaagtaggatactgaggattagtaaggataatcagtctatttaacgtcacagaactagtgagagggtgatttgaacctggtctctgactccaaggcttctgttcttaaccagtttatgagttttaccgtatgtcaataggattccttttttaatttatacacattttctctttttgtcatcacaataccttaaaatttagaaagaaaagatcttattgcctgtattctatacataaagatagtgctggcctggagaaattaagtggcatattcaaggtcacata

SEQ ID NO: 278722 - DNA, 642 bp, Homo sapiens
ggagtgcacgtccttgttggccatatttctctcttcagatttttatgaaacatttatgacgtaaaaatctttttctcatgccaaaaatgattaaaacttgttttttaaaaagaatgcttagatatcatgtctttcatggccatctctaagtcctctctgaatttctaaaatttcgaatgccaatacatgaagraaataattgtgtgttactttatagaatgtaacaaagtttgccagagcatagaaaccacatataaaggatggtttccactacaaaaagagttcaatgtcgggacagggaagtatatttcattcaaaaacaaacaaacaaaaaatccaaatgcactttttttgtcctttcctagcagaagaaccaggtagtcatataattaattataactctcatttcctttcaaatgaactttggatattcaaaatacgtgtgtgtgtgcgtgtgtgcgtgatctatccatggtaagttttatgatgctagcattctttaaaactcagttttatcttttggagataaatctggcttttttccccctaaggtttatttgtatgtcatttttctttttttctgaaaaatttaaaacttgacattaaaaaaagttttaacaaccaataatgtgtaaattatct

SEQ ID NO: 278723 - DNA, 569 bp, Homo sapiens
ctgtctcaaaaacaaaacaaaacaaaaacaaacaaacaattcgaagatccccacctcccacaaggccttgacagttgttaatcctatgatttccattttcccctgatcagtgcttctctgacagagttgctataatttatgagaaaaatatcattggtcctaaaggaatgagaactttgaagtggctaatggttttgtgttaactgccgctgacaaatcattttacgatgtaagtccccaaagtgttttctggctcataaactaacagtttaagatttgagactgctttctaataaattaaaattttataagcaattttttttgtcggaggacacacaaaatctttcatttttctcatcaaaaactttgggagagtaaagcaaaaagaagactctaggaactaatttgggaaagattcgtttctttgttttaaaggtaaaagcatgtgaaaagcaaatataagcmgtttttaaacttaagaggaaatgacaggtaattctattagaaaaatggtgtatgtatttttacttactaatgcaaagtttaacaattaccacttcatgtattaa

SEQ ID NO: 278724 - DNA, 575 bp, Homo sapiens
atgcttggtaaatttctgggaagccgagtgtttcttccagagggaaggatacctggaaatccggatgtaagcaagataaacctgtagctaaagctttcttaaaattcattgattctgggggaaggaaataagtgattagaaaagtatttggtcaaccaaaaccatgatagtttgatatatttactgcactgaaaatacactagaatcatatgcatagtggagcttgaagtggaaagcccaccttacattttggaagaaacttttatatttcaatcccatagatatctaatttatttaaggaaacaggatatctctgtctcataagaaaaaaaataacatctgactgatttttataggaatgcttgggagtttactcttttacttgaaaggttttttttttttttgcctttttttttaaactttagaracagaggcgtttcttagttaagataacagggcttactacagtattctttaattatcaaggtcccttgtaactctaagtctgttatctctaattggagagataattaaatcttaaagaccactctgactctaattcaaccaacgtgtgt

SEQ ID NO: 278725 - DNA, 588 bp, Homo sapiens
gtggtgattcattcctgtaatcccagcactttgggaggccagtgtggaagggtcacttaagcccaggagttcaagtccagcctgggcaatatagtgagacactcttaataataatgataataataaccagatatggtgacaggcacctctcgtcccagctaytcaggagtctgacatgagtcctgggggatgactggagcccagaagatcgagagatcaaagctgcagggagctgtgatcacaccactgcactccagacccagcctagatgacagagcaagatcctgtctcaaaaatttaacatttaacattgaaatgttaaatgttaaaggttacatttaaatatgtcacatttagatgttacatttcaaatgttacatttaggtgtaacatttaattgatgggctgtttttcctgaaacctttggcttttatcctgttattaatttcttccagttctgctagagaggaggccattgactctggagagctcgaactttcatttcatcttcttctataggtagattagagggagataaattagggtagttttttttttttcttattttgaatttttttttttttttgg

SEQ ID NO: 278726 - DNA, 353 bp, Homo sapiens
agtattaactgtgttaatactaccattgcttattttgacattttagtttttaacatttatatttggaggaattaaaaaacgacttgatttcaaaggaggtataactcattttcacaatctgagttcaygtgaatgttttagaagaaatttcagaaatggctttgaagttatctgagaaaatgtttacaattatgccatttgggaattacaattctatgtgttggaattgtttctatggagatacaaattgctgtacaatgtagaatgtagtttgatagaatgagaatgttagaattttcacagtgcttaaagactggtaattaaactataactagcaaggtaagaacaaaata

SEQ ID NO: 278727 - DNA, 582 bp, Homo sapiens
aacatttagtattattattgtagaaaaagaaaatgagaaagaaaaagtgagagaaaagaaagaagtgaaagaagattgttgtagacagagtgatcaaggaaggatttataaaggaggtgaggcttgagttggattaaggttaactgaatttttgtaagcatgaagaggggcaatgtattcattctaaattataacaaatttaccaataaaaggtttgtattttgtagaaatgagaaactgattacatctgcttatttggacagtgaatggaaccacatattctgcctgttggcaaacaccaaatctgtatagtttattttcttcaaaggtaagtaatgagaaaattaactgacaaggcacactggatcaacaggttactatgctatatttgataaataggsttattcctgatacctcagacttactccaggattttttttttttttttaatagagtctcgctctgtcgcccaggctggagtgcagtggcatgatctgggctcactgcaacctctgccttccaggtttaagtggttctactacttcagcctcccagtagctgggattacaggtgcctgctacc

SEQ ID NO: 278728 - DNA, 617 bp, Homo sapiens
tgagtcccaggttgggtttatggtattctactttctgcctatgcaattgacgagtattatgtttcctctctcttttggaaagtgatatgttttggctgtgtccccacccaaatctcatcttgaattgtagttcctacaatccccacgtgttgtggaagggacctggtgggaggtaattgaatcatgggggcaggtttttcccatgctgttctcrtggtagtgaataagtctcaaaagatctgatggttttataaatgggagttcctctgaacaagttctcttgcctgatgccatgtaagatgtgactttactcccccctcatcttccaccatgattgtgaggcctccccagccatgtggaactgtgagtcaattaaacctctttctttataaattactcagtctctggtatatttttattagcagcatgagaatgaactaatacataaagtttgtaagtagcgctatgtgctatgtggtcattctgctccaaggctcatgggtttgtcatgaaccctgcatgttacacaatgctaaagaagcaattgtctgcacaggtgtctcttaaattaacttaagaatatctatcaagcacctattttgtgcaaggtggtaggg

SEQ ID NO: 278729 - DNA, 997 bp, Homo sapiens
aggaaagggaagtgctgccccagctagctagatgccgcaacagaggaggcaaggaattcctccaaagagagaggcacacttgggtgtgatggcctttggtttgaagctggagttccttcttactccccaagttcatgggccaccagcytgagaaagcagtgaaaatgctttcctttgtctgttttcttgtttttgtttttatcaaagatttgaacaggtacacttgcaatttctgatgaaagcattttaaccaacatagatacacctctatctgtttttgcaagggtaggtaaatagaggtgaatggcaggacagataagtgagaacccccagctgtcaaaaggagaggaccattatgagaaaaggtgttcttgtgagacagtgattataaaagaggactaaaatgtctaaaagctcatcttccaaaattgattaaataaagtgcctcatcgccataaaatggcagwatcattttataagatgtggtatggagttgggggagatatgaagaggactatatttcccatagtccataagctttgtatttagagtctgttgaggatggtatgtggttttgtcgtttaacctaacattggtgtaatattctacatgtgataacttgtgtatcatgggtattcacaatcagaatggacattggttggaacaacccacatagccatcctagagcatactgaaacaaaacattatcttagatgtaaataatcactggtagaaaattgcaattctaaatcattagattttttwaaaaaagcaaattctaaaatcttcaattaatatccagttattcttcagtgagaatgttggatttgggaatacaataactatttagtggatcaaaatattcctatcttatccttgacatcattaagccaaggcaaatagagatacagggacacattagctcctatactagatcattagaataccagtggtcaaaacataacagctacaaagcttttggtgccttcaatgttgg

SEQ ID NO: 278730 - DNA, 530 bp, Homo sapiens
atcattttataagatgtggtatggagttgggggagatatgaagaggactatatttcccatagtccataagctttgtatttagagtctgttgaggatggtatgtggttttgtcgtttaacctaacattggtgtaatattctacatgtgataacttgtgtatcatgggtattcacaatcagaatggacattggttggaacaacccacatagccatcctagagcatactgaaacaaaacattatcttagatgtaaataatcactggtagaaaattgcaattctaaatcattagattttttaaaaaaagcaaattctaaaatcttcaattaatatccagttattcttcagtgagaatgttggatttgggaatacaataactatttagtggatcaaaatattcctatcttatccttgacatcattaagccaaggcraatagagatacagggacacattagctcctatactagatcattagaataccagtggtcaaaacataacagctacaaagcttttggtgccttcaatgttgg

SEQ ID NO: 278731 - DNA, 588 bp, Homo sapiens
gaaatagaatgcaaatagcataggtcatttaagattttacagtagtcacattttaaaaagtaaaaagaaataggtaaatttattttaacaaaatattttatctaacctattctattcaaaatatttcagcatgaaatcaaaattctagaaaaaaattagatttttgcattttgtttttcatactaagtcttagacatgtgatgtgtattttcygattacagcacatctcaatttggactagccacatatcacatgctcagtagcacatatggtcagtggataccatattgggtggtatagccttaaagagggttgaaaaagtgtcacttttgaagagcatactcaaaaggagtgagtggtccctctgctttcccatccctccaggctaggcagggggtgtttgtgggcagtggagaggaggcaatcttaatttggggaaggatgaatttcctgcaaacaaagcattagggagttttctttctattttagaccaataagggtagctatctcatatcatcccctttgaatcagcagtgtgatatgaagggtcatgttcaattctcaggcctttgtctacatcttccacca

SEQ ID NO: 278732 - DNA, 456 bp, Homo sapiens
ttttctggggcattacgttcagtccttgggcaattgaagtcactttgcttggaagtgcctaagaatttgctaacttcccaaggcaaaaccagcagcaatgcattctaagatggatccccacatcctggagggagcagtcacttatcctgaccagaactgatgtgtcttgtagagatgagttcacctttactgctcttacagtgcctcagccagccccactgtttgattcaccactgacttagtagcctgcataacattactttggatcaagagacccactttctggcaaaaaaggtgtaactatgggcrcatgaccatgcaatctactggtcataccaataccacaccatccagaagctactggcatgacaaataattagaatgacctcttaaagacacagctttgaagataagaagcaattcattaggatgccgcactgaatttttaccaatggc

SEQ ID NO: 278733 - DNA, 607 bp, Homo sapiens
ggtctcccagcatagaccatagatgttaggtgtattttggtgcagcatgaacatcaaaaaggggaaagcatgtctgtttttgccttaagctcttggtttcagcaagaccacacctaaaagagtccttaagacatatctacagccaaataacagacaatgtcttttctaaatcaaagataaataaacactctgccgactctgaatcattatctttgagacctcttgttttcacacagttaaatgttaccaaattccaccggcatgtgtgggtgtcatcttttggcagtcttaaaatatggaacatttctttatgaaaacataccagttttatgttttgtttcatgaaagaagccaagttgtctaactacacctagtgaaatatttcatattcttaggtagaaaccctattccatttcttcttaaaatttcctacccrttgctcagattctcaccccctttgaattgtcttttcattcactttattctttcctttgtatctctttattttctctattatgtttctttccctctcatacattctatgtaattcagacatacataaactataaatagaatagaaaagaacttagtaaaaatgtagaagtga

SEQ ID NO: 278734 - DNA, 570 bp, Homo sapiens
gctggtgactgtgccaaaatgccatggccagccctgtgtgaccatttttaatggcccacaaaaaacaattcagagaacagtcagtttctttcactgaacatctgtgaaaaccacaactttttttacaaattatattcgcctcaactgtcctgggctttaagactaggtattttctattgcttgagccagccacctagagtcttcccaagtttaagatgatgctctctgcctgggaaggccattatgggaaaatcaccaaaccacaaacccmccaacgatgtcaaacaaaggatgtgattctaagtgtgagctatgggttctggcaggtcttgttagggaagaacagcccagctgttaaagaaataaaatttgccctatcaatataagactaagctgaattttccccagaaacagctttttcccctaacttttctcacatttgctcttaagaatttagcacaagttataaaactcagaaaagttactcccagaattcagcttagtaagatagtaaaaaactacagaaatttagtaatttcaaaaacatgcaagccttgtggatgtttacag

SEQ ID NO: 278735 - DNA, 495 bp, Homo sapiens
tgttgcattgcaaagttttccacctctatcaggggtctgatttggaagcactgtttgctggaccccacaacttccttcatatttcactcttgtttttctggagtgtatctacaaatacccttaaagaaaaggatatatggaagatamactgcctaaaatctgtctgaaaatattattttgccctcatatttgattgataacctggctgagtatagaagactttaaaagtttctttttatccttggaactctgacacatcaaagatgcgtctagacgtggttctttccactaattttctgggcacctaggaggcccttttaaatctgaaaaattctgtccctccactttagaaatttagaaaaagaataattttaacagcttaaatttttcctgaagagtttaaatttaaccgcctgggttggtcaaattttgtttgtttgtttctttgtaattgtagaattcaatagctatgatttaaaatggacatttttttct

SEQ ID NO: 278736 - DNA, 432 bp, Homo sapiens
agtatttctacaccttgatgtatatcactgttatcaacaaaatttaaagtatggttttggttcttttgtttaaaataaaaggaaaataagggaagtagcatcmatttctaagtagtgttaactccatttaagataataatgaaatagctagaaaatttatgcttgcagaacagaaaactatcttttcttaaaacactatctttatgatgtcagtcaatgtttaaattactagaaataaaaattgtgtcttatagtaaccttttcaagaatttctaactgacactctgtcaaacagagcaaaattttgtatgtgtaataaagcacttcaccagattattaacagatttaagttttctgaaagcttctaggaaaaaaaatacattgattttcaaactttattatctaagccattaaattctcttggaaaacaaa

SEQ ID NO: 278737 - DNA, 432 bp, Homo sapiens
agtatttctacaccttgatgtatatcactgttatcaacaaaatttaaagtatggttttggttcttttgtttaaaataaaaggaaaataagggaagtagcatcaatttctaagtagtgttaactccatttaagataataatgaaatagctagaaaatttaygcttgcagaacagaaaactatcttttcttaaaacactatctttatgatgtcagtcaatgtttaaattactagaaataaaaattgtgtcttatagtaaccttttcaagaatttctaactgacactctgtcaaacagagcaaaattttgtatgtgtaataaagcacttcaccagattattaacagatttaagttttctgaaagcttctaggaaaaaaaatacattgattttcaaactttattatctaagccattaaattctcttggaaaacaaa

SEQ ID NO: 278738 - DNA, 432 bp, Homo sapiens
agtatttctacaccttgatgtatatcactgttatcaacaaaatttaaagtatggttttggttcttttgtttaaaataaaaggaaaataagggaagtagcatcaatttctaagtagtgttaactccatttaagataataatgaaatagctagaaaatttatgcttgcagaacagaaaactatcttttcttaaaacactatctttatgatgtcagtcaatgtttaaattactagaaataaaaattgtgtcttatagtaaccttttcaagaatttctaactgacactctgtcaaacagagcaaaattttgyatgtgtaataaagcacttcaccagattattaacagatttaagttttctgaaagcttctaggaaaaaaaatacattgattttcaaactttattatctaagccattaaattctcttggaaaacaaa

SEQ ID NO: 278739 - DNA, 652 bp, Homo sapiens
atttttttagaagtttctaccatttaagtatcatttgcatcatataaacaaacaaaccattcatatacttatagtacttccacaatcagatttaaatatatattaagttacaaaaaattaagtgattcctacacctaaatcctccaagaaatacaatttaggaggttggtcaatctgtgctataagccttcaaaagtgaagtcaccttccccagcactgacagtgtctgagggttgggaaaagcagaatcttccaagttcctagaaaaggtgcatctgggtgtttagtatttaggatggaacaytaaaggtaatcagctacaatcttcccatattacagatgaggaaatggaggaatgaggcttggctaacactacctttggccaagttgttcccatagcttgttctctgtcacagtgaatcttttatcacagagttaatcttaatttctgtcgcatgcagattctgacaccctgaaactcttttgtttctgaatgtaggccatattttcagtcaaacgttagtgaagactttggagactttgcacctcagcagttgctcaaataactgatgccttttaattagcctttcatgttttattaacatgttttattataatcactcagtgaatatttaaatgcaattttcccccc

SEQ ID NO: 278740 - DNA, 652 bp, Homo sapiens
atttttttagaagtttctaccatttaagtatcatttgcatcatataaacaaacaaaccattcatatacttatagtacttccacaatcagatttaaatatatattaagttacaaaaaattaagtgattcctacacctaaatcctccaagaaatacaatttaggaggttggtcaatctgtgctataagccttcaaaagtgaagtcaccttccccagcactgacagtgtctgagggttgggaaaagcagaatcttccaagttcctagaaaaggtgcatctgggtgtttagtatttaggatggaacattaaaggtaatcagctacaatcttcccatattacagatgaggaaatggaggaatgaggcttggctaacactacctttggccaagttgttcccatagcttgttctctgtcacagygaatcttttatcacagagttaatcttaatttctgtcgcatgcagattctgacaccctgaaactcttttgtttctgaatgtaggccatattttcagtcaaacgttagtgaagactttggagactttgcacctcagcagttgctcaaataactgatgccttttaattagcctttcatgttttattaacatgttttattataatcactcagtgaatatttaaatgcaattttcccccc

SEQ ID NO: 278741 - DNA, 610 bp, Homo sapiens
tgctgccttttgttctgctatgccctgcccccagaggtggaatctagagaggcagtaggccttgctgagctgtggtgggctccgcccagtttgagcttccttrccactttgtttacactgtgagcatagaaccacctactcaagcatcagcaatagcggatgcccctcccccccgccaaactcctgtgtcccaggtcgatctcagactgctatgctagcagcaaccaaggctctgtggccgtgggacccaccgagccaggcatgggaggggatctcctggtctgctggttgcaaagaccatgggaaaagcacttgggcaggagggtactgctcctctaggtacagtcattcacagcttcccttggctaggaaagggaaatcccccgaccccttgtgcttcccaggtgaggcaatgtcctgccctgcttcagctcaccctccatgggctacacccactgtccaacctgtcccagtgagaagaactaggtacctcagttggaaatgcagaaatcacccttcttctgcttcgatctcgctgggagctgtagataggagctgttcctattcggccatcttggaagcaactgataatgttcttttccgattcagc

SEQ ID NO: 278742 - DNA, 610 bp, Homo sapiens
tgctgccttttgttctgctatgccctgcccccagaggtggaatctagagaggcagtaggccttgctgagctgtggtgggctccgcccagtttgagcttccttgccactttgtttacactgtgagcatagaaccacctactcaagcatcagcaatagcggatgcccctcccccccgccaaactcctgtgtcccaggtcgatctcagactgctrtgctagcagcaaccaaggctctgtggccgtgggacccaccgagccaggcatgggaggggatctcctggtctgctggttgcaaagaccatgggaaaagcacttgggcaggagggtactgctcctctaggtacagtcattcacagcttcccttggctaggaaagggaaatcccccgaccccttgtgcttcccaggtgaggcaatgtcctgccctgcttcagctcaccctccatgggctacacccactgtccaacctgtcccagtgagaagaactaggtacctcagttggaaatgcagaaatcacccttcttctgcttcgatctcgctgggagctgtagataggagctgttcctattcggccatcttggaagcaactgataatgttcttttccgattcagc

SEQ ID NO: 278743 - DNA, 610 bp, Homo sapiens
tgctgccttttgttctgctatgccctgcccccagaggtggaatctagagaggcagtaggccttgctgagctgtggtgggctccgcccagtttgagcttccttgccactttgtttacactgtgagcatagaaccacctactcaagcatcagcaatagcggatgcccctcccccccgccaaactcctgtgtcccaggtcgatctcagactgctatgctagcagcaaccaaggctctgtggccgtgggacccaccgagccaggcatgggaggggatctcctggtctgctggttgcaaagaccatgggaaaagcayttgggcaggagggtactgctcctctaggtacagtcattcacagcttcccttggctaggaaagggaaatcccccgaccccttgtgcttcccaggtgaggcaatgtcctgccctgcttcagctcaccctccatgggctacacccactgtccaacctgtcccagtgagaagaactaggtacctcagttggaaatgcagaaatcacccttcttctgcttcgatctcgctgggagctgtagataggagctgttcctattcggccatcttggaagcaactgataatgttcttttccgattcagc

SEQ ID NO: 278744 - DNA, 610 bp, Homo sapiens
tgctgccttttgttctgctatgccctgcccccagaggtggaatctagagaggcagtaggccttgctgagctgtggtgggctccgcccagtttgagcttccttgccactttgtttacactgtgagcatagaaccacctactcaagcatcagcaatagcggatgcccctcccccccgccaaactcctgtgtcccaggtcgatctcagactgctatgctagcagcaaccaaggctctgtggccgtgggacccaccgagccaggcatgggaggggatctcctggtctgctggttgcaaagaccatgggaaaagcacttgggcaggagsgtactgctcctctaggtacagtcattcacagcttcccttggctaggaaagggaaatcccccgaccccttgtgcttcccaggtgaggcaatgtcctgccctgcttcagctcaccctccatgggctacacccactgtccaacctgtcccagtgagaagaactaggtacctcagttggaaatgcagaaatcacccttcttctgcttcgatctcgctgggagctgtagataggagctgttcctattcggccatcttggaagcaactgataatgttcttttccgattcagc

SEQ ID NO: 278745 - DNA, 541 bp, Homo sapiens
gaagcgttattgtcctttcaagaggctgtggtgaaggcctaaaggaaagtgaagtgaaatttattgggaaactggatsaaagggaatgtttattatgcagtggtagaaagtttagcaatactgtcacctgcagtattgtggaaagtagaaaatataccgaatgaactgcatgacctaggtaaagaggattccagagggaatattgaggccgccacctgttttctttttgctacttatataaaatgtgatagtaggataaaaaaaattaacaaaagtaatgttaaacatggaggagctgggacttgatgatttcaaattctcagtctgccaatatagcaaataatactaacattgagaaatggcttccaagcaaaaatacaaatccagggcactatcaggaaagcttggtctaaagatgaggccaaaggtatgactctagaattattttctaagatatcagaaagaccaaaggtctatctcaagatctgtccactcagaccaaaggtcttctaaagagtttaagggtgggtctcacagatcc

SEQ ID NO: 278746 - DNA, 541 bp, Homo sapiens
gaagcgttattgtcctttcaagaggctgtggtgaaggcctaaaggaaagtgaagtgaaatttattgggaaactggatcaaagggaatgtttattatgcagtggtagaaagtttagcaatactgtcacctgcagtattgtggaaagtagaaaatataccgaatgaactgcatgacctaggtaaagaggattccagagggaatattgaggccgccacctgttttctttttgctacttatataaaatgtgatagtaggataaaaaaaattaacaaaagtaatgttaaacatggaggagctgggacttgatgatttcaaattctcagtctsccaatatagcaaataatactaacattgagaaatggcttccaagcaaaaatacaaatccagggcactatcaggaaagcttggtctaaagatgaggccaaaggtatgactctagaattattttctaagatatcagaaagaccaaaggtctatctcaagatctgtccactcagaccaaaggtcttctaaagagtttaagggtgggtctcacagatcc

SEQ ID NO: 278747 - DNA, 495 bp, Homo sapiens
tcaggaggaatgctttcaacttttccccatttggtatgatgttggctgtgggtttgcatatatatattttattattttgaggtaagtctcttctatgcctagtttgttaagagtttttatcataaagaatgcctgattttgtcaaatgccttttctgcatctattgaggtgatcatatggtttttgtttttaattctgtttatgtgatgtgtcacactttttgacttctgtatgttaaaccatccctgcatccccaggatgaaacccacttgatcaygatgtaatatctttttgatgtgctgttgaattttgttatctagtattttgttgaagatttttgtatctgtgttcatcacggaaatttagtgacttgctcctaatacatacaatgatgaagaagtaatggtagtgactgttggaaaacagtatgaatagtttcatgtgtctgaatgatcagagcattctgagcaatggaaattgacatgccatgaagat

SEQ ID NO: 278748 - DNA, 352 bp, Homo sapiens
tgcagtgagccaagattgtgccactgcactctgtttcaaataaaaaaaaagatctattgagcccatttgcctcaggaccttccaggtctttgtcattcctgtttccagagtcctgaaggtcataaccatggcccacattccccccattcccaggggagtgtctagactttctgactcaagacaaattaccaaatgtataaatgcccattccgcttaatgactttacttccacttttcacagactctcagatgtggctagaaatagtcccaaaccctgyaatctttcatagagctgagctaaattaagtgggtagtgttcctccagaattcctctcccaagcacttaacactg

SEQ ID NO: 278749 - DNA, 597 bp, Homo sapiens
cttcttagattgcctaaaatctgtttatctattgtctgtttttttattgttaataatgaatattctrtatctttatataggaagattcccaatattatcaggtccaactaaaactttaccagtttgcaaattattcatcacctgttgcccccactactgaatctagtatgcaaggttttgcatgccaaactgagcacatgtggcttcgggtgctgttttccaatcgtttctagatgatccctcatgaaaacttgttcagacacccaggtacatattacctctagctgtggacaagtccatcggcaaataatcataccctccacacccactgacagtaaactcatgtaacagctaatgggctaatagccaacattaacttaagggactggccactacccaaggtaaatcaagataccacagaggtaataacacaaaccatcttgacaaatcaaattcaaggataactgttgtacagggccacttgtgcaactgtatctgtgtaaatgctggccagacagactcagttggtagctattctgcatgggttatctcatattccaactgcaagacaaagagcaaaatggcactactttccat

SEQ ID NO: 278750 - DNA, 1195 bp, Homo sapiens
cttcttagattgcctaaaatctgtttatctattgtctgtttttttattgttaataatgaatattctgtatctttatataggaagattcccaatattatcaggtccarctaaaactttaccagtttgcaaattattcatcacctgttgcccccactactgaatctagtatgcaaggttttgcatgccaaactgagcacatgtggcttcgggtgctgttttccaatcgtttctagatgatccctcatgaaaacttgttcagacacccaggtacatattacctctagctgtggacaagtccatcggcaaataatcataccctccacacccactgacagtaaactcatgtaacagctaatgggctaatagccaacattaacttaagggactggccactacccaaggtaaatcaagataccacagaggtaataacacaaaccatcttgacaaatcaaattcaaggataactgttgtacagggccacttgtgcaactgtatctgtgtaaatgctggccagacagactcagttggtagctattctgcatgggttatctcatattccaactgcaagacaaagagcaaaatggcactactttccatwcttcttagattgcctaaaatctgtttatctattgtctgtttttttattgttaataatgaatattctgtatctttatataggaagattcccaatattatcaggtccaactaaaactttaccagtttgcaaattattcatcacctgttgcccccactactgaatctagtatgcaaggttttgcatgccaaactgagcacatgtggcttcgggtgctgttttccaatcgtttctagatgatccctcatgaaaacttgttcagacacccaggtacatattacctctagctgtggacaagtccatcggcaaataatcatwccctccacacccactgacagtaaactcatgtaacagctaatgggctaatagccaacattaacttaagggactggccactacccaaggtaaatcaagataccacagaggtaataacacaaaccatcttgacaaatcaaattcaaggataactgttgtacagggccacttgtgcaactgtatctgtgtaaatgctggccagacagactcagttggtagctattctgcatgggttatctcatattccaactgcaagacaaagagcaaaatggcactactttccat

SEQ ID NO: 278751 - DNA, 597 bp, Homo sapiens
cttcttagattgcctaaaatctgtttatctattgtctgtttttttattgttaataatgaatattctgtatctttatataggaagattcccaatattatcaggtccaactaaaactttaccagtttgcaaattattcatcacctgttgcccccactactgaatctagtatgcaaggttttgcatgccaaactgagcacatgtggcttcgggtgctgttttccaatcgtttctagatgatccctcatgaaaacttgttcagacacccaggtacatattacctctagctgtggacaagtccatcggcaaataatcataccctccacacccactgacagtaaactcatgtaacagctaatgggctaatagccaacattaacttaagggactggccactacccaaggtaaatcaagataccacagaggtaataacacaaaccatcttgacaaatcaaattcaaggataactgttgtacagggccasttgtgcaactgtatctgtgtaaatgctggccagacagactcagttggtagctattctgcatgggttatctcatattccaactgcaagacaaagagcaaaatggcactactttccat

SEQ ID NO: 278752 - DNA, 591 bp, Homo sapiens
gactggccactacccaaggtaaatcaagataccacagaggtaataacacaaaccatcttgacaaatcaaattcaaggataactgttgtacagggccacttgtgcaactgtatctgtgtaaatgctggccagacagactcagttggtagctattctgcatgggttatctcatattccaactgcaagacaaagagcaaaatggcactactttccatgttatgtgaaaaatgcatactgcattcaaactactgttgtcctcattgaaacatccatccaacaaagctatgtgtatgttacaaatatactttcaattgtttttgttatatcttttattatttaagaccactttaccctaatcatcttcatgggtacttacgtgtgtaaagtggggaagggagatgaaaattatcattttgaaacgtgtttgagaaatactagataaaacaaagataattcagattcttaattgcaagacttctcagagcctttgatatactaatgtgtcagtaaattttcatgaatataaatgaccacagkgcattttttaaagtaaagaaacaaaatatcattaatgtatgaacaaatggtttgc

SEQ ID NO: 278753 - DNA, 611 bp, Homo sapiens
catcagtcatcttatctttttccattgacctttcacatctcatccaatgtttttcattgtgattgtttagggaatttgaaaagacaagactaaatatgtaaggagcatgatgaaaatctgaccccaagaaggagcatgggaaggaagcttgattggaagcattctagactgctaggcaatctagaagagatttggcaaggctgctggggagttctcatgccaacatcagccatcagaggagtcttttgtttcccaggaatgggcccgctttagtattcctgctatgctcagtcactgggagcaacccactggaagtgtggcctcggtgcaaatatracaatagatttcagagcacagctacttccctgtggttggaagtctgtgagacacattctcacggctactatattcatgccataaacatttttagcaccactcctacctcctatcactaacactctatttttaccttgctgtagctatttcttcctcaaagagggttgtattaaagttccaaatgtgatttctcagttacagggtgatatcaggataccccactgtgggaaggttggccggccgtctcccaaatggcctgacagtgtatcatttat

SEQ ID NO: 278754 - DNA, 545 bp, Homo sapiens
  misc_feature (1)...(545): n = A,T,C or G
gtcnccacnccagccatggggagaggaagtggctctacatcctacccttctggctctggcagcccccaaattctgcttaccttggaaatacaaacagttttgggttcactgaccccaatacttccctttcactgaggaggaaactgaggcccagagacaggcagcgtttgccctcatctggggtcatgcagtgagtcagtgactggggcagaactggagtcggcctcctgcctcnccaccgcccacagctaggcctttcccaaaggcaagctggccagcagagccgctgacagagagaaaataattatcttggcagctgagacggaagccagagccgaaaagccctcgctccccagtgagcatcggccaggcccggagaaacggcgtcgggccatcagcgtctcaggggtgctcrgcttatggtgcacacacgtacctcactgccccagccaccccagccccttggtgttgggcttgtgcaaaggggcaaactgagatcagagaggggaagggacccagctagggtcacccagccataagtgggg

SEQ ID NO: 278755 - DNA, 526 bp, Homo sapiens
gggctaatgcctggaactggtattgttgtattgtcagggtaagtatatgttttactatataagaaattgccaaattcttttccaaagtgtttgcaccattttagccaccaggagtgtataagagttccatttgttccatatcttgtcaacacttggtatcatcggtctttgagcaattctagtgagtatgtaatggcaactgttgctttaatttgcaattccacracaactagtaatgttgaaaatgttgatcatctggttatgtgcatatgccttttttggcaaagcacctgtttgaatcttttgcctagttttactggttgtttgtcttcttattgagttctaagaattcttcatatgaattcttgacacaagtgctttgtcagatatctgtgttgcaaaatattttcccagttggtatcttgccttttcattttcctaattgtatcttttgaagagtaaaagtctgattgatcagtttttgcttgtctagttagtgcttgacatgacttgtttaaggaaactt

SEQ ID NO: 278756 - DNA, 526 bp, Homo sapiens
gggctaatgcctggaactggtattgttgtattgtcagggtaagtatatgttttactatataagaaattgccaaattcttttccaaagtgtttgcaccattttagccaccaggagtgtataagagttccatttgttccatatcttgtcaacacttggtatcatcggtctttgagcaattctagtgagtatgtaatggcaactgttgctttaatttgcaattccacgacaactagtaatgttgaaaatgttgatcatctggttatgtgcatatgccttttttggcaaagcacctrtttgaatcttttgcctagttttactggttgtttgtcttcttattgagttctaagaattcttcatatgaattcttgacacaagtgctttgtcagatatctgtgttgcaaaatattttcccagttggtatcttgccttttcattttcctaattgtatcttttgaagagtaaaagtctgattgatcagtttttgcttgtctagttagtgcttgacatgacttgtttaaggaaactt

SEQ ID NO: 278757 - DNA, 552 bp, Homo sapiens
ttatgtgtctttttcactatgttgacatttgcactaatagtgcaaaagcaacagtgaggaaaactgatggtgccttagcacaaatcgaggtacacaatattcatagtcgytgtattcttcacaactatacactataggaaaaaaaaaaatcagtttcactttagaatgcccttgaggtagccattaaattattaaatcttgaccttaagatcattttaatattatacatgataaaatgggaaataggaataaatcacttctgctgtacattcatgcataatgactgactcaagaaaaagcatgtttacaattcctagagttgcaaactgaactagccacttttttcacggaagaccatttttaatcaagagagtgactgacaaactttacacttggtctttggcaggcattttctcaaaaatgagcaaaatgaggctgtcatttcaaggacacccactgccagtattgtagccaatgataaaatacaagccttcaggtgaaaattggaatttttaagaaaacttgtcaattgggatgtttttgctatgagct

SEQ ID NO: 278758 - DNA, 1105 bp, Homo sapiens
ttatgtgtctttttcactatgttgacatttgcactaatagtgcaaaagcaacagtgaggaaaactgatggtgccttagcacaaatcgaggtacacaatattcatagtcgctgtattcttcacaactatacactataggaaaaaaaaaaatcagtttcactttagaatgcccttgaggtagccattaaattattaaatcttgaccttaagatcattttaatattatacatgataaaatgggaaataggaataaatcacttctgctgtacattcatgcataatgaytgactcaagaaaaagcatgtttacaattcctagagttgcaaactgaactagccacttttttcacggaagaccatttttaatcaagagagtgactgacaaactttacacttggtctttggcaggcattttctcaaaaatgagcaaaatgaggctgtcatttcaaggacacccactgccagtattgtagccaatgataaaatacaagccttcaggtgaaaattggaatttttaagaaaacttgtcaattgggatgtttttgctatgagctwttatgtgtctttttcactatgttgacatttgcactaatagtgcaaaagcaacagtgaggaaaactgatggtgccttagcacaaatcgaggtacacaatattcatagtcgctgtattcttcacaactatacactataggaaaaaaaaaaatcagtttcactttagaatgcccttgaggtagccattaaattattaaatcttgaccttaagatcattttaatattatacatgataaaatgggaaataggaataaatcacttctgctgtacattcatgcataatgactgactcaagaaaaagcatgtttacaattcctagagttgcaaactgaactagccacttttttcacggaagaccatttttaatcaagagagtgactgacaaactttacacttggtctttggcaggcattttctcaaaaatgagcaaaatgaggctgtcatttcaaggacacccactgccagtattgtagccaatgataaaatacaagccttcaggtgaaaattggaatwtttaagaaaacttgtcaattgggatgtttttgctatgagct

SEQ ID NO: 278759 - DNA, 950 bp, Homo sapiens
ttattttcataaaaatcttgtgtatttttatatatgttaacacctaaatacttatcgatattgtgaatagtatcttattactgtcaaaatttctaattggatatgactggtgtgaagaaatactatttattttatttctggataatgttatacccagcaaaatcttccaagtccatttattagttctaatcattgatcttgttagactatcaacatagatatttatatcatgtataaacagttttatttcttcctttcaatcctttctcctcttatttctttatcccactggccagaatctccatgctgcgttaaacagtagctgcataggtgtcttagtccattttctgttgcttataacaatccctgaaactgagaagtttataaagaaaaggaacttatttcttaccatcatgggaactaagaagtccaaggtcaaggagccacatctggtgcggaccrtcttgctgatctttttacatagagawccgcatgatccacctgcctcagcctcccaaagtgctgggattacaggcatgagccaccaagcctggctgaaaawattgtttaagttaccattggatgcccccctaagaaggtctaagcaacttggacacttctggcctcactgctctgcaatttacaacccaatgtccgatgctactgaaatccagacacacaacactgaaatgcatccagtggttactgtagagtttagttgaccagatgctcaatctaattctcccatgtgccagtggccactggtcagcagcccataccagcaaggctcggctctcaggacctctgattttatagcattgatggaacagactcatgcaagcctttgtcttttaggacatgctccctctcatcatgcagctggccagagagaggctgagggtgggagagggagtcctttactgaacgtttgacctaaatggtataataat

SEQ ID NO: 278760 - DNA, 631 bp, Homo sapiens
agttatcgacttcattatcactggttttttagattatcagttgaaaaagttttatgtaaaatgatttgtaaatcatattttccgttgtcatttcagagatatggtccaacaggggaaaaaaattgacatatgtagtaaaaatcacagacaaaacctacatctttaagagaatattctctcttcgactgagtatgatttatgtgtatgtgattmtcccactggacatcttcaagaaaagttagccaaataggcaatcaattagaaagggcactccatgttaaaagtatatttattatttataaaccatctttcttgatcgattgccttccatttattggtttttctcaatgatgcaatgtaaactgatgacttaagcattcatactcataaccatgtgtccagatattcaatggaaactgcctgtaagccagctaggcttcagctactgggaacagatcctctctaccctcccctcctccatggtatgggtcattggtcctgccttgccctacataactccactccttaatgactccccaggttatgaagcagcctttttcaggactgacgctgtcccgcttctcagccctaggagaagctcctagaactatatctgctcttgccctcttcc

SEQ ID NO: 278761 - DNA, 631 bp, Homo sapiens
agttatcgacttcattatcactggttttttagattatcagttgaaaaagttttatgtaaaatgatttgtaaatcatattttccgttgtcatttcagagatatggtccaacaggggaaaaaaattgacatatgtagtaaaaatcacagacaaaacctacatctttaagagaatattctctcttcgactgagtatgatttatgtgtatgtgattatcccactggacatcttcaagaaaagttagccaaataggcaatcaattagaaagggcactccatgttaaaagtatatttattatttataaaccatctttcttgatcgattgccttccatttattggtttttctcaatgatgcaatgtaaaytgatgacttaagcattcatactcataaccatgtgtccagatattcaatggaaactgcctgtaagccagctaggcttcagctactgggaacagatcctctctaccctcccctcctccatggtatgggtcattggtcctgccttgccctacataactccactccttaatgactccccaggttatgaagcagcctttttcaggactgacgctgtcccgcttctcagccctaggagaagctcctagaactatatctgctcttgccctcttcc

SEQ ID NO: 278762 - DNA, 578 bp, Homo sapiens
gtgggtattctctagaaacgtaagaacccagtcagggaatgagccaccttcgtgtttaagggaaggaagaattgaaagccaggcatggtggctcatasctgtaatcccagtgctttggaacttgaggccaggagttcaaggccagcccaggcaacatagtgagaccccatctctacaaagcatttaagaattaactgagcatggtggcatgcacctgtagtcctagctactcgggaggctgaagcaagaggatcctttaagcccagagttcaaagttatagtgagctatgattgtgccactgcattccagcctagacaacagagcaagaccctatctctaaaataaaaaataaaagaggtagagggaacaagcaaagaagtatttctactattatctaagagtcttcccaaattctgaaagaagttttgcctgaatcataaagatgaataatgataatggaaaaagtatcaaagtcatgggaaacagaaatatgtcacatggacagagaaccaagtactgttttaagggctgtatatgtacaaactattttgaccctcacaaaacccctatatggtag

SEQ ID NO: 278763 - DNA, 578 bp, Homo sapiens
gtgggtattctctagaaacgtaagaacccagtcagggaatgagccaccttcgtgtttaagggaaggaagaattgaaagccaggcatggtggctcatacctgtaatcccagtgctttggaacttgaggccaggagttcaaggccagcccaggcaacatagtgagacyccatctctacaaagcatttaagaattaactgagcatggtggcatgcacctgtagtcctagctactcgggaggctgaagcaagaggatcctttaagcccagagttcaaagttatagtgagctatgattgtgccactgcattccagcctagacaacagagcaagaccctatctctaaaataaaaaataaaagaggtagagggaacaagcaaagaagtatttctactattatctaagagtcttcccaaattctgaaagaagttttgcctgaatcataaagatgaataatgataatggaaaaagtatcaaagtcatgggaaacagaaatatgtcacatggacagagaaccaagtactgttttaagggctgtatatgtacaaactattttgaccctcacaaaacccctatatggtag

SEQ ID NO: 278764 - DNA, 578 bp, Homo sapiens
gtgggtattctctagaaacgtaagaacccagtcagggaatgagccaccttcgtgtttaagggaaggaagaattgaaagccaggcatggtggctcatacctgtaatcccagtgctttggaacttgaggccaggagttcaaggccagcccaggcaacatagtgagaccccatctctacaaagcatttaagaattaactgagcatggtggcatgcacctgtagtcctagctactcgggaggctgaagcaagaggatcctttaagcccagagttcaaagttatagtgagctatgattgtgccactgcattccagcctagacaacagagcaagaccctatctctaaaataaaaaataaaagaggtagagggaacaagcaaagaagtatttctactattatctaagagtcttcccaaattctgaaagaagttttgcctgaatcataaagatgaataatgataatggaaaaagtatcaaagtcatgggaaacagaaatatgtcacatggacagagarccaagtactgttttaagggctgtatatgtacaaactattttgaccctcacaaaacccctatatggtag

SEQ ID NO: 278765 - DNA, 432 bp, Homo sapiens
tatatgtacaaactattttgaccctcacaaaacccctatatggtaggtactttcaccattctcaattgctaatgagaaattggagcacagagaagttaagtgacctgcccctggtcaaacagctaagaagtggcagagctgagatttgaacctagactgtccggctggagtggggcctctgagcttctaggcaccgctgcctcatgcagtttgatcctatcaataataayagcaaagacataaagagcatgttcccattaacaaagtgctctcattcacttactcaaaacaacatttttggtgtagcacccccaccaggcgcaggcccagagatagagtggtgagcaagtaatacacaggtcctgccctcatggtgctttctcttgagcagtggagacagatcaatcagctgctcttaaaagtaagtgtata

SEQ ID NO: 278766 - DNA, 598 bp, Homo sapiens
gtaattgccataggtatcattatatgtaaaatatatatgttgttattggttaggaaaaagaccccaaaaacagagggaaggacaaacaaggagggagcagtggtgacacagagccccttcgatgaggcaagacaccagggaaaggcagccaccacctcagccaggtctgtggctctcacattctagaacagcatctcttaacacgtgtgtcatagatgttcagtggggcccgaggtgaactgcgagacaccactctcctytaagcctcctgccctggaggggcaggaccagtgtgtcttcttttctttcaactgtattttttcaattgtagttgaaaaaaaaaacccaaaacataaaatttaccatcttaactattcttaagggtacgcctcagtagtattaaatacatttgcagtgttgtgctaccatcaccaccatccatctccagaactctttttatcttttggtttgttttgagatggtgtctcactctgtggcccaggctagagtacagtggcgtgatctctgctcattgcaacctccacctcctggattcaagcgattcccctgcctcagtctcctgaatagctgcaattac

SEQ ID NO: 278767 - DNA, 404 bp, Homo sapiens
accacagcacctcttatctgcttgggatcccrtgcaagttgcgcacagaggatcccatctgtgggctcagaagcacaaagggaacagcaaaatcttctatctgccatctatggggaaaaaaaaaggtaattacctctgtcagttgcatatgttgagtcaccctgagacaatggaggtcttcttcaggctgaatttaacatcacaaatcatcaccttaaatgcatgggtactggagaggcgtagccaggtattatgaaggctttaaaacccatactcataaaatataacagaaaaattcgtctttcaggtttacaaccaacaaaatctgtgatatctcttttgtgaatgcttttaatgttctctgcagagcagcgagcagtagaccctggtgcaaatgtggggtt

SEQ ID NO: 278768 - DNA, 593 bp, Homo sapiens
ccctgggcccttgtctggttttttttgttgtttttttttttggtttttttttttgagatggagtcttgctctgttgcccaggctggagtgcagtggtgcgatcttggtycactgcaacctccgcctcccgggcccaagcgattctcctgcctcagcctcccgagtagctgggattacaggcacacgccaccacgcccagctaattgtttattcttagtagagacgggggtttcaccatattggccaggctggtctcgaactcctgacctcgtgacccacccacttcggcctcccaaagtgctgggattacaggcgtgagccaccacgcccggccagcccttgtcttttgaggggactcttactgacctgtaacccctgagttagagagaaggtagtaaagcctatgaaataaagcactcatagtactcagtaaactacagcacccaccaggtttggatggagctataacattagctataaccagaaatacagacgtcttgaaaaagctgagcactggagcatggtccattttagacccacttcaggttttgcagtcagattcagagggacttagtgtggtgctgtctcagaca

SEQ ID NO: 278769 - DNA, 641 bp, Homo sapiens
tggcaggtaagagataaaagcaaaggggagtgtgtcaaaacaaagaagatacaaaagtttagtaagtgaaaagagtttaatgaagcctcaagggtttaagggaaattaaatggaaacttttaatcctaattgcttttcatctgacatgcttaaaggaatccttttaaactgataagaaacaatgaataggaaagaaaacctgctaaaatctcttagaatttacacgattcttattctactacaagaaagcattatttggtacaaggtgtatttgtggatgtacatgaacagtatatatattatccggatcatgttgtgctatgtacaggtctttacaattcttcctgaaggttaaaacagttcattagaattcaaaatgcgtaatcatctgtaagttggcacttgttaggctcttgtcagcattgataactggcatgttttattgcagcccagttccagccagtgtttgccaacttgtacaacagaagtccagcaataggtgggtagagtgcaggaaaaacagtgccatgtttctcaattggagacctacaacaacaaaaacaacattatatagtcaattyatcaattacaaaagaattaactgtaagtaggttttatccatattagatttatttgacaac

SEQ ID NO: 278770 - DNA, 602 bp, Homo sapiens
ttgcttactaaaaagccatattataagtccgtattatttcaattggtgccagataatacttcagtaattgtcatcaaaaaatgygagagctttttgtcaatgacaacagttgtgaagaagacaatagtttctctcattcatgccacattaaaaattaacttttctacttttaacttccttgtccccaggaagatttgacctccagagccaaaattactatttttagctacatttatctcagctgggtatcaatagatacccagtattatctaactaatttacattacagtgtttctaactaatattccttccagggttacacttttaaaagaattcttcttaaccagaatgaaacacttattggtagaatgtccagcaactggcaaatttctaaacatctactgtatcaaggtggcatgtcaagtcatttaaaaaaggacatattttgaggataattggctagccatttggaagaaaagtaaaattagatctctacttcaggccatagacaaatacaataaaagattcatgattaattatcataaagttaaaaataaaagttaaaaattcaaaagaaaatataataggaaatgttttattat

SEQ ID NO: 278771 - DNA, 580 bp, Homo sapiens
gttgtcagccgggggctatcttccactcccttaaaagccacctgctagtccctgctacattgtcagtttgctctttcaaggtcagcaggagactcctgcagtggggtagtctgggctatctgctctgatgaaattttaagcaacataacataataatgggaatgagtatctcatcactttgctcacatggagaaactatcccatcatattcactaattcctacaatactcaaagggaggggattttatagggtttatacaccaggcggtgggaatcttgggagctgccatggcttgaatgttccttccaaaactcatgttgaaatgtaattcccagtgcaacagtgttaggagatagggctgaatgggagatatttaggtcataagggctccaccctcatgaactgattgtcattatcacacgagtaggttagttatctcaggagtgggttgttataaagcaggcacagtgccttgtgcttttctcttttgcatgtgccccactcttcttccatgggatgaggcagcctaaagccctcaccatatgccagccccttgrtattggacttccaaatctccag

SEQ ID NO: 278772 - DNA, 512 bp, Homo sapiens
cgccataggtagataagagacaaatggttgcattcttctgggtttctgattagcctctccaaaggaagcaatcagatatgcatttatctcagtgagcaaagaggtgactttgaataggatgggaggcaggtttgccctaacagttcccagcttgactttcccctttagctcaatgatttgggggccccaatatttgttttcctttcacacmctatactggacataattaactcatgtccagaaggaaaatgtgtgaaggccaaatgtttttctcatctactattgttccaatacttgaaaacaacaacaacaacaacaaacctaagctaggaagatttgaacatttaaaagccagataattcttttagaaaaggttaaattgttaggacacagtgagaggtcttgagacttttggagggacttaagaattcaagaccctgtcaatgatttgacttgcctacagaaagtaaacataaaacacaaagggaacccctagttgcttttcaataaca

SEQ ID NO: 278773 - DNA, 569 bp, Homo sapiens
tacacagctggtaagtgatggaacatactattatatgtggtaacaaacattggttacatggaattatttactctttcttcttaactgccatgaaaacttacctatcatagacctaactacataactggtattttatttttaatctttttttttttattattattatactttaagttttagggtacatgtgcacattgtgcaggttagttacatatgtatacatgtgccatgctggtgtgctgcacccactaacgtgtcatctagcattaggtattttaaayaattatttttgtttcccataattttacttaagatccttgatgtggacaatctttctcctacccttggattaaaactcaggtagaccccatattttttctggccactcttgggtaaagtcctacgatcatgttaagtcacaaatatagtctgagtatagtaattataagtgtacaataatagataatgatcaaaactccaaaattgttttaatgttaaagtcttcctgccttttgcaacatgggccagcagaggctggacacaggcaagttggaagtgagtgcagtcct

SEQ ID NO: 278774 - DNA, 1155 bp, Homo sapiens
gtgctccttacctttgacaagttccctatgggtgcttggtaccagcttgagctatttttatgactccaaacaacaggacaatttgctgaggtctgggagcatcccctccagagaatccctgatctccccaaatttggttgaggtctaactttattttgctttacaactcctttcttttggaattgtacttgcttccaacaaagaaggcaagttttcctgtttccatgatgatggaaggcaggtaactcctttctggagattgagctcacttccaacagggaaggtgagtttgagtttcttcatgcttctaggatggtagagagtagtcttcagccygagagccatccctagggaagtagctgaattggggttttcctggctaaagttaagtttaacaaccagctggtcttaatttctccttaccacccaagtgctcataatcatattggggagattcattttgttgtttgttcctgtcttactcctgtcaaatttgaccaactctacctgacttggtcaaatctgaatgataattccaaawaatactctttaaggcatcatggccaacttaagctggttctccagacatgataaaatgaatgcagaagctgatcaaaattagtatattgagcctcgagctgatggactttttcccaaataattattcttttttaaaatatggccaggtgtggtagctcatgtctgtaatcccagcactttgggaggccgaggcaggtggattgcctgagatcaggagttcgaggccagcctggccaacatggtgaaatcctgtctctactaaaaatacaaaaattagctgggcatggtgatggatgcctgtaattccagctactcaggaggctgaggcaggagaattgtttgagtttgggaggcagaggttgcagtgagtcaagatggcatgactgctttccagcctgagtgacagcgtaagataaataaatatatacataaatacataaataaaaaattaaaaaataaaaataaaaatatcaatggcatgaaaccttttttttacttttttwattatactttaagttctagggtacatgtgcacaatgtgcaggtttgttatataggtatacatgtgccatgttgtgtttgctgcacccattaactcatcatttacattaggta

SEQ ID NO: 278775 - DNA, 494 bp, Homo sapiens
cactcccttacggggccatatagtatgcgtggagtatggttggattaatcttaaatttttataaactctgggaggttctgatgctgtagacaggtactcatagagagactaaattagagaggtcatggatcttattgactttggattccttagtagggggcacaatacctggcatatgggaagtattgaaataaatgtttggtaaacatgaacaaataaattattaaaaatccaataacaaatctaaccaccmggatcatatttttgagacagaatttcactcttctgcccaggctatagtgcagtggtgtgatcatagctcactgcaacctcaaactcatggcctcaagcaatcttcctgcctcagcctctcaagtagctgagactacagacacacaccatcatgccaggctattttttttttttttttttttttttttttgcttttggagagacagggtgttgctatgttgtcagggctgctcttgaactcc

SEQ ID NO: 278776 - DNA, 494 bp, Homo sapiens
cactcccttacggggccatatagtatgcgtggagtatggttggattaatcttaaatttttataaactctgggaggttctgatgctgtagacaggtactcatagagagactaaattagagaggtcatggatcttattgactttggattccttagtagggggcacaatacctggcatatgggaagtattgaaataaatgtttggtaaacatgaacaaataaattattaaaaatccaataacaaatctaaccaccaggatcatatttttgagacagaatttcactyttctgcccaggctatagtgcagtggtgtgatcatagctcactgcaacctcaaactcatggcctcaagcaatcttcctgcctcagcctctcaagtagctgagactacagacacacaccatcatgccaggctattttttttttttttttttttttttttttgcttttggagagacagggtgttgctatgttgtcagggctgctcttgaactcc

SEQ ID NO: 278777 - DNA, 494 bp, Homo sapiens
cactcccttacggggccatatagtatgcgtggagtatggttggattaatcttaaatttttataaactctgggaggttctgatgctgtagacaggtactcatagagagactaaattagagaggtcatggatcttattgactttggattccttagtagggggcacaatacctggcatatgggaagtattgaaataaatgtttggtaaacatgaacaaataaattattaaaaatccaataacaaatctaaccaccaggatcatatttttgagacagaatttcactcttctgcccaggctatagtgcagtggtgtgatcatagctcactgcaacctcaaactcatggcctcaagcaatyttcctgcctcagcctctcaagtagctgagactacagacacacaccatcatgccaggctattttttttttttttttttttttttttttgcttttggagagacagggtgttgctatgttgtcagggctgctcttgaactcc

SEQ ID NO: 278778 - DNA, 494 bp, Homo sapiens
cactcccttacggggccatatagtatgcgtggagtatggttggattaatcttaaatttttataaactctgggaggttctgatgctgtagacaggtactcatagagagactaaattagagaggtcatggatcttattgactttggattccttagtagggggcacaatacctggcatatgggaagtattgaaataaatgtttggtaaacatgaacaaataaattattaaaaatccaataacaaatctaaccaccaggatcatatttttgagacagaatttcactcttctgcccaggctatagtgcagtggtgtgatcatagctcactgcaacctcaaactcatggcctcaagcaatcttcctgcctcagcctytcaagtagctgagactacagacacacaccatcatgccaggctattttttttttttttttttttttttttttgcttttggagagacagggtgttgctatgttgtcagggctgctcttgaactcc

SEQ ID NO: 278779 - DNA, 572 bp, Homo sapiens
acagcaccaaacaaccctcccagcttctcccaaaggctgcctccaatttggatgtaatcagaatccaaactggctcctttccatgtctcctagtaggaagtgaccctggaagctgcaaagtcctcatttgcaaactgacagtcactttttcagtttcctargccaagatgaaaaaggctctttaccttccaagataaagcccccccgcccactagagcaaagagaaatcacacccacacccagctgacattcattttccattttcccagcctgtcactgctgagaaagagacagctgctgctgccaccacaggcagagagagagagagacagagagagagagagagagagagagagagaaaatcctttaacctcttaccatattaagtcacagaaattttcttgcaatgtgtcttcctgtcatttactcaggaaggtccctatgacatagttttgaaagattttacagacagcagaaaaacaagagtgttatcccaaacctcaatcaactaagcaatgtaaagacataattcctgaaattcttgcccacaatagtttttggaaagaaagcac

SEQ ID NO: 278780 - DNA, 572 bp, Homo sapiens
acagcaccaaacaaccctcccagcttctcccaaaggctgcctccaatttggatgtaatcagaatccaaactggctcctttccatgtctcctagtaggaagtgaccctggaagctgcaaagtcctcatttgcaaactgacagtcactttttcagtttcctaggccaagatgaaaaaggctctttaccttccaagataaagcccccccgcccactaragcaaagagaaatcacacccacacccagctgacattcattttccattttcccagcctgtcactgctgagaaagagacagctgctgctgccaccacaggcagagagagagagagacagagagagagagagagagagagagagagaaaatcctttaacctcttaccatattaagtcacagaaattttcttgcaatgtgtcttcctgtcatttactcaggaaggtccctatgacatagttttgaaagattttacagacagcagaaaaacaagagtgttatcccaaacctcaatcaactaagcaatgtaaagacataattcctgaaattcttgcccacaatagtttttggaaagaaagcac

SEQ ID NO: 278781 - DNA, 572 bp, Homo sapiens
acagcaccaaacaaccctcccagcttctcccaaaggctgcctccaatttggatgtaatcagaatccaaactggctcctttccatgtctcctagtaggaagtgaccctggaagctgcaaagtcctcatttgcaaactgacagtcactttttcagtttcctaggccaagatgaaaaaggctctttaccttccaagataaagcccccccgcccactagagcaaagagaaatcacacccacacccagctgacattcattttccattttcccagcctgtcactgctgagaaagagacagctgctgctgccaccacaggcagagagagagagagacagagagagagagagagagagagagagagaaaatcctttaacctcttaccatattaagtcacagaaattttcttgcaatgtgtcttcctgtcatttactcargaaggtccctatgacatagttttgaaagattttacagacagcagaaaaacaagagtgttatcccaaacctcaatcaactaagcaatgtaaagacataattcctgaaattcttgcccacaatagtttttggaaagaaagcac

SEQ ID NO: 278782 - DNA, 606 bp, Homo sapiens
agaaatgaagttttagttctgcaaagtaaaatgttctgaagattggtttcataaycattgtgaatacaccaaatactatagacctgtacttttttttttttttaaacagggtctacactctgtcatccaggctggaatgcaatggtgtcatcttggctcactgcaacctctgctcctgggttcaagcgattctcctcagcctcccgagttactggaattacaggtgctcatcaccacacctggctaatttttgtatttttagtagaaacagtgttttgccatgctggccagattagtttcaaacaagcctggctaatttttgtatttttagtagaaacagggttttgccatgttggccagattagtttcaaactcttgagctcaggtgatacgcccgcctcggcctcccaaagtgctgggattagaggcgtgagctgttgcccctggccgagatctgtactcttaaaaatggttaagatagcaacattttatgttatgtgtatctgactacaattttaaaaaaatttaaaaagaacacaatgggctttttggtggagaagggatccatgggaagcaaaaacaacagagagagactgaaaaggaagc

SEQ ID NO: 278783 - DNA, 632 bp, Homo sapiens
atctgactacaattttaaaaaaatttaaaaagaacacaatgggctttttggtggagaagggatccatgggaagcaaaaacaacagagagagactgaaaaggaagccactgaagatatccaggcaaaagatgctactgctgtggagtagggtgattgattgcagtgggtrgagtaagaagactagaactttgacatcaattttcaactagtacaccaatattccctgacgggttctagatgggctgtgaggaaaaagattgataaataaccacccctggtttctcgttgcacagataagttgtgcaatcacataggtacccgtattataaccatcataagctattttttttggagttgggcaagacttcgaacaagcaagtgtggagaaaaaatcaaaagtggagtttgggacatgttacttttaggaagactgagaggcatcgtgtcaagtaagaagttggtgactgtgtcttttttattcattgctatattcccagactctataatggtttctggtacacaggagtgtcttaataaatattcattgaatggtagatgaatggatggataagtgaatggatgatagagagatgaatggatggataaataaatggatgatagatgaatggatg

SEQ ID NO: 278784 - DNA, 632 bp, Homo sapiens
atctgactacaattttaaaaaaatttaaaaagaacacaatgggctttttggtggagaagggatccatgggaagcaaaaacaacagagagagactgaaaaggaagccactgaagatatccaggcaaaagatgctactgctgtggagtagggtgattgattgcagtgggtggagtaagaagactagaactttgacatcaattttcaactagtacaccaatattccctgacgggttctagatgggctgtgaggaaaaagattgataaataaccacccctggtttctcgttgcacagataagttgtgcaatcacataggtacccgtattataaccatcataagctattttttttggagttgggcaagacttcgaacaagcaagtgtggagaaaaaatcaaaagtggagtttgggacatgttacttttaggaagactgagaggcatcgtgtcaagtaagaagttggkgactgtgtcttttttattcattgctatattcccagactctataatggtttctggtacacaggagtgtcttaataaatattcattgaatggtagatgaatggatggataagtgaatggatgatagagagatgaatggatggataaataaatggatgatagatgaatggatg

SEQ ID NO: 278785 - DNA, 1178 bp, Homo sapiens
tcatttgaaaacacacccaaaggaaacagaactgacactgtcagtaattgtctcttccaagtgggattttgtgtggatagggcttcatggaaacacttgggaggatttgacttggcctcccaaaggccactgttctcaagtggctcccctataaggtagtccagggtcctctcacctcctctgcccaaattctgtcagcactaggaggagagcatttggacttagtgtccaggagattgattgtgaggactcacaaatgattggtcaataataatcgtttaaaaatggtttctacatgtcatataggtatatagatagatgtggtttactgggaaacctccacagtcatgatgatcatgaattacagtctcgagtcaacttaccatctgtgagcccaagaagcagatgaaatgatatatcatgaaaataacatggtcttaatatttgcacctgactttgaattttggtsttgccactcaatctcaacccaacctctctgagccacaatctcctcatccacaagggatgatattaggwgtaatgggctgtcagttttatgatatgttacataagattgcaactttcatcttgccagcagwctctcccttgctcattttgatgaagcaagctgctatgttgtgagctgacctatggagaaggctatgtgacaaggaactgagagcaatctctgcccaacagccagcaaaaaactgatgtcctcagtctaacaaccctcaaagaactaaattgttcctaatgtgagaacagaagtggattcttccccagttgagcctcagataagaccacagctccagccaacaccttggttgaatcttgtaagaccctaaagcagaggacccagttaagctgttcttggattcctggtcagcagaaactatgagataataaatttgtattgtttttaaccactaagtttgtggcaatatttgtgtagcaatagataacacacctaaaatgtagcgcatttactcattgtttcattctttagcacttacagtcaccatgatagtttctgaggacaaagattagatcgctatgttggccggtgctgcaagtccccaaaatgggaccatgggagggagtggaattgtagggagtggaagtaggagggtaggacatgagttcttgggcgatggcattagttaccaataaaaaag

SEQ ID NO: 278786 - DNA, 567 bp, Homo sapiens
caatctggctagaagtgaaggactccagctcttcagtagcccaaatccttgcatcactctttgaaactcagacaatctacactggactgtgatttgagcaagaaataaatctttgttgcattaggccgttgatatttagagcttttccgttagcaacagtcagtgttgtttatgataaataatacaatctcataaaagttgttytgaagcaaataacattcctccacataatcactgaaatgtctatttattaataagtggtgcagtatttatttaagatagaacataaaaaatcaggtaagaattatttgcataatatatatggaaatcaacctattaaagttgttcaaatattggacagagccagaatataaattacacatacagtttaaaaattacaggaaatcatattataaagagcactaaaggccacttgtggaatagttgtgttcccctgtaagccagaatgtgaagaaagcctactcgtagcacagagacaaacccagggagcaaggcaccagaattctatgccataaaaaggggttaaaaaatacaatccaaaatcaa

SEQ ID NO: 278787 - DNA, 567 bp, Homo sapiens
caatctggctagaagtgaaggactccagctcttcagtagcccaaatccttgcatcactctttgaaactcagacaatctacactggactgtgatttgagcaagaaataaatctttgttgcattaggccgttgatatttagagcttttccgttagcaacagtcagtgttgtttatgataaataatacaatctcataaaagttgttctgaagcaaataacattcctccacataatcactgaaatgtctatttattaataagtggtgcagtatttatttaagatagaacataaaaaatcaggtaagaattatttgcataatatatatggaaatcaacctattaaagttgttcaaatattggacagagccagaatataaattacacatacagtttaaaaattacaggaaatcatattataaagagcactaaaggccacttgtggaatagttgtgttcccctgtaagccagaatgtgaagaaagcctactygtagcacagagacaaacccagggagcaaggcaccagaattctatgccataaaaaggggttaaaaaatacaatccaaaatcaa

SEQ ID NO: 278788 - DNA, 572 bp, Homo sapiens
ctgacccaggcatcactctactctccagggaactcatgggtctgtgatcattttactgtaaagctgagtgaacgtagaagcccgaagcattgtggaggagctagggcctgatttgagaggaagaagggggagagagaatgagctttccaggtacacgggctttggttgaatatgcagctctacttcttacamtgtgtgacctttgacaaggtcttgtcttcagtttcctcatctataagatggagacaataacatctccctcatggggttgcgatgaggattgcatgaactttagagagagctatcatgtcacaagcaactcataaggagtgcttaggataagtttctctccccttccctgacctcacttttgtgggcagaggaagagaagggaacattaacataaaatatggtctcattttttattactcttaggtatcaaattgcagtccattcgacaagtctaagaggaattacaaatacattcctgagcactgagctgggcttttgactacctcattgtaagccattctcaagttattcttatatacagccgatttttggcggtgtca

SEQ ID NO: 278789 - DNA, 498 bp, Homo sapiens
atgagtcttttatttttgcaatttggctttatctcctacacatcatccagatggtgcaacatctggtactatatgtccaatggaattgccacaactcagccactgagatccaacattcctgcctctcttcattccaagattccttctgttctttattgtggtagacaagagcaagcatttttatttgcagagatgtacttatttaaaaagcaattgtgaaagcatttgatttaataattaggattgtttctccacgattctttttctgaaaaaaaatttttttggtgtaaatttagagttyataagtaacaccaaagactgagacaatgaagtccatgcatactgtaaaaaaataacataaataacagtccctagtatgcatcagtcattgtactagaggctttgtgtgtacattgattgtctcacttgaaaatcaaaacacggcagaagagtcaaatgcttttgaatgtgctgaaactcaaattttcttccaggtca

SEQ ID NO: 278790 - DNA, 1198 bp, Homo sapiens
gaggtgattgaatcatgggggcagatttcccccatgctgttctcataataatgagtgagttcacacgaggtgtgatggtttaaaattgtagcacctataggctttctctctcctgctctaccatggtaagatgtggcttgctttcccttcaccttttaccatgattataagtttcctgagacctcttagccatgcttcctgttaagcttgcagaactgcgagtcaattaaaccacttttcttcataaattaccyagtctcaagaagttctttacagcagtgtgagaacagactaatacatgggccattctatactctttgcttaatggaattattgtcttgtgctatattgtcagtgtatttgtagtattggtgaagtcagtaagtatttgtagtatttagacacagacctttgaggatgatttattctctcactcactttcctgccacgtggaacttcaatacttcaacgtccttattccccaaaacatcacagagaatattaatgctactggattcctgatatagactgacagcattctcttcacttatctgatctctattaattcgatcattttatatatgttgttcaaatgttgctcctaaattcacctaacaaaagcagagtaaacagacaacccacagwggttactacgaggatcaaaaaaatcatgtgcctaaataatattgctggtacatattacttatctactacattttactctccaaaactcttagctccatttccatttctggctagaagagggacatgtacctctgtgctgagtttagaaaaaagaacactgcatcacagctgatataacaagcagtaaagaacgtctatatccaaactggtaaggagaattcagcacagttgttagaaaaaaggcaatgctctcttaaccaagagcaactgtaacaaaatgtaacttttaaaaggatacaataaaaaccagttatctagaaataaatctagtawgtgcaggagctgtatggagaaacttaaaagtgcactaaataatattatgctcaagagcacagtaggccaatcttccccaaatgaaatcaacgaaattccaataaattcccaaagtgtttttcataggacttaacaaggtaatcctaaagtatataatctagaaatcacaaaaacgtaatgttggatgaacataagttgtacaaagaaactccaatattat

SEQ ID NO: 278791 - DNA, 553 bp, Homo sapiens
ggttactacgaggatcaaaaaaatcatgtgcctaaataatattgctggtacatattacttatctactacattttactctccaaaactcttagctccatttccatttctggctagaagagggacatgtacctctgtgctgagtttagaaaaaagaacactgcatcacagctgatataacaagcagtaaagaacgtctatatccaaactggtaaggagaattcagcacagttgttagaaaaaaggcaatgctctcttaaccaagagcaactgtaacaaaatgtaacttttaaaaggatacaataaaaaccagttatctagaaataaatctagtaagtgcaggagctgtatggagaaacttaaaagtgcactaaataatattatgctcaagagcacagtaggccaatcttccccaaatgaaatcaacgaaattccaataaattcccaaagtgtttttcataggacttaacaaggtaatmctaaagtatataatctagaaatcacaaaaacgtaatgttggatgaacataagttgtacaaagaaactccaatattat

SEQ ID NO: 278792 - DNA, 542 bp, Homo sapiens
ggcctggtttttttcttttaatttaaaatattatgacaaatgtttttctatggttttcaaaactgctgtttttcttcagtcactttttttttttttcgttttctttttaacagctgctggctggctggtgttctttctgctctatgaaccagcaatggagggtggaagacagctgcactttaaatgaatctgaaagatctgaaaatatcttctcttgcccacctaatactgcagaaatagaataagaagaaaaataataaagcagaagacaaacgtcaggaaagcaaaagtatgagaaaggtactttgtatgatctatagactactgtcttaaaatttcaaattaaagtagatttggcratagaaaaattctgcccagaaacaaatcacattgtagttgtctagatgtctgcttccatcgatgtataacaacttatgtacttttacagtttatgtaaaagtaacatacagtaatggctgaaacagtatctattcatcaattaataacccaaaacaaatgccacaaatgcatttaagaacagt

SEQ ID NO: 278793 - DNA, 556 bp, Homo sapiens
gagttttaatgtatctattatagtaatttatactctttaatttttagtgaagtttaatgcttttcatatgtttacttgtcattaaatttttttgtgaattgccagctttttttaaccttttagtgttcatcattttttgctcaaatgtgaaaactcctttaataataaaaatgttagtgctttgcttgtcaatgcggtacaatcatttgtttttctagtcaatttcatctacattttttccctttaattatatatatcaaatctatcgatctacacctttatgatttcttggttgactgttcagttttcaaaacaccctattgtctcaattttttaacatttaactttgtaattcatcctgattttattttgctattgtacaaaatcatcagtatgtctttaagttatcttaaagatcatttagggccctgctttatggatagcctttccccacactgygggaaggtaggcaggggagctgtctgggttgagggccctggttgctgacagctcaggcacttcagagaataaacacatcaaaaacaaagctcacctg

SEQ ID NO: 278794 - DNA, 591 bp, Homo sapiens
aagaactttacccaataagttatttgctttttgatttatcattaagattaaygtttatacaattcatgggaatattcaattatgttaaatgattttattgtttcaccacactttgtagaatttattgtgttgtttgtaatttgacaggcagtcttattgaatacttgggaaaatgaatacttatgctttcaataataaacttgaaattgcttaaggataatcaacgtgattaatatttttgactagtggcacagttacattcatgttaatgaaaggtaaatacagcaattctgtctgatttcacaaatcaattttatttcataaatcttaaaatgttccatgacaggaatggttgaaacctccagcttattgattttctattcctgtctaaagcattgtacaattatttagaactgtgttagcttgataaataatgccttaaatatttttagtataaattttacagtttctaaacattggaattgtgtgattctgattctgatttggtatcattttattattctaaaccaagttttaattttttatccttacccaaatttacctttaagtccacaagttatcacttagcaa

SEQ ID NO: 278795 - DNA, 563 bp, Homo sapiens
attttgaaggttgctttggagtgagttgtcctatatatctcacctctttgcttttagtggggaggagcaggaggatacctccttaggaaactggacttccaagcgaccatgtggagaatttatgtgactcccattccccatctccatcaaagcacacaaacatagtttgagtggcacagtgagcttgtgtctgaatcatcgttaagaatccaaagcttgaatgttagctgggtcagcccatgatagcagagtatagagctgcaatttggtaaataatggagctcccagaatttgtcaagggaaaggaagaggtgtggccaygtgggaggcaaagcccacaagaggaagccttggatcctgtccaagagactgagtggagggtagatgggatctcagcggaaggaagctggtcgtggcctaatgctcagaggctatgggaggagccaaaactagttggaatactgatattgcctgtgtcaagggactgtaagcagtaagtctctagctgtgggaggtcttcaaataattcagaatagtactatgagagaaagcagctctgaata

SEQ ID NO: 278796 - DNA, 563 bp, Homo sapiens
attttgaaggttgctttggagtgagttgtcctatatatctcacctctttgcttttagtggggaggagcaggaggatacctccttaggaaactggacttccaagcgaccatgtggagaatttatgtgactcccattccccatctccatcaaagcacacaaacatagtttgagtggcacagtgagcttgtgtctgaatcatcgttaagaatccaaagcttgaatgttagctgggtcagcccatgatagcagagtatagagctgcaatttggtaaataatggagctcccagaatttgtcaagggaaaggaagaggtgtggccacgtgggaggcaaagcccacaagaggaagccttggatcctgtccaagagactgagtggagggtagatgggatctcagckgaaggaagctggtcgtggcctaatgctcagaggctatgggaggagccaaaactagttggaatactgatattgcctgtgtcaagggactgtaagcagtaagtctctagctgtgggaggtcttcaaataattcagaatagtactatgagagaaagcagctctgaata

SEQ ID NO: 278797 - DNA, 640 bp, Homo sapiens
gaacattattttcttttgtaatctacttgtccttgtaatccattgctttcctccaattgttcacttgtgtattggttggtaactttgattttccttaaaaatttataattgtaagttaaacttattttgtacacaaattgtcttactttaacatactcaactgctctccagtgaaatgccaactttttatttagtatttctatttacttagaggatcaagatctccgctgcttgtcatccacctgatttaacagcagtttggttttagttaaggatgagacatgggtgtgatgagcagggatgcatccaggrtaatgacctatgttctcatcctaacttgcaattctattgctggtctaaatgaacatgtataatggttagtaaagctccataaaaaccagtattttcagaaatgctaaggatatcttatttttatttttttcacataatttgctgtaaaaaaggcatttggaaaattttaatttcactgatactcacttaaccaaaaaggtcagagccacatttctgttgattgagtatcatgacataaatatctttgaagaattattgttttgtatattaaactaattgaatataaatctactttaaaattgtgtagtccagaggaaacaattaaaaa

SEQ ID NO: 278798 - DNA, 593 bp, Homo sapiens
ccaactttttatttagtatttctatttacttagaggatcaagatctccgctgcttgtcatccacctgatttaacagcagtttggttttagttaaggatgagacatgggtgtgatgagcagggatgcatccagggtaatgacctatgttctcatcctaacttgcaattctattgctggtctaaatgaacatgtataatggttagtaaagctccataaaaaccagtattttmagaaatgctaaggatatcttatttttatttttttcacataatttgctgtaaaaaaggcatttggaaaattttaatttcactgatactcacttaaccaaaaaggtcagagccacatttctgttgattgagtatcatgacataaatatctttgaagaattattgttttgtatattaaactaattgaatataaatctactttaaaattgtgtagtccagaggaaacaattaaaaagcataattattgaatatacaatgtgacaaatcagtcatgtaagaaaaactcataatttccagttactatgagaataattattgataagtaacatctctccttttcctttccatgaaagtgaaaatgcattt

SEQ ID NO: 278799 - DNA, 593 bp, Homo sapiens
ccaactttttatttagtatttctatttacttagaggatcaagatctccgctgcttgtcatccacctgatttaacagcagtttggttttagttaaggatgagacatgggtgtgatgagcagggatgcatccagggtaatgacctatgttctcatcctaacttgcaattctattgctggtctaaatgaacatgtataatggttagtaaagctccataaaaaccagtattttcagaaatgctaaggatatcttatttttatttttttcacataatttgctgtaaaaaagkcatttggaaaattttaatttcactgatactcacttaaccaaaaaggtcagagccacatttctgttgattgagtatcatgacataaatatctttgaagaattattgttttgtatattaaactaattgaatataaatctactttaaaattgtgtagtccagaggaaacaattaaaaagcataattattgaatatacaatgtgacaaatcagtcatgtaagaaaaactcataatttccagttactatgagaataattattgataagtaacatctctccttttcctttccatgaaagtgaaaatgcattt

SEQ ID NO: 278800 - DNA, 524 bp, Homo sapiens
tgcaattctattgctggtctaaatgaacatgtataatggttagtaaagctccataaaaaccagtattttcagaaatgctaaggatatcttatttttatttttttcacataatttgctgtaaaaaaggcrtttggaaaattttaatttcactgatactcacttaaccaaaaaggtcagagccacatttctgttgattgagtatcatgacataaatatctttgaagaattattgttttgtatattaaactaattgaatataaatctactttaaaattgtgtagtccagaggaaacaattaaaaagcataattattgaatatacaatgtgacaaatcagtcatgtaagaaaaactcataatttccagttactatgagaataattattgataagtaacatctctccttttcctttccatgaaagtgaaaatgcatttacagaagtgatgatttttttctcttaatctgtgtattagtctgttctcacgctgctaataaagacataccagagactgggttatttataaa

SEQ ID NO: 278801 - DNA, 588 bp, Homo sapiens
catctgccttgcctgaccatctctgtgggccctccagacatccagccccagcatcacaggtattgagtcatgagcagtaatgacagcagtgttttcactagaagagccatgtgctattaaggtaacattatttatggtactcctaaagagtctgagtcatgtaacatttaaaaataactccttctttagacggacatggatcttgctgctttcaacaaagacccagtgcaatacttaatcagggccatgytgacaaatatatcattaggtgtactgctttctgccacagtaaatgccatttctgtgacagtttcccatggttttctcaaccttatttatcaatcttctttcctatggttctccccatgaaccctctgtccagatattcatgttttcttgctgtttgatgagtatttcctttgtgttctactcttggtagcattgttcatgttggtgatgacctgggaatacccatcctctaccctccccagccatccttcaaggctcagctataatgttgtcctcctccatggaaactttcctgcctcctccagtgctcactgatcttccagttcctgaatgttttca

SEQ ID NO: 278802 - DNA, 495 bp, Homo sapiens
tcctttgtgttctactcttggtagcattgttcatgttggtgatgacctgggaatacccatcctctaccctccccagccatccttcaaggctcagctataatgttgtcctcctccatggaaactttcctgcctcctccagtgctcactgatcttccagttcctgaatgttttcagccctttattcagcacaaaatgtttggtctttaatgttgactagttttgtattgcaagccaatttctgagcgtgcctttgatctcatctctcttagagtattgtatttctayaatactccctctacagaaatctcttagagttctgatatgcaccagggatagtgccaggcccttctcaagaacatattaatataataaacatcaatgattcacttatgtacttaaagaatattccagtagaattaagttaaccagaaggtttggggaatgctatggtttggttagttaaattttcaggttagttgagagatatgcaaataa

SEQ ID NO: 278803 - DNA, 495 bp, Homo sapiens
tcctttgtgttctactcttggtagcattgttcatgttggtgatgacctgggaatacccatcctctaccctccccagccatccttcaaggctcagctataatgttgtcctcctccatggaaactttcctgcctcctccagtgctcactgatcttccagttcctgaatgttttcagccctttattcagcacaaaatgtttggtctttaatgttgactagttttgtattgcaagccaatttctgagcgtgcctttgatctcatctctcttagagtattgtatttctacaatactccctctacagaaatctcttagagttctgatatgcaccagggatagtgccaggcccttctcaagaacatattaatatartaaacatcaatgattcacttatgtacttaaagaatattccagtagaattaagttaaccagaaggtttggggaatgctatggtttggttagttaaattttcaggttagttgagagatatgcaaataa

SEQ ID NO: 278804 - DNA, 548 bp, Homo sapiens
caggttagttgagagatatgcaaataatattttctcttgttttaattgggaaatgttatctcaagtgcatttggtcacttttccgtctaaggaagtacatgagagtaatccactataatgtgatgtgctcaggtgacctcttctgaaaaggagtcarttccattgtttttgcaactggaagtgatttcactctttgagttgtcatagcactttatggccatcataagaatattgccttatttgttttttattgttgtatgtttattaggcacattaaaatctaccactcaattacaaattgacatgatacagaaatggcttctttcttaacttttatattccccactgggcctgatccagtgtgataaatataagaggtactaaaatcttggttaaatgaattgagacaaagagtcagtcttttaaatatcagaataagaattttttttctggaaggtatagaatttggggttaaattggtagtgccccaagacaaaagaataagaagttactttttaaaaagtttcattatgggcttattttcaagc

SEQ ID NO: 278805 - DNA, 644 bp, Homo sapiens
aatgtgatgtgctcaggtgacctcttctgaaaaggagtcaattccattgtttttgcaactggaagtgatttcactctttgagttgtcatagcactttatggccatcataagaatattgccttatttgttttttattgttgtatgtttattaggcacattaaaatctaccactcaattacaaattgacatgatacagaaatggcttctttcttaacttttatattccccactgggcctgatccagtgtgataaatataagaggtactaaaatcttggttaaatgaattgagacaaagagtcagtcttttaaatatcagaataagaattttttttctggaaggtatagaatttggggttaaattggtagtgccccaagacaaaagaataagaagttactttttaaaaagtttcattatgggcttattttcaagctrtttgacattcttcctcagaaaaaatgaaataaattaaatccatggaattgagtgtttttgttattttttcctggctaagtgtgatttttattacaatttttctaaactttccttcatgacaagaaaatcactgttattttaatttctatattttgtcacattacttcttagtctgagctctcatgacattctttatggatataccttata

SEQ ID NO: 278806 - DNA, 510 bp, Homo sapiens
tgggcaaagtagcaatcacatatgctacctaggttgttaataatttaccrtaaatttaacttagtggttattccttagacagtttgccatgtgcattatttatgagttttttccactttggtggactacagcagtcatattaatttttaatcaaattgtgtaattttgtaagtaattcttaaagccaggtgaatacaaggacaaaaggtatctaggaaatagtatttaaatgtattctattcctaggaacacatttgccgttcactttaaatatcaaataccaaaatgactttaaggaaaatagttaagacaggccatacacattgagtttctctaagtaaacctagagcttacttatggttataaatttcatacattttgcttttaaagaaaaagccagcaactgaatatttataatcccgagactgtcccatactttattgttttccttaggggcttttccccagcccaaaggagaatatggtaactgacattctctgcaatctgcca

SEQ ID NO: 278807 - DNA, 532 bp, Homo sapiens
gtagggttgagaaatggagagcttgaggaatgaaatcatttcagatgcagaaggcagcacgagcaaaggcataggagagagaaaagaaatatatgcttgtggaatgaaaagtacttcagaatgactgaagcttacaatggctaaaggagttctaggccattccactcccagtgagccaccaaaggttcatctcttttccmtgttcagtcttgactccatctgttaaccttcctaaaatgcctttagcattctccccaatttaggtactacccatccagtttcttcttccttttccatgacctgaatttctctctcttatagacccattatttgtatgttttacttacttagcatttaatcatatacttttttgtgtgtcatctaattgattgtattattgcttaatattttacatacaccatttttttaatccatatgacaaaatttgaaggttcttgagaccagaaacttgtttataattgcttgtattctctagcatctaaagttaggcctgcatatagggtagttgcca

SEQ ID NO: 278808 - DNA, 595 bp, Homo sapiens
gcacgagcaaaggcataggagagagaaaagaaatatatgcttgtggaatgaaaagtacttcagaatgactgaagcttacaatggctaaaggagttctaggccattccactcccagtgagccaccaaaggttcatctcttttccatgttcagtcttgactccatctgttaaccttcctaaaatgcctttagcattctccccaatttaggtactacccatccagtttcttcttycttttccatgacctgaatttctctctcttatagacccattatttgtatgttttacttacttagcatttaatcatatacttttttgtgtgtcatctaattgattgtattattgcttaatattttacatacaccatttttttaatccatatgacaaaatttgaaggttcttgagaccagaaacttgtttataattgcttgtattctctagcatctaaagttaggcctgcatatagggtagttgccaaataaatgttaattgcctaaatgaacatataactagatgtatgcatgaatgaatgaatggatgaatgaatgaagtagatggaagtctggaatctagaaataaaaagctgtgtacgccat

SEQ ID NO: 278809 - DNA, 349 bp, Homo sapiens
gatgcatatatttccagtgaccaaagtattttaatgttgacttaaaatgacatgataaaccatttctcattatcaagggaagcacatgcatagaagtgaatagatatctcctccagctttggccatctgaggctttgcctgcttctgtgttctatgaccactgactacaatgatccaagaaatttcagtatcttttagatgacaygacagataccacagcctgttactcagagttgtggtttctttggctctgagggtgttttgctgtggattagtctctgactttggccaaaacgtctcaacaaactcccaaattgcttacagaaaatgaactgatgggagaaatgaa

SEQ ID NO: 278810 - DNA, 586 bp, Homo sapiens
ctttctttttgctaactttagattttaaactttaactcttattaaggaatccaatttgaggatttgaggatgctcagtctattttctagatgtacatgcctcaaggattcagaaatgatayaaaacaccaaatactgagacatgaaaaagttggagaaagctttctttagggcatagtgattccttattcacatttttctctgttgaatactgagcccggtgtcttgtatatagtgaaaagccagtaagtatttgttgaataaaaatatagtaattggggcctttgccattttttagccatgtgactttgggccatgcatttaatctccttggaatttagttctgatttttatttttcagtttgtgaaatgatgaggttttaattgcatggtctattaaattcctccagggcaatcattcttgcttgtggggcatggagaaggcacccagacctgtgccagccagtaccctgcccctgagccaacaccacctccagtgccaccatgcacacattccccaacaggagtcccctgcccccagcagctgcattgcctctgccactgtggtgagctgccacagggaggca

SEQ ID NO: 278811 - DNA, 586 bp, Homo sapiens
ctttctttttgctaactttagattttaaactttaactcttattaaggaatccaatttgaggatttgaggatgctcagtctattttctagatgtacatgcctcaaggattcagaaatgatacaaaacaccaaatactgagacatgaaaaagttggagaaagctttctttagggcatagtgattccttaktcacatttttctctgttgaatactgagcccggtgtcttgtatatagtgaaaagccagtaagtatttgttgaataaaaatatagtaattggggcctttgccattttttagccatgtgactttgggccatgcatttaatctccttggaatttagttctgatttttatttttcagtttgtgaaatgatgaggttttaattgcatggtctattaaattcctccagggcaatcattcttgcttgtggggcatggagaaggcacccagacctgtgccagccagtaccctgcccctgagccaacaccacctccagtgccaccatgcacacattccccaacaggagtcccctgcccccagcagctgcattgcctctgccactgtggtgagctgccacagggaggca

SEQ ID NO: 278812 - DNA, 586 bp, Homo sapiens
ctttctttttgctaactttagattttaaactttaactcttattaaggaatccaatttgaggatttgaggatgctcagtctattttctagatgtacatgcctcaaggattcagaaatgatacaaaacaccaaatactgagacatgaaaaagttggagaaagctttctttagggcatagtgattccttattcacatttttctctgttgaatactgagcccggtgtcttgtatatagtgaaaagccagtaagtatttgttgaataaaaatatagtaattggggcctttgccattttttagccatgtgactttgggccatgcatttaatctccttggaatttagttctgatttttatttttcagtttgtgaaatgatgaggttttamttgcatggtctattaaattcctccagggcaatcattcttgcttgtggggcatggagaaggcacccagacctgtgccagccagtaccctgcccctgagccaacaccacctccagtgccaccatgcacacattccccaacaggagtcccctgcccccagcagctgcattgcctctgccactgtggtgagctgccacagggaggca

SEQ ID NO: 278813 - DNA, 577 bp, Homo sapiens
ttcagtttttaagttattggctactgtgtggaccataaaaaacatgtctttgagccatgtttcatttgcaggcagactgtttttgtcacytctgcttttaggccttgaacactgctatggactggagagaaaacactccagatgagaagcataacatgaataatttatacctcataagtgatgtcctaaatacagagaatagacacttctttttgagaaggatgggacatattggaaacagatggaggtgaatatggagtgtggtggttagtcatactggggagagctacattagataagttatgaagtttaggactatgtattagcctgttcccagagactgggtaatttataaaggaaagaggtttaattgactcccagttccacacatctgcagaagcctcacaatcatgccagaaggcgaatgatgagcaaagttacatcttatatggcagcaggcaagagagcttatgcaggggaactcccatttataaaaccatcagatctcatgaaactgactaccacgagaacagtatgggcaaaactgccctcatgattcaatcatctccacccggcc

SEQ ID NO: 278814 - DNA, 580 bp, Homo sapiens
aatggttacaatcttgcctcctctttctcctcctccttttcctttttctcttactaatgaaaggaggttattgcaattttgccaaataatgagaccttaaaccaaattccctaccctgtgctcataacagagcagaaagaaaaaaaaataatgtccttctcatttaactcaataatattgcattatagatatatctgctcctacaagcaattcatgttaagcaagcacatttttctttccccagtagactgtgcaaagcacgtctgctctagttttcaaaagacgaaatatctgtgtgcctcacagacaagttatttgttagaattaaagggaaactttaaggagtgcttaggctctcaggattgaccttcagccatctcttatayaaggaaattaatagttaattggtcactttagtggcccatctgaactaagcagcttaataaagcagtaaaatatgtgtgttcctttgagaaacagaacaccgtgtcattgcatacatgggtaaagaatgatgcttaggagattggaaggctgtgtctagaaaaggggtgctcaggaatcttgtctgtattctaaa

SEQ ID NO: 278815 - DNA, 514 bp, Homo sapiens
ggctcacgcctgtaatcccagcactttgggaggccgaggcgggcagatcacctgaggtcaggagttcragaccagcctggctaacatggtgaaaccccgtttctactaaaaatacaaaaaattagccaggtatggtggcataagcctataatcccagctactcgggaggctgaggcaggagaatcacttgaatctgggaggtggaggttgcagtcagctgacatcaatgccattgcactccagcttgggcaaaaaagtgaaattttgtctcaaaaaaaaaaaaaggaagaagagaaatagaaagataacaaagtgcaatagtttagccaacgaaggacaaaatttgttgaagaaagtcgcaggagatggtcaacaacatacaaggttaaagcaagcaggagatgagagatgagagaaagccactggatctggtggaaaagcacattttgatctttgatgagcaggtagtttcagaagagttttaaagtcagatgaaagctggcagaaactgaga

SEQ ID NO: 278816 - DNA, 514 bp, Homo sapiens
ggctcacgcctgtaatcccagcactttgggaggccgaggcgggcagatcacctgaggtcaggagttcgagaccagcctggctaacatggtgaaaccccgtttctactaaaaatacaaaaaattagccaggtatggtggcataagcctataatcccagctactcgggaggctgaggcaggagaatcacttgaatctgggaggtggaggttgcagtcagctgacatcaatgccattgcactccagcttgggcaaaaaagtgaaattttgtctcaaaaaaaaaaaaaggaagaagagaaatagaaagataacaaagtgcaatagtttagccaacgaaggacaaaatttgttgaagaaagtcgcaggagatkgtcaacaacatacaaggttaaagcaagcaggagatgagagatgagagaaagccactggatctggtggaaaagcacattttgatctttgatgagcaggtagtttcagaagagttttaaagtcagatgaaagctggcagaaactgaga

SEQ ID NO: 278817 - DNA, 494 bp, Homo sapiens
tttgtgtctggatgatctgtctgttactgagaatgggatgttaacatccctgactattattgtattgcattctatctcttcctttaggtctattcatgattgcttcaagtatttaggagctctgtattgggtacataaatatttatacttatatcctcttattgaattggctcatttatcattttatagtgatcttccttgtcttttttcacagtctgtgytgtgtagtctatttcatataatgtcaatatagttattcctgctcttttttgctttccagttgcacagaataccttttccatcctctctagttatgtgtgtctttacaggtaaagtggggtttttgagggcagaatataattgagtcatttctttatccattcagccactctatgccttttagttggagagttgaaaccattcacatttagcgttattattgataagaacttaccactgctgtttcgttgcttgttttttggtggttttgagat

SEQ ID NO: 278818 - DNA, 494 bp, Homo sapiens
tttgtgtctggatgatctgtctgttactgagaatgggatgttaacatccctgactattattgtattgcattctatctcttcctttaggtctattcatgattgcttcaagtatttaggagctctgtattgggtacataaatatttatacttatatcctcttattgaattggctcatttatcattttatagtgatcttccttgtcttttttcacagtctgtgttgtgtagtctatttcatataatgtcaatatagttattcctgctcttttttgctttccagttgcacagaataccttttccatcctctctagttatgtgtgtctttacaggtaaagtggggtttttgagggcagaatataattgagtcatttctttatccattcagccactctatgccttttagttggagagttgaaaccattcacatttagcrttattattgataagaacttaccactgctgtttcgttgcttgttttttggtggttttgagat

SEQ ID NO: 278819 - DNA, 543 bp, Homo sapiens
aataatgaaaagtcaaagactgggagaaaatatttgtaatagacaaatccaacaaaggactggacttctgtctagaacttatagagtacttctacaaatcaatgagataaaaacagaaaatccaattaaaaatggtyaaaagggttgaacagacacattacaacagagtacttaaacattcattatgcatatgaaaagttgttcaatatcattagtcattatgaaatgcaaataagaatgtgatgctaccatccacccaccacaatggcagttgtgatgctgatgacctcgtagagactggaactctcatacattgctgctggtagtgtaaattgacaaagatctttggaaactaacagtatcttgtaagcctaaacaaatgcctaccataggacctagcaatatcacccaccccctttttgtttctttcgctccatatacagacacatatatctggaagaaataattacaacaaatatcaagtacaaaatattcattacagctttactcaacccaaacatttatcaatggaatggacaagta

SEQ ID NO: 278820 - DNA, 580 bp, Homo sapiens
taacaaacatcccaagagtttctgatgcaggtggtccagtgaccattctttgacgaacatggccatagaaaaatgttgactycccagagaaaacgatgattcaaagtacgtggttaaagagacaaacagcaatttacaaacatcacacaggaaatcaaagtcttccatacaagtcagttaacaatgtgaaatacacctgacactcaaaaggattcaaaatgaattaaagtattgtactattacacctagtgattaatggatctatgaggtggactcaggagtgatatcaccagcttaggagagaaataataaactcggatattagtaggatatactaaaatttttggaaccttagagaactcttgtcccagtggcctttctaaaacctttttcacttcagtttcaaattaccgaacttctcaattaggaaaacaactgctatttgttgttttcactagattatctcaggcaagtttttcacttgggtaaccagagttcatgccaggtgattgtcatggttttgcagaaatgtagtatgtttggaaataaattgtgcacagttgctcaattcaactaacct

SEQ ID NO: 278821 - DNA, 582 bp, Homo sapiens
aaagtaattaaagaaaatatttttcagaatgaagctgtatgaaagcttaaaagtaaactgtaaaaaagaaaagatgaggattggatggctgtcttaaatacagattgccatggagayaatggctatttcacaggctcagagatagaactcttgagcagcagatttttcccctccagtttctgtggcaatgtgattggcagagatgcaggtgcattatcagcttgccgataccgccctggagcgactgatggagataattacgatttctagtaggaaaatttccctagagatgatttgttataaaaagataaaatgtatattaatgtccttccacaccatgaccttggttttgaattttagatttccaagtatttcactggaaaactccagtcttacttgggtttgattctttgacctcaggtctcaaggttttactttttactttggtttattgagtctttttaggtttgtaatggttatgttttctctttttaggtgtggtgaaaacctgcagaagactgacagtaatgaaagtggcttgagaaaaagtgaggatatttgcagattgaaaaaagaaaaaca

SEQ ID NO: 278822 - DNA, 582 bp, Homo sapiens
aaagtaattaaagaaaatatttttcagaatgaagctgtatgaaagcttaaaagtaaactgtaaaaaagaaaagatgaggattggatggctgtcttaaatacagattgccatggagataatggctatttcacaggctcagagatagaactcttgagcagcagatttttcccctccagtttctgtggcaatgtgattggcagagatgcaggtgcattatcagcttgccgatacygccctggagcgactgatggagataattacgatttctagtaggaaaatttccctagagatgatttgttataaaaagataaaatgtatattaatgtccttccacaccatgaccttggttttgaattttagatttccaagtatttcactggaaaactccagtcttacttgggtttgattctttgacctcaggtctcaaggttttactttttactttggtttattgagtctttttaggtttgtaatggttatgttttctctttttaggtgtggtgaaaacctgcagaagactgacagtaatgaaagtggcttgagaaaaagtgaggatatttgcagattgaaaaaagaaaaaca

SEQ ID NO: 278823 - DNA, 620 bp, Homo sapiens
taacaacctttaaagtaatattaaattttgtttgatggataaagtcattgatataattctgtcttcggtgcttgcaagacggtgtttgtatataagagtgtatttgtgctttgtgttagaacaattgatatttctagattactaaataaagcactatagcaataacatttataatcaggaacaaaacagaatgaaataatagaaacatttaaaaatttttctatgagtgctatacatggttattcatttactataatcttcacccttttaaaatgtactatagggacctccaagtttgacctgtttaaataaattcttacctacagaacagaaacaagcacaattcacgttcatgaataattctgcacggtaaaaaataacaaaccagactacaccctttttatattggagatttctcccttcctctccctttctttaaactcctctgtgttgtgcatacattactatatcatgtagttattcttagcaaagtttacataagctcgaaccatcttggcaacttttctttagtaaatgcagactaaaaayatgaaaactgtgacagtgctgttggaaaaaaaataggtcccaaatagtgcatgtcataatgaaaggaaagg

SEQ ID NO: 278824 - DNA, 601 bp, Homo sapiens
tggtctgactagaatttcacctggctggaatttcccaatcctagcaagctggggggcgctgcaggtgaccagcgtgtatttcatcccttatctacaactgcataagacagacactcccagagcgactattttagagacctccccctgagaatacaatattttcccagggctgttccttgctgagaaaaagaattcagtgatatttcccctattcgcttttgcragaagagaaatatgactctattctgcccagccccacaggcaggcaggccttatggttatctcccttgttccctgaaaatggctgttatcctgttcttttcaaggtgcccagatttcacattgttaacacacatgctttacaaacaatttgtgcagataacgcaatcatcacagggtcctgaggtgacatacatcctcagcttatgaagatgacgggattaagagattaaagtaaagacaggcataggaaattataagagtattgattagggaagtgataaatgtccatgaaatcttcacaatttatgttcagagattgcagtaaagacaggtgtaagaaattataaaaatattaatttggggaactaataaatgtcct

SEQ ID NO: 278825 - DNA, 594 bp, Homo sapiens
attcgcttttgcgagaagagaaatatgactctattctgcccagccccacaggcaggcaggccttatggttatctcccttgttccctgaaaatggctgttatcctgttcttttcaaggtgcccagatttcacattgttaacacacatgctttacaaacaatttgtgcagataacgcaatcatcacagggtcctgaggtgacatacatcctcagcttaygaagatgacgggattaagagattaaagtaaagacaggcataggaaattataagagtattgattagggaagtgataaatgtccatgaaatcttcacaatttatgttcagagattgcagtaaagacaggtgtaagaaattataaaaatattaatttggggaactaataaatgtccttgaaatcttcacaatttatgttcttctgctgtggcttcagctggtccctccattcggggtccctgacttcccgcaatagtgggtctttccaagctgttcttctgagagtgtataagtcttaaaatatctgatggttttataaaggacaattcccctgcacatgctctctttcttaccactatctaagacgtgcctttgttact

SEQ ID NO: 278826 - DNA, 1182 bp, Homo sapiens
tggtctgactagaatttcacctggctggaatttcccaatcctagcaagctggggggcgctgcaggtgaccagcgtgtatttcatcccttatctacaactgcataagacagacactcccagagcgactattttagagacctccccctgagaatacaatattttcccagggctgttccttgctgagaaaaagaattcagtgatatttcccctattcgcttttgcgagaagagaaatatgactctattctgcccagccccacaggcaggcaggccttatggttatctcccttgttccctgaaaatggctgttatcctgttcttttcaaggtgcccagatttcacattgttaacacacatgctttacaaacaatttgtgcagataacgcaatcatcacagggtcctgaggtgacatacatcctcagcttatraagatgacgggattaagagattaaagtaaagacaggcataggaaattataagagtattgattagggaagtgataaatgtccatgaaatcttcacaatttatgttcagagattgcagtaaagacaggtgtaagaaattataaaaatattaatttggggaactaataaatgtcctwgatcaatttctaaattgattttctatattatcttggagatcactgagtttccttaaaactgctgttttgaattcttgatcagaaaactcacaaattgccatctcatttgagtcagtcactggctttttgatttgwccttttggagagatcatggttttctgtttgctcttgtttcttgtgggtatacatctatgtctttgcactggagaattagttatttattccagttgtctctgtctaacttgttccagtttttattgaatacatttgcttagcaattctttactagtggattgctgcctccttttcagctctaggtgacaccttaagcctaggttcatctcagctctagtaaactgtcagaccactgcctgtcccaaattgggaaggtcccaaaagtattattctggcatcatgggaagcttggctaggggattataaagaggggacctggggaacatacctcctatagctgctcttagttagactctcctttggctgagttacagagcagagtttctgagctggagatggtagtcctgcctactttgtttgtttctgcctgtcctcagagatagtt

SEQ ID NO: 278827 - DNA, 580 bp, Homo sapiens
gatcaatttctaaattgattttctatattatcttggagatcactgagtttccttaaaactgctgttttgaattcttgatcagaaaactcacaaattgccatctcatttgagtcagtcactggctttttgatttgaccttttggagagatcatggttttctgtttgctcttgtttcttgtgggtatacatctatgtctttgcactggagaattagttatttattccagttgtctctgtctaacttgttccagtttttattgaatacatttgcttagcaattctttactrgtggattgctgcctccttttcagctctaggtgacaccttaagcctaggttcatctcagctctagtaaactgtcagaccactgcctgtcccaaattgggaaggtcccaaaagtattattctggcatcatgggaagcttggctaggggattataaagaggggacctggggaacatacctcctatagctgctcttagttagactctcctttggctgagttacagagcagagtttctgagctggagatggtagtcctgcctactttgtttgtttctgcctgtcctcagagatagtt

SEQ ID NO: 278828 - DNA, 580 bp, Homo sapiens
gatcaatttctaaattgattttctatattatcttggagatcactgagtttccttaaaactgctgttttgaattcttgatcagaaaactcacaaattgccatctcatttgagtcagtcactggctttttgatttgaccttttggagagatcatggttttctgtttgctcttgtttcttgtgggtatacatctatgtctttgcactggagaattagttatttattccagttgtctctgtctaacttgttccagtttttattgaatacatttgcttagcaattctttactastggattgctgcctccttttcagctctaggtgacaccttaagcctaggttcatctcagctctagtaaactgtcagaccactgcctgtcccaaattgggaaggtcccaaaagtattattctggcatcatgggaagcttggctaggggattataaagaggggacctggggaacatacctcctatagctgctcttagttagactctcctttggctgagttacagagcagagtttctgagctggagatggtagtcctgcctactttgtttgtttctgcctgtcctcagagatagtt

SEQ ID NO: 278829 - DNA, 580 bp, Homo sapiens
gatcaatttctaaattgattttctatattatcttggagatcactgagtttccttaaaactgctgttttgaattcttgatcagaaaactcacaaattgccatctcatttgagtcagtcactggctttttgatttgaccttttggagagatcatggttttctgtttgctcttgtttcttgtgggtatacatctatgtctttgcactggagaattagttatttattccagttgtctctgtctaacttgttccagtttttattgaatacatttgcttagcaattctttactagtggattgctgcctccttttcagctctaggtgacaccttaagcctaggttcatctcagctctagtaaactgtcagaccactgcctgtcccaaattgggaaggtcccaaargtattattctggcatcatgggaagcttggctaggggattataaagaggggacctggggaacatacctcctatagctgctcttagttagactctcctttggctgagttacagagcagagtttctgagctggagatggtagtcctgcctactttgtttgtttctgcctgtcctcagagatagtt

SEQ ID NO: 278830 - DNA, 535 bp, Homo sapiens
cattcaggtgtgagttaccgtgctattggcagtaaatgcaatgttaatgaatcaagygtatattttaaatgaagtatctttaaacagaaacacacatgaaataagattatgtgttgaatggccaattaaagtgtgaccagaggcttgcaggagcctacccctttaatgaaatgtaagtgcaaaaattacagttgatttgcattatttgtgatagttatattgtataaaatcaccgtgaacactgaattagtgaatgttgaatcattgaccttaaaatattgaaataacccagataatggctgcaagaagccaatgggttttgctcctccttgggctaaagaaaaatgaaaataatttagggtcatttgaacctaacagtttgaaaggttctcataccttgggggtgatgccacctggtgctttgggtatctctgaagggatattatgaagctgcttaagaagccggaagctggaaccaattgctgttggggcattgtcattgccgggacaatctcaacagaaacaccaagcaaag

SEQ ID NO: 278831 - DNA, 535 bp, Homo sapiens
cattcaggtgtgagttaccgtgctattggcagtaaatgcaatgttaatgaatcaagcgtatattttaaatgaagtatctttaaacagaaacacacatgaaataagattatgtgttgaatggccaattaaagtgtgaccagaggcttgcaggagcctacccctttaatgaaatgtaagtgcaaaaattacagttgatttgcattatttgtgatagttatattgtataaaatcaccgtgaacactgaattagtgaatgttgaatcattgaccttaaaatattgaaataacccagataatggctgcaagaagccartgggttttgctcctccttgggctaaagaaaaatgaaaataatttagggtcatttgaacctaacagtttgaaaggttctcataccttgggggtgatgccacctggtgctttgggtatctctgaagggatattatgaagctgcttaagaagccggaagctggaaccaattgctgttggggcattgtcattgccgggacaatctcaacagaaacaccaagcaaag

SEQ ID NO: 278832 - DNA, 535 bp, Homo sapiens
cattcaggtgtgagttaccgtgctattggcagtaaatgcaatgttaatgaatcaagcgtatattttaaatgaagtatctttaaacagaaacacacatgaaataagattatgtgttgaatggccaattaaagtgtgaccagaggcttgcaggagcctacccctttaatgaaatgtaagtgcaaaaattacagttgatttgcattatttgtgatagttatattgtataaaatcaccgtgaacactgaattagtgaatgttgaatcattgaccttaaaatattgaaataacccagataatggctgcaagaagccaatgggttttgctcctccttgggctaaagaaaaatgaaaataatttagggtcatttgaacctaacagtttgaaaggttctcataccttgggggtgatgccacctggtgctttgggtatctctgaagggatattatgaagctgcttaagaagccggaagctggaaccaattgctgttggggcattgtcattgccggracaatctcaacagaaacaccaagcaaag

SEQ ID NO: 278833 - DNA, 445 bp, Homo sapiens
attaggtcattccttagtatggttttgttattttgtgaataaggyctagcttttttcaactatatccttaaatagttattgctatccttcagaagaaacgcttctagttttcttattgatcagtctattgaaattatgtctgcactactaaatgatttagttagtgttccctgattcttgtgcattttgataatttcacaatcttttaaaaatttataacaagagttaaaattttatatctgctataggtcttcagatttctggtacagtatgacattaagtaatacttctgtatatttgtctccagttcagggttgcgggtggatagagcctcaattttgagtttgtacttcaataacacaacttcaacaaagttttacagtgaaagacatatttttcaaggaaaaaatgtgaagcaacattcaaaataatacttattaagttt

SEQ ID NO: 278834 - DNA, 729 bp, Homo sapiens
actatgttcaacattatgaagattttaaaaaataatttgaatgtattgcataatttacttttgattactttttattataaaactgtgtatccatgctgattttaaaagttttgaaactctatgaactatgaaataagaaaatacttgcaatctcctagcccacaaatgaaattaatttattttgatasatataattttatttttttctgtgaagatatgtcttctttcaaaactgagatgatatactcaatttagtcatctacattctattattttcattatgatgaatattttcaatataatcaaaaaagtcttagaaatataatttaattactgattccacatgtgaattgatatggtttggwactatgttcaacattatgaagattttaaaaaataatttgaatgtattgcataatttacttttgattactttttattataaaactgtgtatccatgctgattttaaaagttttgaaactctatgaactatgaaataagaaaatacttgcaatctcctagcccacaaatgaaattaatttattttgatagatataattttatttttttctgtgaagatatgtcttctttcaaawctgagatgatatactcaatttagtcatctacattctattattttcattatgatgaatattttcaatataatcaaaaaagtcttagaaatataatttaattactgattccacatgtgaattgatatggtttgg

SEQ ID NO: 278835 - DNA, 616 bp, Homo sapiens
agctgaactactctgtgacctagttgatttacatttcggtaagctcatcataacatggactgggttttggggatccggctgctgctccatgagctacagtttgagaagcattggcttacagcagggcttcttagcccaggsactatggacatctgactagctagctattgttgtgtgggtttttctgtctaggatgtgcataggatggtcactagcattctctagccgctatagactagacaccaccagcacctctcccaattagttacgacaataaaaaaaaaatctctagagtttgccaaatgtcccaccctggggttgttggggtggggtgcgggagcaaaactgccaaattgctacagttgtggaaagctggtcgtcatgtgatctctctcattaccattcacagcatctgaacgccagtctatagataaattactaaataccaggattatttgagaacaataacttcagtttgtcattaaacaattacttcatgaagtaacatagtgtacttagtttgtttggattaactcacaaagtcatatgtagttctttgcatttagtccacaaacgtatgcaagaccttttaacaccaacagcagatccaaaaatg

SEQ ID NO: 278836 - DNA, 616 bp, Homo sapiens
agctgaactactctgtgacctagttgatttacatttcggtaagctcatcataacatggactgggttttggggatccggctgctgctccatgagctacagtttgagaagcattggcttacagcagggcttcttagcccagggactatggacatctgactagctagctattgttgtgtgggtttttctgtctaggatgtgcataggatggtcactagcattctctagccgctatagactagacaccaccagcacctctcccaattagttacgacaataaaaaaaaaatctctagagtttgccaaatgtcccaccctggggttgtkggggtggggtgcgggagcaaaactgccaaattgctacagttgtggaaagctggtcgtcatgtgatctctctcattaccattcacagcatctgaacgccagtctatagataaattactaaataccaggattatttgagaacaataacttcagtttgtcattaaacaattacttcatgaagtaacatagtgtacttagtttgtttggattaactcacaaagtcatatgtagttctttgcatttagtccacaaacgtatgcaagaccttttaacaccaacagcagatccaaaaatg

SEQ ID NO: 278837 - DNA, 597 bp, Homo sapiens
gcctcaagtagtagatacaccatttttttttgttgaaatcattagatattctgtataaatctgaaaccagaagatcttaatgaattttgttgaccttttatacagaatttgattagttttcctcctttttttttttgaagtaaatgtcaggtttagcagtggtggaaaaagaaatattatggagaatcagaaatctcaatagtccacctaaatgttcaagtcctttaaatgcacaaaattttatatttggatcacaattttatcatgttaaaatgcatgagtggcaagtgtttatcataaagtcttctaagatggcatagcccttacgctcacccattgccaccagcagaccttccccacactccyctcaatttatcctgctgctttcctgaatactgagtttcaaacaaataattttaaatggcctatgtattgattgaaaggttctgcacatgtaccctaaaacttaaagtatactaaaaagacaagtggcatcaatgatcaaatctactaagctcctgaaaataacttatagtacatttttacataaattttctaatgatttccttatattttacttgtagcaagtttttttct

SEQ ID NO: 278838 - DNA, 554 bp, Homo sapiens
aatcagaaaagaatcaaaagcttgtagcatcatacaacgatactaactcaaaataaatcagagactcaaatgctaaaaccataaacacttaaagaaaacttgggaatacacctttatgacctttggtcaggcaataattggcttcttagatatgacaccaaaaacacaaatgacaaaagaaaaattagataaattagacttcattaaaattaaaaacatttgggcttcaaaggacactatcaagaaagtaaagacaacccatagaatgggagaaaatatttgcaaatcrtgtatctgaaaagaaattttatctagaaaatataaagaactcttacaactcaataataaagacaaatagcccaatttaaaagtgagcaacggatacaaatagacatttctacagtgaagatacacaaatggccaataagcacatgaaaaagatgatcaacaacattagccatcaggaagtgcaaatcaaaaccacaatgagataccacctcacacccactaggatggctagaatcaaacagtcagacaataacaagtgttagcaa

SEQ ID NO: 278839 - DNA, 534 bp, Homo sapiens
tgttaacattttactttaccatggtacatttgtcacaactaggaaatcaacatcactattaactatattactattactattaagtaaacatcatactttatttagatttcattatcttttccmgaatgtcctttcactattccagaatcccatttgggatacttagatttagtcatgtctccttaggctcctctggggtgtgacaatttctcagtctttccttgcttttcatgacctcaacagttttgaggagtactggtcaagtattttgtagattgtccctcaatttgggtttgtctgatgttttcctcatgcttagattggacttcaggtttttaggaagactagcacagaaccgaagtgcacttctttatcatgccatatcagggggcatgtgatagccacatgacattcctaatgatgttaacctttatcacttggccaaggtgtgattgacaagtttcaccaatataaagctactttttttcccctctccatactctactctttggaaactaagtgtagccacactca

SEQ ID NO: 278840 - DNA, 534 bp, Homo sapiens
tgttaacattttactttaccatggtacatttgtcacaactaggaaatcaacatcactattaactatattactattactattaagtaaacatcatactttatttagatttcattatcttttccagaatgtcctttcactattccagaatcccatttgggatacttagatttagtcatgtctccttaggctcctctggggtgtgacaatttctcagtctttccttgcttttcatgacctcaacagttttgaggagtactggtcaagtattttgtagattgtccctcaatttgggtttgtctgatgttttcctcatgcttagattggacttcaggtttttaggaagactagcacagaaccgaagtgcacttctttatcatgccatatcagggggcatgtgatakccacatgacattcctaatgatgttaacctttatcacttggccaaggtgtgattgacaagtttcaccaatataaagctactttttttcccctctccatactctactctttggaaactaagtgtagccacactca

SEQ ID NO: 278841 - DNA, 618 bp, Homo sapiens
atggtgattaataaagattacctatgagtgtgagaatgcttaaagctgaagactcaatagaccagaagatcaaggcttgtctgccccagatgacactacttcycatccatttatccacccccgccttgaagccacccctaagtccagcgctcactttcagatccccagagacacagctccactaagaatgaattcattcattcagggcctagagcaagaggacaggtgaaagtctgtgacccacctgtccttttcctatctcccattctggtggagtcccacaccatgaagggcctcgtatgtaagtctatagacccctccttaagcccatacattcaagcccagttcacatgctgccacccctcagacttagaaatgccctcatgggtggctcaggaaagaccccaatgagactccacgcaggcctcagagacattggagcagaggagtccagggtccctggtaccaggagtacagtggagaaacctagggtcagactccagttgggaatgtggttttggtcccttgtcccctgggaaagggcaaggctggaggaagcccagagcagggacacaaaagcaccgtgaccgtggcagttgctttccctcgtttactcaa

SEQ ID NO: 278842 - DNA, 1150 bp, Homo sapiens
atggtgattaataaagattacctatgagtgtgagaatgcttaaagctgaagactcaatagaccagaagatcaaggcttgtctgccccagatgacactacttcccatccatttatccacccccgccttgaagccacccctaagtccagcgctcactttcagatccccagagacacagctccactaagaatgaattcattcattcagggcctagagcaagaggacaggtgaaagtctgtgacccacctgtccttttcctatctcccattctggtggagtcccacaccatgaagggcctcgtatgtaagtctatagacccctccttaagcccatacattcaagcccagttcacatgctgccacccctcagacttagaaatgccctcatgggtggctcaggaaagaccccaatgagactccacgcaggcctcagagacattggagcagaggagtccagggtccctggtaccaggagtacagtggagaaacctagggtcagactccagttgggaatgtggttttggtcccttgtcccctgggaaagggcaaggctggaggaagcccagagcagggacacaaaagcaccgtgaccrtggcagttgctttccctcgtttactcaawaattccttttgagctgcttaatggacacataattttaatcagtcataggacacttgagcgggaaggaactggagaaatcatctactcctttattttacaggtaaaggttccggcttaaaggttatgcagttggttaacagaattatgaccagatctagcccttccggttctcagtttaataatagtgacttccagttagtgaagcatgccccggtgtacacttattttcattaatcctgatggcaaaccttagacctatctcaagattcaattttgtgcctaggaccatcctcccggattgcagtcccatgggcccagccctgtgatgtaatatgcaaaggctcagaaacctaatttggagaagaacgttatgggcactgaagacgtcctgcagtagacaggacaccccaaggcacwgctaagttgtgggtgcatgtctccagctggagctgtgggaatgaaagctggcataaagaatgttgggatgagggacatagacctaatcacatttccatctactcaaatgctgct

SEQ ID NO: 278843 - DNA, 545 bp, Homo sapiens
ggggcctgctcttacctccttctctctcctctggatagtactggccaccacaatgcccrtcagggtccaagtgtaggcaggattgggtcaggtggtacagatacacctgagaatggaagtgggtgaatagcagaagactgagcattacagcaggacaaaccttaaggagccaaggatctggaagcttccacagcatctcgagctcggtgtgggcagaggccattctgttctagcaggaacagaagttcctgtctcagggccttgggaaaccaagagtgacccaacaacaattccttcccacccacactttttcctaagacaaaagccttatgggacctcttcccaactggctttagtaagagggcaggctttcttcaaggagacaagaggaggagaggaggagttaaagtgtgagaatgggatggggaagataatgagcttcctcctgcatctaggcatgaaatgggattattctgagggtgttgatcaggaatgagtcagtttcgtttcctcttaggaagtctacttattgaatgctttatcaa

SEQ ID NO: 278844 - DNA, 578 bp, Homo sapiens
tggacttactcttttgacagcctacacgggccttctgtggacttactttcctgatacaaagatgggaattgctgtttgaaaacaggtgagtacaggcttagcacttctccataagccactgggagtgagcccttgacccctgaatcatttgggtaattcagcatctgggctgcaggtgaagagggactttggtgagagcacctagatgccatttccatcacagggtactaaaggggtctttaggggtctgtgtgggctagagacccagcaccttcctgctgagcaatggtaagttatttgtgatcactgtctcccgagccatcatcctcaaccttcagctcctccttcccctgcccacaaaatcttgggatatgagagaaggatcatgttgatcacagaatggtagcagagcaccattcattcattcaatcattcactatttagtaaatatgtcccacatgtcaggcactaaccaggctccaactcgcactratgaacaatacagttgtgctccctgctctcagggagcttacagtctagtggggcagacaggctttaaacaaggagacacaaaagaa

SEQ ID NO: 278845 - DNA, 603 bp, Homo sapiens
ggatgtggtgacccaacaaccctggtgtcaaatactctgtcactcaccagatcacatattagaaagtgtgttcccactgccggttccagaaaacaaacaccagtaatcacatatgcgtagagcaatcctagccatttcttttggagatggaagtgaaactctcccaactttctgtttcrtaaataaaggagagcagagacataactcttttttaagaagcataataattaagaattacactgtattctgtaataaccacttaaaggaccaagacagggaacaaaaagcaaaagagagggaaataaagaggagagaggcacagcaagagagtagaaggaactggatctacccagttcaattcaaccgacatttactaaggctagagaagattcatgttctcagagcaacgtaatagtcatgattgttgatatggtttggctctgtgtccccacctaaatcttatctcaaattgtaatttccacgtgtcaaagaagggacccgtaatccccatgtgtcaagggattggttatgtgtcatgggggtggttactccgtgctgttcttgtgatagtgagtgagttctcacaagatctgatggttttat

SEQ ID NO: 278846 - DNA, 613 bp, Homo sapiens
cccagatgggatgggctgtacttgctaaaacttgagcccttatgccaagtcagtattcctgctgtacacactaagacctaccaggcactctccacgtggtcctctttggggcttcgttcacaccaaaggatcatcccaatcctgcaaaacttcaacggaagtggcagggaacatagtaatactgaagcttgtgggcatgaaaggagttctgttttgaccaccatcaacttggtcacatgccaatcagtgtctgaccacgtgtgctccaagaataggtggatgctatagcttgcaccagataccatgatgtcactctatgagaaacaaagaggcagcagatgagaggtgtgctgtggatgaggcacttygccaactgccttccctagaaaaccatagctggccagccaatcgggattgagacaaacttctagctggagttacagctgtgatgttataccaccccatgagatcacacctcagtcctacccaggggcactctttagagagaggcaggtattgagttatattaaaacctagagaagatgatacaggagttgtttgagatgaaataaacttcctataagtaagaccagatgcctaaatcctgaaaaca

SEQ ID NO: 278847 - DNA, 1239 bp, Homo sapiens
ttgctgtctaatggcatatctgcacatcatcccctggaatttatttagcaaatgataaagacaagtatgtctaaataatgcacctcaccaaataagtaattatttatttctcaaaattaagaccagtcctatagtccatattttgaggaatgaattggtagaagactgctctatttaatgaaaagccaaggcaccaaatacaggtttttttgttttctttcttgttttaatttaacttttattttaagttcagggatagatgtgcaaatttgttacacaggtaaacttgtgtcatgggggtttgttgtacagattatttcatcacccaggtactaagcctagttacccactagttatttttcctgattctcttcctcctcctactctccaccctccaataggcccgagtgtgtgttgttccccctacatgtccatgtgttctcatcattcagctcccacttataagtgagaagatgcagcattyggttttctcttcctgcattcatttgctaaggataatggcctccagttccatccatgttactgcaaagaacatgatctcattcttttttatggctgcatagtattccatggtgtatatgtaatacattttctttatccawgtttgatatagagactgattaatctttggagatttaaaagaataatataaaaattttatgatttaagaaataccttttaaaacataggaagcaaagtacattttattgggtttttaataatttatttcttcttaatctttataggctggatagaacatccaaattaatctatacaattcatccacgtaataaaaaaatcacctatacccctcaagctattgaaataaaaaaataagttgaggaaatatttaataacaccttataaatgagtgtgcagtaagtatatcctaacacttttgtttgttttgatcctggttaggatagtaccagtgagaaaccttaaaaatgttcaagagtcaatttactttcctatcatatttgtttgataaacacaaggtcwcatgaatgaatatgtacaaataagattgaccaaggtgacaaaaaaattgcaaccattccaaagtgaagtgtgacttgcaattatttcttctgtcaccattcctctctgttagcataagtttctcattctctgtttgtatagtatagagttgactattcatacaaataattataagcattcatgagcaaaaataactaacttaattggagttaatcg

SEQ ID NO: 278848 - DNA, 532 bp, Homo sapiens
attttaaggcaggccattcaaacatatcctcaaattgaatgttagaaatccatccagttctttttgtatgaagttataatatacagagatttagaggactgttaacttatagtttttatctctgaaagtaaaaaaaatataaataacactaattgtatgttattccctatcaaatgtatttctagagaaaatattttttaaatgtaggttagtaaatctcaartttatttaataccaagataagctaatgaaagagaatattttaaaatgtgtatagactcaagtatttttttcaactgaatattaaaattctgaagccataatttaccttaattgttggcagcagttcagctttccatgataaatcaaccccttgcaggctttgaaataaatatgaaaatataattaaaggacaaatatatggaagtattacaaattataaataagattcagaggaaaaagaaaccatctctacacctagtagagatgtctattgagcctaatccaatatactctgtccacatatttccct

SEQ ID NO: 278849 - DNA, 551 bp, Homo sapiens
ttccacaatggttaaactaatttacactcccaccaacaatgtataaacattccctcttctccacaacctggccagcatctgttattttttgactttttattaatagccattctgactggtatgrgatggtacctcattatggttttgatttgcatttctctaatgatcagtgatgctgagctttttttcatacgcttatggccacacatatgttttcttttgaaattcacttaacacttgtatcaaagacaggccctattcccttttccctcctttcagaaccctttcctcctgtcttatctcctgttctaatccatccacagttaggtgagccagcagtggggataagatacctgcaaaggcctgatttgtggttccactcctaggggaaagtccaggattgttttcagggttgtgttttgttttgattgggaggggttggggcataagaatgtttttagcctacttaggatctttgctttgtacgaactacaccccagaggaattttgggatgcattccaaaataggaatacataaaactttctgtccc

SEQ ID NO: 278850 - DNA, 512 bp, Homo sapiens
ttcttaggcagacgacattcattttcaatttaaatcataatgaagaaatttctcagtaacttttctgtgtctctatcttgcatttcttatcattctttttctttattagggtcatgaaaaatgtgccttgttaatacttgacaagatacaagacgagagccttattaatgaaaaaaataatgcactgcagacgtaagtgtaactactaaagttggacttgaacccagggtcatagtcatttattcaataagtattaagagcctgctgtgtgccagactagctctggggagcacagtggtgaaagatgcagtcctggcttcccctgcatgaaggtgacagtcacatacctacaagtgctgaccaagctgggcagttttagttagaatccttcttttgatatgtcttcatttaattttgtgaagtctctstttttctttgctgatatttctggggtaatattataaatttagtgggctgttagaaaaattttatggactgacatatttggggaa

SEQ ID NO: 278851 - DNA, 546 bp, Homo sapiens
acctaagacatctgcacgtgagtgtgaggaaactgcctgaggccagagacgggaacatctgaaggcattaagggaaacagcacctggggttcacagagggccaagaatagtgcctgctcccaccagccagtgtggaaaactcttataattcattaagttgagtatgctgaagggattgcagaggaacatgaaaaaacttttgggggtgatggatatgttcagtatcttgatcaaattgtatactttaaatatgtgcaatttgttgtttgccaactatatcttaataaagctgttggctgggcatggtggctcacacctgtaatcccagcactttgggaggctgaggcgggcggatcacgaggtcaggtgtttgagaccagyctgaccaacatggtgaaaccctgtctctactaaaaatataaaaattaggcaggcgtggtggcacgtgcctgtaatcccagctactcaggaggctgaggcaggagaatcggttgaacccgtgaggtggaggttgcagtgaaccaagatcacaccactgcactccag

SEQ ID NO: 278852 - DNA, 608 bp, Homo sapiens
attttaaactactcaatgtttttagtagtcagagaaatgtaacataaaatcacaatgaaacaccattaaacctctaccatattaacagaaattaagaactcagacaataccaaatgttggaaaagatgtgtaacaatggaaactgtcatgtagttccagtgggaatgtaaattggtacagcggtttggtagtacatgaaaaagttgaacatgcacagaccataacccagtatttctactccatataatggaagctcttgtacatgtactcaggagacactgtacaaggatgttcatagtaacattgtttgtaactacaaaaaaaaaaaaaaaacagaaaaaacctaaatgttcatcaacagtagaatggctacataaagaatagtatatttatacayggtaccatggtgaaaatgaatgaattactcttaaatgtatcaccatagagaaatctgaaaaacaaccttgagaaagaaaagagaaagcaagttaaataagaatataaataatttatgtaaaatataaaaaacaggcaaaactaaatgacatattgtttagtgatacatacatatgctaatactatgataaaaaataagggaacaaggaaca

SEQ ID NO: 278853 - DNA, 487 bp, Homo sapiens
tttggccagcaatcctgcatacaaaatgcaaccacttgaaggttttgcccagagctatggcaataaagtgcatagcagcagttcagtgaactttctccattcttcagcctgcgcaaagcactggctgatgtagccagatattgttgtccatggctttaattatttagaagtagatatgaataatagggagcttgaagttgtctagagcttggtgtggtgctggctcaaaatagcaactaattcctatgtaagtttaaaagagcttggtatgggtaacctctagaagatcccaagccaagtagaaaatgtggtcaggaaaaggattcagcccttgaatattgagaaatcatgttgtcacagagaacacgtgacaacttccatgtgcaaacaaaacataacagatamcaggccattcagaaactgttactgagggacttgctcttggaaggctgaggataaattaaaataaatccaaccaacaccaagt

SEQ ID NO: 278854 - DNA, 524 bp, Homo sapiens
aacatccttatacattcatatttatgcattatggaagcattctgggacataaacccccaggggttgaattgcttggccagatggtatatgcatttagaattttgataaatactcccaaaattacctccaaaatgttggcaccaatttacactcccaccaatgatgactaagagagcctgtttccctacacgctcctcacactttgtatcaaggcactgactagttaaataaaggaatgtgtctctcacttcagaaagacatggtgataaagatcttgcctcattctcttattttcctttattttctctttccttttcataagtgccacttaatcctaagggaagaaaaaagaaatacttgtttggttttcagaatgttcctcaaaggtacatgaattctgcaagttatgaacaccaatcttataarcacccataccttacaaataaactgctcatttatatgtaaaaattaactatcctgaaagtgggaagacagtcccttttagatgctggagatggaaaaat

SEQ ID NO: 278855 - DNA, 572 bp, Homo sapiens
cttatgtccatcttatctcctttcgattttgtccagcagaaagtatactataatatgtaatgggaagtggcaagcaaaggtaatttaatcagaggctggttttgcctatctttgactcccccttcactacacggcaaagttctcttgctacttagttacacagttacttgttatagcatccagagatttttaattaaaaaggctttacttggggcgttaccaatgataggaacacaatttaacaatgaaagaaatcatttgtgttcgtataacacttatcctgaaagaatttcaaagtgctctagaamtattacccagttctaatttccacagccaacacccttgccttctgttttctaagggaaagaggaatttccagtatcttgttcccagttggaaaataaagggtgcgtgcttcccaatcacagacaggcaaggcgaatccggttactccctttcccttccccaaccgcagctcctgcagagtgtaaccctttgcgttctgtggctgggataaagtgcattctgattcataattggtccctcagggtgcctgttttgcagccaaccga

SEQ ID NO: 278856 - DNA, 571 bp, Homo sapiens
cccaggctggcctcaattgatactcctgcctcagcctcccaaagtgctgggacattactatagttttgtaacagattttttatatctggaagtctaagtccccaggttgttctttttcaagattgcctcatatattctttaccctttgcatgtctgtataaaatttaaaatcagcttttcaatttacacacaaaaaaaaaaccctgctgggattttgatgaatctgtaaatgagtttcrgaagagttgttattttcacaatctttcaatttatagaaataattatgtttttctacgtattgaaacagagttactttttctccataatgtattatagttttatggtaagggcatttaatactttttatgctgttgaaaattgtaattttttgtaagtgatatctttttaaaatttcattttctatttgatgttgctgggatgtagaaaattgatttttagaatattaaccttgtatatgcaaagggcaaagtcatttatttaggacatctttaatttttctcaataatgttttatagttttaatggaaataacattttatataatattttag

SEQ ID NO: 278857 - DNA, 524 bp, Homo sapiens
aattaacacgttacccactgctatgaaaagtgatcatcttccaagaccaccatccacttaaaatattgtagtaaaatacacaacataaaatttaccatcttaaccattttttgttgtacagttcagtgacatattcattgttgtacaactgtcaccaccatccatctgcacaamtattttcattttgcaaagctgaaactctgtatccattaaacaataactctccccccaccacccctacccttggcaaccactattctacttactgtctctatgaatatgactactctaggtacctcatatgagtggaattatgcagtatttgtcttctcatgatggcttttttcacttagtataatgtcctcaaggttcatccatgctgtagcatgtgtccgaatttctttcttttgtaaggctgaataatattgcattgtgtgtgtgtgtgtgtgtgagtttgttgggagggttatgtatgtgtgtatgcatacttcccttggagggattccctaacccctaaaaaaaac

SEQ ID NO: 278858 - DNA, 524 bp, Homo sapiens
aattaacacgttacccactgctatgaaaagtgatcatcttccaagaccaccatccacttaaaatattgtagtaaaatacacaacataaaatttaccatcttaaccattttttgttgtacagttcagtgacatattcattgttgtacaactgtcaccaccatccatctgcacaaatattttcattttgcaaagctgaaactctgtatccattaaacaataactctccccccaccacccctacccttggcaaccactattctacttactgtctctatgaatatgactactctaggtacctcatatgagtggaattatgcagtatttgtcttctcatgatggcttttttcacttagtataatgtcctcaaggttcatccatgctgtagcatgtgtccgaatttctttcttttgtaaggctgaataatattgcattgtgtgtgtgtgtgtgtgtgagtttgttgggrgggttatgtatgtgtgtatgcatacttcccttggagggattccctaacccctaaaaaaaac

SEQ ID NO: 278859 - DNA, 511 bp, Homo sapiens
actctgtattctactctgtagaatctggcttattttcaaataagttaaaaacaaatctttattgaatgcctattatatataaggcactaggaggtataactaacaagtttgagaaagagctttaaagcaattgagtggaataaatgtaagcttctaagagtcaatctactacatatttgggattttttttaaargaaaagaattaaataaagcttaatttaaaaacctatagtgtgagggaagggcactgagatcagcatagtttagtgaaattagttttagaaaacaactagatttccataccagactgcgtgattccttattcctgtgtataaaatctaggtaatatgaaggtggttactctgtgttaagaaaatagtctttgcctccagtaaataaaatgagtaaatgtaaaaggttttctaagaagctaatattctaatgattttactaaatatttcagttgagggatgattgccaaatgatttcaatatggtcttttcctttatga

SEQ ID NO: 278860 - DNA, 511 bp, Homo sapiens
actctgtattctactctgtagaatctggcttattttcaaataagttaaaaacaaatctttattgaatgcctattatatataaggcactaggaggtataactaacaagtttgagaaagagctttaaagcaattgagtggaataaatgtaagcttctaagagtcaatctactacatatttgggattttttttaaaggaaaagaattaaataaagcttaatttaaaaacctatagtgtgagggaagggcactgagatcagcatagtttagtgaaattagttttagaaaacaactagatttccataccagactgcgtgattccttmttcctgtgtataaaatctaggtaatatgaaggtggttactctgtgttaagaaaatagtctttgcctccagtaaataaaatgagtaaatgtaaaaggttttctaagaagctaatattctaatgattttactaaatatttcagttgagggatgattgccaaatgatttcaatatggtcttttcctttatga

SEQ ID NO: 278861 - DNA, 391 bp, Homo sapiens
  misc_feature (1)...(391): n = A,T,C or G
cagtgtacactagccagctctagggctctgacaacataatgagttgtgagatagtatactttaaagaaaaaaagaagagtttattttaaagcaaataactaaactgtattntaacttagcayaattaactgcagcatatttacttcatagccccttaacatgtcacttttaccaacaaagctttttccttcatattctaatcacaaaaatttctcaacaatttataacaatctgtaactctgaccttgcaataaatagtcataaaacgttatttttattttattactattatttttagagacaaggtctcgctctgttccccgagctggagtgcagtgggagtcacagctcactagcctcaagcaattctccagcctcagcctcccaaagt

SEQ ID NO: 278862 - DNA, 470 bp, Homo sapiens
tataacccatacttaatttattctttcattaaacctttagaacattctacccagtttcttcaatctctggaaaccyggcagaggtattagcaaccagtgaagtggccaacgtgcaagcaagtccatcacttatgcgccgtgcaagcaatgtttaagcatccctaagcttctgaagcacctcactgatttcttccctgcctctttctgggcaaaaccaaaagcaagttggtaaaggttgtgttaacacaggaaaagaacactcccaaacgccacccgataggagtcctagttcatcccaaaatacctctaccttaaatgtccttaaaaatcaatgatctctaggttttgatactcctccagcttgttctatgttaacaatagggaagaggagtgatgaagtatccaacagttattcataatgagcactaaaaaccatttttaccatcgatacttcaccagtgtgaaatgac

SEQ ID NO: 278863 - DNA, 470 bp, Homo sapiens
tataacccatacttaatttattctttcattaaacctttagaacattctacccagtttcttcaatctctggaaacccggcagaggtattagcaaccagtgaagtggccaacgtgcaagcaagtccatcacttatgcgccgtgcaagcaatgtttaagcatccctaagcttctgaagcacctcactgatttcttccctgcctctttcygggcaaaaccaaaagcaagttggtaaaggttgtgttaacacaggaaaagaacactcccaaacgccacccgataggagtcctagttcatcccaaaatacctctaccttaaatgtccttaaaaatcaatgatctctaggttttgatactcctccagcttgttctatgttaacaatagggaagaggagtgatgaagtatccaacagttattcataatgagcactaaaaaccatttttaccatcgatacttcaccagtgtgaaatgac

SEQ ID NO: 278864 - DNA, 470 bp, Homo sapiens
tataacccatacttaatttattctttcattaaacctttagaacattctacccagtttcttcaatctctggaaacccggcagaggtattagcaaccagtgaagtggccaacgtgcaagcaagtccatcacttatgcgccgtgcaagcaatgtttaagcatccctaagcttctgaagcacctcactgatttcttccctgcctctttctgggcaaaaccaaaagcaagttggtaaaggttgtgttaacacaggaaaagaacactcccaaacrccacccgataggagtcctagttcatcccaaaatacctctaccttaaatgtccttaaaaatcaatgatctctaggttttgatactcctccagcttgttctatgttaacaatagggaagaggagtgatgaagtatccaacagttattcataatgagcactaaaaaccatttttaccatcgatacttcaccagtgtgaaatgac

SEQ ID NO: 278865 - DNA, 560 bp, Homo sapiens
ccaaacactgacacattcttctgcttgtgtttctgcttatgtgaagccatgtgctgggcatgtagtaggtactgggcagacatttttggaatgaataaagaggaaaatggggacagcataagatgctgaaaggaataaatttcagtaagtttcaaaatatggaaaattttaaaaaattttataaaaaattaggtattttgagtgagctctttagcttgacacatgtaggtttctaagatgcaagcaacagaaaccaccttgggttaattttaagtagaagagatatttaataaatgatatttgaatgctcacagactctgcaggattaacaaagaaccgagcttataacaacaccttgcccagcaggggaagtctgtccccagccctacacctttggacacagtgtaccacatggaccaatgctgggtactgggctgtgctgctcacaccaggttctattgctgcccctaaacaatgggtgtcatgagtgctgttacaaccgtgctctccagaaatgattcyaggcaatccctatttctttgcatctctagctctcaggt

SEQ ID NO: 278866 - DNA, 529 bp, Homo sapiens
ttggcaaatcagtggcaagaagttccagcatctggacttttcagaattgatcttaagtcyactgtcatttccggatgcattattttacaactgtatccttggaaatatatttctagggagaatattattgaagaaaatgttaatagcctgagtcaaatttcagcagacttaccagcatttgtatcagtggtagcaaatgaagccaaactgtatcttgaaaaacctgttgttcctttaaatatgatgttgccacaagctgcattggagactcattgcagtaatatttccaatgtgccacctacaagagagatacttcaagtctttcttactgatgtacacatgaaggaagtaattcagcagttcattgatgtcctgagtgtagcagtcaagaaacgtgtcttgtgtttacctagggatgaaaacctgacagcaaatgaagttttgaaaacgtgtgataggaaagcaaatgttgcaatcctgttttctgggggcattgattccatggttattgcaacccttgctgaccgtc

SEQ ID NO: 278867 - DNA, 529 bp, Homo sapiens
ttggcaaatcagtggcaagaagttccagcatctggacttttcagaattgatcttaagtctactgtcatttccrgatgcattattttacaactgtatccttggaaatatatttctagggagaatattattgaagaaaatgttaatagcctgagtcaaatttcagcagacttaccagcatttgtatcagtggtagcaaatgaagccaaactgtatcttgaaaaacctgttgttcctttaaatatgatgttgccacaagctgcattggagactcattgcagtaatatttccaatgtgccacctacaagagagatacttcaagtctttcttactgatgtacacatgaaggaagtaattcagcagttcattgatgtcctgagtgtagcagtcaagaaacgtgtcttgtgtttacctagggatgaaaacctgacagcaaatgaagttttgaaaacgtgtgataggaaagcaaatgttgcaatcctgttttctgggggcattgattccatggttattgcaacccttgctgaccgtc

SEQ ID NO: 278868 - DNA, 595 bp, Homo sapiens
tattgcaacccttgctgaccgtcatattcctttagatgaaccaattgatcttcttaatgtagctttcatagstgaagaaaagaccatgccaactacctttaacagagaagggaataaacagaaaaataaatgtgaaataccttcagaagaattctctaaagatgttgctgctgctgctgctgacagtcctaataaacatgtcagtgtaccagatcgaatcacaggaagggcgggactaaaggaactacaagctgttagcccttcccgaatttggaattttgttgaaattaatgtttctatggaagaactgcagaaattaagaagaactcgaatatgtcacttaattcggccattggatacagttttggatgatagcattggctgtgcagtctggtttgcttctagaggaattggttggttagtggcccaggaaggagtgaaatcctatcagagcaatgcaaaggtatgacacagtgtttcttctcctgagaattcctgagacctatttttgacccttaaagcttttagcattttgattgtaagaatatagcatattttaggtgcatttatcttattttctttactgtgtagttga

SEQ ID NO: 278869 - DNA, 629 bp, Homo sapiens
attatgcaactacatttcttttcttaaatattgaatgtcttccaatgaaatgatctaaccaaccaacaacaaacctttctctacattgtgcctatctagacatggctcatttatttcattagaaggtaaatccagtggacaatttgttttgacaaggcaaactaaattcttcccctttacttttctctttacagcatgtctcctttgaatatttatcttgagttctcaacatcgttcattttgaagataagggtaagccagccagccctggaatctgtgctatgataatctgatgcagatcaggtgaagggcatcttgtgatttttgtttgtttttgtaaagaattctcatggatgtaagaaactggagagcttgcctgaaatagcttgcattctatcttaaattctttaagccattttttcatacaggcaatatccagatgttgttcctctatttaagagggaaaataagacaaaagcttttgtatagtgtcaaataactttgtgtcatacaacaaatattaaataatagaggttgttttttgagagctttaaaatttattgttaatcattcactcattcatttaaaaatatttastgaatattttctatgtcaaaactgtcccattt

SEQ ID NO: 278870 - DNA, 612 bp, Homo sapiens
aggtgtcactatgttggactcaagtgatcctcccaccttagcctcccaaaatgctgaggttacaggcatgagccactgcacctggcccaatttttagtattttgatatttgatgcccatcacttaaataacaacaatttggagtayctcacaaagcagcaaaacctgtcatagctaccctatgaattactattttctaaaaccttgtactttgctgaaactgaaaacagcaacttgagaccaagttcgtgttttcacaaacaagtagtttaactaaattaaaattttaaaaggctggatcccatttattttgagggcttttatgatactagatactaggtgaggtatctagggcttctatcatactatgatactagaaagctgtttgaatttttcacatcttgtttcgttattttcttgtggacactgattagtagggcaaacagaaactctagatattcttaggctcacaataaaagaaacacattttcaaaataaatccagatgttaatttaattctatttgttgaaataaatttttattctcttaataaggcaaatagccatttaaataataagtaataccaaaaaatgctggcaaaatcacagatact

SEQ ID NO: 278871 - DNA, 632 bp, Homo sapiens
tttagtattttgatatttgatgcccatcacttaaataacaacaatttggagtacctcacaaagcagcaaaacctgtcatagctaccctatgaattactattttctaaaaccttgtactttgctgaaactgaaaacagcaacttgagaccaagttcgtgttttcacaaacaagtagtttaactaaattaaaattttaaaaggctggatyccatttattttgagggcttttatgatactagatactaggtgaggtatctagggcttctatcatactatgatactagaaagctgtttgaatttttcacatcttgtttcgttattttcttgtggacactgattagtagggcaaacagaaactctagatattcttaggctcacaataaaagaaacacattttcaaaataaatccagatgttaatttaattctatttgttgaaataaatttttattctcttaataaggcaaatagccatttaaataataagtaataccaaaaaatgctggcaaaatcacagatactgatgaaaattcagaagcgttattagtctttttccttgaattatacatggcatttaattaaacagcacttctttagttcagcattccactttagcagtgataactaaaagcat

SEQ ID NO: 278872 - DNA, 596 bp, Homo sapiens
tgtttgaatttttcacatcttgtttcgttattttcttgtggacactgattagtagggcaaacagaaactctagatattcttaggctcacaataaaagaaacacattttcaaaataaatccagatgttaatttaattctatttgttgaaataaatttttattctcttaataaggcaaatagccatttaaataataagtaataccaaaaaatgctggcaaaatcacagatactgatgaaaattcagaagcgttattagtctttttccttgaattatacatggcatttaattaaacagcacttctttagttcagcattccactttagcagtgataactaaaagcatcaattctatgtctagttatagccaaggaatatcaacagaacactggggtttgtttgtttgtttgatacagggtctcgctctgtcacccaggttggagtgcagtggagtgatcaccacyctctgcagcctcaacatcctgggctcaagccatcctcctgcctcaacctcctgagtagctgggactacaggcatgcaccaccatacctgggtaatttttaaaatttatttgtagaggcagggtcttgccatgttg

SEQ ID NO: 278873 - DNA, 611 bp, Homo sapiens
tatcctgatttgatcattacacaatgtgtgcatgtatcaaaatatcacatgtagcccagaaatatgtacattcattatgtatcaatcaaaaaaggtctagattaaatacctgaaggytcttcttccctcttttaatttctaaaccaattgattacagtagagaagttttctttctcttgagagtgtgacagagttatatagggacaatgtgaacaatatttacactcagggctaacctggacatacatatatagctaaattaattagagaaagattttgaccagtaatctttgtaagtattcctcagaaatgcttacccacgcttttgtgtgttgaaccatcagtttatatctgtggtggaacttttaggtttagttgtgtagccaaactgcctttgtttgaatgtgtttggcagagaactggaagtgttagttattttgatcttctatatgaaggcaatagctagttaatttgaccaaaaggcacagttagggcacttctgggacatttttacagtggtgattttatatactgctatggtttgcaaagcaatttgagacaaatggcactgatgagaagtctctgaaatatgtgaacacaagaagtcagaa

SEQ ID NO: 278874 - DNA, 631 bp, Homo sapiens
cttaaactgatcttcttgccagaagaaacacattttacttaatttagttttctttcacttaatggtcattatttcagcttaagattktcaaagaaaagaagaagaagaaactaccacatttattgagcatgtcttatgtgttggatgctgttatgtgcatgcaggcatttaatcttcaaaacacttctgaggagtgcatagtggtgcaccattttacagatgatcaaactgaggctctgacggcttaactaacttgctcaaactcagctgctaagtgactgagctgaaattgaggccctatctgacctcaaaattagtacaactctttccattgagctatgcaatttcagaagtcaactaaataataatctaaaatactcagtttcagtttaactcatgatctagcatttaaggtgaggcccatgatactgttcatttaatgctcagtttactacatattttagaaaatcaattgtttttgctactattaactccgtaattcaagcaaattgttaccaactaattcaagaaaattattttcactcagatgctccctaattttgcctgaataactatcaagtatgggatttatgtagagaaatgttaacatatatgacattttgtgccagaa

SEQ ID NO: 278875 - DNA, 631 bp, Homo sapiens
cttaaactgatcttcttgccagaagaaacacattttacttaatttagttttctttcacttaatggtcattatttcagcttaagattgtcaaagaaaagaagaagaagaaactaccacatttattgagcatgtcttatgtgttggatgctgttatgtgcatgcaggcatttaatcttcaaaacacttctgaggagtgcatagtggtgcaccattttacagatgatcaaactgaggctctgacggcttaactaacttgctcaaactcagctgctaagtgactgagctgaaattgaggccctatctgacctcaaaattagtacaactctttccattgagctatgcaatttcagaagtcaactaaataataatctaaaatactcagtttcagtttaactcatgatmtagcatttaaggtgaggcccatgatactgttcatttaatgctcagtttactacatattttagaaaatcaattgtttttgctactattaactccgtaattcaagcaaattgttaccaactaattcaagaaaattattttcactcagatgctccctaattttgcctgaataactatcaagtatgggatttatgtagagaaatgttaacatatatgacattttgtgccagaa

SEQ ID NO: 278876 - DNA, 631 bp, Homo sapiens
cttaaactgatcttcttgccagaagaaacacattttacttaatttagttttctttcacttaatggtcattatttcagcttaagattgtcaaagaaaagaagaagaagaaactaccacatttattgagcatgtcttatgtgttggatgctgttatgtgcatgcaggcatttaatcttcaaaacacttctgaggagtgcatagtggtgcaccattttacagatgatcaaactgaggctctgacggcttaactaacttgctcaaactcagctgctaagtgactgagctgaaattgaggccctatctgacctcaaaattagtacaactctttccattgagctatgcaatttcagaagtcaactaaataataatctaaaatactcagtttcagtttaactcatgatcyagcatttaaggtgaggcccatgatactgttcatttaatgctcagtttactacatattttagaaaatcaattgtttttgctactattaactccgtaattcaagcaaattgttaccaactaattcaagaaaattattttcactcagatgctccctaattttgcctgaataactatcaagtatgggatttatgtagagaaatgttaacatatatgacattttgtgccagaa

SEQ ID NO: 278877 - DNA, 595 bp, Homo sapiens
gagagatacaccccaatacaataatagctggagacttcaacagcccactttcrgcattgaagagatcatctagacaaatcaacagagaaataccagacttaactggcactatagaccaaatgaatctaatgggtatgtacagaacatttcatctaacagctgcagaatacacattcttctcctcagcacatggatgtttctcaaggatagaccatatgttaggccaaggacaggaccctaagggactgtcaactggttcctgacatctaaatattcatagctgtcttgatcctgtcctaatagggatctaattcttcagcttttccttttctctgtgagctgtctcatgacttcctattaattcctcttttggcttttgtgagccagagctgatttatgttggtatacaaagaacaccaattgatatatttggtgattatatgtgtttcattaaaatgaaacgtcaaatattctattttttattagatttaaaaattagaataataataataatagctaataaataacatttactaagtgcctgccactgttctaggtgatttacctggattaacccatttaatcctcacagaaa

SEQ ID NO: 278878 - DNA, 592 bp, Homo sapiens
gcagtttcctaagttgttcaagaagactcatatgaataagaacaaaatgactaygtagatgtatctggcaagattacatcgaacagtgttgagaataacttttggtcaagtcatccaggcatgtcatatgcaacctgacaacgcattaaaagcagacctggaaactctgccccccaaatggctgcttaaaactcacaggtgggacaattttgtgttggttaagcaataatattggaagtagagtactatgttttccacacttcaaaatctacctaattctcagcaaatggaaactcaagcagtcagagggcgcatgagaaacttttaatttatcaaagactttttccacactaaaaaaggcttaaagtaatacatctttaaatagtgttacctattgcatttaaatgtgattgaattgtgtcttattttaattaggttcattatgtattatgtattgaatattttcagtaacagaagaatctgaatatcaaaacattttaatcatactgatagagtacagaatttatggatattcaatacggttaaagcaaaacattttgttttggcgtctgtaaaaatttaacatagctta

SEQ ID NO: 278879 - DNA, 559 bp, Homo sapiens
caaagaattaaagtggctccaaagatgtactcatcattctctgtacttaaaattgatgtagaatctatgtttgtacatgggtcctattcggatgcactattggatcctattctcttccgttatcatagagttaacgtatcttgagtagttctrtttcctatgtatgaatatcactacttggagagaagacttgtaattcagctacatttacagaagagaaaatatacccatagtagagattctcttctcctccctttttggggggagttaagtttgtgatgaaaccacaacattgagtcaaaatcctctgaatacctggcaaacttcactgtaactaaccactaagtctaatttagccctgtttccaccctgggaatttggcctagctttggatctggtccggaaaacccatttgatgctaaggtcaggtggtggtcttgtctcagaactctcaaatgtatccctagtctgctaaaaagtgacttcttgaatcagatgttgtggtaaccagtctccccaaaactttctaaaatgtgaataatcctggccagagaggatc

SEQ ID NO: 278880 - DNA, 581 bp, Homo sapiens
acatttgtgattcatggaatgaggtcaaaatattcaacattaacaggagtttggaagaagtttattccaaccctcatgaatgactttgaggggtacaaaccttcagtggtataagtaactacagatgcggtggaaatagcaagaaacctagaagtgaagcctgaagatgtgactgaattgctgcaatctcatgataaaacataaacagataagttacttcttatggatgaaaaaagaaagtagcttcttgggatggaatatactactgtgaagatactatgtagattgttgaaaagataacaagagattagaaatattacataaacttagttgataaagcagcagcagattttgagaggactgactccaattttgaaaaatgttctattgtcctgtggataaaatgctatcaaacagccttgcttgctatagagaaatattttataaaaggaagagtcaactgatatagcaaacttcattgatgaatttattgaattatrctaaataatttaaccttgctcaagtttcagcaaccaccaacctgatcaatcagcagccatcaacactgagacaagactctc

SEQ ID NO: 278881 - DNA, 592 bp, Homo sapiens
atgtgagtcggaacttaccccagaaatggtcacaagagggaataaataatacaggggtggcagctggagggtgatttgcttagacaatattaacttaattttcacagtcaggggctcctcaagttgtttttgaatattactgtcacagtaatcaagaacgtaatatagaagtcatctctgcatttcattttccacaccttcttagaacctgttagggragcaggaattaaagaagactgctgtccaccaccctgaaaatcattcctttctgtgatccacaacaccaggggccaagagattagggcatacaaatatggtcatttcaaaaatacgctgatggggtgctggtggtatattggtgagcctagctgccttccaaaaatatgctaatagaaaaattctttgtttttttaaaatcttgttgtatatcaaatttttccaaagtaatttttgacacattataattaattcccctgcaatcttccaggggagcatttcattaaagcataaaaatccacatggggtctgtgaccagctctgactgcagtctgtcaaaatcagttctctattttcctacaataatgtttaaccc

SEQ ID NO: 278882 - DNA, 568 bp, Homo sapiens
tatactaaccatctcaaaatgcagtgacttagacaacaatgatttagtttttctcacagttgtctgggttgcccggcttagctgagtggttcctctcctctacatagagtctcctgagattatctgaagcttggctgggggctgcaccccygccatgcggggtctcatcattcagtaggttagtttgagcttttattcatgcttcttcaatctcaaaagggcaaaagcagaagcctcaaggtctgtaaagacttgagttcagaagttcttgaatgtcacctccactagattttgttgatgaaaaccagtcacgagcctgacccaaattctaagagcaggaaaataacaagagaaggagctggtttgcacagtgatgggggcagttcttggcagccatccttgaaaatggtttaccacatactatggaatactatggaacagttcaaaggaatgaattaattcacatagattcctaagacttactattgaattaaaacaaattgtaggatgatatatggaattcattttctgttactgtgtagcagtttaccacaaatttaccttaaaa

SEQ ID NO: 278883 - DNA, 585 bp, Homo sapiens
ccagtggattaacctggactagctgttaagggttgtcttgcaccaattatgcctgtttgtattttattggcctatgttgataagagaatatgtcatgtaattttaaaagaactaakaataatattttaggatttgacatactgcatttaaagtgggacccattgaataaacatgattaactcacacaacacaaaaggagtgacctatctgtaatattttatattttcttaatctttgggtttagagcattttaaaaattcagtcttttaaagtcattctcacttctggctggctcattgcaacaaaacttccatctacgacatcgtctttttgagatcctgaaactattttatgggcccagagtacagcacaagaaaaatgaatccattttttgatggccactgcggttatgggaaaaaaaaatcatctttttcctgggtggaataatggcttttttcactcgcagaatgtctcttctgtagcatagcattttcaggactgtaaaagcctctgcccaggagtagaagctgaggtttgtaggggtcgcctgcccaagggggcttctctgggcactgtgaccacttg

SEQ ID NO: 278884 - DNA, 568 bp, Homo sapiens
tatactaaccatctcaaaatgcagtgacttagacaacaatgatttagtttttctcacagttgtctgggttgcccggcttagctgagtggttcctctcctctacatagagtctcctgagattatctgaagcttggctgggggctgcacccctgccatgcggggtctcatcattcagtaggttagtttgagcttttattcatgcttcttcaatctcaaaagggcaaaagcagaagcctcaaggtctgtaaagacttgagttcagaagttcttgaatgtcacctccactagattttgttgatgaaaaccagtcacgagcctgacccaaattctaagagcaggaaaataacaagagaaggagctggtttgcacagtgatgggggcagttcttggcagccatccttgaaaatggtttaccacatactatggaatactatggaacagttcaaaggaatgaattaattcacatagattcctaagacttaytattgaattaaaacaaattgtaggatgatatatggaattcattttctgttactgtgtagcagtttaccacaaatttaccttaaaa

SEQ ID NO: 278885 - DNA, 585 bp, Homo sapiens
ccagtggattaacctggactagctgttaagggttgtcttgcaccaattatgcctgtttgtattttattggcctatgttgataagagaatatgtcatgtaattttaaaagaactaagaataatattttaggatttgacatrctgcatttaaagtgggacccattgaataaacatgattaactcacacaacacaaaaggagtgacctatctgtaatattttatattttcttaatctttgggtttagagcattttaaaaattcagtcttttaaagtcattctcacttctggctggctcattgcaacaaaacttccatctacgacatcgtctttttgagatcctgaaactattttatgggcccagagtacagcacaagaaaaatgaatccattttttgatggccactgcggttatgggaaaaaaaaatcatctttttcctgggtggaataatggcttttttcactcgcagaatgtctcttctgtagcatagcattttcaggactgtaaaagcctctgcccaggagtagaagctgaggtttgtaggggtcgcctgcccaagggggcttctctgggcactgtgaccacttg

SEQ ID NO: 278886 - DNA, 604 bp, Homo sapiens
gaaagaaagcaaaggtctgcacagtttctcatgtttgtgtagtgagatggggggaraaacttacaatcctggatctaaaaatcccgcagcacagctttaagatagaaaataatgttgtgtgtatctgtgcatagtgtcatggtattctgtagcagcttaatcaatgtagtatattatcactcattctttacatcttaaaaatcctatcacttgggaatttggtgtttatcaatgcttaattttccttattttttattttatactattatctgagaattgtgcttctttttctattgcttttaaatatcaaagacatttttttaaaaattagtttcagtatatagattctctgccctttcccctcaagtatccttgcttttttcttttttgtaccattgacaatttaagaataaatggacactattttggcctaaagttaatgtatttccaaaatccttttcattaatcaggaatgtacaataaaagtgctgtataaaagcttgtattccatgataaaaaatactcgaagacacttgactattgtttaatgtcaatcttgtggttggggaatgttgtggttattggtattggtgttatcatagca

SEQ ID NO: 278887 - DNA, 569 bp, Homo sapiens
ccagcctggcgaattctagccataccggttgtctactctcaaaccctgtttcctgttaagaggtttatcaatgacaatacgtgcccagtgggacatggaacctcatcattaattctaatttcacccttgccttgagatcttgctctgccgtttgccttgtgatcttttattgccctatgaagcatgtgatctctgtgacccactccctattcgtacacccctccccttttgaaatccctaataaaaacttgctggttttgcagctcaggtgggcatcatggaacctgtcgacatgtgatgcccacccccagaggcccagctgtaaaatttctctctttgtactctttctctttatttctcagagcggccaacacttagggaaaatagaaaagaacctacattgaaatattgcaggctggttcccctgataaataattataattattacattaatttaaaacctggctgtatttagggaaataacccattttgtagacctgttgtgcattatctggatatagtgtcaatcctgayttcaaactgttaaccaggcaagtaaaagccagtga

SEQ ID NO: 278888 - DNA, 544 bp, Homo sapiens
atgtgttatgtttcatatttgtgtcactcacaccaccatttcatttaattaagtaaattagggaacttatgttagaaaaaaattacaattagacatgaaagggggcaattaagcataaagaaaatagagcaacccattggagaggggcatcattccatcacattcatctgccaaaatatttaaacacggacagcctgagtaagatgcaaataatcacagaactaacaaagggttaccccctttacagggctcgtatgtccatagctaccttctgcacttcttcattgtagccgccatgcttcctcttgttcctacttttctgtatggaatakgaattgaatcacattagctaactcatttagaaagaaggtgaatggacaagtggaaatggtaactggggggaaaaggacccaactatggatacagcttctgcgactaccaagacttatggcctcagatggtcacttaaagtctctgggttctttgtttttcatattttaaaagaagggaatttagagtcaccaattaatgtaaatagctaaag

SEQ ID NO: 278889 - DNA, 563 bp, Homo sapiens
cctcttgtccgtagatctgtgctaggaaccagtgaggtacatcaacacctattcatktcaccataaccttgtccctcattttgaaaaggtgaaaatagagttgaagtgaagttcacagcccaaagtctcactccagcacatgctatattcatctatactgattgttatacacacaacacctgtttcagtaagtaccctggaagttaatcagcgaagataagtgaactcttaagagagctcaattgtaatttacagttctttagaaagtgcttcctttctctttccttattttttttttaagccttaacaaaatgtggtaaacaactgtaaatatgtagatcggcagtgagtacattgagtgactgagtgcacacaggctgggaaaagaaatctaaaattctgtttgttgatagagtggctaagtctttgcacagttatttataacattttaatacacaataaggttataaagtatttttattgagagcttttatttatgtctgtggcctataatcttgagaagtctcaagggtttttgattctgctttaagcaattgttcttt

SEQ ID NO: 278890 - DNA, 548 bp, Homo sapiens
gcaagggggatatctacctccatgatccagtcacctcccaccaagcccctctaacactgcggattacaattgaatgtgagatttgggtagggacacagacccaaaccacatcagcgaggtattacctgggaaggacagtggagtggagggaagctgagtagagcgtttgaaatagaacagaggtttctctattctgtaatttcccccsccaagtctccaaccgtgttcagagaatgtagaagtcttagggcaaaacaaacacataaacaaagcatgatattaacctttcttctaccctggccagtgtctaactcatctgctgtattcatttcctttggttgctataaccaattaccacagacttggtggcttaaaaggacagaaatttattgtctcacagttctggaggccagatgtttgtaatcaaggtgtctgcagagccacattcccttgggctctgaaggggaaatctattctttgcctcttttagcttctggtggctgccagccatccttggcctgtggccatgtaactccagtttctgcctc

SEQ ID NO: 278891 - DNA, 764 bp, Homo sapiens
aatcaggcacctttcaacataagcaacattttgctgctattctgaacaaaccataaagacttattgggaggaaaagatgtgaccttcatttaaactggctttattagatttcccttctaggcccaggcatatttagtcaaaggagagcttggatcagagactgaactgtttttgagaaagtctgtgcgctgaagccttgcagggaactatccttggtgctggcctcgaattccttctgccaacacctctcttacatgctaatttgatcctaatctttctatagacaaagttcctatcactgtggtccattgtgctcattgagatacacttctcgcttgatgaatatttttagctatggtccagccaggattcagcsagacctctagcatcacatgcaactcaatgctagcctgtctcttctgtcctgctctattcctgtctatgtcacccaggatacccaccagggcagttcattccaatgcgcccttacaaagtgctgtgagtcatgctgttgagaagggtgagagactcacttccaagggagtaaatgcatcagggagggcaagacattctgcaactggctactgtagctatcctttcaagtaataatggcgtctccctgtacctacttcccccatgacctggtaaccattaatatgactatgacaagaaaacatgacaagcgtcaaggtctgatggttctaatgcagacaggtcagttcatacacatcaccccagcatgtaacacccatgaaccatatgac

SEQ ID NO: 278892 - DNA, 649 bp, Homo sapiens
aagtccaaaatcaaggtgtcagtagggccatattccctccaatgcagcgggaacctatcccttgtctcctgcagcttctggtggctgctgccttccttggcttgtggctgcatctctctctctctctcacatcttcacattgcatcctcctctatgaattctgtgagaggatatatgcattaagggaccatctggataactcaagataaactcctcctttaagatcaataatcagagtaagatggtggaatacaaggctttgccgattgttccccctacaaggacaccaagttaacaacttcatayacagaaaaaaaaaacaccttcataagtaccaaaaatcaggggagtattcacagtacctgattgtaacttcatattgctgaaagaggcactgaagagatttttttaaaaatcctgaatcactgacaccatccctcccctacccccagcagcagcagaggcatggtgccaatagcatctcttggtgctgggggagggagaacacagtgattgtgaagcatcaaattcagtgctatcttgatagagcagaaaggaaaaccggaccaaactcagctgctgcccactctgagagggagcatttaaaccagcctcagccagaggggaatcacagatcccagctgttgga

SEQ ID NO: 278893 - DNA, 1299 bp, Homo sapiens
aagtccaaaatcaaggtgtcagtagggccatattccctccaatgcagcgggaacctatcccttgtctcctgcagcttctggtggctgctgccttccttggcttgtggctgcatctctctctctctctcacatcttcacattgcatcctcctctatgaattctgtgagaggatatatgcattaagggaccatctggataactcaagataaactcctcctttaagatcaataatcagagtaagatggtggaatacaaggctttgccgattgttccccctacaaggacaccaagttaacaacttcatatacagaaaaaaaaaacaccttcataagtaccaaaaatcaggggagtattcacagtacctgaytgtaacttcatattgctgaaagaggcactgaagagatttttttaaaaatcctgaatcactgacaccatccctcccctacccccagcagcagcagaggcatggtgccaatagcatctcttggtgctgggggagggagaacacagtgattgtgaagcatcaaattcagtgctatcttgatagagcagaaaggaaaaccggaccaaactcagctgctgcccactctgagagggagcatttaaaccagcctcagccagaggggaatcacagatcccagctgttggawaagtccaaaatcaaggtgtcagtagggccatattccctccaatgcagcgggaacctatcccttgtctcctgcagcttctggtggctgctgccttccttggcttgtggctgcatctctctctctctctcacatcttcacattgcatcctcctctatgaattctgtgagaggatatatgcattaagggaccatctggataactcaagataaactcctcctttaagatcaataatcagagtaagatggtggaatacaaggctttgccgattgttccccctacaaggacaccaagttaacaacttcatatacagaaaaaaaaaacaccttcataagtaccaaaaatcaggggagtattcacagtacctgattgtaacttcatattgctgaaagaggcactgaagagattttttwaaaaatcctgaatcactgacaccatccctcccctacccccagcagcagcagaggcatggtgccaatagcatctcttggtgctgggggagggagaacacagtgattgtgaagcatcaaattcagtgctatcttgatagagcagaaaggaaaaccggaccaaactcagctgctgcccactctgagagggagcatttaaaccagcctcagccagaggggaatcacagatcccagctgttgga

SEQ ID NO: 278894 - DNA, 465 bp, Homo sapiens
agtggcttttggactaattcttgcagaatttgaatagcttcactggtggtggatgggagtcacattctacgagggaaaatgagaagtagatctggaggcaggaaagcaaaggcatatattttaagaatgaatcccaagtatccatggctatctgcacatatagtacatgaggaagaacagggagacataagggcataggaataagtatgtgtttcaaatgccttgctgtgtggttcagtctttgtcttgcggacagtaaggatgggtccatggaaggttttcaatcaaataattgaaatgataaaaattgttgtttgaagagatkgacctgctattgggtgaggatgatggagtgactcactagtcagggaaacaggttagaagactttaagagcagttcaaggacaggaaatagaggcattggtcaaggaaagaggaagctgttgattggaaggaattggcagt

SEQ ID NO: 278895 - DNA, 626 bp, Homo sapiens
aggaaaggaagcctcaaaacacttatttaaaaacccaccatggctccgaattctaaagaaatggagtaagcacactcccttgcactaactacaacaaaaaaactcctgaacaaaatacatatagcaactatttgagaactctaaaaataataacaataggtaacttggggagggtcagacctcaaagaatgactcataaagcagtcatttttgtgcttgtttcttgtaaatttcctggtttatattgaggacagccttgattttcaaactgtggaacagacacaaacagaaaatcaaggaaatccaatactttttggctaaaagaaaacggggtgtctgtaggctagagtagayagggaaatcttttttttttctttctccctttttttattctccctgccacgtactgagtcaagcaagtctcagcaagaactgaaaagtatgcaaggagttgcaaaaagaaaaaaactagagaaaaagatcccttaatcctatatatcaagtccttggctaacccctaaggtacacatgtttagaagtgacctgaagctgcataacaagagctttgaaaacataactagaatgtagaccatcgtgcaagtctcagatagtgccaggctggaaca

SEQ ID NO: 278896 - DNA, 607 bp, Homo sapiens
gagcttctatttgtaagtgagagcatgtggtgtttggctttctgttcctgtgttaatttgcttaggataagatttcacagcagttttaaatgaagggtacattaataaataaatttatcaaaaatgccaccacagcatttttgatctcaatataaaatgtagcaggcattcctcccagcacacacaggttaaagactgcatcatcggttcagtccatgatttttctgttgacacacatctggtgaatacaatgtgctgaagcaatacaaaactaaaacaaggcttttgatggaagaggtctaagaatcataacatactgagtgtgtcagaggaagtcactcgtgctttttcactaaaagaagctttacaggtgggtgggtggaaggggatggagaacagttcacactctccatctcatcctgacctgggamctccttcctgtttccttggctggtgccagcatttccatctttcttacccacttctgccatgttgaagctcagctgggcattgtatccctggaggaacagtggacagagcaggggctttcctcttttgaggcacctacgtagacagactcactctctctactcggaaaataactgtc

SEQ ID NO: 278897 - DNA, 266 bp, Homo sapiens
taagtggaaggataatgttgaaggttcacagtaaatccaaatatgatcttgctgattacaaagtttaacaaagtttttattaaagggcctgatgtttaatattttaagctttgtaggccacataggtaggtctcctgcatattcttcttcttttataacaattrtttaaaaatataaaaaccatttcttagctagttggtaatacaaaaacagtcagggtggggagatgggaagggtagttttggcctgcaaactgtagtttgctt

SEQ ID NO: 278898 - DNA, 443 bp, Homo sapiens
gtaacttatgggagatatatttgaatatcttaaaacataaatcaccttaggcatagcagatgattttattcttttaaatattcacagtgcattggaaaataaattattggttattttttcatgggctttaatccacatatcctgtctctgttggtgctttgaggtgctcagcatgaaaactcgttgcaggcctgggttcggcatcctgtgaatgctagcaaaccrcctgccttccgtggtacccaggacttgtggagcccagcacctgctttaattttgaccaagtgaatcttgggactgttccagcccacgttcctttcatgttgctcaatagcaaccctttaactaaatgtttcatctggcaaaatgagatgaaaaataatttctggtaaaagtaattttctaagacctttttggttattcctcacctactttgtgttcag

SEQ ID NO: 278899 - DNA, 571 bp, Homo sapiens
taatgaattatgtaattatcctggaattaaaaagagcatacatattttccattgaattcaataaacttttattttataccaaccttgtttatagcagtgtgctgaggacatrcccaaggtcagataatgccatgtctctgattccagaaaatgtagtccaatgtggtagatgacattcacagataattgcgtcatggtgtgggatgtaagaaatactagagaagtattaggtcactgcaaaagtattcgtggttttcgccattacttttaatagcaaaaaccatgattacttttgcaccaacctaatataaaagcgcaagaactagacagtctagttggaggagaaaggagaagttacaggctggagattagcagataaatttttatcagatagaagttgaaggttgaggaatattgtagcacattttcctccatttccagtcctgttaataaggcatgctagatgtgcttctgaatgaataaaggagtttaaatacttccctctgtaaatgtttaggatgttaattctgagtaaaggtgatacaggatataaaatcagtgtttggagaaa

SEQ ID NO: 278900 - DNA, 1266 bp, Homo sapiens
tggggctttagcactacatgggccagacctggtcctggaggggctgttggtttatgtcatagcattataatctcaaaagtttagtgtgtttatgtacaggctgtaggataatgtgttcctaatctcrtggtctttgatctcctaggttaggccaaaccttgccagatgatagagtgtgcagcaattgtagtggcatttagttgtgaaagatcttaaggcctctgggctattgctccaaattcaagatcaaagactctgatcctaaaaggaaatttaagctgcatggatgtgctgatggttgtttgcaaatgacttaaaataaatctttacttccagtttactagctaaactaaactagaagttatcttgatttgttctacaatatatcatcacctaaaatattacctcccatggccaactattgaagtttgtaatagattatcaaatgtatttgtcagtaatatcggtttcacctgcatttggcttattacctagaagtcaaggtgatctaacacccattgctgagacacttaaaaacccatcactctgtgtcctcctatttctgtggggctcctctggccctcgtaaataggatgtgggtaggactcctatgctggagccgctcaaawgatccaagagtcaagggagaactgtagtccaatcagccaaaaaggaaatctgagtgaatcatccaaaaaacaaaaaaagaatagaaaacaggtatcaaaagtgatacaccgagccaagaattagggttcctggaagagaagtaggaaggagctgagaacagagagtgagttctagttttaaataacaatctgaagcagttcatttttatcttaaagtatggaatcaaataggtcagccaccttgaaaacgccagaagatggtgtgctgcgagatatcagtttagataaactgtatatatatatatatatagtttatatatatatgaatagtttatatatatatgaaagaactaataccaggaaagaataaataagctattttatatagatttcaacaaaaattattaatgtcaaaataaagcaatataacaatatagacataatgggtatagccaatttaagctctgaaatgcacacacagaggatgaaatgagaatgttgggcawcatttgttgcattatttgatctatctactagttattttgtctccacatctcattataatagccagatgcagagctgtaggaaaacatgactcccagcaatggcacctgtccttttggtgagtaattcaaaa

SEQ ID NO: 278901 - DNA, 609 bp, Homo sapiens
tactcttcttttccctgaatggcatattttttgaaagtcagaacrggtgtttttgtcttgtcaaagtctattatggctgggaatataagtttttaaatgaagcttgaatgggcctacagagcactccaaagcatagtcaaattgttgagagtatatcctgaagccaacggtatccccccaccccgtgctaaagaaaaagctgaataatttcacatatatcacgtatataaatatacagtaactttaagtagtaagagaaggagagaagttatctgcatggctttgtattttgttgtttttaaaaaacaaatacaatacgaaaatatttctttagttcagaaaagggaaaagatggctaactttaaaaactattatcaattacttgggtgacaatatcttttaagcaggaaaaagtaagctcaactagttctgagtcatatattgaaatatctctaaatatatgaccctttgttctaacccagtgcacacagactaaccttctaatctcttatttggttgccttaggttgatttgcttaaggagggagaatctggggaaatggcaggtgctagttatccagttagatgtctctgtcattgtgagtatata

SEQ ID NO: 278902 - DNA, 609 bp, Homo sapiens
tactcttcttttccctgaatggcatattttttgaaagtcagaacaggtgtttttgtcttgtcaaagtctattatggctgggaatataagtttttaaatgaagcttgaatgggcctacagagcactccaaagcatagtcaaattgttgagagtatatcctgargccaacggtatccccccaccccgtgctaaagaaaaagctgaataatttcacatatatcacgtatataaatatacagtaactttaagtagtaagagaaggagagaagttatctgcatggctttgtattttgttgtttttaaaaaacaaatacaatacgaaaatatttctttagttcagaaaagggaaaagatggctaactttaaaaactattatcaattacttgggtgacaatatcttttaagcaggaaaaagtaagctcaactagttctgagtcatatattgaaatatctctaaatatatgaccctttgttctaacccagtgcacacagactaaccttctaatctcttatttggttgccttaggttgatttgcttaaggagggagaatctggggaaatggcaggtgctagttatccagttagatgtctctgtcattgtgagtatata

SEQ ID NO: 278903 - DNA, 609 bp, Homo sapiens
tactcttcttttccctgaatggcatattttttgaaagtcagaacaggtgtttttgtcttgtcaaagtctattatggctgggaatataagtttttaaatgaagcttgaatgggcctacagagcactccaaagcatagtcaaattgttgagagtatatcctgaagccaacggtatccccccaccccgtgctaaagaaaaagctgaataatttcacatatatcacrtatataaatatacagtaactttaagtagtaagagaaggagagaagttatctgcatggctttgtattttgttgtttttaaaaaacaaatacaatacgaaaatatttctttagttcagaaaagggaaaagatggctaactttaaaaactattatcaattacttgggtgacaatatcttttaagcaggaaaaagtaagctcaactagttctgagtcatatattgaaatatctctaaatatatgaccctttgttctaacccagtgcacacagactaaccttctaatctcttatttggttgccttaggttgatttgcttaaggagggagaatctggggaaatggcaggtgctagttatccagttagatgtctctgtcattgtgagtatata

SEQ ID NO: 278904 - DNA, 510 bp, Homo sapiens
catgtgccatggtggtttgctgcacccatcaagccatcatctacattacgtatttctcctaatgctattcctctcctagacccctaccctccaacaggccctgatgtgtgatgttcccgtccttgggtccatgtgttctcattgttcctgaagtttacttttctagcaaatacaaaaaggatcgtaccagaaagactggtgctgacttcctttaccctaaattcatctaaaaactctctttctttctttctgctgtcctaagaattagctttgcccctctctttttatacttattctcatgatgagcagtgcagcagtatttccagtttcatgggtcytcccctctttaaaattccattacttgtaatatataggaacaaatatgtttcttctaaaacctgtaaatattgcttattgtgactctattcattaacaagaaacacgtattaaaagtagtgattttcaacagactatggactatctagatcagtcggcagcacttcctaacta

SEQ ID NO: 278905 - DNA, 520 bp, Homo sapiens
ctaacagtctgttatagaaaaaaaaaagttgatcaattattgtaaaaaatgtgaatttaaacttttttttagtttaaattaaagaacaacaagggcagaaaataacctctccaaacacttttccaaacttttgtctccctcaatttgggtatgaaattttacatgttcataatttcttgataattcactgcttatattcaaaatagaartgagctgaattagaactcaggagacctgggagtcctttcttggctactaagatggcataagacttgggaatgaagtacttttataaaacatcataaaactttcatgtctaatgtctggactgtggccagaattactaagtaggcacaggaaaataactggtgtttcagatgggttccataccaaaaactaaacaaaatctgttttactctgggtgccacattttcaattttcatttcctttccacccatacacatagacaagctcttcagatagcaccctaccactgctctgatttaaaaataaccagagc

SEQ ID NO: 278906 - DNA, 578 bp, Homo sapiens
acaagttactaggtctaaagaaatgcgcaccaaaacatagataaacactccttgcgttcataaattttagatgcttttccaggtcccaccagcctgaggactttaaatcaaggagcactmaccaaagaaaaggcaaaacaacaaaaccctgtcactcaaacacccatcagtggacacactggacccctagcctcctccaggtgtcatccgccccgtgccatggctcaagaatccctgctattgttgtccaagtcttttatcctggacccctgggcagaagtagtagggccttcagtcatgaccacagggcatgtttcttccctctcagcattattttcacctcctgcagtggccactttcactggagctatggtcacaatatgctaaattcctctaagccccacactactttctgcatatggccccttccaaccaccaaggtctccagctctcaaaaaccctgtgcttgctacccctgggcttcatacgtaggctgtacccaacaaagacaggctagctcagaaataagctgctgtttagagtcaggcacagcctgctgttgagtaaagagttctttc

SEQ ID NO: 278907 - DNA, 592 bp, Homo sapiens
aaggagcaccgaaccacacttgtaaaatatatactttgcttgtgtatgcgtgtgtgtgtttgtgtgtgtgtgaaattccactttctagacatggaagataaagcagtggaatcatttaaaaaatattttaaaggcgtgatagctacatttagggaggtgtcaccaagttttatgtaggacttttgatgcaaaaaagtatttaaccacataatacatatcagatcagggcatagtttgctcacagagcaaaggttgaaggcagcacattcctgtgtgaaacagaaacaacaggctttggtctaatcaatttggagaacatggaattcaatttggtattaaattttttaaaacaggatgctccctttgagccttgccataaggcaatgcttaaagcattattagcaaaaatccaaaccaaactctcctgtgttaggytcaagtatgcctgttacatacttacctatataatcatatctactctactaaagaagcactttatatattttttgtagagacagggtgtcactgcgttgcccaaactggttttgcattcctggactcaagtgatccttccacctcagcctcccaaaat

SEQ ID NO: 278908 - DNA, 548 bp, Homo sapiens
tggtgtaaaagctttcctatttctcaacatcctctccagcatctgttgtttcctgactttttgagaaccatctttagtactttaaaacaaatctttaattgaaaaacacataaactgaacagaagtataaccttgagtaaattacttaggctccttgcacttaaatgttaccttctataaaatgagaataatagtgttatttatgtcacmggtttttggaaaatttaacacatataaagtacataacaaaatcccaatatttggaaggtaagcaaaccatgctaactattattattaaaaagagttctcaaacatggagtctcaatggaatgatatttcaacaataatatcttaaaagtaataattaaagtacactgaattttcttaattttttaataaaataaattagggtgagtttaaagtgctcactaaaataacacctatttaactgattggcattctaataagatttcctgagtgagagacgtaaaggtgatgttatgagtcatattctgtaaatcgtgctctccgtctgtgtcaaaggttgt

SEQ ID NO: 278909 - DNA, 1139 bp, Homo sapiens
aaatcccaatatttggaaggtaagcaaaccatgctaactattattattaaaaagagttctcaaacatggagtctcaatggaatgatatttcaacaataatatcttaaaagtaataattaaagtacactgaattttcttaattttttaataaaataaattagggtgagtttaaagtgctcactaaaataacacctatttaactgattggcattctaataagatttcctgagtgagagacgtaaaggtgatgttatgagtcatattctgtaaatcgtgctctccgtctgtgtcaaaggttgtgcttacagaagtgtcccatgcccatgaatatcaactgtcatgggtgttgttggagaaaagtaagctgaaagtctcttatgyatattgtttgtaaggtgtgaggaaagatcagtaagagatgaatgagacaggttatgtagccagttgaaaaagaccttgaggtcatggtaatgaatttgaattatattctataagaaatgtgaaaccactgatttttttttaagccgtgaagaacaatcctttatccattcacttaacaaacactgatggctgggcatggtgacttacacctgtaattctagtactttgtgaggccaagwgaactatcagcaagatagacatggtcattgccaacctaaccagtagggacttgggacaatgagtaagtwgcagcactgtgctgaaataggttacaaaagggaaacatcaagtcagaaaagtttactgtgaggataataaaatggagaaataaagtaaatgcaaagaaccagagtataatcaacagaataacaaaaaaaatataaaaccagtgtataatcaacggaacaacaaaaaatatatacactatacatatgttgataatactctggttctgttgagatatatacacacacacacacacacacacacacacacacatatatgtatatcattgctggttcacatccttggagattataagacattcatttttattggtcattacacatacatattacacacgttatatgataatgctcatgaaaataagggtatctggtagacatgcctaacagaatgagaatgacttctataacagtgcatgttcaaagtcttggacagaataactacatagttca

SEQ ID NO: 278910 - DNA, 519 bp, Homo sapiens
gaactatcagcaagatagacatggtcattgccaacctaaccagtagggacttgggacaatgagtaagttgcagcactgtgctgaaataggttacaaaagggaaacatcaagtcagaaaagtttactgtgaggataataaaatggagaaataaagtaaatgcaaagaaccagagtataatcaacagaataacaaaaaaaatataaaaccagtgtataatcaacggaacaacaaaaaatatatacactatacatatgttgataatactctggttctgttgagatatatacacacacacacacacacacacacacacacacayatatgtatatcattgctggttcacatccttggagattataagacattcatttttattggtcattacacatacatattacacacgttatatgataatgctcatgaaaataagggtatctggtagacatgcctaacagaatgagaatgacttctataacagtgcatgttcaaagtcttggacagaataactacatagttca

SEQ ID NO: 278911 - DNA, 396 bp, Homo sapiens
ttcccctccccataggttggagggtgtatctgaaagtatcaccactgtaattatgccttggtctttctgatgaacagccctcatttggaagctccctaggcactgccagccaccagtcaactcagtagcatataaaaagacatttctttggagagtctaaggattttaggagatgtatgtcaagaaatgggctgaagatcaaatttttcaatatcacaattcctctctattcataamatgctgagagcttttactgtgaatggctatggagtttatcaagtgctttttctgtaccaagtaatatgatcctacgatttttttccattatagactgttgagatggtgagttacaatgtttgacttttgcatgttaaaccagtcttacatagctggaat

SEQ ID NO: 278912 - DNA, 396 bp, Homo sapiens
ttcccctccccataggttggagggtgtatctgaaagtatcaccactgtaattatgccttggtctttctgatgaacagccctcatttggaagctccctaggcactgccagccaccagtcaactcagtagcatataaaaagacatttctttggagagtctaaggattttaggagatgtatgtcaagaaatgggctgaagatcaaatttttcaatatcacaattcctctctattcataacatgctgagagcttttactgtgaatggctatggagtttatcaagtgctttttctgtaccaagtaatatgatcctacgatttttttccattatagactgttgagatggtgagttacaatgtttgacttttgmatgttaaaccagtcttacatagctggaat

SEQ ID NO: 278913 - DNA, 529 bp, Homo sapiens
ctgcaagtccatattttcaaatagcctacttactaaaatttattcataaatcaaaataaatacagcatttttgccatcattcacagacatatacagaatggcaaaaaacctgtcaactaatatatacattcttagctgaagtcaatcaaggtgmcactttcttttgtttcagttcttatgctggaagcaagtgtcctttatgtgatctagttaatgccatagtttcatatttttgtactttcagttggtgatttcactgtttattatgacccctaagcatagtgctaaagggttgtccagtgttcctcagcccaagaaggctatcgtgtgccttatgaagaaattacatgttagataagcttcattcaggcatgagttatgatactgttggccgtgaattcaatgttaataaattgcaatatgtattaaataagtgtcttttaacagaaacacatataatatgtggttatacattaatcaatcgatgaaaatgttgtgaccttctggacaagtttgcaggaacctgacc

SEQ ID NO: 278914 - DNA, 574 bp, Homo sapiens
ttttgtgggagggagcaggagaagggaaggctgtgattatcacattttaacaatgtttgttgcatcccaagcatctttattaaagatttatttcaaataattccagctgcaagggaaggcccagttgatcttgcagcaggtgaaacatcctatagaagtatttgtcaaaatgtggtttccaaaccaaaagcagcagcatcacctggtgacctgctagaaatacaaatttctgggccccactccatatctactgaggatggggcccagtaatctctgttttgacaaactctctaggtgattttgatgctcactaatgtttgagaacatttgccaagtagcaaacttagtttgccragtagctacattaatagctgactgagacatggcatgagaagaatagagtcatcttcctttccctttaagatacctgtacaaatgttttaataaagttaatttagtttcatatatcctttaatttctaatatcatatgtcttagtgaaagcaatattcaacttttatcttattgtgattatattcacgttgttctcttctaagccatgttttacgattaca

SEQ ID NO: 278915 - DNA, 574 bp, Homo sapiens
ttttgtgggagggagcaggagaagggaaggctgtgattatcacattttaacaatgtttgttgcatcccaagcatctttattaaagatttatttcaaataattccagctgcaagggaaggcccagttgatcttgcagcaggtgaaacatcctatagaagtatttgtcaaaatgtggtttccaaaccaaaagcagcagcatcacctggtgacctgctagaaatacaaatttctgggccccactccatatctactgaggatggggcccagtaatctctgttttgacaaactctctaggtgattttgatgctcactaatgtttgagaacatttgccaagtagcaaacttagtttgccgagtagctacattaatagctgactgagacatggcatgagaagaatagagtcatcttcctttccctttaagatacctgtacaaatgttttaataaagttaatttagtttcatatatcctttaatttctaayatcatatgtcttagtgaaagcaatattcaacttttatcttattgtgattatattcacgttgttctcttctaagccatgttttacgattaca

SEQ ID NO: 278916 - DNA, 495 bp, Homo sapiens
acattaatactgcaggaaacatagttctagaaaagatgatggattggctttaaagtttaaaaccatttataattttcaaatatgcacttagagttgatttgaaatatttcatacttaagattcctaatggagttaatcaatcacagctgatttcgttgcaagcacagcaccaaccagaaacaacacagccaagacatatgtgcaaatcaaggcatatcactcctacacatttagtgatgaggaagggatattttttcactaagmcttcattcttactttgttaatatgtggtattccaatatagtcagaaactcagttatgaccatagactcttataaccacagcttttcaattctatcttactttctttgaaaattttaaagttatcacatatttttattactctttggattttggaaaccaaaaaagaagggtccacattttgtaatctctacctagatgcatataactttcaatcaatggcccagaagcaag

SEQ ID NO: 278917 - DNA, 1125 bp, Homo sapiens
agttgatttgaaatatttcatacttaagattcctaatggagttaatcaatcacagctgatttcgttgcaagcacagcaccaaccagaaacaacacagccaagacatatgtgcaaatcaaggcatatcactcctacacatttagtgatgaggaagggatattttttcactaagccttcattcttactttgttaatatgtggtattccaatayagtcagaaactcagttatgaccatagactcttataaccacagcttttcaattctatcttactttctttgaaaattttaaagttatcacatatttttattactctttggattttggaaaccaaaaaagaagggtccacattttgtaatctctacctagatgcatataactttcaatcaatggcccagaagcaagggattcatgttaaggcttttggaatgtattcattacacatacacacagtatagaaacagaatttaagagaagcaaggagagaaaggggggaaaattccctatttattacagcccctttccacattcacaaagcttagtgatggcctccctgatgacttwagttgatttgaaatatttcatacttaagattcctaatggagttaatcaatcacagctgatttcgttgcaagcacagcaccaaccagaaacaacacagccaagacatatgtgcaaatcaaggcatatcactcctacacatttagtgatgaggaagggatattttttcactaagccttcattcttactttgttaatatgtggtattccaatatagtcagaaactcagttatgaccatagactcttataaccacagcttttcaattctatcttactttctttgaaaattttaaagttatcacatatttttattactctttggattttggaaaccaaaaaagaagggtccacattttgtaatctctacctagatgcatataactttcawtcaatggcccagaagcaagggattcatgttaaggcttttggaatgtattcattacacatacacacagtatagaaacagaatttaagagaagcaaggagagaaaggggggaaaattccctatttattacagcccctttccacattcacaaagcttagtgatggcctccctgatgactt

SEQ ID NO: 278918 - DNA, 540 bp, Homo sapiens
acaccataaatgatgaactcccattaatataaatatcctaataaactgtgtaatctatggctacattggaatatcattaacaatatcttatattcacttgctatgactgttgctgctgcctatgctactgctactgaccttaaaaaccacatgttaatcatatcaatatttttcaactatgttttgtatcctctggaaaacactrggaacatctaacactgcccagatgactgatgttttagatgtttaaatgtctgcttgtaaaaagacttctttcagaatatatttgatttgatttcgttccccattcccaaccattcttggctatattgatctcaattttaacagtaaatattatatgtgtgctatgatttgagtgtcttttttcaaaactcatgatgaaacttaatcctctatgtgacagtgttgagaggtagaacccttaagaggtgattaagccatgagggttcttccctcatgagtgagttaatactttcatggattaatgaattaatagattaatagattagtgagttagca

SEQ ID NO: 278919 - DNA, 480 bp, Homo sapiens
gagggttcttccctcatgagtgagttaatactttcatggattaatgaattaatagattaatagattagtgagttagcatggagtgggactgatggcttcataagaagaggaacagagacctgagttagtacactcagccccctctccgtaagataacttgagctcttttgggactctagagagtccatgccatcagatgacgctcctcaatctyagactttctatcctccagaatgtacgaaataatatttttttccttgtatgttacccagtttcaagtattctgttataagcaacagaaaatgaacgaacacacacacacacacggaaagagagagggaaaagagagagagatagaagtatgatgagacagtattgctgatacaaagactgaaataatcgggggggagttccaattttaggtttattttttgctcttacaagaaagattctagttagtaaatgtataggataaatgcg

SEQ ID NO: 278920 - DNA, 578 bp, Homo sapiens
tttgactgtctgatagaattcagctgtaaatactcctggtcctggactttcttttgttggcatttttttttattactgattcaatcttgctgcttgttattgaccaataacaagagtttctttttcttcctcatttaatctagtaaggttgtatatttccagtaattttccatctcttctagatgttctaatttgtgygcataaaggtgttcatagtagccttgaatgatcttttgtatttttgtggtattggttgtaatatcccccattttatttctaattcagcttatttggatcttctctcttcttttcttggttaagcttgctaatggtctatcaagtttgtttatcttttcaaataactagttttgtgtttcatttatcttttgtattttttgtttcaattttatttagttctgctctcatctctgttatttcttttcgtctgctgggcttgggtttagttttttcttgtttctctggttccttcaggtcttatacttcttttctatctctttgtccctctatggtaaattctgggtaatttcttcagatatcttccagctcactaattatgt

SEQ ID NO: 278921 - DNA, 929 bp, Homo sapiens
cctagcatgtgtctgattaatatatagtaaatgctatatgattgttgaattaatgtctcctttcttaagatagatatctttttagtcttatgttataaattaagtcataatatattaagaatgaaagtttatatagttatgttctaatgattgatgtcactatttttatctttctaacagctgttaatcaacatagatttattcttctatcatttcatgttaaaatcatactttttaaatatcagtgattatatcttacatatcgtaaatatttttatcaatctcaataaaacacatgagtaattctatgtgtcaagactaaaagcaaatcaatagtacaaatttaatcattaatttattctcagttatttcaatattccagtttctttgaaagaaamaattatctatggagcatttatctcagtaccttgccactgtaattaaacatacatttaaaaaatatttcttaataatagaaaaaaatgggctaatcttccacatataaaaggaagaattataatggaaatataaagaacatttaataaataggataatttttatagtwtgggtttcctggcaaacaagatccgtgatagagatttgcacacaagtgttatattgaatggtgttctttggaataacacttgtgaggaagtgagggaagcaggattagaaagaggaacaaatgaaactgttaaatagtgtcaaccgagaactcagctgatcacactgggactttggagcttgtatttctctctctctctctctccctctctctcwctctctctctctctctctctctcacacacacacacacacacacaaatgcaaacatatttattttcttaaacttactttcttgtatttaaaaaaaccataagattcagagtcatattgacttgctattacatgtctgtctttgtccaagt

SEQ ID NO: 278922 - DNA, 568 bp, Homo sapiens
ttgttatatttacagataattttggagaatttaaactaagaaaagatggagataggatttcctgtcatactctataggtatcaacaattcggtcttcacagttttatactcattgtacataatgaaattaatactttttgtaaaatatcaaaaataagaataaaactatacactagaaatagcaaatatcaaaagtgaccaggtgtgactgctaatgccctctattggtgataggcaggttgcacaggttttaattctgccacttatttgtgaacattggtaagttcaaagttcatgagcaaaggacaatctgtrtgtgtgtgtgtgtgtgtgtgtgtgtgtgtgtgtatatatatatgaatttccatcttgagcaaaaataaatgtcaaatgtgtggcagggaatgaaagcagcttatgtttattttgtttacataattttattgaatgcttacaacaagcctgtaaagtgaatattgtttccattctgtacattttggagctaagggtcagagagaatagttacctccaagtcacatattttataaaaggcagagccagaatttaa

SEQ ID NO: 278923 - DNA, 580 bp, Homo sapiens
ggatgttccaggagaatgcgtttccgtctgcctatgtattgtctttatgaactccagcaaaacatgatttatcataggatactctattctggactatctagctacgctactggataccattcattaggaacaagyttaattcacctacttgtatgcatatgagctattcctttttcctctaaatccactattcataattgcataatcctatgtggcctcagcaaactgggtcctgaattgtgcctaaggaaattgaaaactgatttcttcccttgaaaaatactaagacaaccactctaggggccatattaacagaacattagttggatgtcttcaatgtctccagttttatccttatatcccttttcccaacaggtgaaaaccctttactccccctaccaatctctacactaaatgtttatgaggggccttcctattcactcattggggtttatctttctgggcatatctttcttgtcctacttattttctcccaatgttaataaacacatgttattctcacaataaatagggttttcattggaattagggttgcttttatgccttccctagttataca

SEQ ID NO: 278924 - DNA, 1068 bp, Homo sapiens
ggctaggccagaaacatattacgtctggaaaatcatttcaataacacacaggctcatyggtggtatactaactagggtactttctgaaataatcacttagaacatagcaattaaacaaaattatcccagactgaaaatgcactctgaacagagagttatcgtcatcatcataatattaataataatcaaataataactcatacttcacatggaaatgcatgtatgttttccatgatttacacaggctggctgaatttaggtaaacccattaacttggaagattaaaaacatcatgggtagtgaactatgaaatgtggttctcatgaaggcaatcgtgtcagaaaactttatcataatgaaactgcttcttcttggaaatgctctatcagacttttggacagactatgttaattgcaaagaacagttattgactgtgtttctagagctcatatagcacagtaattattaaaacaaacaagatgaaattagttatttatctgttttgtcttatattctgagttcaaactctggaatcataggtgcattatawattaaacaaaattatcccagactgaaaatgcactctgaacagagagttatcgtcatcatcataatattaataataatcaaataataactcatacttcacatggaaatgcatgtatgttttccatgatttacacaggctggctgaatttaggtaaacccattaacttggaagattaaaaacatcatgggtagtgaactatgaaatgtggttctcatgaaggcaatcgtgtcagaaaactttatcataatgaaactgcttcttcttggaaatgctctatcagacttttggacagactatgttaattgcaaagaacagttattgwctgtgtttctagagctcatatagcacagtaattattaaaacaaacaagatgaaattagttatttatctgttttgtcttatattctgagttcaaactctggaatcataggtgcattatataggaatcggtcattatattcactgatgcctaaggacatcattagatttttcttaaaacttactttctcaccctttaa

SEQ ID NO: 278925 - DNA, 578 bp, Homo sapiens
accatggctgattctgttgtactttggtatcagtgttccaaatgctggcgtacgtccaaatgctggctcttttcctcataaaatgatcatgtggcttcttcaaagacttacccgttgtgaatcatataacactgttctttgacataagcactcactagttggcctgtgtaacccccgactttagcctctgctctgacacccctgcagcctctctcttctggttgacytcttcctggcaggacatcatattagggagtgttaaacaagccagtgtggtcatacacaatatttaagttatttttggtaaacaatgggtgcatcccccaaagaaatgtgagaactatctctgctctatcctgctctgctaaacctacctctattttactgtacccttgctgtcagatgttattgaaaataaatcacagaaaaattctactgcacacagatatttattaagcaaatattcagaagcaagcaacacaaaatagttcttacaaggttctctgaaagttcaatgatggtccagctctctgaacttttaagtattcctaaaagcaccttcctaaaaaggtgtattc

SEQ ID NO: 278926 - DNA, 573 bp, Homo sapiens
gtttacaaagtgtaaactaaaaaatggaaacaaaatgtcactcagtcattctaacaggctagtgctttaagatgactccaacccagctctcttccataatgttgtgagaaaagtgtctctaccatgttctgaaagcccagccttccccacaacaactttctttccctcttcttgctatcaaagcarctccatttagtctctttccatcagacttttccgaagtgagccatgtgagtccacccactgggatccctaagttccagggtacattgttcaaattccgctaagaagtctgaaaacttctgctctgattcaatggcctgcagcttagcaactatccagccaggaggctcaccaaggactaagttctcctctggcaaaaaaaaaaacctcttgtttcacttaagattttcttggagctctctgggcttgagatgaggttggaggctgggagctatagaaggtgaggtggtgggtgttggaaagcaggtccctcctctgtccaaggaatgaaaggggcaatggcacagcccttcctaataaaaagtaggcgattctcttgctcctctgcaa

SEQ ID NO: 278927 - DNA, 605 bp, Homo sapiens
accaaatacttatgcattaattatttattgctgtgtaacaaattactccaaaaccctattaaataactaacttctattttcttgtagtttttatgagtcaggaatctggatacggcttagtgtgatgcctttgttttatggtctctcataaggctagaataaagatgttgactgagatagagtaatctcagtgctcaactagggaagtgtgttaggctgttcttgcattgctataaagaaatacctgagactgggtaatttattaaaaaaaaaaggtttaattagcttatggttctgcaggctgtacaggaagtatggcgctggcatctgctcgacttctagtgaagcctcagggagctttcagtcatgacagaaggtgaagtgggaacaggcaggtcacatggcaaaatcaggagcaagaaagtagcgggcaggtgccacaaacttttaaataaccagatcttgagagaatttactattgcaaagacagycccaagccatggagggttctacccccataactcaaacaccttacactagaccccacctccagcactggggattacaattctacgtaagatatgggcagggacaaatattcaaac

SEQ ID NO: 278928 - DNA, 609 bp, Homo sapiens
ccccttatgtagacagaaaacttaattctagtgaagcatgtctgtgacccacagaggaaactattaaaccattactgctttacaatgatccagaaaaaatgtttgtattttctttatatacagagtacattttcccagcagttgaaggctaaaagcagcagtaagtcaagcttctgcctcaccccaccatggtctctcaaaagtagttaccagtcatgggggcatcaattcgtaaaagtccctgtccaaggattccttcctgaaggtttggaaatgtgcccatcatgcaggtagctaatacattttgaaaataaatgggactgctctctccckaagctcatttcaagtttcttccacttcagctgattaatgcatgggctcacccacagtaactccaccctaagagatagggtttctaacagttggtgcaaagaccaggataggcattttgcccagtttgcaaaactgtaacaatcctggctaacacagttttaaaatggtgatgtcctggtaagacaaagccagttcacttagagaagacacttcatttttatcttatctttagctagtttaacaaaatttctgacaatgatgcacaaatgagggaaa

SEQ ID NO: 278929 - DNA, 609 bp, Homo sapiens
ccccttatgtagacagaaaacttaattctagtgaagcatgtctgtgacccacagaggaaactattaaaccattactgctttacaatgatccagaaaaaatgtttgtattttctttatatacagagtacattttcccagcagttgaaggctaaaagcagcagtaagtcaagcttctgcctcaccccaccatggtctctcaaaagtagttaccagtcatgggggcatcaattcgtaaaagtccctgtccaaggattccttcctgaaggtttggaaatgtgcccatcatgcaggtagctaatacattttgaaaataaatgggactgctctctccctaagctcatttcaagtttcttccacttcagctgattaatgcatgggctcacccacagtaactccaccctaagagatagggtttctaacagttggtgcaaagaccaggataggcattttgcccagtttgcaaaacygtaacaatcctggctaacacagttttaaaatggtgatgtcctggtaagacaaagccagttcacttagagaagacacttcatttttatcttatctttagctagtttaacaaaatttctgacaatgatgcacaaatgagggaaa

SEQ ID NO: 278930 - DNA, 559 bp, Homo sapiens
gctcattaggaaagcatggctgcattaaaaataattgaaattaagctaattctttaattatttgtatctaaaaattaatgtaagttcttatagagaattgactctaagctacagacatttctaaataaatgttggccaagattggttgcacacaaartttattttctcatgaggcatgaggaatttcctttcagtacatacatagcaatcaatgtcctagaaatgaatacaattgaaactacattttaaaaagccatgttactttcagccttccctttattaaattctttcatcacacagttaaggcaaaactttgaaaaattcaatcattataatactgtgtgcaccaagtagttttcctgaaatctactgaatttattgcattagtgtcagctttctcatctctgcaaactattcagctgtaattccagtgtacagaggacttctgagttgtaaaatgctaagaatctttcttattttgttaaaataaataagatgataatcaccttgtctaagcacttaaaattttcaatatgcagtttctgaacccatgtttaaa

SEQ ID NO: 278931 - DNA, 494 bp, Homo sapiens
ggtcctcaatttcttaatctgtgaaatgggggtgataatcccagagttttttttaaggaaataaaaagggcaaggaaaaagagcttagcagcatgcttggcatatagaaaacacccaatcaatgtcagctactcttataataattaattcaggatgagagtaaacaagtactgactgagacactggcaaaacattctagtccaatgtgctgaattgcacaatgccagtcatctgagttaaaaccatggaatcttgtcattactcaaactcattctctgtattytgatgtctcatatttatatgttattaccctcatcacttgtcgagatcccagcaagtgcaaacaagcagaagataagtaaagctctcccctccccttgccctacaccactgtggacagcaatacattgcagtgcttgcaggtgggttcccaagaacccatgggagactggaaaggtgaagacccaacacaggaggggacaacaggggcctca

SEQ ID NO: 278932 - DNA, 585 bp, Homo sapiens
cttccttgtatatgctgttttaaagtaaaaacaacttgttaatagtttgggttaatatttttggccgggcgtggtggctcacacctgtaatcccagtactttgggaggccgaggygggtggatcacgaggtcaggagatcgagaccatctgggctaacatggtgaaaccccgtctctactaaaaatacaaaaaattagctgggcgtggtggtgggcgcctgtagtcccagcaactcggaaggctgaggcaggagaatggcatgaacccgggaggtggagcttgcagtgagccgagattgcgccactgcactccagcctgggcagcagagtgagactccatctcagaaaaaaaaaaaaaaaaaaattgtaggagaccttccaacactcttaaaatcacactgaatagctgttgcctcttttacccatgcctggtacttgttcacaaccgcaaatacttccaaattaccacatatgaagacaatatcaagtacattacttttttgaaaaatttgaagacttgcagagataatattataaggtattgcaggaaatgcagttctgatatctcagaggttaaccagtgag

SEQ ID NO: 278933 - DNA, 609 bp, Homo sapiens
ataaacaatgcaagtgtgagtggaacacagcatgggggagagtgggttcagctgagcttgcagaggtgaacgagtcctggctatgcatagacttgacataaagtcatgacaataatattggctttcttttcagagaaatgtgaagccttaaaggaagtgaaatcatgctgtggcttgaccatctttgcattcatttaaaactgaccttttaagtcattctggaggacagattagagtgaggtgagacgatttaaggaatcccatcaggaacaaattgtggaagtccaagagataggatggtaacttgcactgcagtaatggtgtggagatggggagaaaatgatgggcttgagaggaaaaaagggamtatcgccctcctccccgaccacattccaggcatgtgcatcatggtcctcctgaatacagccactggctggtgtgtaatgcccatgccaagtccagcatcatttttcatggttattagctatacacaggattttttggttcaggttcacaccccatgtaccatgctgtgctcagctgatttcataagaggtcagggaagaacagcttgtggtgtgtcacaacatgtgcacattgcctcctcct

SEQ ID NO: 278934 - DNA, 1090 bp, Homo sapiens
agtcccatgaaatccaccatgtccttagaaagaatgcattaacctttttaaattcagtaccaatagctcaacaaaaagcccagtgtgattgtcctctgaataaatgataacaaggagggatggcaggcattgttgcatattagaggaacatcagagtctttaggcaagagaagcaagagtatgataacaaatgttttggacattatgtttactacttgatgtaacttacttattggtctaaatttgactagcaaactgcaacctgccagctaaatgcagtctatcacttgtttttgttaagttttattggaacacagccatgctcatttgtttatatgttgcctgtggctgctttcctttcatgctacaacagcagggttaagtgaatgcaacagagactgtargacccacaaagcttcaaatatttaatgcctgtcccttaaaagaaaaagtgactgggtgctatgcctcatgcactttggaaggctgaggtgggagtgtcactagagcccagcagattgaggctgcagtgagccatgatcatgtcacagcwagtaaatgagagtgcatgtaagtagtatgcaatactctgatctactgataagtatgagtataattatactatatctattggttggactggatggtcatgccatattttttagtgctaaaagcaaattgcagagtaacctgtttagctggatattatttttgtttttgcacacacgcacacagagaaaaaacacatttgcatataattgaataaacctgaaatatataaaaaaagatacaaattgtaacattagttagctgaaggtagaacaaggggacttaagaatattaacttttcatttatacatttttattgtttaaatttaaaaatcaatcattcattattgtggtgaagtaaaacaaatccggwtaacaagatttcactgggtatctaagacctttaactgtatagttaatcattaattacgtacacaggctttgagtataatacttcaataattggccttaaatatgtagttggtatcaagactcttaagtgggtctacaaccctttgttcttcacctgagcccaaaggta

SEQ ID NO: 278935 - DNA, 579 bp, Homo sapiens
tcacatacttttatggctctttgtttttgaatcctatgacttagacaaaaaactgagatatgtggatgtttcctctaattttatgtactgttgtgtcttaagatgaataccccattgtcctgatttctgtgattactggcaaatgtccctctttttagtctccttccgcataccaggtgcagatctcatttgtgactccacctctgtgacctactctcagagccagttgtggctacttatttaaagcaacagcaatttcatgtgtcattcatgtttgtcttcagacctggaattcagccattgtgagttgtcaaagaggccaaactacaaactgctgtggtctgagttcagaacagaagttcttctcataaggatgagttcaattcaccatgctcttctgggccccacaacatagagaagcaatgcttcagacaattacrtctcagtctgaccttccactttcttaaattaatagttaaaatttctcaatgtttattaaattgtaaatctgctaatttcccttcttcctcccaagaaggaactttgtttccaatctaaagataatagacgccatctgta

SEQ ID NO: 278936 - DNA, 598 bp, Homo sapiens
taattaattattgcttctcttcctatgaaatcagtcctatagaaaagtaatatttctcaaatatctttcatctaaaaaataaataaaataaagcaacacatttatcacactcctgtttcccacacctccccaagccagactcaggtcatatatcatcagaaaagtgaccccaaacataaatacaaagtttgataactcacataggtacccaccagctaggtgaggaaccagagcactgctagctcgccacaaacccctcacccagttgtggcctcttgcaatcattatttcctctcttctgcttaagggagatcacactctcctgactcagaacactaccgtttagatttgcctgtttgtataacttgatcatatgcactcttttattattattatttctcaacatcatactttaaaagttcatccatgctagtgcagcgattcattgatttccatttcttataatttttcatgktataaattcaatgacttttaacaaaaataagtggtcatgtaaccaccacctcacaaaagacatagaacatttccaacaccccagaatgttttctcatgttcctttgtagtcagtcctctcccc

SEQ ID NO: 278937 - DNA, 486 bp, Homo sapiens
ctagtaaagaaagatatgcacacacaccatctctctggcaaaatgaaattctttcttagctctacacccagtgtcattgatgcrtgcagagaaatcaagcaagggacttgcttgaataatagtgcatcttctgttgcagggttgttacagttctctcatctagtacttattcatatggatcttatataaaaacttgtttagtcacatttaaaaacgctatcattgatttctatggtctgtagtgaaagctctgagcattttcttcaaatgtcacttgagaacttctaaaaatctcttgcacgtctatactccatcacatgtacaaaaatcttcacagttcatgatagataaacaggcaagtaaccacagaaaaatttttaatcccaaactgacaacaactgcaaaatacgtttacaatgaaaacagaaaaattaaaataatggtatattcatttcaaagaaaactgcacttcggtgaaaagcaatg

SEQ ID NO: 278938 - DNA, 486 bp, Homo sapiens
ctagtaaagaaagatatgcacacacaccatctctctggcaaaatgaaattctttcttagctctacacccagtgtcattgatgcgtgcagaraaatcaagcaagggacttgcttgaataatagtgcatcttctgttgcagggttgttacagttctctcatctagtacttattcatatggatcttatataaaaacttgtttagtcacatttaaaaacgctatcattgatttctatggtctgtagtgaaagctctgagcattttcttcaaatgtcacttgagaacttctaaaaatctcttgcacgtctatactccatcacatgtacaaaaatcttcacagttcatgatagataaacaggcaagtaaccacagaaaaatttttaatcccaaactgacaacaactgcaaaatacgtttacaatgaaaacagaaaaattaaaataatggtatattcatttcaaagaaaactgcacttcggtgaaaagcaatg

SEQ ID NO: 278939 - DNA, 486 bp, Homo sapiens
ctagtaaagaaagatatgcacacacaccatctctctggcaaaatgaaattctttcttagctctacacccagtgtcattgatgcgtgcagagaaatcaagcaagggacttgcttgaataatagtgcatcttctgttgcagggttgttacagttctctcatctagtacttattcatatggatcttatataaaaacttgtttagtcacatttaaaaacgctatcattgatttctatggtctgtagtgaaagctctgagcattttcttcaaatgtcacttgagaacttctaaaaatctcttgcmcgtctatactccatcacatgtacaaaaatcttcacagttcatgatagataaacaggcaagtaaccacagaaaaatttttaatcccaaactgacaacaactgcaaaatacgtttacaatgaaaacagaaaaattaaaataatggtatattcatttcaaagaaaactgcacttcggtgaaaagcaatg

SEQ ID NO: 278940 - DNA, 851 bp, Homo sapiens
ctgacaaatctttgattctttgaactggggaataattgttttggtttctaagtcctgcttgggttgagcaaacacatacctggctcattatcaataaccttcttagttaggcaaataggtgacaatgtcaataggaatttcaaaaatatgtgtgctggcaaaataaactctgcctttggaaacatcatcacaatttaactggttctaagttactcaggcagcctaggtcattgtgtgccaatgcactgaaattgccctttaacaaaactggcaytggcagctagcagtcaaaattgaaatgtttcagccaacagagctgctttggaatctttcccacwtgtacatcttctgcataagttggtgtgcattgtgaagagatagtgctattgagaacttgggaagagtaagttttgagggcagttccctggaggagaaacaggaagtacagaggtttatatttgtctccttctgcttagatcaactagactaatgcatgagctttctgcaggtagaggccaagaggattttttcacaaaagcctttataaaatttgggctaactgtgctaacttgaggtccagaattagggaaaatggctttctttcatcttatcttcagcattgtgaaagttcaagagaactcagtgcatttggagacttgagggttttacaagccttggtagccaaaggagatggcaggcagaaaagctgtttttcatagagttgttggcagctgtgaagtgtccactcaactaagcttgaagcatgcaggggaggaaaaaaatgtcttttctttcaatcttaaggtcawagctgaaactcccataagaaaagacagattaacaagtgagaa

SEQ ID NO: 278941 - DNA, 995 bp, Homo sapiens
ttgcagcctctgcctactaggtcttagatttttstctccacaggacttagtacaatactcagaaagccagggcagcactaaactaaatgttctcttgaagaccttcatgcccaaatctatttattgatgcaaagagaacacatttaaaaggtcttcgcttttacttccatttcaggccattctaatactaaattggaattgagactcttgcatgaaaatacgtgcttaatcaattctctactttcattttgaaagcttgttgggatcccaataacttggtgttcttctctagaactagtgatatttctctgacacacttgggctgaagtgatgtgttagcacctctggttcttgaagcagagtgaaaacattaggcctgggggtgagatggcacagagaggtgcagggtggggtgccaatcctagtttagtccatggaaagtgagttgggagagcggcatgatgtccttctcctctgaggccttgctagcatatccagtgaaaaatggctgccttcaggtatctgccttctcaccttwatgggcttcttgccagaaagtctgttgtagccactcaccctcctcctgttctggacactttgcagataaagaggaggggatttgactgacaggatcaggaaaaataatagcaactgattcttttgaaatatatatcaaaacctttattaataaaaacactgttaatttgtctacattcctcatttattagaagagcaaatatcaaatacttaaatccagtgacagattttttttttwaatttaactttcaaaagagttcgcctaggagataatccagtatcatctgtcttccacacctgtatagcattttccaaagataactgaggcctctaatatctataactgaggcttctccagatgactctcaagatgtgcaaagtcctcatttaaaccagaggccttcccctctctcagacttggaatccttcaccgacttatttttagtattttcctatgt

SEQ ID NO: 278942 - DNA, 571 bp, Homo sapiens
gaaacaaaaactttaaaaatagtaacaatatcaaatgttggctagtatacagagaaataaaatgtcttacatatggaaatgtaatctggtaaagccactctgaaaaacagtttggcagtttgtaaaaaaattaagcatacatttactattcaaaccagcaattgcattgttgggcatttatcccagataaatgaaaatatacgtccacaaactactacacgattgttcatagcaattttgtttgtaataccccaaactgaaaacaacaaaaatgctgatagaagaaaaccaatcttagaagattgtatactgtgtaatttcacttcaatctcagaatgacaaaattacaaacatggaaaacagattagtggttgtcacaggttagggatggcggggtgagggaatgggtgggattatgaaggggtagcatgagggaaatctttgtgatgatggaatagttttgtgttttgattgtagcagtggttacacaaatatacacrtgtgcggaagttacatactatgcacacacattgtgccaatgtcaaatctttggttttggtatgagactaaa

SEQ ID NO: 278943 - DNA, 601 bp, Homo sapiens
ataacattatgaataaattatataactgaaagatatgtttctaatctaccactaataaaagtatccattacactaagaaaacatttatttttctattttctttatggaaaatattacaaaattgtcatatgaagaagtgattgaagaatatgtagtcgaaaaagagtaacagtatgatagacgtgtggtcgagcacagatttgttttttattctctttttttctcaygtacaacagacagttttcttgaattgattagctggtgtattccatttcttcttttgttaagttctgggatacatgtgcagaacgtgcaggtttgttacctaggtgtatgtgtgccatgatggtttgctgctcctatccacccatcacctaaggtttaagccctgcaggcattagctatctgtcctgatgctttcttttcccatgtccccaccgcccaccccaaaccccctgccgataggtcccagtgtgtgttggtccccttcctttctccatgtgttctttttgttcagctcccacttataagtaagaacgtgcagtgtttggttttcttttcctgggttagtttgctgaggatgatggcttccagcttcatc

SEQ ID NO: 278944 - DNA, 601 bp, Homo sapiens
ataacattatgaataaattatataactgaaagatatgtttctaatctaccactaataaaagtatccattacactaagaaaacatttatttttctattttctttatggaaaatattacaaaattgtcatatgaagaagtgattgaagaatatgtagtcgaaaaagagtaacagtatgatagacgtgtggtcgagcacagatttgttttttattctctttttttctcacgtacaacagacagttttcttgaattgattagctggtgtattccatttcttcttttgttaagttctgggatacatgtgcagaacgtgcaggtttgttacctaggtgtatgtgtgccatgatggtttgctgctcctatccacccatcacctaaggtttaagccctgcaggcattagctatctgtcctgatgctttcttttcccaygtccccaccgcccaccccaaaccccctgccgataggtcccagtgtgtgttggtccccttcctttctccatgtgttctttttgttcagctcccacttataagtaagaacgtgcagtgtttggttttcttttcctgggttagtttgctgaggatgatggcttccagcttcatc

SEQ ID NO: 278945 - DNA, 1066 bp, Homo sapiens
tgggaactcggcaggcttaggccaattctagccgagtaagtgttgagaatctgcatggctctatgattggagctgaagaccctggtggtgtgggctcctgagtgggatcttccaatctgtgggttgcacagtttcatggaaaaagcactgtttcccaggctgggtagcgcactcactcaccacctcccttgactgggaatgggggctcccctaccccctgtggctttcaggagagccaccgctccacactgttcttccttcctctccataggtcatgccagctgcccagtcagtcctaatgacagaacctggatacctcagtttctggtataggattcgcatgctgttttggatatttttgatgggagcctctgatcatcatggcttctagtcggccatcttggcccccatgtkttttattttctagtgttttgtaacgttttctcaggcattcgtaagtgaccacagctggtcacatttgaatctaagaattcataatggtgatgwtgtttaactttgctatttgctgcttgattagaacccagaatttctgaagctatatattaacctggagaattttttcccataaaaagtccagcccaaagtttgtggtgttattggcctgatggacctgaataagctttgaattttacctcgacaacatgttcatgttttaaatgtccaaataactagttcctgaaatattttttgaactaggtttgccattctactggttacataattaagtgagttaacaaataggtggtacatcttcattccatatttgtataactttgtgtttgatttttttgaaaattatctttccaaagagtctgtgctcattgttatttatctagcatgacagttttgagaaatagtgaagctattagtaaatgtgttttggaattatcatttttcattaactaaatgacaaaaagtattttattttttgatagctagagcactttttgtctttaggttgagtggawcttataaactggttcttccatgtaacagggggtctctcttctcactgaaaataggtaaattgggggtggagccaaga

SEQ ID NO: 278946 - DNA, 661 bp, Homo sapiens
tttttattattggaattttcaaatcattgttaaaaactgagtataaaaataaaaaacccattgccaagttgaaaataattatagcaattaacatattgagtttctgatatgtgcccagtactgtactaaacatcttatgtggacgattttatttaatcttcatatgaatgctaagaggcagactctaagagtatctacattttagaggtaaggaaattgaggttaagtaaatgttccaggtcaaacaactaggatgtagcagggcttggatttgaactggtcagtctaatttcagaatgctctcttaaaccactgcagtttgtttcctcccatgggattacaaatttcctagtgaaacctaagacttaaaactcccttaacagaaaaactcatctgaggagcagagctgagcaaagcaaaaccragcagagctcagtacttgcctgcttcctcacaccacaggactgtgggctttttttcttttctgggaatggtgtctaatttaatgaactcttttatatgtaaatagagaccggaattattattctcatttttagaaatccatgaagtaggtgaaattgaaccacctgttttccactgaggacagtaacttggagacactgtgacattcaggcaatgtgggctaggggtagggaaagct

SEQ ID NO: 278947 - DNA, 1230 bp, Homo sapiens
tttttattattggaattttcaaatcattgttaaaaactgagtataaaaataaaaaacccattgccaagttgaaaataattatagcaattaacatattgagtttctgatatgtgcccagtactgtactaaacatcttatgtggacgattttatttaatcttcatatgaatgctaagaggcagactctaagagtatctacattttagaggtaaggaaattgaggttaagtaaatgttccaggtcaaacaactaggatgtagcagggcttggatttgaactggtcagtctaatttcagaatgctctcttaaaccactgcagtttgtttcctcccatgggattacaaatttcctagtgaaacctaagacttaaaactcccttaacagaaaaactcatctgaggagcagagctgagcaaagcaaaaccgagcmgagctcagtacttgcctgcttcctcacaccacaggactgtgggctttttttcttttctgggaatggtgtctaatttaatgaactcttttatatgtaaatagagaccggaattattattctcatttttagaaatccatgaagtaggtgaaattgaaccacctgttttccactgaggacagtaacttggagacactgtgacattcaggcaatgtgggctaggggtagggaaagctwtgtgcccagtactgtactaaacatcttatgtggacgattttatttaatcttcatatgaatgctaagaggcagactctaagagtatctacattttagaggtaaggaaattgaggttaagtaaatgttccaggtcaaacaactaggatgtagcagggcttggatttgaactggtcagtctaatttcagaatgctctcttaaaccactgcagtttgtttcctcccatgggattacaaatttcctagtgaaacctaagacttaaaactcccttaacagaaaaactcatctgaggagcagagctgagcaaagcaaaaccgagcagagctcagtacttgcctgcttcctcacaccacaggactgtgggctttttttcttttctgggaatggtgtctaatwtaatgaactcttttatatgtaaatagagaccggaattattattctcatttttagaaatccatgaagtaggtgaaattgaaccacctgttttccactgaggacagtaacttggagacactgtgacattcaggcaatgtgggctaggggtagggaaagctagtgtctttctaagac

SEQ ID NO: 278948 - DNA, 469 bp, Homo sapiens
acacatgcctcatttgcaaaactagaaaagagcatttttatagcatttattgttactcaggtatgctcatggggtgactcatctatacacaaaaactccattgggcttatttaagaatttctgccattaggtggaacacagtggctcacatctgtaatcccagcactttgggagagccaggagggtggatcacttgagtccaggggttcgagaccagcctggggaacatggctagacctcatctctacaaaaaaattttaaaaattagccaggagtggtggcatgtagttgtagtcccagctacttgggaagctgaagtaggaggattgcctgagcctgaaagttctaggttgcagtgagccatggctgtattactgcactccagtctgggggacagaacaagactctgtctcagaaaaaaaaaamaaaacaaaaccaaaaccaaaaaaaataataataataaaaaccc

SEQ ID NO: 278949 - DNA, 565 bp, Homo sapiens
ggaatacaagtgacctatcttcaagttcacagattcttctatttgatcacgtcagctgttgatgttctattgcatttttcatattaatccattgcattcttcagctcaaaaatttctgatttttttatatctttttactaaamcttttacttttgatgtgtttttttaattttgttgagatgtctattggtgttctcatctagctcactgagtttccctaaaacaattatatttaacttttggtcaggcagtttcttgatctccacctctgtgggagtaattacttaaatattattttgcctcttagatggtatcctcttccattgatttttcatgttccttaaagtcttacattgctatcttcatgtttgaagaagtagtcatctccttcagtttttactgactggattcaggagagaaacatcttcaccaattagcccagctagggatgctgagactagctcacatcttttctgtgagtgtacctgctgcatacctcttgttccctcttggggattaattctttagattctctgtcttctttaggtcataaaaagccaagcca

SEQ ID NO: 278950 - DNA, 592 bp, Homo sapiens
tgatttttttatatctttttactaaaacttttacttttgatgtgtttttttaattttgttgagatgtctattggtgttctcatctagctcactgagtttccctaaaacaattatatttaacttttggtcaggcagtttcttgatctccacctctgtgggagtaattacttaaatattattttgcctcttagatggtatcctcttccattgatttttcatgttccttaaagtcttacattgctatcttcatgtttgaagaagtagtcatctccttcagtttttactgactggattcaggagagaaacatcttcaccaattagcccagctagggatgctgagactagctcacatcttttctrtgagtgtacctgctgcatacctcttgttccctcttggggattaattctttagattctctgtcttctttaggtcataaaaagccaagccaggtgttgacagcctcctgtttgctttccccagtggtgtcttgaaatccttaagtttgtgtggttttttccaatcccacagagctgagttgggtgtctatataagatacttgcactcaccattcatgagaacacactcagggaa

SEQ ID NO: 278951 - DNA, 1052 bp, Homo sapiens
tgatttttttatatctttttactaaaacttttacttttgatgtgtttttttaattttgttgagatgtctattggtgttctcatctagctcactgagtttccctaaaacaattatatttaacttttggtcaggcagtttcttgatctccacctctgtgggagtaattacttaaatattattttgcctcttagatggtatcctcttccattgatttttcatgttccttaaagtcttacattgctatcttcatgtttgaagaagtagtcatctccttcagtttttactgactggattcaggagagaaacatcttcaccaattagcccagctagggatgctgagactagctcacatcttttctgtgagtgtacctgctgcatacctcttgttccctcttggggattaattctttagattctctgtcttctttaggtcataaaaagccaagccaggtgttgacagcctcctgtttgctttccccagtggtgtcttgaaatccttaagtttgtgtggytttttccaatcccacagagctgagttgggtgtctatataagatacttgcactcaccattcatgagaacacactcagggaawattattaaaacacagaaagtaaatggatctgtttgggaagaagaatatacagtgggtggctagagaagggaatacagagagtctttataaccacgtgtagaaatagaaatagccattttgcatgttaaaatcagcttattccatttcaatctctcccatggataacatttttctcttgctgagaaactcttcaataatgatccatcatgaggaaagcttatttgaaaatggaagcacaaaacgttcctctgagatttagataccatttaaatgtatttttatgcctacacwgtttgaatgctaatagctgcctgcccaactcaaaggcaaagtgtttactcctattattaagaaatttaagataatgattaatcagaccattttatattcatttatatttcataagacaatactcatacacatttttatgtttgactttcacagttctctgaatttttc

SEQ ID NO: 278952 - DNA, 604 bp, Homo sapiens
cagatccatctcattctcttctgatttttatattgatgcctttttctaatttgctaattatccaatccttctcactctcgttaacctaattctgtgtactcttaaaatttatatttgaaagagccataagaggacctcaagatccttaagaagcatttctttattctttgtcccatccccatctctctttctctttctctctctctctcacacacacacacaatttttttttttacaactctgacacctaatccaactcactttcatgacttgcaacacaacctctataaggaaatattgccccctttccccatcccatcacttaaatagaacttatgttgcctagatttttaaactcttctagattcaaataggctgacaactttcaaatttacctagaactcttttaagtgtttgggataggggaattcattttcatcacaaatgtgataatggttgtcttccccatgtgaacctctgtaaggttctgaaartttagtatagtaaaataacttccattaacaatttattatcattatgaaggtatgcaaactttatttgagcaaaattccatgttcactcttttaagattaaagtattagtt

SEQ ID NO: 278953 - DNA, 612 bp, Homo sapiens
tggggtgagaaatgctgtggaaaattggatgatttggatgtctgtattggaaacacttctcaaacatcccttagccccataacccagaatgccaggcagaaagctgtaggtcatttatgatgttaagcaggatagtcttaggactcaggggcagtagagctgatgaaggtaagagatgagtcaaaaggctgaaaactgagtagagggcattctgtgaaggtgaaaatgaaaaatgaaaaacctatcatttcccaactgtaaataatttactcttctcagccaagcagttgttggagccagcagctgatggagattgaagtccaggagcaaagacctggacttttttagcagctccttggagagagctcatgaaggactgtctcagctctggattcaatggggacctgacatccagtgtcagamagtccataataagcacagcacatggcaagcttctaacggctcctcagagagaaggccatcaatctatacgactgtaacaggtaggactggaaaccgtagagcaaacactgaacaagaggccaagccctctcaattttcaaacctgcaaacaaataaacaaaccaaagacaagggtgacagagactgcca

SEQ ID NO: 278954 - DNA, 615 bp, Homo sapiens
gccagctaggcaatcagaactccttgcataaggctcccaatttaagctcacatatggcacttccttgtgttctctcttatcctcattttttgctattgctttcttgtccagtatcaaatagatggagaataatctaggactttggatttcaaggcagtagcacgggcctagcctgggtaaagaaatgaatgtaattagaatactcttctcttgccatccccggctggaatccaggccacagttcctgagctatgccaatgctcctactccactaggagcttactctcagtgatatacttagtcttctcaagctttcgycttggtttcttagttatttactgattagagttctgagatctatcagcctccctccttctgctctgcagcctccactgttagttatatgagttgagataatagccatcagagcttaccatttccttattgaatgatccccagtaatttagaatctcttcttatcttttaccaagaccttttgtcaatatatgcatatgattaatttgcccattaacttcttccacaattagttttcaatcttcagaaaactctccttctttttctgggttgtttctaaataccttctccctcattgct

SEQ ID NO: 278955 - DNA, 615 bp, Homo sapiens
gccagctaggcaatcagaactccttgcataaggctcccaatttaagctcacatatggcacttccttgtgttctctcttatcctcattttttgctattgctttcttgtccagtatcaaatagatggagaataatctaggactttggatttcaaggcagtagcacgggcctagcctgggtaaagaaatgaatgtaattagaatactcttctcttgccatccccggctggaatccaggccacagttcctgagctatgccaatgctcctactccactaggagcttactctcagtgatatacttagtcttctcaagctttcgtcttggtttcttagttatttactgattagagttctgagatctatcagcctccctccttctgctctgcagcctccactgttagttatatgagttgagataayagccatcagagcttaccatttccttattgaatgatccccagtaatttagaatctcttcttatcttttaccaagaccttttgtcaatatatgcatatgattaatttgcccattaacttcttccacaattagttttcaatcttcagaaaactctccttctttttctgggttgtttctaaataccttctccctcattgct

SEQ ID NO: 278956 - DNA, 438 bp, Homo sapiens
gttatatgagttgagataatagccatcagagcttaccatttccttaytgaatgatccccagtaatttagaatctcttcttatcttttaccaagaccttttgtcaatatatgcatatgattaatttgcccattaacttcttccacaattagttttcaatcttcagaaaactctccttctttttctgggttgtttctaaataccttctccctcattgctttacttctagaagaatgtaaaccactatgataagtcttcccaggcataaaaagcattacattttttataaaattacactgctatcaatttttcttatagttccagtttttacctcatgtatttagatgctctgacatgttttgcataaaagtttatgactttatggggtatttaaaaatattatttatatgtaatattaaacctttaacttaatactgtga

SEQ ID NO: 278957 - DNA, 629 bp, Homo sapiens
taccaacagcacttgtcataaatagaaataaatgtaaaaggaaatataatacaatcaatttcattgaattctagcagtaaatgattttgtttacccaaagttctaagcttgaagccttattttttattgttggaaagggagattaacaagtatagggagagttttaaagttatgtcataacaaaactggttctatccgatagttgaaaggaaaattgtaaatttatgaatattcttattttgtgaatkaatgctaataaatactatggttactatttgatttatttagctgcaagcaataaaaaccaatattaggaggaaatgaagtaggtgacaggaactgatcactgtaagtcatttccaagggtaattacgtggtgaaccagcttcactccccagccctcctcacacagtttggagctctctggtggagactgaaagattcagagtaggaagcctaatgggcttagagcatgtgtccattccttgagtggtgacagaagggtgcttgagttacagttccacaagaatgtgtgcaatgggggagaggtcatttctccaaaggaaattctaactctggtaccaccagaaagggaaatgaatgttgcataatcaaaaaaatgataaatg

SEQ ID NO: 278958 - DNA, 609 bp, Homo sapiens
ccccttatgtagacagaaaacttaattctagtgaagcatgtctgtgacccacagaggaaactattaaaccattactgctttacaatgatccagaaaaaatgtttgtattttctttatrtacagagtacattttcccagcagttgaaggctaaaagcagcagtaagtcaagcttctgcctcaccccaccatggtctctcaaaagtagttaccagtcatgggggcatcaattcgtaaaagtccctgtccaaggattccttcctgaaggtttggaaatgtgcccatcatgcaggtagctaatacattttgaaaataaatgggactgctctctccctaagctcatttcaagtttcttccacttcagctgattaatgcatgggctcacccacagtaactccaccctaagagatagggtttctaacagttggtgcaaagaccaggataggcattttgcccagtttgcaaaactgtaacaatcctggctaacacagttttaaaatggtgatgtcctggtaagacaaagccagttcacttagagaagacacttcatttttatcttatctttagctagtttaacaaaatttctgacaatgatgcacaaatgagggaaa

SEQ ID NO: 278959 - DNA, 548 bp, Homo sapiens
cttcttttcctctcaaagcctgggtcttaggctgccctcttatgacttttccccatagaggggttaattggtgaacctactgaaatgttgcatcaattctttggaaagtacatatgtacatttttcttccatatgttttctctacacaaagacttttaataatttgcacttcctcttccacttagttttgagggatccttggagaactcctttagttttgttgagcctaaggtttaatccttagaaaatgtgtaagcatttattttatgtgttttaaaagactaaattgtgaagtgctgtcctcacaaatgtatcaccaaatggtggacgtcaacaaagaaaacagtgattcattcagtgtcgagatgagaagtgattgtttcttggccttttggctaagatcaagtgtagatgggaagtgaattttatgaaatttggasttcagttaaagcaccctttagaatgtgaggagtagagacttaaatgtattcattagaaaagaatgattaaaaataaatgtaaatgaaatgtatttttaacactagaaa

SEQ ID NO: 278960 - DNA, 562 bp, Homo sapiens
ggaggaagggtgaattatctctctctctccttcacctgagaattcatcttcccctgcccttcaacattggagcctctggttcttgagcctttgaactcagaataaattgctttcctgattctccagcttgcagagggcagatggtggaacttctcagcctccgtgattgtgtgagccacttccaataataaatctctcgctctctcccctctgcctccccaacacactcacacatctatgtgtactactatgtatattgcatctattatgtgtatgtatgtaaatatatacacacacatattacatatatatacacagtatggttctgtttctctggagaactctaataccctcacgcatactccagttcacttcgttgcatgcatcaaatgaatggaatggtaggtggaaagaaggctcagctactgttcatttcattctgtctttgttgttgactctggtaartcacttaacttctgggcttacgttttttaataagaaatcagtctgttattttgagtgactgctgggttcccttccagctctaataccctattattcg

SEQ ID NO: 278961 - DNA, 573 bp, Homo sapiens
catgtgctgtagtccccgctacttgagaatctgaagtgggaggatcacctgagcccagggaggtcaagagtgcagtgaaccatgactgtgccactgcactctagcctgggcaacggtgtgagactctgtctcaaatttgtgtgtgtgtgtctgtgtgtctctgtgtgtgtgtgtgtgtgtgtgtgtgtgtgtaagagaaagggaggagacagagaactaarctttaattttttttaacatgcccaaattcctacctaaggggtctgaggagtcacatcttacaaaccataaagtctcatcagaggggtttttattttaagcctatagagcgaggtctgcattctaacctgactctggcataacatcatataacaaataaggcaagaagtcaaaacattttaaccccaaatatgtttccttgccaaatcttgaaattgccctgcaaagttttctcttgtgggaaaaaaaatcgcattctatagagaatcccctttcccctctcttttttccttccttgctttccagatccaggaaatcagctaagagctaggcacccttttaggtccgatgaaa

SEQ ID NO: 278962 - DNA, 583 bp, Homo sapiens
aaaaaattaatattaataaaactttagcaagactgataacaataaaaatatagaagatacaaatcatcaatatmaggaatgaaataaggtctattactacaattctgcagtcattaaacaataaaagggtgatatcacagaaaatatcacagtaaggacctttgaaaattatctccttcataaaagcaattaaaaaaaactggcaaaaagaattgtcagaatcaatgtttttagagctctgcaaattaaccaaagggttgcaacaattcaggacacattaattcaaaaaaaatgggtgaatcttagaacactgaactgaaactgcctttgcaaaaattagaaatctaacctaactgataacatcttgtttctaaacctcacaagctaactgcctttgttagctttaaaacaaagatggtaacagtcccttccttgctatccccctccttgctcaggactgaagtcacttttgtaagacctatgaaagaccacaagattaggattatgggaggggcctgaatgttgctaaaatgtgggcctagttaagcgataccagccattgttccctagtttgcctttcaat

SEQ ID NO: 278963 - DNA, 583 bp, Homo sapiens
aaaaaattaatattaataaaactttagcaagactgataacaataaaaatatagaagatacaaatcatcaatataaggaatgaaataaggtctattactacaattctgcagtcattaaacaataaaagggtgatatcacagaaaatatcacagtaaggacctttgaaaattatctccttcataaaagcaattaaaaaaaactggcaaaaagaattgtcagaatcaatgtttttagagctctgcaaattaaccaaagggttgcaacaattcaggacacattaattcaaaaaaaatgggtgaatcttagaacactgaactgaaactgcctttgcaaaaattagaaatctaacctaactgataacatcttgtttctaaacctcacaagctaactgcctttgttagctttaaaacaaagatggtaacagtcccttccttgctatccccctccttgctcaggactgaagtcacytttgtaagacctatgaaagaccacaagattaggattatgggaggggcctgaatgttgctaaaatgtgggcctagttaagcgataccagccattgttccctagtttgcctttcaat

SEQ ID NO: 278964 - DNA, 599 bp, Homo sapiens
attggggtccatgtaagagaatccaacagcctgacctgtattctgcccaaagaggccatggagatttgtctcagtcttgcgcttgcctcccttttccacggtatggcactgggcamacttctgaacaaaaatcttattgcctttctcaacatcactcatatttaattttctcttttgttgctggcattatgaaggttcctgctcagaagctggatgtcctgcttcttgagatattcttgaaagaatatctcaaatgggaaacctaatgtttcacagtgcttaagttgttatctatagagcagttaaaaggaatgataatcttttttttttttttgagacggagtctcgctgttgcccaggctggagtgcagtggcgcgatctcggctcactgcaggctccgccccccggggttcacgccatgaggaatgataatcttataacaggatctgcatgattcttggacagtaggtagctaaaaactttgaggaagcaggtctgagagtagctgatctaatgatcaatgctgagtgtgctgcaggtttggttagtttcccatctgcccctctcttgctccttgattaactctataaagttcata

SEQ ID NO: 278965 - DNA, 599 bp, Homo sapiens
attggggtccatgtaagagaatccaacagcctgacctgtattctgcccaaagaggccatggagatttgtctcagtcttgcgcttgcctcccttttccacggtatggcactgggcaaacttctgaacaaaaatcttattgcctttctcaacatcactcatatttaattttctcttttgttgctggcattatgaaggttcctgctcagaagctggatgtcctgcttcttgagatattcttgaaagaatatctcaaatgggaaacctaatgtttcacagtgcttaagttgttatctatagagcagttaaaaggaatgataatcttttttttttttttgagacggagtctcgctgttgcccaggctggagtgcagtggcgcgatctcggctcactgcaggctccgccccccggggttcacgccatgaggaatgataatcttataacaggatctgcatgattcttggacagtaggtagctaaaaactttgaggaagcaggtctgagagtagctgatctaatgatcaatgctgagtgtgctgcargtttggttagtttcccatctgcccctctcttgctccttgattaactctataaagttcata

SEQ ID NO: 278966 - DNA, 598 bp, Homo sapiens
ctgctggaagtctgctcaagcacagtgtagttggttttccttacttaccctcatagatatccgcaactgaaaataggttgtatggctttcaactatagaaatacggctctttatgctatgggtctttagaggacaaaaataaccctggctgcagggcgtcatgaacagaggtgtggatgaggactagtaggcttttcccaaggctaagtcactaggtccatttagctgatgtgcaaggaaagggaggcaaggcttggaaaataagttggcraggggaaaagggccctagtgacaacctgaagagtccgtggtctgaaacctaatacagtggaggaaatggagcagtggagactgcagtgactcagaagaagaacagcaaggattttattcatccattagaaacaattaaagctccaatgtaacccacatgctccccttggtcaaaagcccttagcacagattgtggctcctgaaaggctatttagctaccattttaaaaatcattctgaaagttaaggcaacaagagcaggatcttctgctctgggctcaattgtaatattggagaaaggactatgtggccaagcagaaattatggga

SEQ ID NO: 278967 - DNA, 471 bp, Homo sapiens
gggcttgacattggctagtttaaataacttcagcaaattcaggggcatagaggctgtccctagttgtctggcacctggccctgggtgagagccttatagagaaggtggttggggayatgggctctggattggttagtgtgcatttgaaaggcacattcataagcaaggtgcttgccatttccagggattatccctgggaggggcagtctctccagggtcagcaagtccccaagatggcaaagcatcaaaaatacagagtaaaaataaatgattaatacactttgtatctagcaggcattcaaatattgaaagaatgaatgaatgaataagtgtttgcaccagtgagatactgagcggacctatttgaaaagagagagtggaagaatgggctccggatgtgggactgcagaggacacttggaacaggggccagcaaaaggactctgagctccagaggggaacaacaaggagt

SEQ ID NO: 278968 - DNA, 570 bp, Homo sapiens
tgcttcctgccccccaccagcagccccagtgaacaccacagggtggagcatggcagtgggcttacccagacccccagctctgaagagatcagccctactaaatttcctggattgtaccacactggtgagccctcacctccccatgacatcctccacaagcctcctgatatagtgtctgatgatgagaaagaccatgggaagaaaaaaggaaattttaagaaaaaggaaaagaggaccgaaggctatgcagcctttcaggaagatagctctggagatgaggcagaaagtccttytaaaatgaggagacccaagggaatccatgtgttcaagaatcccagcttttctaaaaagaaggagaaggattttaaaataaaagaaacccaaagaagaaaagcataaagaagaaaagcacaaagaagaaaaaaagagaagaagtaaaaaaaaaaaaaaaaaaaaaagaagtcaaaagacttgacagcagctgatgtagttaaaacagtggaaggaaaagaagtaaaagaaaaagccatttcaggagccagaggtgcctgagattgatgttccaagtct

SEQ ID NO: 278969 - DNA, 1059 bp, Homo sapiens
aatagagtttttgtagtgtcatttcatcatagtctctgaatgcctagacatgattcttactttttcaaccttttatatccctgagagctttcctctaaataactcattaattcattcatctaacaggtagtgagtgttgagtcacctaatacttgtattgagtcatcatcccactaggaagaaagaagtcactgcaggtgttttaaacagaggtactttaatttagggaactggttacaaaaatgttggaaagagtagagctgctaaaattaaaaacattaattataccaagtgttgacaaggatttggagcaagtggaattcttatacactgctggtgggaatttaaaataatacaattttggttgtttcttaaaaagttagatatatgactacygtatgattcagccatcccaaacttaggtatttacctaaatgaagtgaaagcagatwtccaaattatggggaacaagacctctgaagtggcwaaattaccctcaccacacacacaaaggtggtgtagtgggggagagaaatggccagcaaaaggtagaaaaaaaaaagaaggatttttaaattttaactgctagagggtctttatttacataacgaggccacctttttgccagccaggtcaaattgaaagcaatgactgtcaccccacactgcagttccacggctaagtttctgtcttttttttcccaccacgacaacctcagtttggttcctaattcaaggcctttcgggtttgatacttggtgcttctaaaatagcaacaatttgtcctagctgaaatatagtaatgagaatttaaaaattttttttgacaaagaactcaatggttaaaagtcagcttaattaaaagctcatatccaaggtgtgtgtgtgtatgtgtgcatgtgtgcatgtttgtatttaaaaggccttaatgttttgggtttctttgttttttctcttctaggaccttgtcctttttttgagcaaaagtgttttttttctttctttctcagttgactggattctgttttcttcatttacttctgctgtccctcctttctct

SEQ ID NO: 278970 - DNA, 607 bp, Homo sapiens
tccaaattatggggaacaagacctctgaagtggcaaaattaccctcaccacacacacaaaggtggtgtagtgggggagagaaatggccagcaaaaggtaraaaaaaaaaagaaggatttttaaattttaactgctagagggtctttatttacataacgaggccacctttttgccagccaggtcaaattgaaagcaatgactgtcaccccacactgcagttccacggctaagtttctgtcttttttttcccaccacgacaacctcagtttggttcctaattcaaggcctttcgggtttgatacttggtgcttctaaaatagcaacaatttgtcctagctgaaatatagtaatgagaatttaaaaattttttttgacaaagaactcaatggttaaaagtcagcttaattaaaagctcatatccaaggtgtgtgtgtgtatgtgtgcatgtgtgcatgtttgtatttaaaaggccttaatgttttgggtttctttgttttttctcttctaggaccttgtcctttttttgagcaaaagtgttttttttctttctttctcagttgactggattctgttttcttcatttacttctgctgtccctcctttctct

SEQ ID NO: 278971 - DNA, 1087 bp, Homo sapiens
tgaagtggcaaaattaccctcaccacacacacaaaggtggtgtagtgggggagagaaatggccagcaaaaggtagaaaaaaaaaagaaggatttttaaattttaactgctagagggtctttatttacataacgaggccacctttttgccagccaggtcaaattgaaagcaatgactgtcaccccacactgcagttccacggctaagtttctgtcttttttttcccaccacgacarcctcagtttggttcctaattcaaggcctttcgggtttgatacttggtgcttctaaaatagcaacaatttgtcctagctgaaatatagtaatgagaatttaaaaattttttttgacaaagaactcaatggttaaaagtcagcttaattaaaagctcatatccaaggtgtgtgtgtgtatgtgtgcatgtgtgcatgtttgtatttaaaaggccttaatgttttgggtttctttgttttttctcttctaggaccttgtcctttttttgagcaaaagtgttttttttctttctttctcagttgactggattwtgaagtggcaaaattaccctcaccacacacacaaaggtggtgtagtgggggagagaaatggccagcaaaaggtagaaaaaaaaaagaaggatttttaaattttaactgctagagggtctttatttacataacgaggccacctttttgccagccaggtcaaattgaaagcaatgactgtcaccccacactgcagttccacggctaagtttctgtcttttttttcccaccacgacaacctcagtttggttcctaattcaaggcctttcgggtttgatacttggtgcttctaaaatagcaacaatttgtcctagctgaaatatagtaatgagaatttaaaaawtttttttgacaaagaactcaatggttaaaagtcagcttaattaaaagctcatatccaaggtgtgtgtgtgtatgtgtgcatgtgtgcatgtttgtatttaaaaggccttaatgttttgggtttctttgttttttctcttctaggaccttgtcctttttttgagcaaaagtgttttttttctttctttctcagttgactggatt

SEQ ID NO: 278972 - DNA, 546 bp, Homo sapiens
aaagcacttatacactaaagaattaattagaacaaccaaatttccttaagggattgatttactcttaataaattataagagattttaattttttgtttaacccaaagtttaacttctattgcatctcaccattttcagttttctctccccttttaaaaggcatgaaataacactctccttcaactcattttcagctcatataagtttttctctcaagttctttttgttgtgatatgatgctaatattttcttaaagatmtaaaggaaatgttctcttccaacataatattctatatactgcagaaggtcttttcttttgccttttggtaactggcctagcagattttatgttttattgaaataattcctatgccattattattatgtttgggtttgcttaggaaaaaaaaacaagattaaaaaactattttttcaaattaaggttattacatccgtgtatctttctatatgtgcttttaaagtacttgtgacattaagttacagagttttgactcctgggtctaaaaaggacaccaagtccaaatc

SEQ ID NO: 278973 - DNA, 634 bp, Homo sapiens
actttggttaaatgaatgacttattttacaatgacctatgatcaagtgttttaaacctttgatatttgacaaactttccaaatcaaattataaactatgtctttttctggcctaattaatcctttaagatattagggtccctaaagtccaaaaatgacatatttggcttatttggtataaaaattttgcaggaagcattgtcaaatatgaaacagtgtttggttttctttggactgtatttgtataaatatgttattggtatgtgttccaaaattatgagaaactcctataattctgatatgacttaatgtacattataagtaataattataattattatgttaaattattgtgtgccacagaggtaacaaatttccttgtcaattgtgtctttgactacggctgtcctgaaactttttgtcatccacaaacaattgtcttgtttaggtcctctttagaaggtggcttcataatcaactataaaactctaacargtgctcttgaatgcaggtttctggtaactctggaggttgtaacatcagaatagaggaaaaactttcaggattcacagacagctgaaatgttcataaataccaagcagaacaagcattaactgcatggactaaactaatag

SEQ ID NO: 278974 - DNA, 596 bp, Homo sapiens
aattttccaggattgttgttttgtttgttgttgtttttctctcttcttccccctattttctcttcataggacatgagaattcaaaacatgctaaaaatgagctttcctaataacttgggacctacctgtctaggaataaaccatcctaaccatgagagatcagrcaaaacctgagaccacagacccattttcttctaaaatgctttctccaaaagatttttaaaaagaaaaggggggaaatgtgaaagaaaataaatcttgggggccccaaaatcactaagctaaagggaaaagtcaagctgggaactgcttagggccagcctacctcccattctattcaaagtcacccctctgctcactgagataaatgtatatctaattgcctgctttggagaagctaatcagaaactcaaaagaacgcaaccattcatctcttacccacctatgaccttaaagtcccctccccacctcaagtcttcctgcctttgcttcgagttgtcctgcctttccataccgaaccaatgttcttgcatatgttgcttgatgtctcctgtctccttagaatgtgtaaagccaaactgtgctctgaccacctt

SEQ ID NO: 278975 - DNA, 587 bp, Homo sapiens
aggatgactctaaatcactagaaattcttatcaatggrgaaggcactgacttaaatctgcataacaaacttcacttacctttatggtgctttccctggccttccttattcccttctttctttgtttcagctgaggatggtatttgagccacttctttgagatgtgctttttccctgggtatctcccatcgacacaggcagaatctatatttcttagtctacttgtattgctctaacaaaataccttagactaggtaatttataaggaacaaatgtattccttaacaattctggaggctgggaagtccaagatcaaggtgctggcattgtctggtgagaatggctctttgcttccaagatggtgtcttattgctgtatcctctagaggggaagaatgtgaggtattcacattgtgaaaggaatggaagggcaagagagtatgcccttcaacctggagccctttcatagggatactaatcctgctcatggaggctctgcccttttaggagataatcaccttccaaagaccatgtctcttaatactgttaccttggggattaagtttcaacatgaattttggagggaaca

SEQ ID NO: 278976 - DNA, 549 bp, Homo sapiens
ttttggaaacatttatcctatggtgttttgttctttgctaatattgattatggcatctttttacacagaattttaaaaaaatactttaaaatgtatcaatcttttccttattgtcgtccctattttaagttttgcyctacagcaattttcctataaaaaattttgctcaatctttttctaatacaggattttatataagtatctgtgtgtctgtgtatgtgtgcttcattttcttttacgtgatgatcagtcaggtgtgacctcaagaggagacacaggagtggcacaggaaaaaacaaagtgtactaattcacaggtcctggagacaggaggaccatgtgggaaaggcaccagggtggtcaggaggtggaagacaggagcaaagagaaggtctagtccaccccctttacggggttttatggggaagggcaaggcagggcagggtgaacagtttaggactggctaatgtgaataattgtggaaggtttggggctgtgggaatggttcctagttgcctggaagctgatcctgggatgtataaggcagagg

SEQ ID NO: 278977 - DNA, 1119 bp, Homo sapiens
tttcccaattcatatgcatctcattatagggccatgagaaaatgcagccagacctggttcagtccgggaacagatctgtcattctggggtctagacatggtggccctcttctcacagctccactagtcagtgccctagtggggactctgtgtaggggctcccaccccacatttcccttccacactgccctagcagaggttctccaagagatctctacccctgcagcacacttctgcctggacatccaggtatttccatacatcctctgagatctaggtggaggttcccaarcctcaattcttgacttctgtgcacctacaggcctaacaccatgtgtaagctgccaaggtctggagtttgcaccctgtgaagcaacagcctgagctctatgttggcccctttaagccacagctggtatgcagggcaccaagtcccgagactgcacaaagcaacaagaccctggtccagcccacaaaaacattttttctcataggcttcctggcttgtgatgggaatgttgctggggagacttctgacatgccctggagacatgttccccwtttcccaattcatatgcatctcattatagggccatgagaaaatgcagccagacctggttcagtccgggaacagatctgtcattctggggtctagacatggtggccctcttctcacagctccactagtcagtgccctagtggggactctgtgtaggggctcccaccccacatttcccttccacactgccctagcagaggttctccaagagatctctacccctgcagcacacttctgcctggacatccaggtatttccatacatcctctgagatctaggtggaggttcccaagcctcaattcttgacttctgtgcacctacaggcctaacaccatgtgtaagctgccaaggtctggagtttgcaccctgtgaagcaacagcctgagctctatgttggcccctttwagccacagctggtatgcagggcaccaagtcccgagactgcacaaagcaacaagaccctggtccagcccacaaaaacattttttctcataggcttcctggcttgtgatgggaatgttgctggggagacttctgacatgccctggagacatgttcccc

SEQ ID NO: 278978 - DNA, 484 bp, Homo sapiens
tagtagtgataaattttaaaaactcttcaggtagaattcaagcatcarcatatttaaagtttcttaagcaaaatcatgtacggccaagttcagaaaacctgacctagtaaggcattaaactagtaagtagacccagtaaatgcctccaaaactcaacttccttttgtataaaatgagcataataatacttgctctgttattcccaatatatgagaaaggaatttctagacctcaaggaataaccacccccaccccaaaatcaagctttaaagtaaaatcttggtggtagagtctagatgttaggtatctggattttcatagttaaattctctcaactctactgtatatttgcagatattttcagttaaaaattaggttttgctgtgttgcaacaaaaaaatgcttccctaaaattagacattgttttatagcacttaataaaatttaaaaatattcttaatcatttgacagagttggtcctagt

SEQ ID NO: 278979 - DNA, 484 bp, Homo sapiens
tagtagtgataaattttaaaaactcttcaggtagaattcaagcatcagcatatttaaagtttcttaarcaaaatcatgtacggccaagttcagaaaacctgacctagtaaggcattaaactagtaagtagacccagtaaatgcctccaaaactcaacttccttttgtataaaatgagcataataatacttgctctgttattcccaatatatgagaaaggaatttctagacctcaaggaataaccacccccaccccaaaatcaagctttaaagtaaaatcttggtggtagagtctagatgttaggtatctggattttcatagttaaattctctcaactctactgtatatttgcagatattttcagttaaaaattaggttttgctgtgttgcaacaaaaaaatgcttccctaaaattagacattgttttatagcacttaataaaatttaaaaatattcttaatcatttgacagagttggtcctagt

SEQ ID NO: 278980 - DNA, 618 bp, Homo sapiens
ctgcttgtctaaggtctcataagcttctaccagaagacccacggaagagcatggttctccatggttttaccaatttaattcagccacaaaggagttgtttgtcatttttattattcctttagagccagaattgtagctgcacagaaaaagaataatttctttacttatgtgtatgakcatgggttggaaatatttaattatatcagtccaatagaaaaatctgacaaattgcaataggacctttccgtggtaaatgacgtccttccactccagctcaaattctcaaaaggaatctttaatatttccatctccccaactcgaagttactcatctaagctatttgatatgtactcacatttatacaacattttaaaatatttaatattttaagagtacgtcaaatatcccaatcactatgctacttagggtatatatagatgaactcaaacttatatttcttatcaaagaacttaacatatgatggacttatcattttcttcctattccatagatggctctgaaatactgcatatcttatatggatgattgtgaacataccaaacagcttactgtgcccagcaatatttctccattatggcccatctactaataggctaa

SEQ ID NO: 278981 - DNA, 973 bp, Homo sapiens
tccgtgtttaggttttttaagaaaaacctctaaactattccacataggggcttctccattttatattaacactaacacaatatcttcatggasttgcccaaacttgttattttccttttatgtttttttaatttttttaagttgttgaaatgatgtaggatttttctcagccattttgccagcttgagacctccagctggagatttccagccagcaatgcccctgcttggcccacattctccacaggaggtgccccaaccactcagccactgggccacacctagtttgcactctggcatgaatcctgcagccaccatgattatgagctcagcccccagatgaagagggtgtgtgggcaagtgagtgaagggtctggccagctgcttcaagtgctggcacaggagtgggttccatgcagggcttacagcttgaccaagcatgttgcaagtgacttccatggtggactctagcatctagacaaggggawtccgtgtttaggttttttaagaaaaacctctaaactattccacataggggcttctccattttatattaacactaacacaatatcttcatggagttgcccaaacttgttattttccttttatgtttttttaatttttttaagttgttgaaatgatgtaggatttttctcagccattttgccagcttgagacctccagctggagatttccagccagcaatgcccctgcttggcccacattctccacaggaggtgccccaaccwctcagccactgggccacacctagtttgcactctggcatgaatcctgcagccaccatgattatgagctcagcccccagatgaagagggtgtgtgggcaagtgagtgaagggtctggccagctgcttcaagtgctggcacaggagtgggttccatgcagggcttacagcttgaccaagcatgttgcaagtgacttccatggtggactctagcatctagacaagggga

SEQ ID NO: 278982 - DNA, 491 bp, Homo sapiens
gagacactttgcctggttactatgggaattctcacttatcttacccgagtccaccaaggtggcacccccaggagtcagcaagagttgcagcattactgggcttggtgtgcccccaatgccaatatggttgcagcgactacaggcttagagcataacactcaattccctttgaatacttagaaagctttctcaagaaggatggctacaaacaagtcaatactgaaatacctaactcttcgatgcctagrcatcagcaaacatcctcaagtatcaagaacattcagaaaatcatgacatcgctgagaaaactaaatcagcaccagtcacaaatctcagagtgttggagatatgtgactattgagacagataattcaatatagctgtcttaagaaagctcagcaaacttgaagataacacagagaaggaatgcagagttctgtcagagaaatttaacaaatagattgaaaaaatttttaagaagtaagcacaaa

SEQ ID NO: 278983 - DNA, 533 bp, Homo sapiens
agagttccagtttcagttttctgcattatggctagccagttttctcagtaccatttattgaattggatatccattccacattgtttatttttattgactttattgaatatcagttgggtatagtatagggctttatttctgtgatctctattcagttctattgctctatgtgtctttttttgtatcagtatcattcatgaatttttttttactatagccgtgtagtataatttgatgtcaggcaatatgatgcctcaggatttgttctttttgcataagaatgctttgtctayttggaatctttatgttgcacatgaactttagaattttttttaattctgtaaaaataatgtttgtagtttaataggaataacattaaatgtgtagactgctttggacacagtgggcattttaacaatattgattcttccaattaatgatcatgaaatgtatttccatttatttctgtcatctacaatttctttcatctgtattttgtaattcttgtagttatccttcacctcattggtaaa

SEQ ID NO: 278984 - DNA, 596 bp, Homo sapiens
atcttttttttgtaagggtactaataccatcattaaaaccataccttcatgagctcatctaaacctaattaactcccaatcgcccctccaaatatgatcacattggcaaacagggctccagcgtgaattttaagggagcacaattcagtccataccacatttgatgctctatttaaaattgtttataaaaacaactaatgtaaccttcattatcccttttatttatcattttccaattcaagttaatcttccacaattttttaacctccatttaatagaattcaattcatctatgtcctgtccagaatatctagcagatgcttcacctggacttcacttagagtatacattttcaacattacatatacttttaaaacatatatcttatctttttctgtttagatattcaatggacaacaagagatgttacctaattctctcataaatcrccaactctggctttttctaattttatatattcagggaaaatgttgaagaatcagaattaattcccagaggcattttcaagtgtataaaataggtgaaatatcacaaaaaaaaacagaagttactttgtgaagactttatgattactg

SEQ ID NO: 278985 - DNA, 593 bp, Homo sapiens
attttatatattcagggaaaatgttgaagaatcagaattaattcccagaggcattttcaagtgtataaaataggtgaaatatcacaaaaaaaaacagaagttactttgtgaagactttatgattactgcctatgctcctccttctttatttatcactctcctcgaagaatagctgaaattaaaacagttagttttatcactactttttgtattatctcatttactttattttaatacataatggccattattttagtctytgttttgaactttaaattttatgcagaaagttagatattcttttttatcgttgagtttcatagagtaatgagttatatgttatgggagtctcacatgctttaaatctgttaaatatgtaaatacatatgtatgtgcattaacacacgtatgtaacacactaacacacacacatacacacacacaaaaacaattccaagtcattcatttaatctatctatttaatctgtctattcatttaactatctagctccaaataattggaggcaaaacccagcataatgttactatgctctagtgttcatctataacataagaaagtcctgtttgatgtt

SEQ ID NO: 278986 - DNA, 593 bp, Homo sapiens
attttatatattcagggaaaatgttgaagaatcagaattaattcccagaggcattttcaagtgtataaaataggtgaaatatcacaaaaaaaaacagaagttactttgtgaagactttatgattactgcctatgctcctccttctttatttatcactctcctcgaagaatagctgaaattaaaacagttagttttatcactactttttgtattatctcatttactttattttaatacataatggccattattttagtctctgttttgaactttaaattttatgcagaaagttagatattcttttttatcgttgagtttcatagagtaatgagttatatgttatgggagtctcacatgctttaaatctgttaaatatgtaaatacatatgtatgtgcattaacacacgtatgtaacacactaacacacacacatacacacacacaaaaacaattccaagtcattcatttaatctatctatttaatctgtctattcatttaactatctagctccaaataattggaggcaaamcccagcataatgttactatgctctagtgttcatctataacataagaaagtcctgtttgatgtt

SEQ ID NO: 278987 - DNA, 554 bp, Homo sapiens
atggtaaaacctcaaatgcaatgctgagttctatagcgcagccactggttcttgccatatgtctcaatcaaatagcttcgacaaatttattattaatgtcaccaatctttgatatataggaatgttgaatattgcagaacatttaaaatactttaattcasctttctcatgctatcatcaccacccatctttaccgtcagggagtcaattggtaaaacaaaaattctggcatggtatttagcttttatttagaggaagtgagacaaatatttaggaagaatcacattgagacattttcacctctggaacatggcaagaaacaggaaaagcctgggaagagttgacatcatgagcccatgaaggaccagcatcaaggcattctgaataccacaagacaaaagctagagttatttccctacttcatttacttctgtgaagaagttcattatatgattcctttcttatacataattagatcaggaacatgtaaaactgaacctcaagagtttcatagccatgacttcatctggaagagttacagaaattcaggaatt

SEQ ID NO: 278988 - DNA, 563 bp, Homo sapiens
caattagttaattgatctcattcaaatagagttaaaattgcaaagagggatttgaatgaactgtattgcagaatttcagactacactagaccccaatcaaaagcctcctcatatttttgcctctgtgtgtgtgtgtgtgtgtgtgtgtgtgtgtgtgtgtgtcagtgaggaagagagggagggagagacaaagagggaaagaatgtaagtgtgtaggkgtgtgtgtgtgtgtgtgtgtgtgtgtcagtgaggaagagagggagggagagacaaagagggaaaaaatgtaagtgtgtatgtgtagagtattacatgtgcatagtctacaactccatgtattattgtgtgttttggtagtaggcttactaaaacatagaaggtaaggcactgagaattaagtttgttcaagctgcttcagatctctggatattttcagtatatgaaagatccctgacatgtcccttttttaagggaggagtgagatgtgagattataactgtaaagtgttacagtggccttttctatgcacagaaatgtgggctgaaacacaagcaatgttttta

SEQ ID NO: 278989 - DNA, 563 bp, Homo sapiens
caattagttaattgatctcattcaaatagagttaaaattgcaaagagggatttgaatgaactgtattgcagaatttcagactacactagaccccaatcaaaagcctcctcatatttttgcctctgtgtgtgtgtgtgtgtgtgtgtgtgtgtgtgtgtgtgtcagtgaggaagagagggagggagagacaaagagggaaagaatgtaagtgtgtaggtgtgtgtgtgtgtgtgtgtgtgtgtgtcagtgaggaagagagggagggagagacaaagagggaaaraatgtaagtgtgtatgtgtagagtattacatgtgcatagtctacaactccatgtattattgtgtgttttggtagtaggcttactaaaacatagaaggtaaggcactgagaattaagtttgttcaagctgcttcagatctctggatattttcagtatatgaaagatccctgacatgtcccttttttaagggaggagtgagatgtgagattataactgtaaagtgttacagtggccttttctatgcacagaaatgtgggctgaaacacaagcaatgttttta

SEQ ID NO: 278990 - DNA, 588 bp, Homo sapiens
gtacctcaaaatgagaatgtttctgatttggaattaaggcttttaaaggggtaattaaggtaaaatggggtcatacaggtggcccctaatataatgtaactggggtccttataaaaagagattaggtcaaagacagacaccatataaagacagaataagaaggcatcgatctgcaagccaaggagagaggtttcaaaagaccaaatctaccaacactttgatcatggacttctagctttcaaaacrgtgagagaataaatttctgttgtctaaaggacccagtttgtgctatgcgtttatggcatctccagcaaactaatacagaagaaagaacaaaataggacatagtttagacatctcttatagattaagattatatacatatacactttaatgttaatagttaccattatttatttattttattttatttgccaatatttaagtaatactaatctgaatatttaccaaatatatgtatgcattatgtaagtagtcttaaatgatgactgtgtcacttggaacattttattttcatttattcatgaattttttcaggaaaggctaagacatcattattgaggacta

SEQ ID NO: 278991 - DNA, 1083 bp, Homo sapiens
  misc_feature (1)...(1083): n = A,T,C or G
tcataatagtctgcaataattctctgaatttcagaggtctcatttatgtctcctttttaatttctaattttaggtcttctttttttggtctagctaaagatttgtcaattttggttaacttttcaaataaatgactatttgtttcgttgatcttttgcattttttaatcccaattttatttgtttctgctttgatatttattgttyctttccctttactaattttggggtttttttttttcttgctttttgaattccttgaggtgcatcattaagttgtttattttaaatctacttttttgatataaatgtgtattgctataaacttccctcttagtactgtttttgcgatatcctataggttttggtatgtggtattttcatttttctttgtttcaaaaaatgttttaattcccaccttaatttcttcactatttgtcattcattagcatgttgttcaatttttgtgtgtttgtgtactttctgaggtgcctctcattactgacttgtagttttattttatgattgtcagaaaatagttgataaaattgtatttctaaaaaattggtttwgagcaatgtgtagtttaatgatgtttattctaggagcggctagtgaaaattggattctaggaatttaattatagatcatcttggtgcctccttccaggagtctaatagagagactaatttgattgctacttgcagagtttcattgaagaaacttccccaaacgggatttcgtgcccactgccttacatttctgtttatgcaggttggtcaatgttaagattattaaatgtcaaggaccacaaawttaaataatttgttcttatttttcatctgtgtttatgtttctctgtagctggaatttaaattgttttagacataaaggatattttattttaaattaaagttgttaagcatctttcccgtgtgaggcatcaggttttcagggaagatacaaaaatgaaaaaatatacatcacctagtaatttacccaagtcattgcagatatcatatatgaaaaaaaatggggatttttttttttttttnnnnnnnnnnnnnnnnnnnnnnnnnnnnnn

SEQ ID NO: 278992 - DNA, 493 bp, Homo sapiens
cgaacatgtgagtgcatacatctttttgatagaatgatttgttttcttttggatatatatccagtratgggattgctgggtctaatggtagctctgttttaagttctttcagaaatctccaaattgctttccagagtgaagaagcctgtcttttagataattttcattttccctactttagtatcctgattgatatctgtatttggttttagataggtaatttgatttgaaaccaacaaacaagagtatgccttttccataatgaatgttctatcatgccagaattaggtcttttaaaatatcacttttcaaaaggccatagttttgaagggttatggaagaaatgttctgcactgttgacctctaatatgtatctatttgggatctcaaccacttactacttttatgctcagcatacgttattataaggtgccaaaattaaaaacaaaattccttcatataaattagtgactaaataccatagttccaaatt

SEQ ID NO: 278993 - DNA, 635 bp, Homo sapiens
ttattgtttctatttgctgcaatgcactttttcccctcaacatatgcagaaatttatttccaaaatgaagggagataaggagggaaggggaaggtagtggtactaaccaaagtcatcaaamccaagctgcaacaagaacaagtcactttggttcctggagccaaacttgaagaggaaataggcagaaaggaagacaaaattgtaagaatatatagtcagtgggattctttttctatctaaatgatttagttataaatatagacgtcttccctctatgcatgtaacaaatacaaaattcactaccgtgaaattttaaaactgaactctttcacatttgttaaaaaagttaaaatcacataattttcttcccttcagtttctgaactattacatggaataatggctagtcctaacttctatacacagttaagctatattaaactcctttgacagtataaggagctacataatttctatcacacttgccttgaatttaggcatgagaaaaatttcttgaagcgactaaaaaggagcaagtcaagaaaaaggaaagctataaaggagacaaaaagaagactaccagatgaaacaattaccctgaaaaactcatgtattttattaaaggagtacaaatac

SEQ ID NO: 278994 - DNA, 325 bp, Homo sapiens
gtattttattaaaggagtacaaataccccacaaatgacaataaatgtaatctattacaacaaagtaagcaaaataragtgcacatatcaagcatgataaatggccctaataggctatctgctgaaagacgtaaggctcgagattaagtccaccaaagggtccacattccttttagaccctaaagaaaaggttctgcaatgcacttttatttttttcttttagtctgtaaattgttgcattgcacttttaatatacaaatgtatgtatacaatatttctcacgtatgcatttaagaaatattcattgtgaacctactattccagat

SEQ ID NO: 278995 - DNA, 633 bp, Homo sapiens
gcacaaattgaatgaatgaatgaatacaaatgagtattatttatgtatatatgtgtgtgtgtttgtcccttttggtaaagtaacttcacatttaggaacttatcgtacaggagtgacaagagtctgctcatgttttcacctgcaagaatgttgattcacatgcatatttaaattagtaayacaactaaaaagctctcctgagttcaacaatgaaaacacagttaatagtataataatacagataactaagtgatcgtgatgaatagatctttgcagcctattgttaagtgaaaaaactctaaaaattatgtataatataaacccatttgtataaatgtaaatataggaagagtttgaaatcttatagccaaatatttacaatcaccatctcttaactggtgagattacatgtgagttttagatttttcttcctgttctattttggataaggttatttaaattttcctcagtaaatatatattacttttgcaataaaaataatctgcatttctaatagtttatagtttgtttcttcccatgtttcagttgttattttgtgttgtaactatcactcagagccctttgagactccagttatagcagaacaagtttgcaactgcgtttcacagtgtt

SEQ ID NO: 278996 - DNA, 540 bp, Homo sapiens
tttttgccagggttagctgacacaagcaaaaagcaatgcaatagccatcaatctgccttgaacaagatctattgtctcctttggttgttatattttagtagactttttcaaaactgaatttttcaggaaaactgaacatacacattaaatttacrtattttcctccttgttgttttcatatgttaaaagactttgactaagaccccaaaaacaatttttcaaaaaccctggctaattttcacttattttgcaaaaacgaaagttttctatcatcttcaccccatattttcttccaagacaaagggtttcactaagtgaatgaatctaacatatatcattcaacatttttattatatcatgccacccaacctcactcattatgctctttgcatgatctaaacattcagttccccaaaattaaagccactgcctgcaaaatactgtcttttgagaagtacaattaatgaaatgttttttaaatgaatgtacgtgcatttatggaaatgggacttttcttagaaatagtttgttgcttgaaaa

SEQ ID NO: 278997 - DNA, 1081 bp, Homo sapiens
tttttgccagggttagctgacacaagcaaaaagcaatgcaatagccatcaatctgccttgaacaagatctattgtctcctttggttgttatattttagtagactttttcaaaactgaatttttcaggaaaactgaacatacacattaaatttacgtattttcctccttgttgttttcatatgttaaaagactttgactaagaccccaaaaacaatttttcaaaaaccctggctaattttcacttattttgcaaaaacgaaagttttctatcatcttcaccccatattttcttccaagacaaagggtttcactaagtgaatgaatctaacatatatcattcaacatttttaktatatcatgccacccaacctcactcattatgctctttgcatgatctaaacattcagttccccaaaattaaagccactgcctgcaaaatactgtcttttgagaagtacaattaatgaaatgttttttaaatgaatgtacgtgcatttatggaaatgggacttttcttagaaatagtttgttgcttgaaaawtttttgccagggttagctgacacaagcaaaaagcaatgcaatagccatcaatctgccttgaacaagatctattgtctcctttggttgttatattttagtagactttttcaaaactgaatttttcaggaaaactgaacatacacattaaatttacgtattttcctccttgttgttttcatatgttaaaagactttgactaagaccccaaaaacaatttttcaaaaaccctggctaattttcacttattttgcaaaaacgaaagttttctatcatcttcaccccatattttcttccaagacaaagggtttcactaagtgaatgaatctaacatatatcattcaacatttttattatatcatgccacccaacctcactcattatgctctttgcatgatctaaacattcagttccccaaaattaaagccactgcctgcaaaatactgtcttttgagaagtacaattaatgaaatgttttttaaatgaatgtacgtgcatttwtggaaatgggacttttcttagaaatagtttgttgcttgaaaa

SEQ ID NO: 278998 - DNA, 1225 bp, Homo sapiens
aaactataattcaataatacaattaatattgttttcttgaacttcaattcataaacataataattattttatatcttttagttgataactatacattatgaaatatatggtgtaattaaattatagcaatctctccaaatggagttctctttgagacctcacataattagaatctactcttaactttaaaagtaccacaaaggccaaaagttcttcatccccagatgtaagattaactggagatttgtcttcatgaacaaatatctctcttacttacaacttctattttgatatttcctgacaataagaaaatatctttaccagtattctgagcttagtaggtgtgcattatgtgttggcttctttattttttcactttcacttctttcacacacatttactaccttccagtctatacacagaacacctcttcgtgtgatgacacgcatttgaggatgtgaactgtagactttagttaataataacatatcagtattggtgcatcaatgkttaaaaaaaagtaccacagtgatgcaagatgttaatagaggaaactggctgggagtgagatggtataagggaactctgtattctccactcaaattttctgtaaacccaatgttgctttaaaaagtawgttttgtattaaaaatatttaaggtctactatctgagaagttttcaagtttacaatgtatattattaaacataatcacaatgctcttcaagcttattcctcctcacgggaaacttctattctttgacgaacatctctccctttctatcccactacccacacaattttctttcaaccacatttctactccccttctatgagactgaagttctttaagatattttaatacacaaacattccctaggatagaacatatgtttccagaatagatcacatgttagacaccaaacaagtctcagtaaacttattaataaaaagattgaaatcctacawgtatcttttctgactataagaaaatgaaagaggaaaacaataacagaaggaaaacttgaatattaacaaatacatggaaatgaacaactctctaaaacaaccaatatgtcaaaaaagaaataatgatgggaattagaaaataagatgaataaaaacaaaaaatgcaacatgccaaaatttaataaatgtagagaaggcagtgcccagaggaaaatttatgaatacaaataactacattaaaaaagaagaagaagtt

SEQ ID NO: 278999 - DNA, 554 bp, Homo sapiens
cttatgactaactaccactatttgactttataaagtatatgcacgtgaaatttaaataaaatatattattaaaatggtgggaaaatacatgaagaatatttgccattatcaacaacctctgatttaggatgtctataacccaaaagaggaaagtgatattttatgakagtaaaacccataaaaactcagtgaagtgatagaatatatacatttgtattattctttgtcaagtttgatttactactatcacttttataacatttgatattttcaagtattttacaaagtcatttgatcttcatacagtctgtaaaatggggaagacattaagattctccttttgcagacaaggactcatacacattaagtgatgtgccgaaatgatgagccaaactggtcactgacagtccagcatcttgactcctaggcttttattctccttccagcattcccgaataaacttctaagaagctgtctacaattgtctttaccttctcttacagcagggagaccactaaaagattaagtggtcatcctggagatacaaaacagtc

SEQ ID NO: 279000 - DNA, 647 bp, Homo sapiens
acttatgtcatatatgccatctgtcattaatcaaaatgtgctgtgcatattttggtttttgtccgtggttcctggctgactgctcctataacctgtgtaatttcataagtgactacagcaataagagtatctttggttatatttggccttttgtcctgggttcttgaaacagctctggatcagttccagagtgataaagatgaaatayagtcttttgttacttatcataagccccttttaaccacacttgagcttatgttaatgaggttatttttggaaagtttctagataaccccactggttgaggtgctggttgccagggacaccaaccatgtgctcagagggttggaactcacagccctaacccaccacctctggggaggggagaggagctaaagattgcattgatcatcattgaccaatgatttaataaatcatgccttcataatgaagcccacataaaaacccaaaaggactgagttcagggggcttccaggaagatggccaagaacacatccccgtactgggagggtggcatagcgcagctccatggggacagaagctcctgtgctcaggaccctttcagacctcatcctatgtgtatcttcatctgcctgctcatttctatcctttaaaatatcccttat

SEQ ID NO: 279001 - DNA, 647 bp, Homo sapiens
acttatgtcatatatgccatctgtcattaatcaaaatgtgctgtgcatattttggtttttgtccgtggttcctggctgactgctcctataacctgtgtaatttcataagtgactacagcaataagagtatctttggttatatttggccttttgtcctgggttcttgaaacagctctggatcagttccagagtgataaagatgaaatatagtcttttgttacttatcataagccccttttaaccacacttgagcttatgttaatgaggttatttttggaaagtttctagataaccccactggttgaggtgctggttgccagggacaccaaccatgtgctcagagggttggaactcacagccctaacccaccacctctggggaggggagakgagctaaagattgcattgatcatcattgaccaatgatttaataaatcatgccttcataatgaagcccacataaaaacccaaaaggactgagttcagggggcttccaggaagatggccaagaacacatccccgtactgggagggtggcatagcgcagctccatggggacagaagctcctgtgctcaggaccctttcagacctcatcctatgtgtatcttcatctgcctgctcatttctatcctttaaaatatcccttat

SEQ ID NO: 279002 - DNA, 636 bp, Homo sapiens
caagtatgagtcttgaggtagggaaagaaggccttaaggtctggggcttttggaagaaggtagaacttgagctaagtttgaagatgagttggatttaggtaggtgaagagcctggcsgggttgctgatgcctgtaatcccagcactttggggaggctgaggtgggaagatcccttgagcccaggagtttgaggttatagtgagctgtgactgtgccattgcactctagcctgggtgacagagtaagaccttgtctcttaaaaaaaaaaaaatagaaaaggaaagctgggtgtttcaggcaaggggagttgtaataggatgagaaaattagagaaaattagaaagtgaaagaccgcatttcatagctagtgaatgaatcatttggcattgggcagtgggatggtaggcatggtggtggggatggtggggagaggtggagaaatgaaatgggaggcgggtagggcctgggaagtttgagttgggcagctagtgtacattttttagaagagaaactgttgaggaaattttggtattaggaacttaatgtggctgctgcaaaagtcattcattatctcctgggttaaaatcacattgccactaaagatgggttctaggccacctacttggacttttacct

SEQ ID NO: 279003 - DNA, 425 bp, Homo sapiens
aagtggtaggggcagcacaccagctgatatggagcccagatggtttggtgcaggagtgtctgtagcagggcatagccagggatgctcatccccctaggctggacttactcccatagaagactgtagccctggaggaaccgtcagacctgaactctgcagggcagtcttacctatgagatatggccagtctgacctgaggacccctcagyctgttggcctctcctagggtactagcctagcagccctgcatgcaatgcagccgccaggtacctcctaggggccctcatcatagctcctgcacttgcagaccagtggagagctccagcagggtggcccccacggcaatgcaccagcccactgaatccctcccaccacttcagcttcccctggcccgtggcaccccccatattactttgttgtcacat

SEQ ID NO: 279004 - DNA, 425 bp, Homo sapiens
aagtggtaggggcagcacaccagctgatatggagcccagatggtttggtgcaggagtgtctgtagcagggcatagccagggatgctcatccccctaggctggacttactcccatagaagactgtagccctggaggaaccgtcagacctgaactctgcagggcagtcttacctatgagatatggccagtctgacctgaggacccctcagcctgttggcctctcctagggtactagcctagcagccctgcatgcaatgcagccgccaggtacctcctaggggccctcatcatagctcctgcactkgcagaccagtggagagctccagcagggtggcccccacggcaatgcaccagcccactgaatccctcccaccacttcagcttcccctggcccgtggcaccccccatattactttgttgtcacat

SEQ ID NO: 279005 - DNA, 559 bp, Homo sapiens
gcatgtttactaaactgaatgctgtatttgtgtttttaaaaaattatgtttcgactttttctttcaaatttacagctagaaaattaaagtctaccacagccagactccaggccccaggaatgatttaatgcaacatcacattagccagaaagggagaataaatgaggtgaaaacattttgttgtatcattttcccataaaaagcttgtaagaatacagagtcaccccatgaagctgttcttgtgtcaattgttgcagcaaaataaaaaattctattgtaatctgtgaatatctttaaaatggccaactgctccaaacttattaagcattcttttctacacagtcagcttaaatacccacaatacctttgaaaaagttgcaggrgtgaagagacagtcttatggggttgtttattatcactgtgatggagctcaaaactagggtgcagatccccatgctagtgttgattttataatggaagtcccctagacactgttttttaggtcttccaagcatagtggctcacttttacctaaggcataactcaagtactttcccag

SEQ ID NO: 279006 - DNA, 602 bp, Homo sapiens
ttatacaggtgtttcattatcaggtccagagatttgattaaacaagatttctcccttatagggaaatttttatagaaagtacttataatagacattttgtttatttttatcttgcccatccccatttcttttcttgttaattgtaccctgacttttcaaaggaaatccatttctctcaaacccttagtccatgtggtttacagttgggtacaagaccargatccaaatatttagtcacagggattgtttcagagttaggtatatgatttaaactgggcctatgagaagcagccatgggcttctgctgtaactgtcaggaaagggaccatctcagtgtactgtggtttctaagtagaatttgctgtggccatattatgtggaaagcttgtctgatgaagaaggcaacccagaaaaaagaggaattgagagatgaagacagatcataatgacattctttgagtaattggattgccaagcctttgagccagttctacccttgtacttttcatctctgtgtcaataattttttttaaacttaagccagcttgtgttggcgttccatcacttacaaccaaaagagacccaattaatgaacctacaac

SEQ ID NO: 279007 - DNA, 529 bp, Homo sapiens
agtaattggattgccaagcctttgagccagttctacccttgtacttttcatctctgtgtcaataattttttttaaacttaagccagcttgtgttggcgttccrtcacttacaaccaaaagagacccaattaatgaacctacaactctataattctatataatattacagaactcactttaaactttgattaataatgcaaacttatagagagcctagacttccaagtattcttagtgtcatattcatatgtttgtaggatataaaatacttgtgcacgtgtcatatttgtacatataaaattaaaactactattaatatatttagatagattttgcatattaaaatattatggtatttataataattttcagttatggctagaatgatgacatgactgtagctgaaaagtgtattatgatggaagttgtgttttggtacaattaaggtgaggttatggttagagactctatagtgtccaaaatttgctctattattgatcatctatccctccttaacagtttttaaaaa

SEQ ID NO: 279008 - DNA, 595 bp, Homo sapiens
cagccattagaatataatttatataaatactgtttcaagaaagctgtatatttctagagaagactgaaagaaatcaatacttaaatctattaatttcacttgcagtaatagtttattgatgctataaaactaaatctattgrtagtacaccctcagattaggagcccactactcagaactcatggaacttgcagctcctctatttttgtcccttttctcagcactaattttatgactgcttgccttttttgcccattccccaccacagcatagtcatctggattaggtggttctttttgtccctcagatagttttatttgagctttatagcaagggtgaccctcatgctagagcctaaagtagaaacatttcctccttctgatctttgtgttctttaaaaacaaaaaccaaaacccagatgaactaaaaacatgaacatttttcaatcattgtaactttgaaaacaacattcagggatggctgatcattccattagagtgtttttttttttcttttgtctgagttcattcatatttctagctgttctgtctattgacagaagcgtggtttgtctttctctatgctttttgcagca

SEQ ID NO: 279009 - DNA, 530 bp, Homo sapiens
tttgtttgagcagagctgggttcaatctctctcccctrttgcaatagtcttgaataatgtcttccttgcctgtttaattccatctggtgtaatttttctttgatcttttggtgagacttacttgattataataattaatagaggttgtctaatatttctatatttttttctggaaaaaaaattattaaatgtatggtaatatcagtgggctttaggctcataaaggagactttgaccagtaatctcccagggcacaaatctggggaaatgagttggagaccattgctctaaatgcacattccttggtagcagaaccttttggtaatttttacctctgagaggctgacatgtgttcctggcatgcccttttggaaccaagtttggttttcctgtagaaatggcttataattttggctggtttttgtctcagataagaatgtctagcatacttggggatcaaacctgctaggggtctcttcttctgaggactgaggggtgactgagaaatgtgtaccaaaggaataattagc

SEQ ID NO: 279010 - DNA, 440 bp, Homo sapiens
catttcctgcactcagcctcttccttttggctctctaactgcccagccttcttgcgtttcctagagacaacctagccagtccacttaagggcctttgcrtggctgttctctctgactgggatgcttctccactaggcattcaccttgctaacacccccactttatttaaatctctgctcaaatgtcacctcctcagaaaaaccctctctaaaagtgtgccccatttttctcctcccctttttcctgcttttgatctttcatcgcagtttttcatgcctgaggttataaaatgctttttggttatgatctcttccccactagtccataaacataggccaagaactttgtcttatcattgcatctgaagttcccagaatagtgcctggcatttagtagtatgcaatgcatttgtattgaacaagtgaattaatttagacttg

SEQ ID NO: 279011 - DNA, 440 bp, Homo sapiens
catttcctgcactcagcctcttccttttggctctctaactgcccagccttcttgcgtttcctagagacaacctagccagtccacttaagggcctttgcgtggctgttctctctgactgggatgcttctccactaggcattcaccttgctaacacccccactttayttaaatctctgctcaaatgtcacctcctcagaaaaaccctctctaaaagtgtgccccatttttctcctcccctttttcctgcttttgatctttcatcgcagtttttcatgcctgaggttataaaatgctttttggttatgatctcttccccactagtccataaacataggccaagaactttgtcttatcattgcatctgaagttcccagaatagtgcctggcatttagtagtatgcaatgcatttgtattgaacaagtgaattaatttagacttg

SEQ ID NO: 279012 - DNA, 565 bp, Homo sapiens
gagggtaaaattttcctgccaccttggagaaataattgacaagaggtaggatcagtatcggccctaggaaataaacaaatctccattttcatctgagaaagcgtgttcagtaaaaacagaaatagaaagcccaactggaattaggtggcagctactacatggtgggcatgcaggggcccaggatttacctaggcacatttgatactaamatatgacaatgtttacaaatcccacctacatgagaggttatatctcctaatatgtagcttgcactggaaaacaacagtgtaggcattgcagaaagggaatggaagacagaagtaacatctactcagtactcactgctatagatactgctgctatacatgcacgattccatgaaagttccagccgtcctgtggagtgggtacttttattatctccctttcatagatgaggtggctgaggcttagagtggatacgtagcacattaagacaaccatgctggaatactaattcggggctgtctgacttgaaagtcagtcctgtcttctgtggcactctgtgattatagttgcataagact

SEQ ID NO: 279013 - DNA, 565 bp, Homo sapiens
gagggtaaaattttcctgccaccttggagaaataattgacaagaggtaggatcagtatcggccctaggaaataaacaaatctccattttcatctgagaaagcgtgttcagtaaaaacagaaatagaaagcccaactggaattaggtggcagctactacatggtgggcatgcaggggcccaggatttacctaggcacatttgatactaacatatgacaatgtttacaaatcccacctacatgagaggttatatctcctaatatgtagcttgcactggaaaacaacagtgtaggcattgyagaaagggaatggaagacagaagtaacatctactcagtactcactgctatagatactgctgctatacatgcacgattccatgaaagttccagccgtcctgtggagtgggtacttttattatctccctttcatagatgaggtggctgaggcttagagtggatacgtagcacattaagacaaccatgctggaatactaattcggggctgtctgacttgaaagtcagtcctgtcttctgtggcactctgtgattatagttgcataagact

SEQ ID NO: 279014 - DNA, 493 bp, Homo sapiens
cactgaagagaatgattgaaattaatagttctgatgaatatccatatatattaatttaaagccagtcactaaagtgtagtatctgctctgctggagttttaaaggtattatctatttgaaatcttatttattttattgaataatgtgtaactattgcaatgaatttaacaccaaaaattgttgaatgactgccayatgtaaatactataataattaaaaaattatctgcaatctacaaaccacaaactaattcagaataacttcttctgacgccagagaggtctgtggtccttcaagaaatgagagtgagggaattctgcttgaggcataagggcatatgagaaagagcttctcttgcattctttttatttccataaaggcacctgctttgaggcttagggtctaagaaagtctcagattctgaactctgccctgcctctagagtcttggattagttgctttgttaaagtcattaaagtttaaaaaataatct

SEQ ID NO: 279015 - DNA, 493 bp, Homo sapiens
cactgaagagaatgattgaaattaatagttctgatgaatatccatatatattaatttaaagccagtcactaaagtgtagtatctgctctgctggagttttaaaggtattatctatttgaaatcttatttattttattgaataatgtgtaactattgcaatgaatttaacaccaaaaattgttgaatgactgccatatgtaaatactataataattaaaaarttatctgcaatctacaaaccacaaactaattcagaataacttcttctgacgccagagaggtctgtggtccttcaagaaatgagagtgagggaattctgcttgaggcataagggcatatgagaaagagcttctcttgcattctttttatttccataaaggcacctgctttgaggcttagggtctaagaaagtctcagattctgaactctgccctgcctctagagtcttggattagttgctttgttaaagtcattaaagtttaaaaaataatct

SEQ ID NO: 279016 - DNA, 644 bp, Homo sapiens
gcatatgtaatttttgtggttgaattttatgtatgactctaatttcctagtataaaagcaaaaagtgaaacatgctgttttataattgtcttaattatggaagataattctatttattgtattagttagaatattttaagtagtataaaacccaactcaaaaaggcccacaaagacctgaaaatattcataagtgtggtggtagtaaggcttggtttaactagaacttggtctgattggctcaaatattcttggtaatttcattctttttgtgttgatttcatctccatcttttcacaagatggttgcagtagtactgaacctcacatctgtaaacaactacatacagagcctatctcttttgactttctcttgacagggaaactttacttctatgttgtccagtgaatttaaccttcacatctcactggcctaatcatttaattaataacctgcaatcaaagraatactgtgggcagattggctaaggcctggtttcctgaagcagttgtagcaagaaactggattaccttgggcaagtcacagccatctttgaaatgattagtatgatcagtttcccttgaagttcaccagctatgtagtctaggagtgtatacctgaacagatactaaattaggaaaggga

SEQ ID NO: 279017 - DNA, 1249 bp, Homo sapiens
gcatatgtaatttttgtggttgaattttatgtatgactctaatttcctagtataaaagcaaaaagtgaaacatgctgttttataattgtcttaattatggaagataattctatttattgtattagttagaatattttaagtagtataaaacccaactcaaaaaggcccacaaagacctgaaaatattcataagtgtggtggtagtaaggcttggtttaactagaacttggtctgattggctcaaatattcttggtaatttcattctttttgtgttgatttcatctccatcttttcacaagatggttgcagtagtactgaacctcacatctgtaaacaactacatacagagcctatctcttttgactttctcttgacagggaaactttacttctatgttgtccagtgaatttaaccttcacatctcactggcctaatcatttaattaataacctgcaatcaaaggaatactgtgggcagattggctaaggcctggtttcctgaagcagttrtagcaagaaactggattaccttgggcaagtcacagccatctttgaaatgattagtatgatcagtttcccttgaagttcaccagctatgtagtctaggagtgtatacctgaacagatactaaattaggaaagggawtatgctttttccacggtttttgcaatccacagaccaggagattccttgtgtgcctacaccaccaggaccctgggtttcaagtgcaaaactgggcaattgtttgggcagacaccaagctagctgcaggagttttatttttgtaccccattggcacctggaaccccagtgggacagaaccgttcactcccctggaaagggggctgaagccagggagctaagtggtctcactcagcgggtctcactcccacagagcctagcaaactgagatccactggcttgaaattctcacctccagcacagcagtctgaagtcgacctgggatgattgagctwagttgggggaggggtgtctgccattactgaggcttgaataggcagttttccccgacagcatgacaaaggcctggaagttcagactgggtggaactcaacacagtgcagcaaagcagctgtggtcagactgcctctctagattcctcttcactgggcagggcatctctgaaagaaagtcagcagtttcagttgggggcttatagataaaactcacatcttcctgtgacagagcacctgggggaaggggtggctgtgggtgcagcttcaccaga

SEQ ID NO: 279018 - DNA, 640 bp, Homo sapiens
ttcaggacatgtaccccagaacttaaagtaaaaaaagaaaaatgatttttagataatgatgcacctaatccttgtacacacacacagacacacacacacacacttgccagtaatataaactgcgaacttgaggagacttattttaaaatgctatttttctctccagagaatctatsgaactttacgtagtgtgaagtttcgtgcctagaaatggaaggcaaaatcaacaacgaaaaaatgttttaaaataataaaatttaagaatgcattgatgataatttttaattcctacttttctgaatttgatgacatcactttatttttccacctcacagtctttgaggatggtgtctacatttagacaacaattcctaattttctggctctgctttgtttccagacgattcttttctttatagtggacttggcagttaaatcaattcccttaagtacagtttgctgaaataaaggcaggttcagggtcctttctgggggcagcaccagccagtattttattatctcttccaaatcatgacactcaatgaagtgtggaactgataaaagattaatttactttaaggtccaagagtgaaaacataatagaaaatgagaagtttcatcataaatgcatcaatgatgt

SEQ ID NO: 279019 - DNA, 571 bp, Homo sapiens
tgaaagactaatgaaactgttgcttaaaatgtgaatttggcaatattgagaagtaagcttaggaaaaacttaggaaattgtcacagcatggcctttagcaagaaaacttttcatgatgttgcattctggtgctttattgatatggcaaatcattttattcgatagttgtaaagatcttctacgaaagactgtcacccatatttgtgggcttaagcaatgttttgtttgggttatatggaaatcattcttctggatagtggtttctctcaggcctcaaatcctcttttcttattattgttatagtaaattctataaaggatgaatgaattagaaagatcttctcattagactaatttgatataatgatcatctttcyacatgatgattttctatgaataaatggtaaagactcattaatgtgattttagaggctcatttgttctgcagaagatcatttttcttttagaagagaaagatctgagtgtaattaagttagatttgtattcttcaggattctaggaaatctggaaatgtatattttgaacttcaatatttatagtatatatatgca

SEQ ID NO: 279020 - DNA, 571 bp, Homo sapiens
tgaaagactaatgaaactgttgcttaaaatgtgaatttggcaatattgagaagtaagcttaggaaaaacttaggaaattgtcacagcatggcctttagcaagaaaacttttcatgatgttgcattctggtgctttattgatatggcaaatcattttattcgatagttgtaaagatcttctacgaaagactgtcacccatatttgtgggcttaagcaatgttttgtttgggttatatggaaatcattcttctggatagtggtttctctcaggcctcaaatcctcttttcttattattgttatagtaaattctataaaggatgaatgaattagaaagatcttctcattagactaatttgatataatgatcatctttctacatgatgattttctatgaataaatggtaaagactcattaatgtgattttagaggctcatttgttctrcagaagatcatttttcttttagaagagaaagatctgagtgtaattaagttagatttgtattcttcaggattctaggaaatctggaaatgtatattttgaacttcaatatttatagtatatatatgca

SEQ ID NO: 279021 - DNA, 589 bp, Homo sapiens
ttaggggcatttcttggcttgtgaaaggcaatactttttacgtatatcagtaaaaaatgtaatatgkcttcatttacttgtgggtgtcatccttcctttctaagttatcagaaagcactttgtgttactttgcaagaaaatataaaacagccattattctccaaaccatgcatatgtgcttcattaatattaaatgtatgctccatcatacaaattccttttctgtgtatataataacatttttttcaatgatgcatcatagtttaatcttttggatggtattttttaaaaacaaactctacgaatattaacaatgcacataacttaattaaaaggataaaaatatgaagaactaggatcaagttcttggcagattataaaaactatatcacagttgccccctggctgacagcaattgtagaatgtcattcattgtgagaaacattctgatatctcagttgttaaaatgtgaaaaatgtacatcttagagccaatgaaatatggtagtagatattcaataatgcttaaatgcttgaagtgtgactttctaccccctgccacccacgggtatatctctagctctaggctg

SEQ ID NO: 279022 - DNA, 1103 bp, Homo sapiens
actcaaggtaaagtctctggcctggtgaaggttgtccttgtaaccttcttctattataccccattggacactgcgtacctcaaatataggaactgtgaattatttccctttgcacttttgctatctaccacagtggctgtcatatattgtctttagtcaaatcttgttattgattttaagataaaacattattttatgtactactaacaaatgttaccacttatatgaatgatttattattactttaaaaatgtaataaatgtaaaaatattttaataaatatatcactactttaataaatgtattggaatttgatattaaagagttattttggactatttagacagaaatatttatcatttaatgttactttctttaggggcatttcttggcttgtgaaaggcaatactttttacgtatatcagtaaaaaatgtaatatggcttcatttacttgtgggtgtcatccttcctttctaagttatcagaaagcactttgtgttactttgcaagaaaatataaarcagccattattctccaaaccatgcatatgtgcttcattaatattaaatgtawggtaattattgtaagttttaaatttacctacatattgatctatatcctattctctctctctgagtctatcatacctggcatatagcaagttttcataaatgatatctatcattagaaaattacatatcatgttatttctgagtatttttatgtctgatttacattttccattgaatttatattatacaagtttagttgttcttactttgctcwttcttttgtatatacacaatgcgagaatgcaagaacagtcataattaatctaaggcagcaaactttggatccttgcaaaacaaaactctaatattgcagacaaatccacatatcttgccctaaaataaaactagagaaaactctgaaagcagagttagaacagtagtagaatttattacctaaaaggcagaacttggccaggttctgccatctcttataggttaaatatgtctctatagaattcttagccgcagatgaagtaatcctgtttgatttatatggccccattttaagaaatctacagaagggaaggtct

SEQ ID NO: 279023 - DNA, 529 bp, Homo sapiens
ggtaattattgtaagttttaaatttacctacatattgatctatatcctattctctctctctgagtctatcatacctggcatatagcaagttttcataaatgatatctatcattagaaaattacatatcatgttatttctgagtatttttatgtctgatttacattttccattgaatttatattatacaagtttagttgttcttactttgctctttcttttgtatatacacaatgcgagaatgcaagaacagtcataattaatctaaggcagcaaactttggatccttgcaaaacaaaactctaatattgcagacaaatccacatatcttgccctaaaataaaactagagaaaactctgaaagcagagttagaacagtagtagaatttattacctaaaaggcagaacttggccaggttctgccatctcttataggttaaatatgtctctatakaattcttagccgcagatgaagtaatcctgtttgatttatatggccccattttaagaaatctacagaagggaaggtct

SEQ ID NO: 279024 - DNA, 529 bp, Homo sapiens
ggtaattattgtaagttttaaatttacctacatattgatctatatcctattctctctctctgagtctatcatacctggcatatagcaagttttcataaatgatatctatcattagaaaattacatatcatgttatttctgagtatttttatgtctgatttacattttccattgaatttatattatacaagtttagttgttcttactttgctctttcttttgtatatacacaatgcgagaatgcaagaacagtcataattaatctaaggcagcaaactttggatccttgcaaaacaaaactctaatattgcagacaaatccacatatcttgccctaaaataaaactagagaaaactctgaaagcagagttagaacagtagtagaatttattacctaaaaggcagaacttggccaggttctgccatctcttataggttaaatatgtctctatagaattcttagccgcagatraagtaatcctgtttgatttatatggccccattttaagaaatctacagaagggaaggtct

SEQ ID NO: 279025 - DNA, 578 bp, Homo sapiens
aattgagaaccactggtctaacttgaaaagcccttccatgattttgatagcaagtgatcatcttgtccttaaaggtagtttattaccacaaactgacacatctgtttaaatttgagtttgcagaaagcagaatctgagataaggccttaaggaatagtggtccttagaagtccaagtgagagagtgaacaaagtgaggcataaaaggggggagagccagtatagtttttattagagagtgttatcactgtaggcaactggggcttagttacaacagggattccctgataaacagtgcggaacccaccttagaatttttccaccaaggtgggaaagccgagatatttattcctcctctcctygccctcattgactgacactgatcaggtagaatttgatcctcagcattcccaggctcccctgcagatgggctttgctaactcctgtgattctggagaaagttctcaggcagagtagcccagtagagggtatttaacatggacagttatcagtttgcagaggaactgtcctttgaactcaatggcaagccaaaaagatgtcggggcagggagtcaatag

SEQ ID NO: 279026 - DNA, 619 bp, Homo sapiens
gaattttgaaggcaaaatcagaccatagcagtagatatgaatagctgtaaacaaggaggtaaagtgcagcagattaaattattggtcccactttctaaaactttctatagtcatattatcctggcctaatgcagtggttggcaatctatggccaaatctaactgggtcmgctctaactgcagttttttattttgtaaagtcttcagctaataatggtttttacatgtttaaagggtttaaaaagagacaaaatatgcagaagaactgtatgtggcctgcaaaacttaaagcagtttgtatttggctttttacagaagaagtttgccaatccctggcctagtgaatagtgaagtgtactttccaactctggactttgggcaataccatatgatatactttgggcaacggaatatgagtagaggcttgaaaaatgtttgggagttggacttactctttggaattttttttttttcctcagcattttaaaacatttaagtataaaatataaaatataaaatgcatatgcaaaaaatacctaaaacaaatctaattcattacaaagcaaatatggttcattacaaagctcaatgatttatttcaaagcaaatatccataacta

SEQ ID NO: 279027 - DNA, 597 bp, Homo sapiens
gtgctttattagctgtatgatttgaaattatcttctcccagtatatagcttcccttttcatttttaaacaatgttatttcaaagaacaaaaatgatgaagtccatttatcaatttgttcttttatgaattgtacttttcttgttgtaattaagaaactttttgggagggcgaggtgggtggattatgaggtcaggagatcgtgaccatcctggccaacatggtgaaaccctgtctctactaaaacacaaaaaattagctgggcatggtgctgcacacctgtagtcccagatactcaggagrctgaggcaggggaattgcttaaacccaggaggtgaatgttgcagtgagccaagatcgcatcactgcactccagcctggtgacagaatgagactctgtctcaaaaaaaaaaaaaaaaaaaaaaaaaaaaaaaatgctttcttctatgtttccttctatatgttttattgtttttggttttacatttaggtttgcgatgaacttgatataatttttgtaaatggtacaaagtataagtcaaagttcaatgtctttatctgaatatccaatatttcttgtgtcatttgttgaaaatatt

SEQ ID NO: 279028 - DNA, 557 bp, Homo sapiens
ctcaagactcattttatacaatcacaaacaaagaactttgtctataacaaatgaaatcactggcaataattcccttcttagagacaaagtgcaaggagtatgtcacatgaataacaattatatatttgtacaatattttgtatgtcctgaatttagaaagttcaacttttaaagagaaaaatataatccagaaatcttttttattattgtttgcatgaaccaaaaggctatttgccagatatgtttagtgttttactctgacatgttcaagaggctacagagtagatattaaacgtgagaacaactggtaaatgacaacttgaaaacaagaaaacagaagataaaggacacaggagagtgatttagggaataagtaaggatagaaagaataaataacaacaaaatcagaccctaggcaaaacgtaaaagaacaggcaagatactcaattayagtgcataggggggtccgtggaagaggaagaaaagggaggtatacatgcatttgtcaagattttatgtagtatcccaacattttatcacaattctccctcccacca

SEQ ID NO: 279029 - DNA, 596 bp, Homo sapiens
tctggggacttggtgccctgtgccctagctgctccagctgtgactaaaaggggctaaggtacagctcaggcagtggcttcattgggtacaagtcccaaaccttggcagtttccacgtggtgtttagcctgcaggtggagagaagtcaagaatcgaggtttgggagcctctgcctagatttcagaagatatatggaaacacctggatgtccaggcrgaggtttgtggcagggatggggctgtcatggagaacctctgctagggcagtgtggaaggaaaatatggggtcagagaccccacacagagcctgtactggggcactgcctagtggagctgtgagaagaggggcactgttctccagatcccagaatggtagatctaccaacagcttgcaccatatgcctggaagagctgcagatactcaatgacagcccatgaagtcagccaggagggggtctataccctgaaaagccacaggggcaatgctgccccagaccatgggaacccatttcttacataagcatgacctggatgtgagacatggaatcaaaggaaatcattttggagctttaagatttaactgccctgctagatttca

SEQ ID NO: 279030 - DNA, 596 bp, Homo sapiens
tctggggacttggtgccctgtgccctagctgctccagctgtgactaaaaggggctaaggtacagctcaggcagtggcttcattgggtacaagtcccaaaccttggcagtttccacgtggtgtttagcctgcaggtggagagaagtcaagaatcgaggtttgggagcctctgcctagatttcagaagatatatggaaacacctggatgtccaggcagaggtttgtggcagggatggggctgtcatggagaacctctgctagggcagtgtggaaggaaaatatggggtcagagaccccacacagagcctgtactggggcactgcctagtggagctgtgagaagaggggcactgttctccagatcccagaatggtagatctaccracagcttgcaccatatgcctggaagagctgcagatactcaatgacagcccatgaagtcagccaggagggggtctataccctgaaaagccacaggggcaatgctgccccagaccatgggaacccatttcttacataagcatgacctggatgtgagacatggaatcaaaggaaatcattttggagctttaagatttaactgccctgctagatttca

SEQ ID NO: 279031 - DNA, 596 bp, Homo sapiens
tctggggacttggtgccctgtgccctagctgctccagctgtgactaaaaggggctaaggtacagctcaggcagtggcttcattgggtacaagtcccaaaccttggcagtttccacgtggtgtttagcctgcaggtggagagaagtcaagaatcgaggtttgggagcctctgcctagatttcagaagatatatggaaacacctggatgtccaggcagaggtttgtggcagggatggggctgtcatggagaacctctgctagggcagtgtggaaggaaaatatggggtcagagaccccacacagagcctgtactggggcactgcctagtggagctgtgagaagaggggcactgttctccagatcccagaatggtagatctaccaacagcttgcaccatatgcctggaagagctgcagatactcaatgacagcccatgaagtcagccaggagggggtctataccctgaaaagccacaggggcaatgctgccccagaccatgggaacccatttcttrcataagcatgacctggatgtgagacatggaatcaaaggaaatcattttggagctttaagatttaactgccctgctagatttca

SEQ ID NO: 279032 - DNA, 583 bp, Homo sapiens
tgaaactttggactatagactgtggactttgagttaatgctgaaatgagttaagactctcggggactgttgggaaggcatgattgggtttgaaatgtgaagacatgagatttgggaagggccaggggcagaatgatgtggtttggctctgtgtccccacccaattctcatcttgaattctcatgtgttgtgtgaggcacttggtgggaggtaactgaatcatgggggtaggtctttcccatgctgttctcatgatagtgtgtaagcgtcaagagatctgatgatttttaaaaggggagtttccctgcacaagctctcttcccttgtctcccaccatgtgagatgtgcctttcaccttccctttgattgtgaggcctccccagccatgtggaactgttaagttcaataacactctttcttttgtaccagtcttgggtatgtctttatcagcagcgtgaaaacggactaaaacaggtactgagcagtgctaagagtgaaytgcatttaaaaattatttttaaagttgcaactagtgttttttttttcctttctttatcctagggtatagttctatggagctttgt

SEQ ID NO: 279033 - DNA, 580 bp, Homo sapiens
cctgagagctgccttaaaatagcatgacttctttcctttgatgctagacttgacaagaggtttgattaggactgcttggaagaacttacagaatgagagatttcatctcatgacaaatgtatctgatgacttgttacaaatttattatgcagaaccacagatggaaatattaaccatgtcttgttttaygaattctgtgtttatccttgaacaaatgaaaacattgtccccttctttctttcaaagaaatagccagagctttctttgatatccaagtttttctttttttttaaagttttattttaggttcataagtacatgtgcacctttgtcatataggtaaacttgtgtcacggggtttgttgtacagattattttgtcaccctggtattaagcctagtacccaatagttattttttctgctcctctacttccttccacccttcacccataggaaggccttagtttctattgttcccttctttgtgtccatgcgttctcatcatttagctcccacttaccagtgagaacatgcagtatttggttttctgttactgtgttagtttgctaaggtaatgac

SEQ ID NO: 279034 - DNA, 580 bp, Homo sapiens
cctgagagctgccttaaaatagcatgacttctttcctttgatgctagacttgacaagaggtttgattaggactgcttggaagaacttacagaatgagagatttcatctcatgacaaatgtatctgatgacttgttacaaatttattatgcagaaccacagatggaaatattaaccatgtcttgttttatgaattctrtgtttatccttgaacaaatgaaaacattgtccccttctttctttcaaagaaatagccagagctttctttgatatccaagtttttctttttttttaaagttttattttaggttcataagtacatgtgcacctttgtcatataggtaaacttgtgtcacggggtttgttgtacagattattttgtcaccctggtattaagcctagtacccaatagttattttttctgctcctctacttccttccacccttcacccataggaaggccttagtttctattgttcccttctttgtgtccatgcgttctcatcatttagctcccacttaccagtgagaacatgcagtatttggttttctgttactgtgttagtttgctaaggtaatgac

SEQ ID NO: 279035 - DNA, 578 bp, Homo sapiens
catctagcatgagtgactacatttttgttttgtctggtctgctaaggcatagggcaggagtctagtccaaaataatgacctcccataaactttgtttaacagcacttataactcagtttttgtctcatgtcattgtatatcaatagccagagatatggccattagattractcagcatttatgctgtggtaccaacaccttccctatcatgagcctagccaggtgaaaaagccaaagtcttcctgtatctgaaacgcatcctgtcgctgctcctctgtctaaaaatcaaagtccacatttatactcaattcaggcaccagaaagtctagtctccattattccatttctacctaaagtgtcaattagttccaccagtccatttccctgttcagcacaagacataggtctgatttttcctaaactcatctttctgtgtgcatttaactggatacccaatgacagtttttggtgttatcataaatttattcaactttttgacacttgcagcttaaaaacaatgtcaaaatcttatatctgatcttttaccaattcctatttcctttactaaccttactaaa

SEQ ID NO: 279036 - DNA, 602 bp, Homo sapiens
tctttataaaaatattccttccaatactactagactagatttgatcttcaaccacttatctactacactgaaataataatataaacsacctcacatttagatttatcttcagcaattaaaaaaactatactgaaactatttggctacaaattttagtccgaccaaacagctgagaccagtttttgctatcatgcaaccaatcagaaattaacagagtgaagtcattctaatcttgccctttgtagaaatggaccctaaccaaactgttgattaatgttatggttgaaactattctaaaccaacaaacacaatctgttaatgtaaatgaacttttctgactgttctcctaagaatcagctaatttagagaaagaccagtgtcatgttctacactgttcatctgtcctttagtgagccatttgttacaggagatctgtcaaacctaaagccagatccatctggaattttgagtctggaatttggaaaaaaaactccaaatactataatcattataataattaatcacacaaatagtactctggaatctacaaaaagaatgagttacagaaaaactgaagaaaaataaaaagaccaaccccagag

SEQ ID NO: 279037 - DNA, 581 bp, Homo sapiens
catgctaaaaccacaaccagtgcaaccatgcacgcagtcaccagcagccccctcaaaacacacacacacaccggcccctgcaagctgtgctgcctctgcagctgctgtgaatgcccacatggaggcaggcaccccagtaacagtaaccactggcaccctgccagagccaatgagcatgcaccccaccatattgctgctgctagcacatgcaaagcaaaatggatttcactgccaccaccctgcaaaacactggttggaccacccattggacagactagtggtctgggagcatctcaacaccccccagtacaatcttcctaacctcaaggacccatagaacaaaggtggagtctgatacaggtctcccaaagttagggcatgcagtccagaagtcyggaactgagccttggcccctaaaaccttccagaaatgaagcaagtaaactgaccctaccttataccacaatccaaccttcaaaggcatccaataggaccaaagaaaatacccatccaaagaacaataacttcaaagatttaacaaacatcagcccacaaagatgagaaagaaccagtgtgaaaact

SEQ ID NO: 279038 - DNA, 560 bp, Homo sapiens
gaatttgcataatgaccattttccttagctgtctgtaaattggtaggaaaaaaatgacaaacccatggcttctaggaactgatattcaaaaatcagaattgtctttgaccagaatgttgaactgtaggattctgaatgggaaatggtttttagagagtcaaaataagttataatattaagcagtaattaaaaattcaattatttagttgcctaaagcattcatcagagtcaaattgaggttgaaagaacttgaattttggaagctgggtgcaaggcttgaaaggctactgtaaggtgtcacctcatgagtatattgtgttaggcctgcacaatgttttgaaattaaaacacaacgagaggatttcacataaaaatcaggagttttgcttttcttgaaaaaaaagcaaaagatgtggcaatacagggcctattgtgcctttcagctgaggtgagtgcttttgagttctccacattcccttccactcaaataatgtrtatgcgaattctcctccacagctgacttaactcatttaaagttacatgactagccctgtaggcac

SEQ ID NO: 279039 - DNA, 596 bp, Homo sapiens
tttgcaattgcaaattgtgctgctataaaaatgtgtgtacatatgtctttttcatagaatgatttcctttcctctgggtagatacccagtagtrggattgctggattgaatggtagatctacttttagttcttaaggaatctccatactgtttggcatagaggttgtaccttcctaccagcagtgtaaaagtgttcccttttaaccacatccacagcaacatctattgcttttttgactttttaattatggctatttttgcaggagtaaggtggtatcttattgtggtttaaatttgtatttccccggtgattactgatgttaaatattttttcatctttgttggccatttgtatgtcttcttttgagaaatgtctattcatgccctttgctcatttttttgatggggttatttctttgttttcttcttgctgatttgtttgagtttcttgtagattctggataccagtcctttgttaggtgcatagtttgcaaacattgagaaggcactttttgatactctaaatatcaggcaatcaggcaagattctggctggtagatattggaaagttttcaggttttatgggtgtgatcatt

SEQ ID NO: 279040 - DNA, 596 bp, Homo sapiens
tttgcaattgcaaattgtgctgctataaaaatgtgtgtacatatgtctttttcatagaatgatttcctttcctctgggtagatacccagtagtgggattgctggattgaatggtagatctacttttagttcttaaggaatctccatactgtttggcatagaggttgtaccttcctaccagcagtgtaaaagtgttcccttttaaccacatccacagcaacatctattscttttttgactttttaattatggctatttttgcaggagtaaggtggtatcttattgtggtttaaatttgtatttccccggtgattactgatgttaaatattttttcatctttgttggccatttgtatgtcttcttttgagaaatgtctattcatgccctttgctcatttttttgatggggttatttctttgttttcttcttgctgatttgtttgagtttcttgtagattctggataccagtcctttgttaggtgcatagtttgcaaacattgagaaggcactttttgatactctaaatatcaggcaatcaggcaagattctggctggtagatattggaaagttttcaggttttatgggtgtgatcatt

SEQ ID NO: 279041 - DNA, 596 bp, Homo sapiens
tttgcaattgcaaattgtgctgctataaaaatgtgtgtacatatgtctttttcatagaatgatttcctttcctctgggtagatacccagtagtgggattgctggattgaatggtagatctacttttagttcttaaggaatctccatactgtttggcatagaggttgtaccttcctaccagcagtgtaaaagtgttcccttttaaccacatccacagcaacatctattgcttttttgactttttaattatggctatttttgcaggagtaaggtggtatcttattgtggtttaaatttgtatttccccggtgattactgatgttaaatattttttcatctttgttggccatttgtatgtcttcttttgagaaatgtctattcatgccctttgctcatttttttgatgggsttatttctttgttttcttcttgctgatttgtttgagtttcttgtagattctggataccagtcctttgttaggtgcatagtttgcaaacattgagaaggcactttttgatactctaaatatcaggcaatcaggcaagattctggctggtagatattggaaagttttcaggttttatgggtgtgatcatt

SEQ ID NO: 279042 - DNA, 654 bp, Homo sapiens
ttcatctcctaagtcagtgtagcaatttatactcccacaaacactgtgtaaaaatggctgcacttttgaatttgccaagatgggatatgatattttattttttttaaatgtcagtttgataggtgagctctttccatttttatagatttttagtacaattcttgggccctgattgcccattgattcttttttagctatggatcttgggatccttcaaatgtcttggttagctcaaaatatttttctatctatgatgcttatcctcctgcttgcagctccatcctttatgcaaaattgctctggctccttgaaattggtttgtttttgctgttgttggtagttatttgtcttatggttctgtcttatgcatgcattagatttttctgtcacttgctcctcttttattcagaaagtggcctgcttataggaaggtcgccagagaacatagataggcttctactctattctttcactactctattaacatgccagtattcaatgctcaccatcttgcgcacaacattctaggaaagtacagggtctgcccccacactcattcagtttattgttcaaggccctctgaataggaaaaatacaatatgattattttggtcaaraaaacagaaaccactctaagtatttcagccaggatgg

SEQ ID NO: 279043 - DNA, 564 bp, Homo sapiens
attgtaccattgtaccttaagcgattcagattagatataaaggagattttattttttatttacttaaatatcaggattgttaaatattagaaagatgctctctctttaaaggtcatttaaaaacttctatctgaggtgatttgagagacctgttgcctgaggggagtgggtggggctggatgacttctcagtgttttgtctggccatttgatttatgattctgtgttctgatgtgcaaaagcagtttgttatgttgatgtgcaaatgatctggcttgaagaaatcacatcaaagtaatctctctgttttagtatttttctcactttaaaaaatattctattttcagagagataacgggggccaattattagtatttgcagaatakttcacaaaatggaaagaaataaaaaaagcaaattttatacttaactgctgaaactttctgtggctgaattggtgtgttatttcagctttctctcttgctgcagagctttatttcttcagcagcattagagggtaccagaagagtaattttgatgctagcactggaaaaacatatctgtt

SEQ ID NO: 279044 - DNA, 549 bp, Homo sapiens
agaatttctggttcaatgacacaactctcaaagcactcagattcttctttggaagaaatatagtatactgcctgaatataataagtgtttattttccatttcaacaatttttctaaatatgacttttaattcttcaaacaaaccactggagataattagatartaaaccactatcataatccaaggttaatccataatcctgtttctaatgctaatcctccatacatccttccaaactttagagcaccgatttcattttcataccatctttaagctttttcttgaattttaaaatacttgcattgagtgtcttttctgtgttaggcactggattaggtgctgagaaaactatggtgaaggagccataacatctgcccttgagcttacagtctagtgtggaagaataagaagcaaataggcattgcaaacagagggatgaatacttttgagactttgtgacattagcacaaacaaaagaaccctgattcttcccacgatgtcaaaaaaatgcttaggactaccctatatcctaagtaactcccagtcaag

SEQ ID NO: 279045 - DNA, 549 bp, Homo sapiens
agaatttctggttcaatgacacaactctcaaagcactcagattcttctttggaagaaatatagtatactgcctgaatataataagtgtttattttccatttcaacaatttttctaaatatgacttttaattcttcaaacaaaccactggagataattagataataaaccactatcataatccaaggttaatccataatcctgtttctaatgctaatcctccatacatccttccaaactttagagcaccgatttcattttcataccatctttaagctttttcttgaattttaaaatacttgcattgagtgtcttttctgtgttaggcactggattaggtgctgagaaaactatggtgaaggagmcataacatctgcccttgagcttacagtctagtgtggaagaataagaagcaaataggcattgcaaacagagggatgaatacttttgagactttgtgacattagcacaaacaaaagaaccctgattcttcccacgatgtcaaaaaaatgcttaggactaccctatatcctaagtaactcccagtcaag

SEQ ID NO: 279046 - DNA, 588 bp, Homo sapiens
ccagtggtgtcatgcctccagatttgttctttttgttccagattgctttggctattctgggtcttttgttgttccatatatattttaaggcctttttttttctatttatgtgaagagtgtcattggtattttgacagggattacattgaatctgtaagttcctttgtgtacaatcgtcactttaataatatcagttcttccaatacatggacatagaatatcttcccatttttttgtgttcttatttgttcagtgttttatagttttccttgtatatacctttcacttatttggttaaatatattcctaggtattttatattcttcatagtgattataaatgggattgctttcttgatttctttttcagattgttgctgttggcatagataaatgctactgatttttgtatgttgattttatatcctgcaactttactgaatttgtttatcgttctaacagttctttttggttgagtgtttagaattttctgagtataagattatgccatctgcaaagaaggctaatttgacttcttccttctcmaattggatgctctttatctctttctcttgcctaatttctctat

SEQ ID NO: 279047 - DNA, 597 bp, Homo sapiens
agcattttcaacaattctttttttcccaacttttattttaggttcaaggtgtacatgtgcaggtttgtaaaatgggtaacttgcatgcacagcagtttggtgtacagataattttgtcatccagataatgacaacataataaccaataggaagttctctgaaagtagaatttcccaccattttttcaatctgttgcatgtttgtgccatgtttgtgtgtttgaagctctctcatatttagtcttaatttccccttaaaggtgttcttgtggctataaatttctgttaggtgtagtttgagtattagccaaacaacagcccccaaaaagttgaaaaattggtgaccataatggtgcaggaagaatgactctgytgcacacctcctttaccaactgctacctattaagtcttctgtgttcttcttttgatgagcaaaatcaaccatcatttatttcatttatagcacttatttactttcaatatttgggttattacattataaatctgttttctttgttcagtccaattcatttgggtatctttggttgaggtggatcatataacatttcttattaaaattaatagaatttttcattta

SEQ ID NO: 279048 - DNA, 602 bp, Homo sapiens
ctttctcctctctctagttggtgtgatgtagagaatgttgggtaaggttttattgctttgcttctgtagccctatgcactttggtcaggaggttttatactgggccctgtggtttgacctacaagccagaagatgtgcttatggctaacaggctgctgttccaggcaagtgtgtactgtgaatgtctggagttctgcactgtcaatgtgcagccaatatggctgagtacattgtttactaggaggagccctctgttgcctcagacaaagggctggtccatggagtccacagtggtttgatctccttgctcaggcttgggagaatggggcaaaataggtgagaccagactgggmaggctgcctacacgtcccctgatagcactcaaaagcaccaggactaaaagaatccagtgggcagtcaacatatgcctggaggtgtgcctaggtgcccccaagttctctgaacaatgaagggggcagcctaaactcctaattcagaaaactgagtgttccagatgcttggatatctgcctggatgtggcatatagagggccccactgcaccacaatctctacacaggaagtgttgggcagctcaggctgc

SEQ ID NO: 279049 - DNA, 602 bp, Homo sapiens
ctttctcctctctctagttggtgtgatgtagagaatgttgggtaaggttttattgctttgcttctgtagccctatgcactttggtcaggaggttttatactgggccctgtggtttgacctacaagccagaagatgtgcttatggctaacaggctgctgttccaggcaagtgtgtactgtgaatgtctggagttctgcactgtcaatgtgcagccaatatggctgagtacattgtttactaggaggagccctctgttgcctcagacaaagggctggtccatggagtccacagtggtttgatctccttgctcaggcttgggagaatggggcaaaataggtgagaccagactgggcaggctgcctacacgtcccctgatagcactcaaaagcaccaggactaaaakaatccagtgggcagtcaacatatgcctggaggtgtgcctaggtgcccccaagttctctgaacaatgaagggggcagcctaaactcctaattcagaaaactgagtgttccagatgcttggatatctgcctggatgtggcatatagagggccccactgcaccacaatctctacacaggaagtgttgggcagctcaggctgc

SEQ ID NO: 279050 - DNA, 516 bp, Homo sapiens
agagctacactgtgttcaaagtgacagagtcaacttcaaacaaagtctgcctcaaaaaaaaaaaatcacttttaattactctgccaaaattggctgctttaagcacaatttaattagttctgctgttgatgggtatttaggttatgatatttgccattatagacaatattttaataaacatgtttgagcatgtcttcttttgccaatgtgaaatttcctttagttttacagtagtgaaattgctgagttgtaaggtatgtgcatcttcaactttattaggtattgacacatgtgctttctcaggtagtacacttaaaattacatcaatatataagcaaatgtagttggtatttgcagatttaaatttttttttccytcagtatcatgaattgaaagtgatagctcctggatttttaagttgttatttctttaattagcagtgagtttgggcaacttttcagatgtttattcatcattcagtatttctacttctacatgttggttggtctctaaaaa

SEQ ID NO: 279051 - DNA, 550 bp, Homo sapiens
ataaatcagtaggcaggtatgaaaatgtttcatgtatatgaatacgttgctgttattttcctcaaaagtttaagtcatcttgtatccrtttgcaaaaatttaaggaaagcataacttaatttttagtgttttgaaatcaggcaaaatgtcaatagaagaaaaaagtcatgattttggagacttgcagccagaaaaattttaggattcagtccaatttgtagaaaataataaaaactgaaaaacactggacaaggcaagaatctaataacaggtatagtatagtttatttggaaacataattttatctcttcaattccccgattttattaaagaaaaaatgatagtaagaccaattaatttgtaaaataaattgtagtcttatatacttagcttgattatttgcataaagtgcaggagaaataattatttgccatataagatctcttttttaattggctttgctggaaacttttccataaggaatctaacattaagagatttttaaaaacctcaagcccagccaaaaatttatttgtgtctgcatatacct

SEQ ID NO: 279052 - DNA, 570 bp, Homo sapiens
gtcaaatttaacaacaaattaaaaggatttcaccaaaatcaagtgatatttatccctgggatgcaaaaaggattcaacatactcaaatcaacaagtgtgaaaaaaccacatttacagaatgatgaacaaaaatcatatgatcatctccayagttgcagaaaaatatttaacaaaattcaacattatttcataataataatgaaaaaccctctcaataaatcaggtatagaagaaatgtacctcaacacaataaaggcatatatgacaaacccacagcttacatcatgcttaacacaaaaattttaatatgtcttctctaagatctgaaagaagacaaggatgtcccatcttgccatatctatttaagatagcattacacattctagccagaacttaaaatcctaaattctaactggaatcagaaataacattctaaattttttttctttttttgagatggagacttgcttgttgcccaggctggagtgtagtggcattatcttggctcaccacaactcctgcctcttggtttcaagcaattctcatgctcagcatcctgagtagctggga

SEQ ID NO: 279053 - DNA, 533 bp, Homo sapiens
agtaacaatgatatagaaattatttcaataaaacataatgtctgtttgttaggttagttatcaaaaagaaaaaagaaggcctgaagtgtgattgctctyccctatggggagtccatttagagttcaaaactaatgaaaatggtacttgaattagttagacatagaaaaagtgtgtcccgggtcataagtgaatgtttctcatttcatagaagaatttaaagccaagagcacagaagaaataaaacgttttatttagacctttaagattaaaccacatcagaccacaacagcagttagaacctgaggaaaaaaggttataggagctgatggaaaagttgaaggagaaagctggaaacattgagatgcagtaaaagggaaaccgttgggttaaaaaaaattgaaatctcttgtgtttttgttgttttaatcaattctttagtttattagtatatttttaatatcaaagcccaatctctagaaacagtattataaatacttaccttttaattatagccaatctgatcaaataaagt

SEQ ID NO: 279054 - DNA, 570 bp, Homo sapiens
gtcaaatttaacaacaaattaaaaggatttcaccaaaatcaagtgatatttatccctgggatgcaaaaaggattcaacatactcaaatcaacaagtgtgaaaaaaccacatttacagaatgatgaacaaaaatcatatgatcatctccatagttgcagaaaaatatttaacaaaattcaacattatttcataataataatgaaaaaccctctcaataaatcaggtatagaagaaatgtacctcaacacaataaaggcatatatgacaaacccacagcttacatcatgcttaacacaaaaattttaatatgtcttctctaagatctgaaagaagacaaggatgtcccatcttgccatatctatttaagatagcattacacattctagccagaacttaaaatcctaaattctaactggaatcagaaataacattctaaattttttttctttttttgagatggagacttgcttgttgcccaggctggagtgtagtggcattatcttggctcaccacaactcctgcctcttggtttcaagcaattctcatgcycagcatcctgagtagctggga

SEQ ID NO: 279055 - DNA, 584 bp, Homo sapiens
ttaaaaccttctgcctatcaaagaaaacaactaacaaagcgaagagacaacctacagattgagataaaatatttgcaagccatacatctgataaaaatacgttagaaactccaacaactctatagaaagaaaatacataatccaattaagaaatggtcaagggaattgaatggatatttctaataaaaaacaaccaaatggctaacagatacatgaaaaaaatatctacctcaccaatcaccagggagatgcaaactaaaactgcagtgagatattattttgtgcctgttagaatggtaattataaaaaaaagatagcaaataacaagtcctgtcgaggctgtggagaaaggaaattcttatatactattgttgggaatgtaacttcatacaactattatagaaaatattayggtggtacctcaaaaaactagcaatagaataccatacaatctagaaaccccatttctaagtatttacttgagattgagaatcaatatgtcaaatagatgtctgcagttccatttcattgcagcactattcacaggctgattcaagctatgaaatcaacctaagtgtccaaca

SEQ ID NO: 279056 - DNA, 584 bp, Homo sapiens
ttaaaaccttctgcctatcaaagaaaacaactaacaaagcgaagagacaacctacagattgagataaaatatttgcaagccatacatctgataaaaatacgttagaaactccaacaactctatagaaagaaaatacataatccaattaagaaatggtcaagggaattgaatggatatttctaataaaaaacaaccaaatggctaacagatacatgaaaaaaatatctacctcaccaatcaccagggagatgcaaactaaaactgcagtgagatattattttgtgcctgttagaatggtaattataaaaaaaagatagcaaataacaagtcctgtcgaggctgtggagaaaggaaattcttatatactattgttgggaatgtaacttcatacaactattatagaaaatattacggtggtacctcaaaaaactagcaatagaataccatacaatctagaaaccccatttctaagtatttacttsagattgagaatcaatatgtcaaatagatgtctgcagttccatttcattgcagcactattcacaggctgattcaagctatgaaatcaacctaagtgtccaaca

SEQ ID NO: 279057 - DNA, 584 bp, Homo sapiens
ttaaaaccttctgcctatcaaagaaaacaactaacaaagcgaagagacaacctacagattgagataaaatatttgcaagccatacatctgataaaaatacgttagaaactccaacaactctatagaaagaaaatacataatccaattaagaaatggtcaagggaattgaatggatatttctaataaaaaacaaccaaatggctaacagatacatgaaaaaaatatctacctcaccaatcaccagggagatgcaaactaaaactgcagtgagatattattttgtgcctgttagaatggtaattataaaaaaaagatagcaaataacaagtcctgtcgaggctgtggagaaaggaaattcttatatactattgttgggaatgtaacttcatacaactattatagaaaatattacggtggtacctcaaaaaactagcaatagaataccatacaatctagaaaccccatttctaagtatttacttgagattgagaatcaatatgtcaaatagatgtctgcagttccatttcattgcagcactattcacaggctgattcaasctatgaaatcaacctaagtgtccaaca

SEQ ID NO: 279058 - DNA, 537 bp, Homo sapiens
ctattctgggtcttttgtggtttcatttaaattttaggactgttttactatttctgtgaagaattttattagtgttttaatagggaattacattgaatctgttgattgctttggggagtrtgaacattttaacaatatcgattcttccattccattaatatggaatatctttcaatttttttatgttcccttccatttttctcatcaatgtttcataggttttattatagagctctttcacttcttttgttaatttctatgtatttaattctatgtgtgggtattgtaagtgggattacatttttttttcagattcttcactgttggcatgtggaaatgctactaatttttgtatgttgattttgtatgctgcaactttactgaatttatcagttctaatcattctttgatgtagtttttagattttttcagatacaaagtcatatcatctgcaaacaaggataatttgactttttctttttgaatttgtatgccgtttatatatttcttttgtctgattgctctaactagaacttc

SEQ ID NO: 279059 - DNA, 537 bp, Homo sapiens
ctattctgggtcttttgtggtttcatttaaattttaggactgttttactatttctgtgaagaattttattagtgttttaatagggaattacattgaatctgttgattgctttggggagtatgaacattttaacaatatcgattcttccattccattaatatggaatatctttcaatttttttatgttccsttccatttttctcatcaatgtttcataggttttattatagagctctttcacttcttttgttaatttctatgtatttaattctatgtgtgggtattgtaagtgggattacatttttttttcagattcttcactgttggcatgtggaaatgctactaatttttgtatgttgattttgtatgctgcaactttactgaatttatcagttctaatcattctttgatgtagtttttagattttttcagatacaaagtcatatcatctgcaaacaaggataatttgactttttctttttgaatttgtatgccgtttatatatttcttttgtctgattgctctaactagaacttc

SEQ ID NO: 279060 - DNA, 537 bp, Homo sapiens
ctattctgggtcttttgtggtttcatttaaattttaggactgttttactatttctgtgaagaattttattagtgttttaatagggaattacattgaatctgttgattgctttggggagtatgaacattttaacaatatcgattcttccattccattaatatggaatatctttcaatttttttatgttcccttccatttttctcatcaatgtttcatagkttttattatagagctctttcacttcttttgttaatttctatgtatttaattctatgtgtgggtattgtaagtgggattacatttttttttcagattcttcactgttggcatgtggaaatgctactaatttttgtatgttgattttgtatgctgcaactttactgaatttatcagttctaatcattctttgatgtagtttttagattttttcagatacaaagtcatatcatctgcaaacaaggataatttgactttttctttttgaatttgtatgccgtttatatatttcttttgtctgattgctctaactagaacttc

SEQ ID NO: 279061 - DNA, 537 bp, Homo sapiens
ctattctgggtcttttgtggtttcatttaaattttaggactgttttactatttctgtgaagaattttattagtgttttaatagggaattacattgaatctgttgattgctttggggagtatgaacattttaacaatatcgattcttccattccattaatatggaatatctttcaatttttttatgttcccttccatttttctcatcaatgtttcataggttttattatagagctctttcacttcttttgttaatttctatgtatttaattctatgtgtgggtattgtaagtgggattacatttttttttcagattcttcactgttggcatgtggaaatgctactaatttttgtatgttgattttgtatgctgcaactttactgaatttatcagttctaatcattctttgatgtagtttttagattttttcaratacaaagtcatatcatctgcaaacaaggataatttgactttttctttttgaatttgtatgccgtttatatatttcttttgtctgattgctctaactagaacttc

SEQ ID NO: 279062 - DNA, 440 bp, Homo sapiens
tgtccaaggcttaaagtggggtgttaaartctctagctaccattgtataggggcctgtctctccctttagctctaagaatatttgctgtatatatgtgcgtcttccagtgttgggtgcatatatatttacaatttgtatatcatcttgctggattgaccaatttatcattatatactgaccttctttgcctcttagagtttttgtcttgaaatctattttctctgttataagaatagctactactcctcgttttttgctttccacaggcgtgctatatcttttttcatccctttattttctgtctatgtgtatctttataggtgaagtgcgtttcttgtaggtcatagatcaatgggtctttaaaaaaaaaatcctttcagctactctatatgttttgataggagagtttagtacatttacattcaatgttattattgac

SEQ ID NO: 279063 - DNA, 589 bp, Homo sapiens
tagaatgttctgtcaatatcctttaagtccatttgttctagggtattgtttaagtccattgtttcttttttgactttctatcttgatgacctgtctagtgctgtcagtggagtattgaaatcccccactattaatgtgctgccatctatgttatttcttaggtgtagtagtaattgttktatagatttggaaactccagtattaggtacatatctatttaggatggcaatattttcctgttggactttccttttaccattatataatgtctctctttgtcttttttaactgttgttgcttaaagtctcttttgtctgagataagaatagttactcctgctcacttttggttttcatttgcatggaatatctttttccacccctttacctgatgtttatgtgagtccttatattttaggtgagtctcttgaagacagcaggtacttgattggtgggtttttatccattctgcaattccatatcttttaagtggagcatttaggccatttacattcaatgctagtattgagatatgaagtactgttctactcattatgctagttgttgcctgaatacactgggattttttt

SEQ ID NO: 279064 - DNA, 571 bp, Homo sapiens
atatctagaactaggtttggaaatcagctatacaattattcatgcataagacagtttacatcagaccactagaattaaattagtgaatatcaatatgtacagcatttgagcacattaaaaattagaaaatcatgtgttataaaacatacacacaaaatagtaagatgggaaaagaatatggataatgtttttcaaacttacaagctggaaamgagacaaaaaagtagttatgaggggcttcaaataatcataatcttactctattctaagtaaagcatctaaaaaatgacagactttctttaacagagacataatgtgtagaatctaaagtcagcctacctcatcttgagtactagcaacaccattaacttgattatatcttaaggtatattatttaaagttgcaaagccacagtcgactgtaacataaataactagtatacctgtttcatagagttttgtgtggggtgggaaaagaatgtggaaatatatattaaatgtttaaaacacctatgacacaaagggaataatttgtgaattttaagtattattattaggctcatcttacaata

SEQ ID NO: 279065 - DNA, 518 bp, Homo sapiens
caactatgtgctagagagattcacatgactaaaagacagccagatactaatatccaagaaaatgaaaaaaaatgcattgaaggcatttcaaaagtttttgggacagctcctcccatcacaggcccagattcctagaagaagataatggttacatggcccaggcccagggtaccactgccctgtctcaccctgggaggctgctccttgcattcccactgctctaattctagccatggctcaaagggccccaagcacagctctggccaccactctagagtatgcaagccataagccttagtgccgtaagccttggtaccataagtcttcgyggcttcaacgtggtgtcaatcctgcaggtgcacagaatgctaaagtgaaggaggcttggcagcttccacttagatttccgagaatgtattagaaagcctggatgcctacgtagaagcctgccacagaggcagagtgcacgcagagaaactctactagaacagtgacaatggaaaatatggggttgatgc

SEQ ID NO: 279066 - DNA, 554 bp, Homo sapiens
tttataggttcataccttaaagaaayttactttgagtctcaggtgagactttggatgttacttttgagtgatgctggagttgtttaagactttgggggactattgggaaagcatgactgtgttttgcaatttgagaaggacaagagatttggggagcagggacaaaatgatatagtttggatgtttgtccttctcaaatctcatgtcaatataagattcctgatgttggaggtggagcctggtgggatatgctagaatcatgggacaggatcccttatgaatggtttgatgccatcctcacagtaatgagagagttctcactctgtgagataatgagagatctggttatttaaaagagcctgctacttcttgtgtctctgactccctccagtgctatgtgacttcctgctcctcctttgccttctgtcgtgaatgtaagcttcctgaagcccttagccagaagcagatagtagcaccatgcttcctgtacagcctgcagaaccatgagccaaaataaacctctttttaaaactaaattacccattctcaagtat

SEQ ID NO: 279067 - DNA, 554 bp, Homo sapiens
tttataggttcataccttaaagaaatttactttgagtctcaggtgagactttggatgttacttttgagtgatgytggagttgtttaagactttgggggactattgggaaagcatgactgtgttttgcaatttgagaaggacaagagatttggggagcagggacaaaatgatatagtttggatgtttgtccttctcaaatctcatgtcaatataagattcctgatgttggaggtggagcctggtgggatatgctagaatcatgggacaggatcccttatgaatggtttgatgccatcctcacagtaatgagagagttctcactctgtgagataatgagagatctggttatttaaaagagcctgctacttcttgtgtctctgactccctccagtgctatgtgacttcctgctcctcctttgccttctgtcgtgaatgtaagcttcctgaagcccttagccagaagcagatagtagcaccatgcttcctgtacagcctgcagaaccatgagccaaaataaacctctttttaaaactaaattacccattctcaagtat

SEQ ID NO: 279068 - DNA, 554 bp, Homo sapiens
tttataggttcataccttaaagaaatttactttgagtctcaggtgagactttggatgttacttttgagtgatgctggagttrtttaagactttgggggactattgggaaagcatgactgtgttttgcaatttgagaaggacaagagatttggggagcagggacaaaatgatatagtttggatgtttgtccttctcaaatctcatgtcaatataagattcctgatgttggaggtggagcctggtgggatatgctagaatcatgggacaggatcccttatgaatggtttgatgccatcctcacagtaatgagagagttctcactctgtgagataatgagagatctggttatttaaaagagcctgctacttcttgtgtctctgactccctccagtgctatgtgacttcctgctcctcctttgccttctgtcgtgaatgtaagcttcctgaagcccttagccagaagcagatagtagcaccatgcttcctgtacagcctgcagaaccatgagccaaaataaacctctttttaaaactaaattacccattctcaagtat

SEQ ID NO: 279069 - DNA, 554 bp, Homo sapiens
tttataggttcataccttaaagaaatttactttgagtctcaggtgagactttggatgttacttttgagtgatgctggagttgtttaagactttgggggactattgggaaagcatgactgtgttttgcaatttgagaaggacaagagatttggggagcagggacaaaatgatatagtttggatgtttgtccttctcaaatctcatgtcaatrtaagattcctgatgttggaggtggagcctggtgggatatgctagaatcatgggacaggatcccttatgaatggtttgatgccatcctcacagtaatgagagagttctcactctgtgagataatgagagatctggttatttaaaagagcctgctacttcttgtgtctctgactccctccagtgctatgtgacttcctgctcctcctttgccttctgtcgtgaatgtaagcttcctgaagcccttagccagaagcagatagtagcaccatgcttcctgtacagcctgcagaaccatgagccaaaataaacctctttttaaaactaaattacccattctcaagtat

SEQ ID NO: 279070 - DNA, 586 bp, Homo sapiens
ctagaactgtaaaaccagacaaagagcattaaatcccagaatagactgcaataaagcatattaagagcaatctaaggcttttaaagcccagaataaaatgaaaaagaaggaatagaaccagagcttgagttgtaatgttaatagcsaatagacatcaagtagagaaacagagcttcaattttctcctattttcttttgtaagaataataattctatccactggaaacaagaaaaagatttttaaaagaataataatctttagtcttcagtatcccattaactgaagaagtggtaaagaatatttgaattatagaaagaaaacagaagaaaccagaaagctgcagaagaataaattcttcagcttccataaaggtaaacattaaagatgcccaaaattatagcacctaatgtagattcccaaaagtgtgtagtccagattacaaaacagatggtctgtgaacactcagaaaatgaagaacataacatttggtctcagcatgatctctgtaaatgaaacatgacaaactaaatttatttccttttttgatatagctcccagacagctagatgaaagaaatgccccaga

SEQ ID NO: 279071 - DNA, 544 bp, Homo sapiens
ttggcaccaaattatatactagcacaggttagaagtctgaatctgccttagtcaagtcattttctctcaaaaactctactattctaagaaattttttctgtagcttccaatatgtgacactgcctgagtttggctctcctgctttactgggcaaatgaagtagcaatatgctcgtaatggatatgcattacctacatgcaattaccattctgaaccatgtggatcagactgaataccatcacctgaagccttctgccatgtatgtaaaatccataaaaatggtaatttgagaaaaggtaggatttactaagttatgggaacagagacctgctctcaaggcattattaygtgtaatgagagtttgttctcccaaagcaaggcttttaactagcagtttcatttgccaaatgtggcctcccactggaatactcagttaatgctctggttcagtacaattgtacagctttcagggagatgaaagttgttgcacagaagcagacccttttctctctagatcatggaggtttatttgagcagcctagta

SEQ ID NO: 279072 - DNA, 591 bp, Homo sapiens
tgctctttacttacttttttyctatatttaagaacattttctatcataagctatctatattttagagcaatttaataaaatatacttctgtgaataaaagtggaaatatgtgctttttatttctacctagccactccaaaatataaaaactaattatgactgttcttgtttcttgtagcaatatgcttatttgtacaagttcagtaagaatgtactctctttatagctggatacaattagaaacattgttcatattaccaaggcttctactggaatgccatattgagaacagggtataatacctggcttccaagattcccggccttacagtcagtgagtaaatattatcacatcccgagaggcccaagaaccttaagactacatgtgaaaactacagtctgcctttgtttggcttcctaatctcaaaaggttttaaagtttgagattcctatataatcaatcacatataaatgatcagaccaaaattgataaaataaacttactttcacaaaaattatctttattatctttagtagaattggagattattatgaatagaaaagtacttcttctaaagaaaacgtataatac

SEQ ID NO: 279073 - DNA, 591 bp, Homo sapiens
tgctctttacttacttttttcytatatttaagaacattttctatcataagctatctatattttagagcaatttaataaaatatacttctgtgaataaaagtggaaatatgtgctttttatttctacctagccactccaaaatataaaaactaattatgactgttcttgtttcttgtagcaatatgcttatttgtacaagttcagtaagaatgtactctctttatagctggatacaattagaaacattgttcatattaccaaggcttctactggaatgccatattgagaacagggtataatacctggcttccaagattcccggccttacagtcagtgagtaaatattatcacatcccgagaggcccaagaaccttaagactacatgtgaaaactacagtctgcctttgtttggcttcctaatctcaaaaggttttaaagtttgagattcctatataatcaatcacatataaatgatcagaccaaaattgataaaataaacttactttcacaaaaattatctttattatctttagtagaattggagattattatgaatagaaaagtacttcttctaaagaaaacgtataatac

SEQ ID NO: 279074 - DNA, 623 bp, Homo sapiens
gtataatacctggcttccaagattcccggccttacagtcagtgagtaaatattatcacatcccgagaggcccaagaaccttaagactacatgtgaaaactacagtctgcctttgtttggcttcctaatctcaaaaggttttaaagtttgagattcctatataatcaatcacatataaatgatcagaccaaaattgataaaataaacttactttcacaaaaattatctttattatctttagtagaattggrgattattatgaatagaaaagtacttcttctaaagaaaacgtataatacaatctttattaaactgaagctctatgcatggtttttgagttcttcttatcctcctatagactggactggttcttaaattcttcatggttcctctaatctaattattttccataaaactattaaaaccaggaactactcttcttgaagaactataagctgaaactaaataaatttcaagagacaagtcttaggcctgacaaatgggccacacagaaagtttataaagctgccaataacatcactagagacatttaaactgcaaactaagacaagaagctgatgacttcatgctataggtagcttttctcaagatgtcagaacaaga

SEQ ID NO: 279075 - DNA, 592 bp, Homo sapiens
taaaaaccacagccttgcataaagccctttgcaaactaatacaaaaaaatactctccaaggacattggcccaacaactccttgtcttacctcagacttggcaccacccttgttattgattcttatagccaaggataattatctctaaacaattatgtaatcttcctcatttttttgaaactgtttttctttatctccctgaatacatgtattgtttaccatggcacattgattttcattgcaatggtatattcctgaatatataaaattggttttaaagggcctctctctgcctgttattcaggctaacatacctctttccctcccttcagctaacacttcatttggttgaggtcccttttgtagtgagtgaattaaacctagttgcacacacgtaaaagccttgaccacataagattagaggggcacaagagggcactctgatgatcaccttcactygtatcatacttctctcagctctcaatgtactgaaacaaccttgtttctttgatgatcacaatcaatcacttcaactcaaagtaatcttttctgcctattcatgctgttactggaggaactgacaatagctataa

SEQ ID NO: 279076 - DNA, 577 bp, Homo sapiens
caggcagaaaatcaaggtgattctcttcacaggctaattttggagtagcttacataatctacttatctgtgaatatatgtaaagtagtacctgtgtgagtcaagtaagaggacaaaaccacaatgtgcctcattttacttgacaactttcttattaattgtactatttgtttaaagaaccaacatagaaacttaattcaagttctgggtgttagattgcacaaagatgtaatttaccgtagtacctccttatctgtgggggacatattccaagaccccccagtggatgcctaaaaccacagatastaccaaaccttatatatactgtttctttgttcttacaacttagacgaggtactaagtgactaacaggctggtagtgtatacagcgtggacacactagacaaagggataactcaaatcccagatggatcagagcagggatggtgtgacatttcatcctgctattcagcatgttgcccaatttaaaatttaggaatggtttatttctggaaatatttatttaatattttcacaccctagttgatcatgggcaactgaaactacagaaagtgaaa

SEQ ID NO: 279077 - DNA, 522 bp, Homo sapiens
tagtaccaaaccttatatatactgtttctttgttcttacaacttagacgaggtactaagtgactaacaggctggtagtgtatacagcgtggacacactagacaaagggataactcaaatcccagatggatcagagcagggatggtgtgacatttcatcctgctattcagcatgttgcccaatttaaaatttaggaatggtttatttctggaaatatttatttaatattttcacaccctagttgatcatgggcaactgaaactacagaaagtgaaacctctgataaygggggaccactgtattataggtgcaaattgactgctagagtctcaggttgctgggatactcataatcttttaaaagcctaatgtggataagaataaccactataagaaaacacaaggtgctgggggcatgttttactaataatcttacctcctaaatatttcttcaatctattgctttatctcttgccccaaatttcctatttaaacttgttaagattatcttttacaaaattgga

SEQ ID NO: 279078 - DNA, 523 bp, Homo sapiens
ctctttcagatcttcccttttaggtatttttagagcttataaaagaatatattaggaagtaattgtttaataaatgttgagttgcatggaaatttagagaaggaaaagcttttcctctaccctctttggttctgtctctagggctcgtgaattaaattgacaaaagatagattaacaagagaaaaagcatgacaattttattttatgcagatatttttatgtacatgacacaggggcttcacagaaaagaagtgaaaaacccaacaaaktagttagatgtgggggctttttagataactttttaacaatggttgataaattataggaaggttaactagaaatgtgtgttaataggcattagtaagattgtctatgcagactctctttgtcatctctgatctttctggtacagaagagagaaacacattcacaaatggaaatttatgtcacgtccaaaaaggaaatttatgccctgctgttaaacagaaagagtgagagctcttcttgtatctactgtttttca

SEQ ID NO: 279079 - DNA, 582 bp, Homo sapiens
tctaagaggaaagtttatagctctaagtgcctacatcaaaaaacagaaagaacttcaataaacaacctaatgatacatcttaaaaaccataaataaataatatataaatatttataataatataaataataataatactgactgtaaatggaataaattttccaatcaagacacacagactggataaacagattaaaaaaatcaaaactcaaactcaaaattaacagaaaaaataataaagatcagcrcagaataaatgaaattaaaataaaacagtacaaaaaaacaatgaaacaaaaagttgtttttttgaaaaattaaacaaaattgacaaacttttatccagactaactaagaaaaaagaaggaagacccaaataaataaaacaagaaacaaaaatggatacattacaactgatagtgaagaaacttaaagtattaatagtggctactatgagcaagtatataccaataaattggaaaatctagaagtaacagacaatgtcctggacacataaaacctaccaaggttgaaccaggaagaaattaaaaacctaacagagcaataacaagtaacaagatt

SEQ ID NO: 279080 - DNA, 601 bp, Homo sapiens
ccaaaccctttgctaaggcataacaaaagtgacctttgctccagttaccaataaattcctcatttgcatctgagaccttctcagctttgccttaaccatccatgtcactatcaacattttggtcacagccatactaccagtctcaaggaagttctaaaatttccctcctcttcctgtcttcttctgagccctcgaaacccttacaaccttttcttgttacccaattccaaagttgcttccacattttcaggcatctttataccaatgccctactccttgacaccaatttcctgaatttgtctggcctcacattgctataaagtaaggcctgagactggatactgtataagaaaagaactttattcagctcacagttctgcaggatgtacaggaaacatggtggcgtatgcttgtgaggaggcctcaaggaacttttactcatggttgaaggcaaaacgggagcaggcastttacatggttgaagaaggagcaatagagagtgagggggaaggtaccattcactcttagacagacaaatctcatgagaattcactatcacaagaacggcaccagggggtttgtgctaaaccattgctgagaa

SEQ ID NO: 279081 - DNA, 627 bp, Homo sapiens
gtaactttcttaaagctgcttgttttggcattagattggctttattattttctttaattaccttagtttcccccttctggtggccatggccatgaactgttgccagctgggctaaatttcttacagtttgcaataactttgtaactggagagccttgcctggagatagtcattctactcctgtttctcttatgagggtctgggtatggtggagagttcagatggttgggggttgtccaaaggttaacttctctcttttcaaaggagggccatggctgccctcaaccaaaggcagggtggccagcatttagcaactgggtccaactgcatgaaaaagtaggatactacrtgggtcagtgggcccaacctttaagttagtactcctaaggcttttcccttttcatgaacataaagatagaaagatttatttaagttgggtaggcttaaagctgaggcccttgtgagctaggttttaagtttgggcaatgcttggttacattttttcattcatttaaaagggtctgtgctcttttaattgtttttatagaggatgggcaatgaggccaaagctagcaattcagaggatgccaaatcctgccatgcccagaaacccttgtagttgtttcca

SEQ ID NO: 279082 - DNA, 561 bp, Homo sapiens
ggcatttgaagggtaactttcttaaagctgcttgttttggcattagattggctttattattttctttaattaccttagtttcccccttctggtggccatggccatgaactgttgccagctgggctaaatttcttacagtttgcaataactttgtaactggagagccttgcctggagatagtcattctactcctgtttctcttatgagggtctgggtatggtggagagttcagatggttgggggttgtccaaaggttaacttctctcttttcaaaggagggccatggctgccctcaaccaaaggcagggtggccagcatttagcaactgggtccaactgcatgaaaaagtaggatactacgtgggtcagtgggcccaacctttaagttagtactcctaaggcttttcccttttcatgaacataaagatagaaagatttatttaagttgggtaggcttaaagctgaggcccttgtgagctaggttttaagtttgggcaatgcttggttacattttttcattcatttaaaagggtctgtgcycttttaattgtttttatagagg

SEQ ID NO: 279083 - DNA, 592 bp, Homo sapiens
tcttctaggagtaactacagataggttacttgttgctgagatatttgtgcttttggcgggaaatcttagaactcctttctctcaggaagttaaaggctaatgggtattttgatcttaaattttttagaagggctggcaacaaggatgttatccacatactggaagagggttccttgttcaagagtcagttcctctaggcctctccaaatattgtgggggctgggtatagggtttgaactcttgagatgacatagtccacgttagctgctgggtttttcacctgtctggggaatcctgccattttgttgagtaagtatacccctgggtgtgttcaaaacagagtaggtggtccctgtcccaaccaaggagccaacaggcttgtcccctatgtccagtgtcagtcaggacaccttgaaggatacctagagtgccrattgaggagcccctaggacctgtagactttttttttctacttaaaccatctgctactgtgaaacacctgggtgggacattcacccttccccctcctttcagatgggtcccttttccagtgaccctcttccttacagaaggcacattggtttggtcctag

SEQ ID NO: 279084 - DNA, 562 bp, Homo sapiens
ctctgaatgaggttttgaatccccaggattttttcctaatcatctagaatgtgacttctagttgtaaatatctgaagttgtgaagagaacatgtacaataaccatccctcttcccattggtgacctgccagaggtcatcatagaggaaggctgctaagatgccttgcactgggtactgtccgggttgactatctgaaaggaatcaatgggtgattggtggcaatgaggtgkgttgcctgcagaagccactggggataagggagctgtaggtctaagattatagaattaaaaaacaaacctcttataattttattaagagtaaattaataccttagaaaaatcttattttaacatagatgaccaatcttagaaagactgttataggtaatttctttttaattgtaggcaattaaatcacatacaaaatttcttttataaatttgttttcccacaatctttattgggacttagaccatgaacaacatattgatttgtttgtactacttcttttaaaataataagtcattttactttaggacaaaaatttaccgtgtaagatctt

SEQ ID NO: 279085 - DNA, 562 bp, Homo sapiens
ctctgaatgaggttttgaatccccaggattttttcctaatcatctagaatgtgacttctagttgtaaatatctgaagttgtgaagagaacatgtacaataaccatccctcttcccattggtgacctgccagaggtcatcatagaggaaggctgctaagatgccttgcactgggtactgtccgggttgactatctgaaaggaatcaatgggtgattggtggcaatgaggtgggttgcctgcagaagccactggggataagggagctgtaggtctaagattatagaattaaaaaacaaacctcttataattttattaagagtaaattaataccttagaaaaatcttattttaacatagatgaccaatcttagaaagactgttataggtaatttctttttaattgtaggcaattaaatcacatacaaaatttcttttataaatttgttttcccacaatctttattgggacttagacyatgaacaacatattgatttgtttgtactacttcttttaaaataataagtcattttactttaggacaaaaatttaccgtgtaagatctt

SEQ ID NO: 279086 - DNA, 600 bp, Homo sapiens
ctctttcaccaaagctccttctgagaaagattctttgcccccagttcccatttcactatatgagaatgaaccctggaaatatctggaatcagaagaataccaagaaccatagggttctcatcccaactgggtggactattgccactactacaagggtgatatacccccacagcagactcaaaagacatgtatgcataggaaaacagtcgctgggaatccctgccccatctgccaaggtcacaagttgcatgttgactttaggaatgttaagctcttggaacagtttgtcagtgcccacacgggtattatcttccacgctccatacacaggagtctgtatgaagcagcacaagatgttgacccatgccatccagaaagccagggatcatggtctcctcagttaccacatctcccaagttgaaccccgggaccttgrttttagtgcctctcatggagctatgagtacttctctgccagtccccaccctcgtctcaggtgaaccctggtacctatggtacagctggaaacagccatcagagaaagaactgtctcacctttgccagctctatcaggattatctctaagaagagagtggcccccg

SEQ ID NO: 279087 - DNA, 600 bp, Homo sapiens
ctctttcaccaaagctccttctgagaaagattctttgcccccagttcccatttcactatatgagaatgaaccctggaaatatctggaatcagaagaataccaagaaccatagggttctcatcccaactgggtggactattgccactactacaagggtgatatacccccacagcagactcaaaagacatgtatgcataggaaaacagtcgctgggaatccctgccccatctgccaaggtcacaagttgcatgttgactttaggaatgttaagctcttggaacagtttgtcagtgcccacacgggtattatcttccacgctccatacacaggagtctgtatgaagcagcacaagatgttgacccatgccatccagaaagccagggatcatggtctcctcagttaccacatctcccaagttgaaccccgggaccttgattttagtgcctctcatggagctatgagtacttctctgccagtccccaccctsgtctcaggtgaaccctggtacctatggtacagctggaaacagccatcagagaaagaactgtctcacctttgccagctctatcaggattatctctaagaagagagtggcccccg

SEQ ID NO: 279088 - DNA, 1217 bp, Homo sapiens
ccaactgatgctgtcaggtgccaattgtagagtctctagggtggtaagggagattcccaagcagatagattgatcatctagcccaggaccccatgctgggtcactagttttgttactgacaaagccagtacccataaaaacggagtctttccctgyttggtgtcatgaagccttgacataaaactgaacatgagcatcaagcagtaaaggctttattcagtgtccatagaattgagaagcaggaacacggcttacaaatcaacttcttgacgagtgagggatgaatggtttaaaatatataatttttttttctaataaatgggttgaacattaaaagcgaggggagtaatccctgtcttttcgggcaagggcagtgaacttcccagaaccagtagtatcaccttccttttggtccttttatgacttcttccagtcattgtcatggcaattgctaactgtcatggtgctggtgggagtcccatttagcaaggaaattagattataatgaagcttgagatcttttaaaagtcatttgatcagctatcttggttctaaccagtctcaactggtctgattacaaaaggaatttttttacagcagwaaagtcataaaagtaattaaagagttgtaaatcaaaaactttgtgaaaaagttaagggtactatgacatttaatgtaaawaaatttaattctacaaatacatatcaagtgtgactctccactcttcatggttatgtaagagagaatatacagaataagttatgcacagcataagcagctttagcatttaaaaaagatgaatttctgcagatcaattatttgccatatcttcctattggaatactgctttgctggtaggtagtatagtgtgagtagttaagagtacaaagattggccttagatagatccagtttatgtcccaacttccatatatacttgttataagaatttagatgaaatgttatttttttctgtgtgctttcattttccccataaaggggaggatataatgaatggcacctaacttagtagattaaatgaaaatatacctgatatatgtatatatacagtccttgcctgttggctattggatactgaatacttaatcagttataatttttctataataaattagtttataatcatatcatataaaatcgcacattatgtaggtctgtagagtaattgttcttcctctagaaactaaagtggaggca

SEQ ID NO: 279089 - DNA, 599 bp, Homo sapiens
tttataatatcaaagactatcgagcctatctctagatcctcggagtagagaatccctgaagtacagcacccacacacagtcacacaaaacatatttacctctcccgacggtgatacctgagttaytgaagcagcacctatctcttgactgtgatttaaagctgcctggtaaatggtttctgggagtcatcaggcctgaaaaatgcccacctgccactaagtgtccttttgcccctcccccgccctcatccatcttcctcccagggctatccattcaggcctgcacgtactgatattgagtagaaaaagtcaactgcctgctgaagacaatatactttcaaaagaaaacagagaggcggcaggaagtatattttaatgcatttaccccattcttgactctggtttattcttttattttcaaataaaattatatttttctgctcctgacccaatcattatgggttttattgagctttaatgttaatatatcttctcacctgtattccctcacagttcgtatcagaaataataagcagtaaatacaatatatctaagtaaagagtcagccagggcatataaacctatttcccatgtcacccc

SEQ ID NO: 279090 - DNA, 622 bp, Homo sapiens
gtttaaaggtcatagagaatgtatcaaaacctaagaaaagccgtggactccattcctgagatgctcatggcctacccaagaagaaagaaaaaacaatgattcgtggaaaaaaaaaamcccaaaaaaccagaagcataaagttcagaggcaacaacaggaatgagcgtatgagatgcaaagaagcacaatggaggaggatcatctaatgtgggcattggagggtgaatacaagttcaccaggagaataaggaaacatggcggagaacagcactacagagtagagttccaatctcccctgaagatggtgcaataccaggaggcacagacagggccccattgttaacaaaaaaacagtgcttgttcacagagatccaagacttcctctaataggcttggaccccttggctgcctaaacaactgtaaaacttgagttcatccaagtaaagggcatccgctttgccaagctccagtggccttggaccacagtgcaggcgcctggtttgcctgtgactccaggactgacttctgttcgctgtccatgccaggttggctcccttgacccctggtagtgaccagtctccattctctatggccaaacctcccagaacttcccctttgaagc

SEQ ID NO: 279091 - DNA, 622 bp, Homo sapiens
gtttaaaggtcatagagaatgtatcaaaacctaagaaaagccgtggactccattcctgagatgctcatggcctacccaagaagaaagaaaaaacaatgattcgtggaaaaaaaaaaccccaaaaaaccagaagcataaagttcagaggcaacaacaggartgagcgtatgagatgcaaagaagcacaatggaggaggatcatctaatgtgggcattggagggtgaatacaagttcaccaggagaataaggaaacatggcggagaacagcactacagagtagagttccaatctcccctgaagatggtgcaataccaggaggcacagacagggccccattgttaacaaaaaaacagtgcttgttcacagagatccaagacttcctctaataggcttggaccccttggctgcctaaacaactgtaaaacttgagttcatccaagtaaagggcatccgctttgccaagctccagtggccttggaccacagtgcaggcgcctggtttgcctgtgactccaggactgacttctgttcgctgtccatgccaggttggctcccttgacccctggtagtgaccagtctccattctctatggccaaacctcccagaacttcccctttgaagc

SEQ ID NO: 279092 - DNA, 622 bp, Homo sapiens
gtttaaaggtcatagagaatgtatcaaaacctaagaaaagccgtggactccattcctgagatgctcatggcctacccaagaagaaagaaaaaacaatgattcgtggaaaaaaaaaaccccaaaaaaccagaagcataaagttcagaggcaacaacaggaatgagcgtatgagatgcaaagaagcacaatggaggaggatcatctaatgtgggcattggagggtgaatacaagttcaccaggagaataaggaaacatggcggagaacagcactacagagtagagttccaatctcccctgaagatggtgcaataccaggaggcacagacagggccccattgttaacaaaaaaacagtgcttgttcacagagatccaagacttcctctaataggcttggaccccttggctgcctaaacaactgtaaaacttgagttcatccaagtaaagggcatccgctttgccaagctccagtggccttggaccacagtgcaggcgcctggtttgcctgtgactccaggactgacttctgttcgctgtcyatgccaggttggctcccttgacccctggtagtgaccagtctccattctctatggccaaacctcccagaacttcccctttgaagc

SEQ ID NO: 279093 - DNA, 622 bp, Homo sapiens
gtttaaaggtcatagagaatgtatcaaaacctaagaaaagccgtggactccattcctgagatgctcatggcctacccaagaagaaagaaaaaacaatgattcgtggaaaaaaaaaaccccaaaaaaccagaagcataaagttcagaggcaacaacaggaatgagcgtatgagatgcaaagaagcacaatggaggaggatcatctaatgtgggcattggagggtgaatacaagttcaccaggagaataaggaaacatggcggagaacagcactacagagtagagttccaatctcccctgaagatggtgcaataccaggaggcacagacagggccccattgttaacaaaaaaacagtgcttgttcacagagatccaagacttcctctaataggcttggaccccttggctgcctaaacaactgtaaaacttgagttcatccaagtaaagggcatccgctttgccaagctccagtggccttggaccacagtgcaggcgcctggtttgcctgtgactccaggactgacttctgttcgctgtccatgccaggttggctccctygacccctggtagtgaccagtctccattctctatggccaaacctcccagaacttcccctttgaagc

SEQ ID NO: 279094 - DNA, 575 bp, Homo sapiens
tggagcatgtagaaggagggttgccagataaaatacaggacacttaagtacatttgaatttcagataaaccataaatcaattttaagtatgcatatgacacaaatagtgaaaatatttattgctgatctgaaattcaagtttaactgtgggtgtcctctatttttatttgctaaaactggtgatcctacctacaytgcttactttatgctcatatataaggcatatcatgatttcattgaaaaaaatacactaattcaggccattaataatacaaacagtgagacatatgggtaatggagatactgttttaaaatgtttttattttttattccttgattcattaaatatttactaagtgccaactaagtatcaaccatactcccagggataggatataccttcatgaccaaaactagaccaatccttgccttcaaagtgcttacagtctagtaggggaggcaggtgatgaataagataacaggcaactccaattgtgcaagtggcatgaaggaaacagccacttaactcagagaataatggagttaacagaggctgatttctcatggtggtcagg

SEQ ID NO: 279095 - DNA, 575 bp, Homo sapiens
tggagcatgtagaaggagggttgccagataaaatacaggacacttaagtacatttgaatttcagataaaccataaatcaattttaagtatgcatatgacacaaatagtgaaaatatttattgctgatctgaaattcaagtttaactgtgggtgtcctctatttttatttgctaaaactggtgatcctacctacattgcttactttatgytcatatataaggcatatcatgatttcattgaaaaaaatacactaattcaggccattaataatacaaacagtgagacatatgggtaatggagatactgttttaaaatgtttttattttttattccttgattcattaaatatttactaagtgccaactaagtatcaaccatactcccagggataggatataccttcatgaccaaaactagaccaatccttgccttcaaagtgcttacagtctagtaggggaggcaggtgatgaataagataacaggcaactccaattgtgcaagtggcatgaaggaaacagccacttaactcagagaataatggagttaacagaggctgatttctcatggtggtcagg

SEQ ID NO: 279096 - DNA, 575 bp, Homo sapiens
tggagcatgtagaaggagggttgccagataaaatacaggacacttaagtacatttgaatttcagataaaccataaatcaattttaagtatgcatatgacacaaatagtgaaaatatttattgctgatctgaaattcaagtttaactgtgggtgtcctctatttttatttgctaaaactggtgatcctacctacattgcttactttatgctcatatataaggcatatcatgatttcattgaaaaaaatacactaattcaggccattaataatacaaacagtgagacatatgggtaatggagatactgttttaaaatgkttttattttttattccttgattcattaaatatttactaagtgccaactaagtatcaaccatactcccagggataggatataccttcatgaccaaaactagaccaatccttgccttcaaagtgcttacagtctagtaggggaggcaggtgatgaataagataacaggcaactccaattgtgcaagtggcatgaaggaaacagccacttaactcagagaataatggagttaacagaggctgatttctcatggtggtcagg

SEQ ID NO: 279097 - DNA, 562 bp, Homo sapiens
catctgcaacctcagttcctccttgtgacatatcatatacacagattccagtgattaggacatggacatcttgtgggggagcattattctgtctatcacatatgggaaaatcttcatgtttatttagacgtgttaaatttgaaaagccagtgaattgaccaagttggaagttagtaatgtaggcagacgaatatgtgagtgcaaaactcaaagagatttgaaagttatcaacacaacgatggtgtataaagccatgagagtgtatggcatcactgaagaagagactgagcctagaagcttccacatttacagttaaggtagaggatgaggggccaaaaaagaaaacataaagagcagccaaagaaataggatgaaaaccaaaataatgtggtgtcatggaagcccagaaaggagacttttcaaaataggagtgagtgctctcccaagtttaatactgctgcaaaaggcaattgsagattcatcaatggatttgttggcaagaaattgaaagccttgacacgagctgttccagtggagaggtgggggcagaaccaaaactgag

SEQ ID NO: 279098 - DNA, 522 bp, Homo sapiens
tttaacttttaagcctctgtgtcagtgagttatgatgtagataaattgcaaaagttgattctcactcaaatgacatgycatcagctgcaggttggctgcagttctactcaatatatcttctttatttgggggctcagactgaaggatcggcccctctcaggccatgcccttcccttggtggagggaaaaaggaggtggcagaactatgtgattgctgttgaagacacactcaaaagggcatttgttacttttcccattgaccaaaagaagtcatatgccaatgctgatgtcaatagggcagggaagcacaatcctcttacaaaaggggtcacagatatatatcaatataatctttcctaatataataaaagcaggcaaatgagaataggtgaggaaatggaagttgagtcatcaacctacagtgtttgctacagatcgcacacacatgctctagcttttcatttgcttgtagagcatttcacaggacaagtattcacatcctttgggaactacagttttgag

SEQ ID NO: 279099 - DNA, 560 bp, Homo sapiens
aaaatccatagttgtttactttttttttttgagacagagtcttgctctttgtcacccaggctggaatgcagtggcacagtctcagcttactgcaacctccacctcccgggttcaagtgattctcctgcttcagcctcccaagtagcagggattacaggcgcgcatcaccatgccctgctaatttttgtatttttagtagagacggggtttcaccatgttggtcaggttggtcccgaactcctgaccttgtggtctgcctgcctcagcctcccgaaattctgggattacargcatgagccaccatgcctggcctagctgtttactttctaaaggcaccaacattcaggcttaattttttgcttaaagaaaacattgtcctggaatttggtatgcatttctattgttagctcacaaatatattaaaatatgaagtttttaaatttgagaacaaagggttattttatcttaaaattatcaagattaataatttaactgatttactccagattttatcatgacagatattagctagtatcctattacaatgtaactgagatata

SEQ ID NO: 279100 - DNA, 587 bp, Homo sapiens
acatatttcaagttttcaatgttaatgactaggccacaaattaatatcctagtaaataaaataaaataaaataaagtaccaagaataggtactccttgtggcatttatatactgaaataagaatgactgcatcaaaaataggatcttatgacctcctttgcagactgagcaataggatgtgatttactaggcttaaaaaaaattagatttgataagacactttaatccatgaaatagtgtataataagaagcttcagccctcaagactgcctttacagctatgccaggagatgtgtctgccktatgccctgcactagggccccttgcacagcaggcgggtgcagggctgccccccttctcttggctggccaagtgcatggagtgccttttagtagttgatccaccaggtggcgctcctttctccaattgccacaaaggcactacacgcgctagccaccgccctgtgcaatcaatttccgaagccctggaagagcccaattcttgcagcagccccttgcagaggcggagtgcactatgcagacagagggtaacaccatggcatttacccaaactcaggcgacacagag

SEQ ID NO: 279101 - DNA, 587 bp, Homo sapiens
acatatttcaagttttcaatgttaatgactaggccacaaattaatatcctagtaaataaaataaaataaaataaagtaccaagaataggtactccttgtggcatttatatactgaaataagaatgactgcatcaaaaataggatcttatgacctcctttgcagactgagcaataggatgtgatttactaggcttaaaaaaaattagatttgataagacactttaatccatgaaatagtgtataataagaagcttcagccctcaagactgcctttacagctatgccaggagatgtgtctgccttatgccctgcactagggccccttgcacagcaggcgggtgcagggctgccccccttctcttggctggccaagtgcatggagtgccttttagtagttgatccaccaggtggcgctsctttctccaattgccacaaaggcactacacgcgctagccaccgccctgtgcaatcaatttccgaagccctggaagagcccaattcttgcagcagccccttgcagaggcggagtgcactatgcagacagagggtaacaccatggcatttacccaaactcaggcgacacagag

SEQ ID NO: 279102 - DNA, 537 bp, Homo sapiens
aacagtgtagaaggaatattgactctgtgcaaggcagggttgaggccgtttctaaagtataagctatgatctctgctctcagggagtttgctacttaactggggagatgagaaataaacacactgacatataaacaatataaaaattaaatgcccacttcaaatttcaaatgaaaaatttttcacatagatgtgttgataagttaccaagtcaactgtaccaatcacgagtgctgaagacgtccatggagggagaaatgacttcaggtgttgtaatctagctaaggcttcagagaggaggtgagattcraactgacctatataggtcagtgcaacagtgcaaacagattttctgaaaatcacctctgcatttcttcagtttaatgttgcacaggaacataaattaaggcctgagtgatcagatcctcagagagacagataggaaagttgatttgtcacttggtatttacatcactgtcttagtccattcaggctgctagagcaaaataccataagttgggtgacttataaacaacaa

SEQ ID NO: 279103 - DNA, 633 bp, Homo sapiens
tccatctagaatttctgtttagtcaaatcatcctcatggaggcaaaatgtttcctctcagtggtaattctgactttgaaagtattctgtcttaaataaattatttatcatatcatttattggatttattaaacgtgtttccatgtgctggagctttcttggcataaaagtagaagtatgacccttatkatctgaaatgcctcgtattccagacacaagctacacagtgctaccaattagagtccaatctaagaaagattgagcagggcatcctgaatgttggcaaattctgcctcagattgaaaggggacttggcaaggactagaggatcgggagggtctggactggaaatggtagattctaatcctggctctgccaccaacaggtgctctcaccttgggcaagttattcgacctctctggcattagacaagcagggatcggcctactatcattttcaggtgttctgagtgatattcagaggcccacagccaatctcttgtttgttcctagtgagctgagctgaggatgagaccaaggtctctcaaaggctttcctgaaatccccgaatgctacaggcaatacgataaaaggcaggccatatgttgcctgagaacccaaaattcaaaatggaa

SEQ ID NO: 279104 - DNA, 633 bp, Homo sapiens
tccatctagaatttctgtttagtcaaatcatcctcatggaggcaaaatgtttcctctcagtggtaattctgactttgaaagtattctgtcttaaataaattatttatcatatcatttattggatttattaaacgtgtttccatgtgctggagctttcttggcataaaagtagaagtatgacccttattatctgaaatgcctcgtattccagacacaagctacacagtgctaccaattagagtccratctaagaaagattgagcagggcatcctgaatgttggcaaattctgcctcagattgaaaggggacttggcaaggactagaggatcgggagggtctggactggaaatggtagattctaatcctggctctgccaccaacaggtgctctcaccttgggcaagttattcgacctctctggcattagacaagcagggatcggcctactatcattttcaggtgttctgagtgatattcagaggcccacagccaatctcttgtttgttcctagtgagctgagctgaggatgagaccaaggtctctcaaaggctttcctgaaatccccgaatgctacaggcaatacgataaaaggcaggccatatgttgcctgagaacccaaaattcaaaatggaa

SEQ ID NO: 279105 - DNA, 588 bp, Homo sapiens
ggtccctgacaaaatcattgatgcttttcaagttgttctttactttcttctctactagtgagaatcctaccctcagagtactgttatatggagacaacaggtcagtgtttccccaggactcttgcaccaccacaataaagcttcagaacactcctacttctggcctctatccagctgacattacagaatgcttgcttttccttcttttctcctctcctgtgcctgcccacttcataccctgcctctatcctcagtttttctgtcattgtttaatactttcagatagttcttagtttcctctggtatctatcttatttcagtaatcctcatttgatgctaatgttagataatcccagtcaatcttttattacttcacatttaggtttagctctctatactgcaagtttcattctcaccatctttttcctcccctctgcccctctcaccctcagagtctctgttcargcttacttgtatggttagaagctctgccttacccagccacaaatctttctctcacactgacaagtgaagcctgtctttgctgggcataggaatctaggattgcaattcttttgtctcatatgt

SEQ ID NO: 279106 - DNA, 942 bp, Homo sapiens
gtcccctttgctgatttctagcaaagtgatcttaggaaaacttmcttggtaaaatgggtataatactactactgtagagattaaggtgataattcatgcaaagtgctcagcatattatttagcccatagcaaacattttctaaaagcatcacaacttttaaagcaaattctgcacatgacagtacccctttatacatttcagtgatgtggtgttgtgagtttaatcacaaaggaaagggcccaaattatttctgcttttggaaggacacatctaacttttagggtaagctctttcaaaaagttcctacagctcatcacctccccctgatttatgagggaacttttattcagtatggttttwgtgggattttctgtattggtatagtaaataatagagctgacgcttaggatacacggtggaagtggtgaataaggctactgcggaagaggccaaccaatatattgtgtggtttcatgcacaagctttgtatcccaaactacatccatacagatgactctttctgtttttcgtttttaaaatgtctttttttttaacttttaagttcaggggtacatgttcagggcatgcaggtttgttacataggtaaacatgcgtcatgggggtttgttgtatggattatttcatcacccaggtattaagcccagtaaccattagttwtttttcccattcctctccctcttcccaccctccaccctccagtaggccccagtgtgcactgttcccctctaggtgtccatgtgttctcatcatttagctcccacttataagggagagcatgccatatttggtttcccatacagatgactcttctctgtatcagcagcccctagagtccagagttccctatgtatatacctaagtactttctggggacttcctcctgagcacctcaaagttgccattttcaagatcgaactaac

SEQ ID NO: 279107 - DNA, 590 bp, Homo sapiens
agatacacaacttcattaccaaggcttcctttccttcattgatgtttagctcttataattaatatcatgcaaatggggcacagacacatacttcactagtgccaaggagtatatttacaaaatagggttatttgtgggggaaaatatggaatcccagaagtatcaaagcaacatgattccctgagagatgtgcttaggtcaagcctatagtgtttcagtggatcaccccaacttcatacactcygcatattttttagcgaaaggcggcagagaatatctgggtaactttgtaacaatgaagcttcctggtaaatgaagtggctttgataccaagaggcagactcagaattcaacttctggcaccagtcttgtcttccattgagctaattcagacctgctcagccacctccttgccagaaagggaatagaaatgagcctctaaggttatctggatcacttgcttgtcaattgacaacattaaatattggcaaaatgaggttcagcaacccttaatatgctagagagtagtcaaaaagaaagtccttgtttaaaggaagttacatagcaacacaaatcttgcttacattcca

SEQ ID NO: 279108 - DNA, 532 bp, Homo sapiens
tctggcaccagtcttgtcttccattgagctaattcagacctgctcagccacctccttgccagaaagggaatagaaatgagcctctaaggttatctggatcacttgcttgtcaattgacaacattaaatattggcaaaatgaggttcagcaacccttaatatgctagagagtagtcaaaragaaagtccttgtttaaaggaagttacatagcaacacaaatcttgcttacattccaagacgacaggtcgtggtagtgatggtgctgttttaattttttaatgttataaaggttttcttcatttccttgacattgaaatatgtagcatatttttgtttatacaaaacacctattacatccttcctagcagaggcacagtagaagaaagaagatccatgcagaagaaaacagaacaaatatgaaatattcattatatactgtggaaatattttgtctcatatcagtgtgtaagtttgacttacattccctattaccttggacatagagaaataaaagaaaaagtaaagagaagag

SEQ ID NO: 279109 - DNA, 526 bp, Homo sapiens
gcatttatcccaataatgtaagattggattatcatccaaaaatcaatatatataatatactattttaatagaataaaagacaaaaatcacatgattatctcaataggcaaaaagcatttgacaaaatccaacatgctttcatgccacttaacaaacattcaacaaactagaaatagaagggaacttcctcaaactaataaaaggacacttaacaaaaaatgcacagctaacacagtaatggtaaaagactgaatgttttacttttaacaccaggaatcagacaaggatattggctatttaaccacttctatttaacaatgtactggaggttctagacatgcaatcaggcaagagaaagaaataaaaaggcattcagactgtaaagaaaaaagtaaaattatccctatttgcaggtgataaaatctcatatacagataatttkaaggaattcagaaaaaactattataataaacaagttcaacaaggttacaggacataagatcaatatacaaaactcagctgtatt

SEQ ID NO: 279110 - DNA, 521 bp, Homo sapiens
tcttttacacttaaaactacaaaacattgctgaaagaaattaaagaagatacaaataaaggaaagacaacttatatacaggagttggaatataatcttgttaagattgcaatactctccaaattgattgacagagtcaatgcaatccctaaaataaactcagctactaattttggagagattgacaagttgattctaaaattaatatggacatacaagagacctaaaatagtcaaaatgatcttcaagatgaaaaacaaaaagtcaaaggactcacacttttagatttyaaaacttacttcaaagatacagtaaccaagacaatgtgatactggcatgaagacatacagattaatggagtagagttgagagtctcataaacctatatatctatggtcaattgactttccacatgggtggcaagacaaataaattgggaaggaatagtcttttcaacaaatggtgctggaatactggatgtccctgtacaaatgaatgatattggaccccttatctcacacc

SEQ ID NO: 279111 - DNA, 951 bp, Homo sapiens
gcctgtccctgacacttgcaggatcttgtgttattttcctcaaagtagaagaattttcccaagccatctttccaagtaacttctaaagagagaaaaaaaaatatcaacactcagagtccatttatcaagcyctgttagggatttgacgaatcactgagtgaccactggcatgcagtcaacgaagttggttgcaactcgttttctcattactctgttcttatcttaatgctgcagcccctgctaatgtttgctgactcccaaagaagctggcttgttctcttttcatcagcattattgttttttgaggttctgaatagctgcccattctwgtttctggaagtctggattattgttggttcttctgccctgactactcaacctaaaagtcatgatacagttgaagaaaccaaaaaggaagctcactgctttcctcccctagagggagaaagtcactctaggaaagggccaggctgggcagggtagagccctgccttttggagacaggtttctgactcattcctagaggcaagatttcttgccatgctctaaaaggaaaaaaatatatgagattcatggaaatgtggaaaggctttcaaaacatccacaaaaacttatgactttaatttctaaagaccttgtgtgtccttgggattctatgtcatwcaaatggcatatgaaagcagaattcacaagattaaaatacaaaaacaaacaaaatccttaatgtgaatttctaagtttcacaacctgagcctgggggttaatgattcactctgattttccaactcactgaaaacgttttccagttactgctgagcaactttctgaaatgatttctgtgcctgtttctgagtccctgcagtgaataaggatttgataattaagtagtaatttcaccagctttgagagtcggatctctctttgcctcagtttccttgtcagcaacagggg

SEQ ID NO: 279112 - DNA, 622 bp, Homo sapiens
gtttctggaagtctggattattgttggttcttctgccctgactactcaacctaaaagtcatgatacagttgaagaaaccaaaaaggaagctcactgctttcctcccctagagggagaaagtcactctaggaaagggccaggctgggcagggtagagccctgccttttggagacaggtttctgactcattcctagaggcaagatttcttgccatgctctaaaaggaaaaaaatatatgagattcatggaaatgtggaaaggctttcaaaacatccacaaaaacttatgactttaatttctaaagaccttgtgtgtccttgggattctatgtcattmaaatggcatatgaaagcagaattcacaagattaaaatacaaaaacaaacaaaatccttaatgtgaatttctaagtttcacaacctgagcctgggggttaatgattcactctgattttccaactcactgaaaacgttttccagttactgctgagcaactttctgaaatgatttctgtgcctgtttctgagtccctgcagtgaataaggatttgataattaagtagtaatttcaccagctttgagagtcggatctctctttgcctcagtttccttgtcagcaacagggg

SEQ ID NO: 279113 - DNA, 594 bp, Homo sapiens
atgcccccggtgtagaaaacaggccctttaccttggctctcctcccacttccatcagggcagccaagggctccagtggtaaatgcyctcctgcaactgataggacattcctcaaaagagcccttgcggtacaatttgtacaacatggccctttgaaacagatagatctgagcttgaatcctggctctacttctagctgtgaaatgcaagccacaaaacctctctcagcaagttcctaaacctttctgagcctcaatttgctcacttgtcaaatgggaatgatactgtgtactccatgctgttttggtgaaggttcaataaaatacatatgcaaaacacataattaatgcctgacacataagcatttaataaatatagcatttcaaaaaggaccaaaataacatagcaaaagcagaagaaataagaagaatgtaaggtaatgaaagaaaaattttaaacaaataaaccagaacaaatgcatccaaataacaattacttcttaaggctactatggggactatgttaagttactccaaatgttctgctgtgtttgggaactcttatccaggatctcaaagtacgttccttagaccat

SEQ ID NO: 279114 - DNA, 548 bp, Homo sapiens
ttaactcattgaaattatatattattataacattaggtcagcagcccctgtagtaggttgatggaggaartattttggtaattcttgacatatttcaaagaatttttccatatactcattccatatccccatccatatgatatcaaaactgactaaaaaatgagaaatgtagccaaatagcacttcttaatggtttctttgtgccaggcactgtgctagttgctggtaatgtacaagcagataggacacggttcttaccttcagggactcagagcccagtggggaagagagaaggcagcaacatctagcagcgaagggctgtgtggaagtgaatgcaggagcagctggagtgcgctccttctagccatggcttacacagcttctttgcctggtgattgtggtttgaatgaactgactgctggggccttgtggtctctaatcttctgccattttcaacatctagagtaattcttatctctacttcctgcattttgccggttttatttgtgccatcaacaaaagcacagcatcaaacaagtcattcactc

SEQ ID NO: 279115 - DNA, 542 bp, Homo sapiens
ctgcttggcccaggacttcttcacttgatcatacataattgtgttgttgatgccaagtccacaaaagatgacaaaagcctaggaaagagcaaacctgctaattaaacattgcagcaactcattggcaaaatctaatatgaaagcasgcagccaccagggatgggtctgaaaatacaatcttgttgtacacagaggtaggccttggggaaataggcacattaaaattcttaattactattgttatataacaactttatagctcacactgcacatgaggaaaaattatgaatttaatgtcattgtagagaaactatttcatatgtttaaaaacatacttacactctgtttaagtgggttcttaatttatttaggttgtggactgattttagtaaatccattctatttaaccaaagcaacctcttttagttgctaggctataaaatactttggtaaagaaaccaagttaatgtaaccataaggtaaatgttaaggggaaggaggattgagttagaaccattaataaagaagctatgaggtattct

SEQ ID NO: 279116 - DNA, 561 bp, Homo sapiens
aagctttggacttagatgatctgagatcaaatttcaactccaccatcaggtgtgtgaccttgggcacgttacctaacttttttagcactcaatttcctcatctgtaaaatggggattaaaatgttaactacctaagaaggttatgaagattaaatgagataatgttagaatgttcataaagcatttagcatattgcttcactcagagtaaacattcaagaaatgttaggaattaytacaagcaataaaagttgatataatacagttaaccttcaaagcaaagttagttctgtttcctgctaccagggggtacatatagttctacaaatcttaatttatgagtgattactttttccaaacttcacctctagtattataccagatgttttagggcatgacttcccaaatacacaagtttaacaagaaaaatcaactatcttgaaaaccactagcctgtgtccccatttagtacaaaagaaaaaaaaaaccagctgtaattctaaagtatgcttgtatttttaaaaacacccaacttcccaccagggaggtaagtcatcatatg

SEQ ID NO: 279117 - DNA, 547 bp, Homo sapiens
tgaaaaccactagcctgtgtccccatttagtacaaaagaaaaaaaaaaccagctgtaattctaaagtatgcttgtatttttaaaaacacccaacttcccaccagggaggtaagtcatcatatgcaagaagacatatatatataaataatgaaacacaaaactattagcatgtaaccaggcaaactacggttctaattttgaagtaataagggatgtttacttttaggattgaaatgtaggactacgagattgccacggaatatcaacaggtaacacatggtgtttcttatggactttccctttaaacataaatttatttaaaactctgtgcatgatgtagtttaagtctttgtactagaggcttagatcccaaaccttagaatattctttatgttcagtaacataccaatattcttatgcagaytaagctgatgaaaaacattatctcagaattcatatcttaaaaacactcacagaatactaaatcctttaataagcagcagtgtcttagactttaacaggcaattttagggggaagcagagaaag

SEQ ID NO: 279118 - DNA, 587 bp, Homo sapiens
tcgtccagtgtactcttccaaaaaatatttatttaccaccttctatgcaccagacacattgcttagtattgaggatagaaaaatggattcaaatagtcattacccttgagctactcacagtctaggaaagatagaaatattgagataaaataagtgtccaagtagaggatgttcaaacactattggaaagacaacaattcactctgtttagagaaatcaggagcagcccaagaccctttacaatgagtcttcaaagacaacagtgatgatgataagctcacatttgctagatgttcactctctgtctggcattccgctcagcactttcttatgcattattttatactttttacaaccaccccatgaagtaggtactgttatcatcctctcttatcagatgagacttagggagatyaactgccttgaatgagagagactggctcaaaggagcacagccaatggcaaacacatccatcaaagttatcttccaaaaaaacaaactggttttcttcccctccctaaggataaaatctgaattaaggcaataccagtaagcatgaagagaagaaagccaattttagaaaggt

SEQ ID NO: 279119 - DNA, 1116 bp, Homo sapiens
caaagctcatgctcttaacctgaaggctttactgcatccataatgtgtgtgaacaratttctacaacctttccggaaataggtttattgatgtgtatccagagcctaaaaagtataaatacatactctttgacctatcaatttcatatctaggaatttatcctgtggtaattatcaaagctatgcacaaagctttacatgtaaaagtgtgaaccacagcattatttatcttagtgatttattagaataacatgaatattcaactgaaggcagttggttaagtaaatcatagcacattcacataacagaatattatgcatctaattaaaatcatgctatagaagaatagttactcatatggaaaatatttaatatattaaatgataatagtgtacatgcctatgggtatacaaaagcatattatatacattgaaggatcctagaaaaattatgaccataatagtttcctttgaatttcttggctattagaattttaaaattattgctcctagtttgtaaattttagataataaacacawatgcattctaagaagtcacctaatacaagaggcggtcatctgcaaatgcagtttatgtacatgctattggggcaatctcagacaatgctcctagttggaataaatcccaagaaacagaggcaaaggcgaatagaaaataatccatctgaattccccaaagatacagcaaggcaagttgacttgtttagatattatattatttcaataatggttttagataattgtttataactttaagaagactcaaaataacctggtaaaacataatttcatataagatatagtctaagattttagaatatctttaaaatttttcatgattataaaaataatatgaacacatgaaaaatttaaagcacaaataaaatcaaaagctctaacctttccatctttagagatagcaattattaacaagttggtacaagtccttcctcaccttttcttataaatatgtattaagttcatgtcaatatataatatatttaatgacataaagcatattcataaattacacawagataatatatttgacaatattgaacaatattcaacaagaatgtctattatttactaaacat

SEQ ID NO: 279120 - DNA, 557 bp, Homo sapiens
ggataccctgttcccatggagcagatgactgataaagctacaaaacctaagaacagatgacccataaacatgagggtttcttgtactactataaataaatataatattatattgagtaggtcttttctgtcttacattcttttcatagaatcttgtaacagaataaacagtgattttcataaggtcgcagaatttaaagctcacaaatgtagttctagctctgtgacatataatcttttgtcataatttttccayccataagccaaagagtctggccttaaaaccatgtatgctatcaagcccagcaggtgccacttttgagagccaactcaaacaggcattcagaaggcaaataatcactatggctcacctgctaagtctgctctgttcaccacaaggagggaactccattaaatatttaagacaatcactaagagaacacccagcaggcaaacaactatgattacttgccccatagccctctcagcaggcatctgacagcacttgggatggggtttacatcacattaaagacatccctttgtagctcctatcaaa

SEQ ID NO: 279121 - DNA, 557 bp, Homo sapiens
ggataccctgttcccatggagcagatgactgataaagctacaaaacctaagaacagatgacccataaacatgagggtttcttgtactactataaataaatataatattatattgagtaggtcttttctgtcttacattcttttcatagaatcttgtaacagaataaacagtgattttcataaggtcgcagaatttaaagctcacaaatgtagttctagctctgtgacatataatcttttgtcataatttttccacccataagccaaagagtctggccttaaaaccatgtatgctatcaagcccagcaggtgccacttttgagagccaactcaaacaggcattcagaaggcaaataatcactatggctcrcctgctaagtctgctctgttcaccacaaggagggaactccattaaatatttaagacaatcactaagagaacacccagcaggcaaacaactatgattacttgccccatagccctctcagcaggcatctgacagcacttgggatggggtttacatcacattaaagacatccctttgtagctcctatcaaa

SEQ ID NO: 279122 - DNA, 605 bp, Homo sapiens
gctagctggccagtgttccccaccaggcacccacgcagtcttcccttcccctggccaaggggtccagctcagtgggagtcccaggaaggagacagcaatgaaaggtttctctccctgatgaagaaacccattgcataagaataagaggtttctcccccaggaatcttcccaggcttgcacctaagcttttttttcttccttttctccaccctgtaggcagttaatgcagccttgcagatatagggagcttttctatgcaagagttttttttttcattttggaaggcatcttgttaggccaggacccaaattcacaagacaccctttttctctcccttgttggaggagaacccagctcctcagctttaccttagcattcagcttatgataaggaggcagcagccagctgctggctgcagtctgtcaaggtctaaggaacgcaaaggttatgacaacagtggagacagggtgtatgtgggtgagtacgatattcccaccctctaggcccctstgttaacgtgagtggaagctgcactgacacctatcgatagcaccctgtcaaggttgccaggacttgaagatacaaggacagaagaaagaaaagaa

SEQ ID NO: 279123 - DNA, 485 bp, Homo sapiens
aatgattgacttgcatccagatggttgtcagtaaagcctgatttggaatgcaaccttaaggcagaaaacgtgattttcctgtgaataaaactggcttgttatcttcctaatttaaggggaaactacakgattgataggatgtgcccctgttctcgctttcaaatatttcggatgggtagattctatagtggtggaatgtctactgacagtcaccagtgtgacattgcatgtagtacaaaatagctgggcatttgtttctgatgagaattatggtattcaggataggattgattatgctgcagtgacaaacagccttcaaagttcagtggactaaaaaacataatttatttcttgcttaaactgggtgtcaattatcagttgaagattggcagggggttctactccatgtcatctttgtgtatcatctttacgtgaatactttatgtattcaggagatctcgttcgtgaaagtgtggttgacaatt

SEQ ID NO: 279124 - DNA, 485 bp, Homo sapiens
aatgattgacttgcatccagatggttgtcagtaaagcctgatttggaatgcaaccttaaggcagaaaacgtgattttcctgtgaataaaactggcttgttatcttcctaatttaaggggaaactacaggattgataggatgtgcccctgttctcgctttcaaatatttcggatgggtagattctatagtggtggaatgtctactgacagtcaccagtgtgacattgcatgtagtayaaaatagctgggcatttgtttctgatgagaattatggtattcaggataggattgattatgctgcagtgacaaacagccttcaaagttcagtggactaaaaaacataatttatttcttgcttaaactgggtgtcaattatcagttgaagattggcagggggttctactccatgtcatctttgtgtatcatctttacgtgaatactttatgtattcaggagatctcgttcgtgaaagtgtggttgacaatt

SEQ ID NO: 279125 - DNA, 508 bp, Homo sapiens
tttcctctttcttccctttcttagtttcttttttaatatttcatttttattttgtttcagtattttatatttgagccccatttttgtagaatagatttaacccttcttagaagccaagaagttagccttttaaggcatcatggatgctggcagaaggcataaggctcctgggttcagaagcaaaactctacttgtgcacagcactgcaagcagcatgagtatcaacatgtgcatggattcttcttgtcctcaagtcccacaggggcaatgtgacatagactcaggtggacactgctcatgcagtggctttgcatcacagttgaggaacactgggcttgggaacccattttacacygtgaacagtaggcaagcctgctctttgtcccaatgggaaacattacctcatccctcaaggtggcttgaagcaaacataatgtgagaagtagcctgggtaaaaagtggttgtggttccacagtcttggtgcacacacggcagcacatgtaggaa

SEQ ID NO: 279126 - DNA, 541 bp, Homo sapiens
ctattataaatcaatggaaaggtacagattcaactccactacttatcatgaaactttaatataggcaagttatttatcctctgtaagtcttagtgttttcatccgtaaagytggaaaatgaatagtttgctttacttttacttgatttgtagagaaaattaaatgaagtaatatatgtgaagtgcttagcacaatggcatagtatgagcccaattaatgctaatttaagcaaagaatgttttccttatttccagactcaaatatgacgctagaaagctgctctgggagggcacttcgagagctcaaaatcaacaggtgtcataatgaactcattacatttcctcctcctctgatatctaacattgtaaatgacagccttttttacacagctcacaaacgagcaacttaggggtcctccctacctttctccttaccacttttctctgattttcaatcaagtttttttttattttatctcctgtatatgttatctgttcatcacctttccttcatcattacagccaccatctaaatcacttat

SEQ ID NO: 279127 - DNA, 580 bp, Homo sapiens
aagtaactcctttaatttttaaaattgaggtataatttacctacagtgaaagggatacatcttgagtgtacagttcaatgaatttcaacaaatgtatagatgagtgtaagcaggtactcttttcaagatttagaacctttccattcattagctgatattttaaaggtataccacagaattgacagtcatcagttaccctctgtaagaattmtttaagaattacaagctgagaaccctggatcctctagaaagaaagttgcatcaaattcttcctcagaaatttgaaagtaaaaggatggaatttccagacaacaaataacgcaacaacccttgtatcattaaaacttacattcaagaaaataaattaggaaaaacagtagcgctttgattttaaaaaaaatcttcagagaacagcaattctgcagcaacattattactctgaacattttagttacttcagtattaatgatctatatttttttcctctcacctggtactgatattgttcatttgctaacacatatttgaaggaaaaaaaaacacctatagcctttaatgaactaattatcacatgcaactt

SEQ ID NO: 279128 - DNA, 1205 bp, Homo sapiens
aagtaactcctttaatttttaaaattgaggtataatttacctacagtgaaagggatacatcttgagtgtacagttcaatgaatttcaacaaatgtatagatgagtgtaagcaggtactcttttcaagatttagaacctttccattcattagctgatattttaaaggtataccacagaattgacagtcatcagttaccctctgtaagaattatttaagaattacaagctgagaaccctggatcctctagaaagaaagttgcatcaaattcttcctcagaaatttgaaagtaaaaggatggaatttccagacaacaaataacgcaacaacccttgtatcattaaaacttacattcaagaaaataaattaggaaaaacagtagygctttgattttaaaaaaaatcttcagagaacagcaattctgcagcaacattattactctgaacattttagttacttcagtattaatgatctatatttttttcctctcacctggtactgatattgttcatttgctaacacatatttgaaggaaaaaaaaacacctatagcctttaatgaactaattatcacatgcaacttwccacatttttccagtggttataataatatgcatctatacaaatatctgtatatatagcatagctttttgttataaaaatgaagtcatattgtatatactattttgcaaacttaaaaaatattgtcagtgtatcattgtgaggtttccaattcagtatatcatacataaaaagtaactcctttaatttttaaaattgaggtataatttacctacagtgaaagggatacatcttgagtgtacagttcaatgaatttcaacaaatgtatagatgagtgtaagcaggtactcttttcaagatttagaacctttccattcattagctgatattttaaaggtataccacagaattgacagtcatcagttaccctctgtaagaattatttaagaattacaagctgagaaccctggatcctctagaaagaaagttgcatcaaattcttcctcagaaatttgaaagtaaaaggatggaatttccagacaacaaataacgcaacaacccttgtatcattaaaacttacattcaagaaaataaattaggaaaaacagtagcgctttgattttwaaaaaaatcttcagagaacagcaattctgcagcaacattattactctgaacattttagttac

SEQ ID NO: 279129 - DNA, 412 bp, Homo sapiens
tttaggtaacttggttaagtctccgtttattgcaaccaaaaacgaccaatcaaaataaaaggtaatcttttttttttttttttttttttttttttgagatggagtctcgctctgtcgcccaggccagactgcggactgcagtggcgcaatctcggctcactgcaagctctgcctcccgagttcaagtgattctcctgcctcagcctcccragtagctgggactacaggcgcccaccaccgcgcccggctaattttttgtatttttagtagagacggggtttcaccttgttagccaggctggtcccaaactcctgtgctcaagccatactcccaccttgacctcccaaagtgaataaaaggtaatcttatccctactttgtaaatcgaataacagaaattcaaaagaatggaa

SEQ ID NO: 279130 - DNA, 412 bp, Homo sapiens
tttaggtaacttggttaagtctccgtttattgcaaccaaaaacgaccaatcaaaataaaaggtaatcttttttttttttttttttttttttttttgagatggagtctcgctctgtcgcccaggccagactgcggactgcagtggcgcaatctcggctcactgcaagctctgcctcccgagttcaagtgattctcctgcctcagcctcccaagtagctgggactacaggcgcccaccaccgcgcccggctaattttttgtatttttagtagagacggggtttcaccttgttagccaggctggtcccaaactcctgtgctcaagccatactcccaccttgrcctcccaaagtgaataaaaggtaatcttatccctactttgtaaatcgaataacagaaattcaaaagaatggaa

SEQ ID NO: 279131 - DNA, 550 bp, Homo sapiens
ggtgtgttactaggagtcctttagtagaactaaaagagacacaatgaatagaaccacttccacttgtttaatagattgtgaagactttcaatgaaatttgtatttctcaaaggtgcattttttttaccctacctcatttcatattacttttttatttctcaagttgcctgagaaaatgttcagtataaactagatgctcttatccatgaatttccattctgtaaacaaaagtatggcaataaaaatctcattcttgaaaattactttttaaaagagctataaaattcaaacacaatctagattcaacaaaaattaagcttacttaatttgaataagatgctttcattactgtaataatatgtaactcaaataatcatcagaacataactgctttgaaaagtgactcaattcaattctttgtgttaaaatgctcacataaaaatggcctgagttctacaagtcctgttctatctgctggagcctactgcacttcyaaatcttgaacaattgggagttaaaaggcaagggctggtccctctttcagaggaaa

SEQ ID NO: 279132 - DNA, 609 bp, Homo sapiens
agctcttgctgcgtagtttgggcatagatggctgagattatactgtaaaatgcaactttcattaaagaacaatttatgrggattgttgaattatgacaaggccaaggtaaacgttaaaatgaagtatatgcagtttgtagatttataaaattgtcagaagagtttcaaaataagcaaatggctgcttttaaggtcatttgtaatatatgcaactgtacttctatttgctttcaggcaaattatatccaatttaaatgttattcttcagaaagtatgtctaataaaattcaccaccataacttctgcatgggtaatgcctgctctcatcactgaagactagtttgctgtcaaaactttcaaagagcctccaagtgaaatgaatactgaagaataaagcttctaaaggctattttgggttccgacacctcctttctcatgtggcattaaactaagccaagggcaccttgtctcataaaactcacttcatgaaatacctcttgtaaaactgcagaaaatgggaagtttgaaattagaaacagaatacaaaagagaagctagcccttaactacatgtagcatcttcagatttttaagtaggaggaaaagtggt

SEQ ID NO: 279133 - DNA, 1121 bp, Homo sapiens
aacccacaatctgtaaatggccacctcattctgaagtgacctcagagaaaacaccccgattcagtgcactgtcttttccttggttttctaccaggtctgcactcttctcttagaatcaaccaggataccctggcttgttttgggggctaaaatgggatgactattttcaagtctttatttaggctttatttggttatttatttatttagsctttatttataaatggcttccacatttatatctttagcctaaagctctctatcccatcaccatctccacttagataattaatagacatctaacactgaatatgctgataaatgacctcccagggtttcaccctccatttctgatgtccccatcttggtgaacggtggcatgttcttcaaggtgctaacccacacacctttaagttatccttgcgttatctttctccttcacctcacatagaaatccaggacttaggacacaatttcttgcctatagtacaccaataaatattatttcctgcttcgtctcttagctttccatcatctattctgaacagcagtcagattctctgccaaaaaccatccatgtttcwaatttcttgcctatagtacaccaataaatattatttcctgcttcgtctcttagctttccatcatctattctgaacagcagtcagattctctgccaaaaaccatccatgtttccctatctcactcaaggtaaaaactgagcttgctaatacgacttaagagactctacacagccttatcccagttattacagacctcctctcctcccacgcctcctcttaatcacactttctgcagctaccctggctcccctgctattcattgaacataccagcatgctcctgcttaaacagtctttgtaatggttgtttcctctgccaggaatactcttcccccaggttctgtgwggcttgttccctcatccacttcaagtctttgctccatctctttctcatcaaggccactctgaccaccatagttaaagctgaagactctgccagcactctcatgtcccctccccgtgattgcctttgcgttatttccatagcatactccaccatccaacatactaaggaatgtacttatttattactttattgt

SEQ ID NO: 279134 - DNA, 591 bp, Homo sapiens
gattttaatatgatctgtatgtaagacttatgtcagatatatgtctgatgaattttttcttctaattcttacttgaatttttattttcttaatggtatttttaaaactgtctcttttaaatagcagaagtttaattgtgatgaagtaaactttatcaattttcttttatgrttagtatttttgtgtctcaagaaatttttgcttgtgctggggttacaaagattttcctgtattttcttttataagctttataattttatcatttatgtgtaggtttttgattcatcttgaaataattcttatctatggtgtgaggtgggggataaagtttattctttctatatgaatattcaagtgttcatgatgatatttatcgtagaagtacctatcagtctttgagagttatctattttgatttgacccatgaatgtacatataaattttaaatgtcacatatgaaaaaataataagtatatgttataaagaaattttgactaatcatatatgtggattgactaaatttttaattttttgaacattagtactttatctaatatttctcctccaccattcaccaaatacttggtaaaa

SEQ ID NO: 279135 - DNA, 540 bp, Homo sapiens
tttctgcacagcaaagctacaattagcagagtgaagagagaacctaccaactgggagaaatatttacaagcatattatctgttaagtggttaatatgtataatataaaaggaaattaaacaactcaatagcaagaraacaaataacctgattaaaacatgggcaaggggcctgaatagatatttctcaaaagaagacatacaaattaccaacagatatatgaaaaaatgctcaacattactgctatggtttgaatgtctgtctcctcccaaagtcattttgaaatttaattatcattataacagcattagagggtgggacctttaaaaggtgattaaaccaggagagctctgccttcatgaatggattaatgctgttctcacaggactgtgtttttgttgtgggagtgggttccttataaaggtggaatgtgctttcactgtcaccctctcttgcccttccaccatgtgatgatgcagcaagaggttccttgaccgatcccagcctcttgatttttgtcttttgagcctccaaagctgtg

SEQ ID NO: 279136 - DNA, 540 bp, Homo sapiens
tttctgcacagcaaagctacaattagcagagtgaagagagaacctaccaactgggagaaatatttacaagcatattatctgttaagtggttaatatgtataatataaaaggaaattaaacaactcaatagcaagagaacaaataacctgattaaaacatgggcaaggggcctgaatagatatttctcaaaagaagacatacaaattaccaacagatatatgaaaaaatgctcaacattactgctatggtttgaatgtctgtctcctcccaaastcattttgaaatttaattatcattataacagcattagagggtgggacctttaaaaggtgattaaaccaggagagctctgccttcatgaatggattaatgctgttctcacaggactgtgtttttgttgtgggagtgggttccttataaaggtggaatgtgctttcactgtcaccctctcttgcccttccaccatgtgatgatgcagcaagaggttccttgaccgatcccagcctcttgatttttgtcttttgagcctccaaagctgtg

SEQ ID NO: 279137 - DNA, 586 bp, Homo sapiens
taactctaagtagctaaaaacaatgtttaaggacattcaaatcacttccttggctactgagaatgggttatacctcaaagaagaaccatatgsctggcctggcatgcacactaagttctcctaacatatttgtcataaaaactaaatctgtaatggcaagccacacttaatctgcctgttcttaatgtcagtgtcccgtgtctctttctctaacttcctgtgaccatctgaacttcaatttcttcatctatgaaatggggagctatatggtttcattacagggcaaatgtgcaagcaaatagtataacagatgtataaaattaaaaaatataaactaaatatgggattctacacacctacaaattatcattattcaacatggcattattcgtagatgtttaactgtctatttctcactaagtgtgaatttcagggcgatgattttttaaaaatctcttcaggatgaagcaagggaaaagacacaaaggcaagttaaaatgctgccaaatgggtgtacagtgacacctgggtgtgataatccacacataacttccatctgttatttcttaatttacgctcagctgtt

SEQ ID NO: 279138 - DNA, 623 bp, Homo sapiens
actttttcccaaagtgactgtactattttgtatgcccaacagcattatataagttctagtacctccacattatcaccaatgcttaatatggtcagagtaaaataaaaatttagtcatcctaatagatgtgyagtggtatctcactgcagttttaatttgcatttccctagtgatgaatgcttctgatgctatgagttatcttttcatgtgcttacttgctattcatgtatcctctttgatggaagtgtcttttaaatttttttcccatttttagttgaattatttttattatcctttttccttttatagaattttgagagttctttatatattcttgatgtaagtcctttttcagatatatggtttgcaaatatatttccctgtccatggcatcttttcattctctgtacaatgtctttcaaggagcaaacctttgtggtttttaaatagttaatgaagtccatcatgtttttttaattttgtagattatatgttttgtgttatatctaaacaatatttgcctaactcaagatcacaaggctcttctcttataatttctcctagatgttttatagttttaggctttacatttagacctataattcattttgagttaatatttt

SEQ ID NO: 279139 - DNA, 1871 bp, Homo sapiens
actttttcccaaagtgactgtactattttgtatgcccaacagcattatataagttctagtacctccacattatcaccaatgcttaatatggtcagagtaaaataaaaatttagtcatcctaatagatgtgtagtggtatctcactgcagttttaatttgcatttccctagtgatgaatgcttctgatgctatgagttatcttttcatgtgcttacttgctattcatgtatcctctttgatggaagtgtcttttaaatttttttcccatttttagttgaattatttttattatcctttttccttttatagaattttgagagttctttatatattcttgatgtaagtcctttttcagatatayggtttgcaaatatatttccctgtccatggcatcttttcattctctgtacaatgtctttcaaggagcaaacctttgtggtttttaaatagttaatgaagtccatcatgtttttttaattttgtagattatatgttttgtgttatatctaaacaatatttgcctaactcaagatcacaaggctcttctcttataatttctcctagatgttttatagttttaggctttacatttagacctataattcattttgagttaatattttwactttttcccaaagtgactgtactattttgtatgcccaacagcattatataagttctagtacctccacattatcaccaatgcttaatatggtcagagtaaaataaaaatttagtcatcctaatagatgtgtagtggtatctcactgcagttttaatttgcatttccctagtgatgaatgcttctgatgctatgagttatcttttcatgtgcttacttgctattcatgtatcctctttgatggaagtgtcttttaaatttttttcccatttttagttgaattatttttattatcctttttccttttatagaattttgagagttctttatatattcttgatgtaagtcctttttcagatatatggtttgcaaatatwtttccctgtccatggcatcttttcattctctgtacaatgtctttcaaggagcaaacctttgtggtttttaaatagttaatgaagtccatcatgtttttttaattttgtagattatatgttttgtgttatatctaaacaatatttgcctaactcaagatcacaaggctcttctcttataatttctcctagatgttttatagttttaggctttacatttagacctataattcattttgagttaatattttwactttttcccaaagtgactgtactattttgtatgcccaacagcattatataagttctagtacctccacattatcaccaatgcttaatatggtcagagtaaaataaaaatttagtcatcctaatagatgtgtagtggtatctcactgcagttttaatttgcatttccctagtgatgaatgcttctgatgctatgagttatcttttcatgtgcttacttgctattcatgtatcctctttgatggaagtgtcttttaaatttttttcccatttttagttgaattatttttattatcctttttccttttatagaattttgagagttctttatatattcttgatgtaagtcctttttcagatatatggtttgcaaatatatttccctgtccatggcatcttttcattctctgtacaatgtctttcaaggagcaaacctttgtggtttttaaatagttaatgaagtccatcatgtttttttaattttgtagattwtatgttttgtgttatatctaaacaatatttgcctaactcaagatcacaaggctcttctcttataatttctcctagatgttttatagttttaggctttacatttagacctataattcattttgagttaatatttt

SEQ ID NO: 279140 - DNA, 563 bp, Homo sapiens
tgtgagtccccaaagtccattatattattcagatgcctttgcattctcacagtttagctcccacttataagtgagaacatactatatttggctttccattcctgagtcacctaacttagaataatggcctccagccccatccaagttgctgcaaaagacactattttattcctttttatggctgagtagtattccatggtgtatatatatacatatatatatatatrtatatatataccacattttctttatccactcattggtcaatgggcacttaggttggttccatatttttgcaactgtgaattaagaagagtgtcctttgaatattctcctagtgccaacattaaaaaaacagaaaaaccatagaataaattataggaatatacttttctgaaaatgtctatattgtcttgaattttcaggaagactatctctgaaatattatacttaaactagctacccatactcctaatattattgcgagctgaatataatacctaataattccttacataataaagactggtcttaattatatcaaaaaaaaatctgaaaataat

SEQ ID NO: 279141 - DNA, 586 bp, Homo sapiens
actcctaatattattgcgagctgaatataatacctaataattccttacataataaagactggtcttaattatatcaaaaaaaaatctgaaaataatgctatttgttgacctagaaatagctatgttaaaaatcttaactgagtgtatttaatactgtactattttccatatagttacaataaattccttgctctttctctctttggctacttttttgaartagactaagatgcttggtgaagcagctggaaagaggtgatgttaacgtcgtcgacttaaagaagaatattgaatatgcggcatctgtgctggaagcagtttatatcgatgaaacaaggtaagttttaaccttcttctcttttatcttctttgattctctcccgtttttcttcctctttcttgaccctcctttatctcaaacaggaatttagcatatcttcctgtgaaaccaaaatcaaatcttattaaaatttgaaatgttcttcttcatgtagctaattaactggactatgattctctaaaattaatacacattttaatccaaatgtttgaatgtcataagatagtcaaacactaaagtgaaaaa

SEQ ID NO: 279142 - DNA, 522 bp, Homo sapiens
agcactgggatctaagatgatgtgagggtttttgaggaagagtgactacaccagtttgcttagaaattagggtgtgcataaaagaagcaacgggaaatacctgcagtttgacatttgaccacattgtttgcatgtcatacacccctcagagattgcaaataccttgaagaaggtattgttgtgcacacacacaggtacccatgcattatatatgtatatatgtatatataagtgtggttttgtgtgtatccttgtatatataaactaatgtatacatatgtattcttatatatgtactaatatctatatatagatattyattcttttacacagccctaggtgcagtaatagatacccaataatcatttatctaactgaactgggttttttaacacctttttagcaaagttgtctatactgcttgatacaacagctgttaacttggtttgctaccaaacacagtagccgtcctcatccacaattttctgggtcagaaactgctcagattagaacatcaagaac

SEQ ID NO: 279143 - DNA, 610 bp, Homo sapiens
gatggtaaattgaacataactctgtattataatgtggttaactaagtatgtttcatataatgtttacatgaaattaactgtgaaactcttaacatgtaggatattttctttctttccacttaatgttctgctttattttgtatgtatttctttcctttgaaagtcacaatctttcmatctttttctgttcaaatcctttccctacctttgaggttgtgcacttcacactgtacatataaggcaaagtgtatacattaaactccagataaggaaaatacaacctaacatgtatttaccatttactatgtaccaagtatttaccacttacaatgtactcttctaaatactattttatatgtgtattttattttaattctcatagccactttgtatcatagggacttttatttttattctttatttaaaaaaaaaaaaaaaagggatacatgtgcagaacctgcaggtttgttacttaggtctatgtgtgccatggtggtttgctgcacctattgatccatcctctaagtttcctcccctcacaccctacccccaacaggccctgttgtgtgttgttcccctctctgtgtccatgtgttctcattgttcaact

SEQ ID NO: 279144 - DNA, 553 bp, Homo sapiens
ggaaggagcaggctgcaatctttgctgttctgcagcctctgctggtgatactcaggcaaacagggtctggagtrgctccccagcaaactccagcagacctgcagcgggaaaatgaacaaatgaaaaggaatagcatcaacatcaacaaaaaggacatccacacaaaaaccccagaaaccccatgcgaaggtcacaaacatcaaagaccaaaggtagttaaatccatgaagatgaggaaaaaccagtgcaaaaaggctgagaattcccaaaacccagaacttctcttctcctccaaaggattacaactccttgccagcaagggaacaaaactggacagagaatgagtttgatgaattgacagaagtaggcttcagaaagagggtaataacaaactcctccgagctaaaggagcatgttctaacccaatgcaagaaagctaagaaccttgaaaaaaggttagaggaattgctaagtagaataactagtttagagaagaacataaaagacctgatggagctgaaaaatgcagcacgagaactttgtgaaccataca

SEQ ID NO: 279145 - DNA, 1096 bp, Homo sapiens
cctgaggcttcttttaagttttttcctcttgttctggtcaggtgatttctattatttctgccatttccatttctaaagtcactgaaagaaattctcgaataatagattgagctctgaaattctagttctggatttattcttataaaggaaaagttgtttaacattaaacttcaaatgttaacgtatgaggccatagtatcatgattttttgtttctttgaagctgctattttttatttgtttgttttttgagacagggtctctggcacccaggctggagtacagtgggtcaaacacagctcgctgcagcctggacctgctggactcacgtgattctctcatgtcarcctcccaaagtgctgggattacaggcatgagctaccacacctggcacaaagctgctattctgtatattgaaacttaaatatttcatcagtttttattaatatcagaaaacctgaaactgttacttacttacatacatggccatcaagtgatactggtttgttagagtgaaatagaaagtatgttttttaagatttatgtatctcctctacaatagtacaatttttatgcttcactgaataaaagtacaattttttaatatactcattttawcttttttgaaaaaataagaccaaggagctaactgaagccaatctccatgcacccaagtcttagcaagcacaactgtagctaccagttatctaggtgtgtcagcagcctcaggacttttgagctgtccttaccctcttgtttcattttgatctatgtcttctaataacccagttgtctcttcttgtcttcaggccatcacactccaaatggtcatgcaaatggaaccwtggatgatggctcccttttactgggaacccttagataggcctctgagagatctgactgctgttttccccaaaacatgccccctgtcattatgaagcaattaagatgaggcatcatccctatcttaatgacagttagatgtacctcttcacatgagggattgatggcagcagcagcccatctggagcagccacctgtggggatgccagctgcagtgggggaggcatggctggagctgtgcactccagggagct

SEQ ID NO: 279146 - DNA, 479 bp, Homo sapiens
cttttttgaaaaaataagaccaaggagctaactgaagccaatctccatgcacccaagtcttagcaagcacaactgtagctaccagttatctaggtgtgtcagcagcctcaggacttttgagctgtccttaccctcttgtttcattttgatctatgtcttctaataacccagttgtctcttcttgtcttcaggccatcacactccaaatggtcatgcaaatggaaccatggatgatggctcccttttactgggaacccttagataggcctctgagagatctgactgctgttttccccaaaacatgccccctgtcattatgaagcaattaagatgaggcatcatccctatcttaatgacagttagatgtacctcttcacatgagggattgatggcagcagcagcccatctggagcagccacytgtggggatgccagctgcagtgggggaggcatggctggagctgtgcactccagggagct

SEQ ID NO: 279147 - DNA, 507 bp, Homo sapiens
ttttctctctaaattgcccgcagtattctaggtcattttgatttctacatacatttttgagtcatctgataaatttatacttttttaaagtctgtggaaaatttggattggaattgtgttgggaaaaatacatacacacaattgggaaaaattataattttaacaatactaagaaaggaaatgtgtaaacatggtacatctttttagttacataggccttttaaatttttctcagtgatgttcaatagttgtaagtgaasaggtcttgttcattttttttttgctaaaattattcctaaatgttatttgttgctgttatacaaaaatgtatttgttgcttttatatgagccccctatcctctgaccttataaaaagcagatggtggagccgtgcttgtatagcccatagaactgtaagccaattatacctcatttttaaataaatttcctaatctcaggtattcctctatagttatgcaaaaatgaactaatacaacaaactactat

SEQ ID NO: 279148 - DNA, 370 bp, Homo sapiens
tgtcaagtctgagatcacactagttcctggtagatggtccatgatttctgatttccaagccatcctggcttctcactggatgcaagtcaatcctgctactgtgtcttcctatactaactctgaattaggaagggaaagacacactgggctgagattttagaaattttggttctggtcactaagcagctgaatggcctgatccctaaaataaggaagakgggttctaaagaaccttccaattctatgattccattgaattaattggtttaacgtgttctctcttaagatgtttcataaatctcttaattatgtgtcttaaaaatatattttatctttccagtcttgatcttttgtgtagatgtttttctca

SEQ ID NO: 279149 - DNA, 607 bp, Homo sapiens
attcaaaactctaaaaactgactacatttttcccctcttctctctaatttgccaaacttttggtgagacatgaagcaaaagagacaagctgtttaaaggaaggattaaggcaaataagaaaatacagtgaaggatatacaattgataaatcaaaaacattaatgcaaattatgagttaaatattactaaatattgcaaaaaattacagaaaagtgtatacrccacaactctgtcatgtaaacagtgaattttttcttcctatttttcaccaaaaaaagtcatgttaaatttatagatggaaatctgcaactttatttcctttaaacagaatattatggaaattcttcaagtgtaattcatacaagtccccaatttaaaagcagctgcctaaaatgatgtatctgtggctgaaatcaaactagtagacagtggtattcttgtgccaattatgtacaatccatgtccactctgattaatgcattctatttagtcagcaccagggctgcactgttgtttatttttgttattgcttactatttttactatcaacccagcgtgtatcttaacttattaatcatatggatactcaagtggtttctaatttgtt

SEQ ID NO: 279150 - DNA, 607 bp, Homo sapiens
attcaaaactctaaaaactgactacatttttcccctcttctctctaatttgccaaacttttggtgagacatgaagcaaaagagacaagctgtttaaaggaaggattaaggcaaataagaaaatacagtgaaggatatacaattgataaatcaaaaacattaatgcaaattatgagttaaatattactaaatattgcaaaaaattacagaaaagtgtatacgccacaactctgtcatgtaaacagtgaattttttcttcctatttttcaccaaaaaaagtcatgttaaatttatagatggaaatctgcaactttatttcctttaaacagaatattatggaaattcttcaagtgtaattcatacmagtccccaatttaaaagcagctgcctaaaatgatgtatctgtggctgaaatcaaactagtagacagtggtattcttgtgccaattatgtacaatccatgtccactctgattaatgcattctatttagtcagcaccagggctgcactgttgtttatttttgttattgcttactatttttactatcaacccagcgtgtatcttaacttattaatcatatggatactcaagtggtttctaatttgtt

SEQ ID NO: 279151 - DNA, 487 bp, Homo sapiens
taaggatagaagataaataatagaaaacacagtgaagagtgctccgcacataaaaaatagtactcaagtcttaaagatgaatggatagtgacatatttatgaaattagagaaagtccaagatggctggagagcaaagcatagagaaaagtgagggaaaatgggaaaaaggtgagtgatttctgcatttccaactgaggtacctggttcttctcattaggactggctagacactgggtgcagcccacagagggcaagctgaagcagggtggagtgtcaacacacccaggaagcacaagggatctgggaactccctcctttagccaacggaagctgtgagggactgtcccttgagaaattgtgtaatccggcccagatactccacttttcccacagtgtttgcaatccgcaaaacaggagatccccttgggtgcctatgctaccagggccmtaggtttcaagcacaaaactgggcagccatttggacag

SEQ ID NO: 279152 - DNA, 566 bp, Homo sapiens
attgaaactaggcaaactcatgaagataagaaagaatcaatgaaaaaacgctgaaacctaaaaggccagagtgcctcttctcctccaaatgatcacaacacctctccagcgagggcacagaactatacagaggatgagataaatgaattgacagaagtacgcttcagaaggtgggtaataaataacaaattctgttgagctaaaggagcatggtctaacccaatgcaaagaaggtaagaaccttgataaaaggttacaggagctgctaactagaataaccagcttagaggggaacaaaaatgacctaatggagctgaaaaacacagsatgagaacctcataaagcatacacaattaccaatagccaaatcaatcaagcagaagaaaaaatatcagagtttgaataccatcttactaaaataatacaggcagacaagattttagaaaaaaagaatgaaaaggaacaaacaaaacctctgagaaatatgggactatgtaaaaagaccaaacctatgattgattggagtacctgaaagagaaggagagaaaggaaccaagttggaaaac

SEQ ID NO: 279153 - DNA, 566 bp, Homo sapiens
attgaaactaggcaaactcatgaagataagaaagaatcaatgaaaaaacgctgaaacctaaaaggccagagtgcctcttctcctccaaatgatcacaacacctctccagcgagggcacagaactatacagaggatgagataaatgaattgacagaagtacgcttcagaaggtgggtaataaataacaaattctgttgagctaaaggagcatggtctaacccaatgcaaagaaggtaagaaccttgataaaaggttacaggagctgctaactagaataaccagcttagaggggaacaaaaatgacctaatggagctgaaaaacacagcatgagaacctcataaagcatacacaattaccaatagccaaatcaatcaagcagaagaaaaaatatcagagtttgaataccatcttactaaaataatacaggcagacaagattttagaaaaaaagaatgaaaaggaacaaacaaaacctctgagaaatatgggactatgtaaaaagaccaaacctatgattgattggagtamctgaaagagaaggagagaaaggaaccaagttggaaaac

SEQ ID NO: 279154 - DNA, 600 bp, Homo sapiens
ccttgcccactgcacattcatgctacctggtttcagttgggccctgtttggaagcaacactgcttttgatcatccttgactctgtattgaatgcatgtcttactttttgataattccaaaaatcatctttaattagaaagcaaggaaaaataatgaagagcaaaaacaaaaagtataaacaaacttatttattcacttaacaatattaagtactagttctagttgcaatggtttttcaataacaataacatcagaaaaattcctgtcttcctaaaataattttctagctgggaaaggaaataaaaaactatataatatgtgaggctatgataaaaacctcacatattagagaaaaggaaagcaagatatgaaagctagaagtargaagtgctgattgagtattgtaaaccatatgaatgtgctggtgtataaattaaaaaatagtctaatacctttaacttcatatgatgcaaacaatatgtcaaatagagtcttttaaaaaatgtttaagttccaaacatttcaaactttaacttgtcttttcctttctatatttctctgtgaatacatgcccatcttttttcccaaggctaatgtcta

SEQ ID NO: 279155 - DNA, 593 bp, Homo sapiens
atgcttcataaaaatgataaaatcttggggttttttttgaaagtatagataaataggaggaagaactcatatatttgttatagtaagtcttatgtgtaagtaatgtatctctacatttaattaggtcttttataactttcartaaaggtttatgactttctcattaaagtcttgcctctgtgaagttacttctatttctagtactctcgttgcttctgtaattgctatattttgaaattatatttttgtttgctgtttgtatatatgaatttaatttttaaataaccattctctgtaacttctcttggactttcatatacataatcataatctttgcaaatgatgacagttttatatttttctaatccttgcaaatttattttgcataccttctccatttagcaggaactccacacaatgatgaatagaagaaggcattgaggccttgttctcgatttaaaggcatgtttttaacattttattacaaagtatcttggttaaagtaatatttggtagctaactttttttcatattaaatagggtcccttactcctatttgttaagagtttatattataaaggagtcctgagttt

SEQ ID NO: 279156 - DNA, 593 bp, Homo sapiens
atgcttcataaaaatgataaaatcttggggttttttttgaaagtatagataaataggaggaagaactcatatatttgttatagtaagtcttatgtgtaagtaatgtatctctacatttaattaggtcttttataactttcaataaaggtttatgactttctcattaaagtcttgcctctgtgaagttacttctatttctagtactctcgttgcttctgtaattgctatattttgaaattatatttttgtttgctgtttgtatatatgaatttaatttttaaataaccattctctgtaacttctcttggactttcatatacataatcataatctttrcaaatgatgacagttttatatttttctaatccttgcaaatttattttgcataccttctccatttagcaggaactccacacaatgatgaatagaagaaggcattgaggccttgttctcgatttaaaggcatgtttttaacattttattacaaagtatcttggttaaagtaatatttggtagctaactttttttcatattaaatagggtcccttactcctatttgttaagagtttatattataaaggagtcctgagttt

SEQ ID NO: 279157 - DNA, 571 bp, Homo sapiens
aagctggaaccatcatcctcagcaagctaacaaaggaacaggaaaaccaaacactgcatgttctcacttgtaagtaggagttgtacaatgagaacacatggacacagggaggggaacaacacactgaggcctgttgtaagatggagggtgaggggaaggagagcatcaggactaatagctaatgcatgcatgatttaaaacctagatgatgggctgataggtgcagcaaaccaccatggcacacatttaccatgtaacaaacctgaatgttttgcacatctatcccggaacttaaagtaaaataaaaataaaaattaaaacatttttaaaaaagaaagaaggacaacagaaattatctaaactgaaacacaaagaggagtggtgggtggggagagagaaagaaagaaacagaatatttcaaagctgtgggatcatataaaatactctaatacatttgtaatgggtatcccagaaagagacaagaaagaaaatggaagaaatatttgactatttgaagaaktgatgggcaaaaatatttccgaaattaatgacaagtaccaaactacagatc

SEQ ID NO: 279158 - DNA, 627 bp, Homo sapiens
ttttgactgtattaccttatacaagaatgggaactttgcagatgtgattaaattaaggatcttgaaattgtgagattaccctggatacttgtatgaagccaatataatcaaaggagttgttacaataaaaacatgcaggtggcctttagaagctgaaaaaggccaggaaagattttctcctcagagcctccagaaggacaagccttgccgacaccatgactttaccctgctgaaactgattttggatgtctgacatataaaactgtaacataacaaattagtattgttctaagctattaagtttgtggtaatttttttacagcagcaataataatagggtgtatgttgtaaatcttagagggaccagtaaaaatatttttgaatacctaaataaaaaatcaaygtaagagagaaaaaggaatcattaaaaattctcaattaatataaaagaaggcagaagaataaaaaagaaacaaagaacagatggaataaatataaaacaaaaagatggtagatttttattgcaaccatataaatagtaacataaataaaaatgatctaaacacaccagttaaagcgtaaagattgtcagagagaaaagcaagaccaaatcataatatgtctata

SEQ ID NO: 279159 - DNA, 595 bp, Homo sapiens
attgtatatctatttataaaattgaattgtttaaaatgtttcaaaaaaaggcttagatggcttcattcatgaatattaccaaatatttaaataataccaatgaaataatatttcttctaagaaataaagaggaaagaatatttcccaactcatcttatgagaccagcactgtcctaatattaaaaccataaaaagctattacaagaaaattacaaaccggtgtccctcatgaacccagatacaaaaatcttccaaaaaatttagcaaatgaaatccagcaatctatacaaaaaataacatatcacgagtaatttgagtttgtccctggaagtcaaggctcatttattccaaaatctatcaatatcatgaatgatatagtagacttagtagaaaataaaataaaagttcaatatatgtaggaaaaagcattcgatgccttgtcacaaagatgtcactaaaggcaaagaagcccctgctcttcccaaagccaaagccaaaccaaaggttttgagagccaagaaggcagtactgaaaggtgtctatagacacagatccayatgtcacccatcttccagtcacccaaaatactttggat

SEQ ID NO: 279160 - DNA, 545 bp, Homo sapiens
aaatactttggatttggaggcagcccaaatatttttggaagtgtgtccccaggagaaagaagcttgacyactatgccatcatcaattttccttgaccatagagttggccatgaagaagaaggacaacaacaacacacttgtgtttattgtggatgtcaaggccaacaagtaccagaccaaacaggctgtggaaaagttctatgacattgacatgaccagtgccaacaccttgatcaggcctgatggagagaagaagacatttgtttgactggctcctgactatgatgctttggatatagccaacacaattgggattattaaaactgagtccagctggttgattctaaatatacggttttcaccaagacaaaaaaagcatttaacaaaatttaacatccatttatgatatcaacttctagaaaactaggaatggaaagggacttatcctaatacgggtcatctccaaaagcctacataaaacttcatatgtagtagtaaaacactaaacgttttccctctaagttctagaacaaggcatcagtgtc

SEQ ID NO: 279161 - DNA, 545 bp, Homo sapiens
aaatactttggatttggaggcagcccaaatatttttggaagtgtgtccccaggagaaagaagcttgactactatgccatcatcaattttccttgaccatagagttggccatgaagaagaaggacaacaacaacacacttgtgtttattgtggatgtcaaggccaacaagtaccagaccaaacaggctgtggaaaagttctatgacattgacatgaccagtgccaacaccttgatcaggcctgatggagagaagaagacatttgtttgactggctcctgactatgatgctttggatatagccaacacaattgggattattaaaactgagtccagctggttgattctaaatatacggttttcaccaagacaaaaaaagcatttaacaaaatttaacatccatttatgatatcaacttctagaaaactaggaatggaaagggacttatcctaataygggtcatctccaaaagcctacataaaacttcatatgtagtagtaaaacactaaacgttttccctctaagttctagaacaaggcatcagtgtc

SEQ ID NO: 279162 - DNA, 564 bp, Homo sapiens
ttcttgtgattttagaagtgaagtataacttatatttttcctacacttttttatggccatttttgtttatttatgttctgtttgacttttggaatctgcttatcaaatttaaaaaaatactttttttgacaaatatataatgtataaattcacttacggataaatggcatctttaggagactacttrgtcatgaaggccatactgtttttcattcagttatttgtttgtatttctcactagcttttctgatttttctttgcagagatcttttacagttcctgttacctctggtattttatcaaagttgttattgtaaatgttgttttctttcattataacttgtaagaggtttttatttgcatatacaaagcctggtgattcttgatattgttattttaattttgaacccagccactttactgaattatctttttgtttctagcagtttaaaattttctgattttccctttagctagcctctgataacagaacatagaagaggcattcagactatgtggtcagtaaaagcttcaagtaggagttgatccctcagctgagtcccc

SEQ ID NO: 279163 - DNA, 564 bp, Homo sapiens
tttactgaattatctttttgtttctagcagtttaaaattttctgattttccctttagctagcctctgataacagaacatagaagaggcattcagactatgtggtcagtaaaagcttcaagtaggagttgatccctcagctgagtccccaggttcaagtctgtcttagtccattttgtccataggtatttctaaaaggaatacctaaggctgagtaatttataaagaggtttatttgactcatggttctgcaagctgtacaagaagcgtggtgccagtgtctgcttctggtgagggcttcaggttgcttccacgcatggaggagatgaaggagagctgatattggggctggcctgggrgaggttccaggctctttttacaaccagctgtcatgggaactaacagaattcactcatccctgcccactcacagggagagcattaatctcttcatgaaggatctgtccctatgacccaaacacccccaactaggtcccacctccaaccattggagattaaatttcaacaagagctttggaagctcaaatattcaaactataacaaatt

SEQ ID NO: 279164 - DNA, 620 bp, Homo sapiens
tgccagaaaaaagaaaggaaagcaagaggttaaaaattcttgctgagcagtgggtgagggaagggatttgtgagaggaaggagatgagttcaattacagtgagtttgcatttgagaagcctatggaatacatgcatagtaatttacttaatatatctatgtattaggtcaatgcaattcatttatttattcaacaaatattgattaaatattctctccatgtcagatacattcttcatggacatacattaggatctgcttcctgccctgctgtagcaattgacaaaggagggtgaatgtatataagtacttgatacattttgtatctacaaaaagcaaggtgactattataggatgaattgtattcccttcaaattcatatattaaatttccagtccatagtacctcagtgtatttggagataaagtctttaaagagtgattaagctaaataaagccatcaggatggggccctaattcaatgtaactgatgtccttataagaaaaggaagagataccrgggatgtacatgcacagaggatgcacagaagaaagagtatggggagaggcagcaagaggatggttatctgtaagacaaggataaaggccttagagaaatcaa

SEQ ID NO: 279165 - DNA, 604 bp, Homo sapiens
aggtcctcatctcactgagagaattttgaccaaataggacccaaccttagatcctggagtggggaatgttcctagtagtagcccaaggggacgagatactgtaaaggctcttctatctttagatgtgattatgcactaagatctttttaaattttaaataaaatgagccaagctcattttgaaaaacttggctagttcatgaagttgattctaatattagccaaataatgttgcttttaaaataacaaaaacctagcaatgtatattcyatctggctcataataaccaagcaagtctatgacagaggttttttaattcttaaccctagtactactgtgcttattttaaagagggttggagaccatctaagtgaccctacattttctaagaacctgccagttgatttaatgtagagattgggcaattagaaatcaatacttacaaggctcctttagggaaattaattttattaggttctgatctaactgattaggcagcaatcagacttctttgtcttcaaaataatgcagttaatgtgacaacaacgtttcatttactctgattaggattctcaattaggacatcaaggatatgtaagataaat

SEQ ID NO: 279166 - DNA, 500 bp, Homo sapiens
ctaactgattaggcagcaatcagacttctttgtcttcaaaataatgcagttaatgtgacaacaacgtttcatttactctgattaggattctcaattaggacatcaaggatatgtaagataaatgatgacaggtctacgaagaagttgggactgatttagagccaactttgtattatttaactgtgtttaataccacaaaagaactgaatgagatattgtttatagtcatactttaatatttattgcatggatataatattatttctggggcacagaatcttttacatacactcattcagtaatcatttcctgaatatccattatgcatatgaaacttttaaatgtaaaaaagtaagaaagatacagtttttatatgcaaatatcttatgatccaatgggatagatatatccataargaatataaatctaagtactgaaaaggaaatataaataatattctggtagaaaaaggaaaaaagaacaattgtcctggaagattg

SEQ ID NO: 279167 - DNA, 617 bp, Homo sapiens
tctgtggctttttgattctcttcatagtgtcttttgcagaacaaaagtttgtagttttaatgaagtccaatttatcaattccttctttcatggattgtgcttttggtgttgtatctaaaaagtcattgataaacccaaggacatgtatgttatctcttcaaaggttgacagttttgtgttttacatttaggtctatgatccattttgagttattttttgtgaaggatgcaaggtctgtgtttactatttttttttttttttttttttttgcatgtgggtgtccagttgttccaaacaccatttgttgaaaagattctcctttcaattgcgttggctttgctcctttgtcaaagatcaattgactatacaggtctatttctgggatctatgttctcttttgatgatccaaatttttctgattactgtagctttatagtamatcttaaagtcaggcaatatcaatactccaactttgttcttcttacatattgtattggctatctgagtcatttacttctccatatgaactttagaatcagtctggtgatatctacaaaaataacttgctggaattttgactggaattgcattgaatctatggaccaagtttgaaagaa

SEQ ID NO: 279168 - DNA, 435 bp, Homo sapiens
ggattttcttatactgtgaggggaacagttctgctgtgtggagcgggtccgggtagtttcactactcgagagcttcctgttttgttgtaattataaagtattaataatataacttctttgtttagccaggtccaaagttctaagatctgttcccttggtacctccyctcatctactacccagaatatgaaaattctttctccttcactcttagggttttttttttcctattaagcttaccatttattcatagaagttttcctcccccaattcagaggagatctccatctttccaaaaaatgagtttttgatcaataattccaaaatctttcatgggctggcttaactagtgccctcgaatattttccctagtaggtcctcatagttttttggccctctccttcacattggaaccagtgtatccttattcgatttt

SEQ ID NO: 279169 - DNA, 590 bp, Homo sapiens
tatattgctcatcttttcttgcatgctgcctactttatcctttagaacccttagcatattaataataattgttctaacttccctgtctgataattccaacctccctgccatattgagttctgatgcttgctctctttatactgtggtttttgcctttagtataccttgtacttttttcttaatagctggacatgatgtactgggtacmagaaatagcggtaaataggccattaataatttggtaggtgtgaggggaagaaatattttataatcctatgattaggtctcagttttttttcataggcctatgactctggactaacttcacaagtgtttctccgatttgtttctccccttttagatgaaacaggacggctagagtgagctggaattgggtacttactttccccaaggtcagttaggttctgataaaatgctagcaagttaggcccctctttctttctttcttttttttttttttgtgagcaacatggctgtttatttcacctgggtgcaggcgggccaagtccgaaaagagagtcagtgaagggagataagggtgggccgttttataggatttgggtaggtaa

SEQ ID NO: 279170 - DNA, 531 bp, Homo sapiens
ggtgaccgagcataaaagtttggaaaatgtgcagcctgacaatatggtagaaaagaaaaacccattttctggggagaaattcaagccagctgcagaaacgtgcayaagtaatgaggagccaaatgttaattgccaagacaatgtggaaaatgtctccaggatatgtcagggacctttatggcagcctctcccatcagaggcctgaaggctacgaggaataaatcggttctgtgggcctggtccagggcccccctgctgtgtgcagcctagagacttggtgtcctgcattctggccacttcagccatgtctaaaaggggccaaggtacagctcagtccatggcttcagagggtacaagtcccaagccttggcagcttccatatggtattggtcctgcaggtgcatagaagacaagagttgatgtttggaaacctctgcctagaattcagaggatgtatggaaacatctggatgtccaggcagaagtttgctgcaggggtgaagtcctcatggagaacctctactagggcaat

SEQ ID NO: 279171 - DNA, 347 bp, Homo sapiens
tagggcaatgaagaggggaaatgtggggttggagctcccacacagagtccccactggggcactgcctagcagagctgtgaggagagggccaccatcctccagaccccagagtggtaaatccactgacagcttgcactatgtacctggaacagccacaggtactaaacagcagccartgaaagcagcccccggcctgtatcctactgagccgcagggcagaactgcccaagtccatgggagcccacctcctgcaacagtgtgacctggatgtgagacatggaatcaaagcagattttgaagctttaagatttaatgactgccccgctgggtttcaaacttgcatgagg

SEQ ID NO: 279172 - DNA, 587 bp, Homo sapiens
gggtctcagttctgaatacagcttgagcaactaggaatttatagcaaggggccaagttggggatcagtagatggaaaattatgaagaggaaacatcaggggtaaggaatattttgattaaactgaactaacaggattcttgctgaagacaggccagggtgatcagacatcacttgagggatggtagaggatgaagaacccaactagctattgagggtgatcagatatgaaggatgggggattctggctaaacaaccctatcaaggtttttgttraaaactgaaacttgcaagaagttgcatagctaggcctaggagaagtttcaggaatctgacaaaagtttggtcaagcaaagaatctttgtcaagaccaacagatttggtgagcatgaattcgacttctaccccattgcttgtggaggcagtcatatatattttatatatgctatatctcatcaataaaagtacacatctaataaaattttgagcatgtaaccaactttacatgtatttataatgacttatatgattttgtgtgcaatgcatattataaatagaaattttaaaaggctgagataaaaatatatct

SEQ ID NO: 279173 - DNA, 1727 bp, Homo sapiens
gggtctcagttctgaatacagcttgagcaactaggaatttatagcaaggggccaagttggggatcagtagatggaaaattatgaagaggaaacatcaggggtaaggaatattttgattaaactgaactaacaggattcttgctgaagacaggccagggtgatcagacatcacttgagggatggtagaggatgaagaacccaactagctattgagggtgatcagatatgaaggatgggggattctggctaaacaaccctatcaaggtttttgttgaaaactgaaacttgcaagaagttgcayagctaggcctaggagaagtttcaggaatctgacaaaagtttggtcaagcaaagaatctttgtcaagaccaacagatttggtgagcatgaattcgacttctaccccattgcttgtggaggcagtcatatatattttatatatgctatatctcatcaataaaagtacacatctaataaaattttgagcatgtaaccaactttacatgtatttataatgacttatatgattttgtgtgcaatgcatattataaatagaaattttaaaaggctgagataaaaatatatctwagctgaccttggaagatactctcttcctcattcccaccatcctgaatctggctatgtttttctcttctggccagctccttgcaccctcaggagataagccacaaaatacataatctcaatttttcagtgattcctaataagatctgaaaattgcatttaaaactggcatttcatcaaataaagacaaatgatagtattctcgccaatttaaaattgataagtaattatttgcttagawtgaaattaaatggaaaacattaaaacgctgtgacaagttggaagaatgattgaagaagagaggaaaaaactttgtatttctgtacttttaaaatcattttcatcccctggattctgaaaaaagcctcacattttcattttgcactgactgggccctgcaaattatgtagctgatcttgtaggtgttttcctactgaaatatgagcatatattgtatttgagacattggaggcaagtttgtaaaattttatgaaaggattagttagaacatctaccctttgtgtgtccaagtgtgccccgcttcttgtcaggtgtcagacaagattagatgcwagctgaccttggaagatactctcttcctcattcccaccatcctgaatctggctatgtttttctcttctggccagctccttgcaccctcaggagataagccacaaaatacataatctcaatttttcagtgattcctaataagatctgaaaattgcatttaaaactggcatttcatcaaataaagacaaatgatagtattctcgccaatttaaaattgataagtaattatttgcttagaatgaaattaaatggaaaacattaaaacgctgtgacaagttggaagaatgattgwagaagagaggaaaaaactttgtatttctgtacttttaaaatcattttcatcccctggattctgaaaaaagcctcacattttcattttgcactgactgggccctgcaaattatgtagctgatcttgtaggtgttttcctactgaaatatgagcatatattgtatttgagacattggaggcaagtttgtaaaattttatgaaaggattagttagaacatctaccctttgtgtgtccaagtgtgccccgcttcttgtcaggtgtcagacaagattagatgc

SEQ ID NO: 279174 - DNA, 609 bp, Homo sapiens
aagaatgggcttagcaacaagcttttcatgcagagcctagtataaattgcctacccatgggctcctgagmaaataaatgattctattaaatgactaagttctgtggttgttggttacatagtaaggtcctatttagtggactagatgccatttcttagtgggattttgctgatgaccatattaaaaacaagaaaaagtaaaatatctggcagcgtctgaccagaactttcttcttgtcttctttatatcctccttttcatttccatccttggttttttgaagatctttctagcttggttgtcttctgaattaataaaagcctgacctctaagctaccgtagcaatagctaagagatttcatgggataggtccaaatgcacacctgatcttgtgccaaagaggaagatattgactgaaagacatggaggtcattcctttctgctccctgtttcctagaataccatttaagagcctggcttcacaagatggcagctatctagcagcaaagagatttcttattctattatctgtgttatttccatacatatttgcatgttgacatgtaaaaacaatcttggtaaatgaatggtcacttttttttttttttgg

SEQ ID NO: 279175 - DNA, 604 bp, Homo sapiens
aagagtgaactgagccctgggactgcaccataaggattgtggcgtgagtaaaatagcagtggaacctcaaaaggagaggttggtatggtaagaaaaaaatctaggagagctgggtgtcctgagggccaaacaaattgtttcaaggaggagaaatgctcaaatgtcacatgtttctgrtaggttgagatgatgatcaaaaattgacccctggatttagcaacatgcagactatttgtggacactgaaaagagaagtttcagtggagtggtgggcaaatacctgtttaaatagatcgaggaaagactggggttaaaaggctttagaatagtgaatgagacaactcttctgaggagatttgctataaagggtaaaatagaaacagagcattaaggaagggaaaagtggttttaaaaatatgttgatgagaatgatccaggagagaggaacaaactgaagattcagaagaaaggacaattgcaaggacgatgttcttgagcaggggaggagagattgaatcaaatgcacaatgtggacatagagagtagccctgctaattccaccttaatgtgaggagggtagttagggtttacaaacatagatgcag

SEQ ID NO: 279176 - DNA, 595 bp, Homo sapiens
ggggaaatgtttctagaaggaagaaggagactctggttcacccccagtttgcaggatggagtcattgtgcctttagggaagagtgagcagctggctggaggtctatactcctgcctgcttggtctggagtttctctcaccctggtcacttgatcctcttacttttcctgtcagtgaggaagctgtttactcccagaaagtcattcattccctgataagatcaatctcattgttaagcagaattttcacttcctgcccgggagttggcrtagcgcgaatgtccagcattcagagccccataaacagtcagcatgagagaggccctagaggccaacactgcccaacagctcctgatgtaaaaatggggaaactgaggtccagagagaggaagagcagggaaaggagtcagtgtcagagctgagcccaaatccaggccctgccaccgctactccaccattcctaggtcaggtggtgttttgcatgccatcaaagaaccccacaatttcatgcgctcccttttgattttaagattcaacatgccattctaagaaaacttgctaagaaaacatttcaacacaatataatattttaatgta

SEQ ID NO: 279177 - DNA, 476 bp, Homo sapiens
ttcctttacatgtggacatccagttttgccaacaccagtttttgaagactggtctttcctcattgtatgtctaacagttttgtcaaaagtcaattaagcaaaaatatgtaagtttgtttctggactctctattctgtaccatcgatctatgtgtctcttcttatgccaatgccatgctattttgattattatagcattgtaccagattttgaaataaggcagtctggtgcctccagctttcttcttttgctcaagatggcttcacctattcatggttttctgtagttaatattaatttcagattgttytgtcaatttctgtggaaaatatcattggaatttttttaggattgaactgaatttgtagatctcctcaggaaatatttaaacagtattaattctccaatccctaaacacacatatcttgtcattgtgtgtcttctatttctttcatcagtgattcatagttttcagggg

SEQ ID NO: 279178 - DNA, 476 bp, Homo sapiens
ttcctttacatgtggacatccagttttgccaacaccagtttttgaagactggtctttcctcattgtatgtctaacagttttgtcaaaagtcaattaagcaaaaatatgtaagtttgtttctggactctctattctgtaccatcgatctatgtgtctcttcttatgccaatgccatgctattttgattattatagcattgtaccagattttgaaataaggcagtctggtgcctccagctttcttcttttgctcaagatggcttcacctattcatggttttctgtagttaatattaatttcagattgttctgtcaatttctgtggaaaatatcattggaatttttttargattgaactgaatttgtagatctcctcaggaaatatttaaacagtattaattctccaatccctaaacacacatatcttgtcattgtgtgtcttctatttctttcatcagtgattcatagttttcagggg

SEQ ID NO: 279179 - DNA, 578 bp, Homo sapiens
tcattttacatctaattttttgagcatttttacaatgaaaaaatgttaaattttgtcatatgctttttttgtcattgttgatatggtcctatggtttttgtccttcattctgctgatgtactgtattgcatttgtagatttatgtttattgaagcatccttgtattcctgagaaaaatctcacttaatcatgctgaaacacacaggattttaaaaagacattctcttccattcatattttagtctacatgaaatgcacrttgaagagatgtttggttttccctgttgcccagccactctcttcccctttctaccatctgatattaccactgaaactctcccaatctgttaagataagcaataggtaagcaacttctctcttggtaaaatgagttttattttaaagcagaacttctgtgcattactgtcttagagttccctctttcatgaagggtaagagtgaggaagaaagaaagggataaaacagagagcgctgtctatgttatctacatctatggttatatcaatagctgtatccatatgcatatcatataatgtcgattgaagcctccatgactt

SEQ ID NO: 279180 - DNA, 558 bp, Homo sapiens
cattactgtcttagagttccctctttcatgaagggtaagagtgaggaagaaagaaagggataaaacagagagcgctgtctatgttatctacatctatggttatatcaatagctgtatccatatgcatatcatataatgtcgattgaagcctccatgacttagaaaatctaaaaagtaataatttacaatttttgaatactcaccatgtgctagacactgttggaaatgccttatagctgttacctcagatggtygttatgcccagaataaatattccccttaacctcctcccactgctcacagataagaaaacagaagcacaaagagttgtgtggatgctcattggtatgattcgaactcaggcactctgactccagagatcacaggtttcaccgtcactcttgtcaaatacttgtggccttgatgctatgccatgagacttcttgcagctgctgctcctgggagtgagtggggttgtggtatagggaagagggtttgtggttttctccttctgggctcttctgctttctttgtgtatgcaaatgaatgttttttaaa

SEQ ID NO: 279181 - DNA, 1047 bp, Homo sapiens
actggcgcctcaaaacaacttagagatgctggataatgtgatgttaatatgcacatcacatgaatctcctttgaagaggttgttatcaatgttatgtcatccygtgctcttgaagaaatgtagatgtcattattgatatttaaacaggatcctcacttcaggatagagagtcttggcagaactccaaaaggtaacatgaagctgcacatagcacagcaaaagaaagccatcagtgtaaaaagccttctcaagttgtggagccaatcagagtagcaaattagtaagccatgaatagttaaagagcatctcctaggaaatttccaccccagtttagaatgatcccattctcattgccattggtattgaaaatgctaaagtcaggctattgggtctttatgaatcactctaagatggtcatgaaattttcacttggaaaggcatgtggaatatgatttattttactcacaggtcctagagagggaagtagggcatgctacgtagaaagccatatgagaagagctccwactggcgcctcaaaacaacttagagatgctggataatgtgatgttaatatgcacatcacatgaatctcctttgaagaggttgttatcaatgttatgtcatcctgtgctcttgaagaaatgtagatgtcattattgatatttaaacaggatcctcacttcaggatagagagtcttggcagaactccaaaaggtaacatgaagctgcacatagcacagcaaaagaaagccatcagtgtaaaaagccttctcaagttgtggagccaatcagagtagcaaattagtaagccatgaatagttaaagagcatctcctaggaaatttccaccccagtttagaatgatcccattctcattgccattggtwttgaaaatgctaaagtcaggctattgggtctttatgaatcactctaagatggtcatgaaattttcacttggaaaggcatgtggaatatgatttattttactcacaggtcctagagagggaagtagggcatgctacgtagaaagccatatgagaagagctcc

SEQ ID NO: 279182 - DNA, 1047 bp, Homo sapiens
actggcgcctcaaaacaacttagagatgctggataatgtgatgttaatatgcacatcacatgaatctcctttgaagaggttgttatcaatgttatgtcatcctgtgctcttgaagaaatgtagatgtcattattgatatttaaacaggatcctcacttcaggatagagagtcttggcagaactccaaaaggtaacatgaagctgcacatagcacagcaaaagaaagccatcagtgtaaaaagccttctcaagttgtggagccaatcagagtagcaaattagtaagccatgaatagttaaagagcatctcctaggaaatttccaccccagtttagaatgatcccattctcattgccattggtattgaaaatgctaaagtcaggctattgggtctttatgaatcactctaagatggycatgaaattttcacttggaaaggcatgtggaatatgatttattttactcacaggtcctagagagggaagtagggcatgctacgtagaaagccatatgagaagagctccwactggcgcctcaaaacaacttagagatgctggataatgtgatgttaatatgcacatcacatgaatctcctttgaagaggttgttatcaatgttatgtcatcctgtgctcttgaagaaatgtagatgtcattattgatatttaaacaggatcctcacttcaggatagagagtcttggcagaactccaaaaggtaacatgaagctgcacatagcacagcaaaagaaagccatcagtgtaaaaagccttctcaagttgtggagccaatcagagtagcaaattagtaagccatgaatagttaaagagcatctcctaggaaatttccaccccagtttagaatgatcccattctcattgccattggtattgaaaatgctaaagtcaggctattgggtctttatgaatcactctaagatggtcatgaaawtttcacttggaaaggcatgtggaatatgatttattttactcacaggtcctagagagggaagtagggcatgctacgtagaaagccatatgagaagagctcc

SEQ ID NO: 279183 - DNA, 540 bp, Homo sapiens
tggggtattatgtcttcaaataatctgttcctttctctcttcctcttttcttcttctagaactctaacaatgtttgtgttgatccatttgataatgtcctacaatgtcctcgggttctgcttgtttttctttattcctttttctttctattccccagtcacaataatttcaattattccatattccagttttctgaatctctcttctgactgctcacaccagttggagaacacctctagtggatttttcaattattgtactgtttaactcttaagtttctgtttattttttataattctcttgctgktgttcttattttattaatgcatcatattccaatgtttctttagtttttttttctgttgttttctttagctgtttgagcatgtttaagacagtgatttaacatcttggtctagtgtcagaaagggcccaatatatgacaagggtctttgtaggacatatgacaatggaagcaagatgtgggagtgatgggaagatgtaactgtgaggaaaggaatgtggcagcaaggaacagag

SEQ ID NO: 279184 - DNA, 548 bp, Homo sapiens
aaatgagataatacacacagtgtgctgagctcaaggcctgctcctggtatgcacccagtcattgaagttcattgatacacacttgaggaaacattcaagatcacgtaaggatgagtaaatgactgctctgttactttctaggagtggcaggtgaggagctgcaggtgattcagcctgaggcatttgtgtcagttgcagctggagagatggccactctgaactgcactgtgacctccctgctccctgtgggacccatccagtggttcagaggagcttgtccaggccagaaattaatctatagtccaaaaagatgccactctccccgggtaacaactatttcagaccagagaaagagaaacagcacagactattccatccgcatcagtagcatcaccctcgaagatgctggcacctactactgtatgaagctccggagagcaattcctgccaacrtggagattaagtctggaccagggactcagatgtctgtgcgtggtgagtacagtgtaggcctccttcatcccccaaggtatgacaagaagtcaata

SEQ ID NO: 279185 - DNA, 601 bp, Homo sapiens
  misc_feature (1)...(601): n = A,T,C or G
agcccctgacttcttcaggtcagtcagcttttctttgttttatttgttgtaacatcagtatccactgaagtttcgaatggaagacaggactccaaagttaatataaaatgtttgaaagtaatagctaacactttatagacttaccatgtgccaggcactcttctaagtgttccacacatattactttatgtaatcttacagtaatgcagtcaggtaggtactattattagttctattttaaaggtaaggaaattgaacaaagagaagtctagtaacttgcccaaagtcactcagaaaagtaagagggatttgaattcaggcagtctggctcttaacaaggatttgtttgtttttttccaaaaagycactgatgtagcgcatcctctttgcctcccatctggtgttggaatccctactacaacattccaccaaatgtactgcctgggctcagcttgcacacctgcagggatggggagcgtgctacctccctggggatctgtggccagccgtaccagttttaaaactctcccccaaatttatgaattcctnaataaatcttcaaggctccacatggtttcctgggaaacagagcagcttgctc

SEQ ID NO: 279186 - DNA, 524 bp, Homo sapiens
tctcactgtcatttcaggtgccactggggtacaaaaaaaaaattcctggagctagctctgtgtctgcccaagtggccgcccagttttgtrcttgaaacccagggccctggtggtctaggcacccaagggaatctcctggtcttcaggttgcaaaaaccatgggaaaagcatagtatctggaccagatagcactgtccctcacagcatagtccatcacggcttcccttggctagggtagggagttccccaaaaccttgtacttcccaggtgaggtgacgccccaccctgcttctgcttaccctccgtgggccacacccactgtctaacccgtcccagtgagatgagctgggtacctcagttggaaatgcagaaatcacccaccttctctgttggtctcactgggagctgcagactggcactgctcctattcgaccatcttgccagctcttcccctttgtactttcaaagtggtgaaatctctgcaaaagttcctttcatgtgaagatttttgcctgtgtcacatt

SEQ ID NO: 279187 - DNA, 625 bp, Homo sapiens
gagtgccatgtagcatcctttcatttccacccaaagcactccttttagcgtttttgtaggtaaggtttagtggtcataaactctcaccacaccagttgggtgtggtggtgggygctcattttcatgacctgatgccaccccttctacagatcagggaagtctgggcctggagacatcgtgctattcacgcaaggatccatggctgaggatttatctgagaatatcttaatttctcccttgtgtttgaaggatgtttgccaggtgtagagttcttggttgataggtttttcctctttcagcattttaaacatatcattcctctgtcttgtggcctccaatgcttctgataagaactcagctgataatcttacaaggatctctcgcgtgagaggaatcgcttctcttttgctgctttcagaattctttccttgactttaattgtcgacagttggattataatgtgtcttaatgtgggtctctttgactttatcgctgagttaaatttgggtttccttggcaccttaagcttgtagattcatgtattttatcaagtttgggaagattttgttcatgatttcttccaataatcttctgcccctttctctttttctcttttcccccagaa

SEQ ID NO: 279188 - DNA, 625 bp, Homo sapiens
gagtgccatgtagcatcctttcatttccacccaaagcactccttttagcgtttttgtaggtaaggtttagtggtcataaactctcaccacaccagttgggtgtggtggtgggtgctcattttcatgacctgatgccaccccttctacagatcagggaagtytgggcctggagacatcgtgctattcacgcaaggatccatggctgaggatttatctgagaatatcttaatttctcccttgtgtttgaaggatgtttgccaggtgtagagttcttggttgataggtttttcctctttcagcattttaaacatatcattcctctgtcttgtggcctccaatgcttctgataagaactcagctgataatcttacaaggatctctcgcgtgagaggaatcgcttctcttttgctgctttcagaattctttccttgactttaattgtcgacagttggattataatgtgtcttaatgtgggtctctttgactttatcgctgagttaaatttgggtttccttggcaccttaagcttgtagattcatgtattttatcaagtttgggaagattttgttcatgatttcttccaataatcttctgcccctttctctttttctcttttcccccagaa

SEQ ID NO: 279189 - DNA, 625 bp, Homo sapiens
gagtgccatgtagcatcctttcatttccacccaaagcactccttttagcgtttttgtaggtaaggtttagtggtcataaactctcaccacaccagttgggtgtggtggtgggtgctcattttcatgacctgatgccaccccttctacagatcagggaagtctgggcctggagacatcgtgctattcacgcaaggatccatggctgaggatttatctgagaatatcttaatttctcccttgtgtttgaaggatgtttgccaggtgtagagttcttggttgataggtttttcctctttcagcattttaaacatatcattcctctgtcttgtggcctccaatgcttctgataagaactcagctgataatcttacaaggatctctygcgtgagaggaatcgcttctcttttgctgctttcagaattctttccttgactttaattgtcgacagttggattataatgtgtcttaatgtgggtctctttgactttatcgctgagttaaatttgggtttccttggcaccttaagcttgtagattcatgtattttatcaagtttgggaagattttgttcatgatttcttccaataatcttctgcccctttctctttttctcttttcccccagaa

SEQ ID NO: 279190 - DNA, 1244 bp, Homo sapiens
gagtgccatgtagcatcctttcatttccacccaaagcactccttttagcgtttttgtaggtaaggtttagtggtcataaactctcaccacaccagttgggtgtggtggtgggtgctcattttcatgacctgatgccaccccttctacagatcagggaagtctgggcctggagacatcgtgctattcacgcaaggatccatggctgaggatttatctgagaatatcttaatttctcccttgtgtttgaaggatgtttgccaggtgtagagttcttggttgataggtttttcctctttcagcattttaaacatatcattcctctgtcttgtggcctccaatgcttctgataagaactcagctgataatcttacaaggatctctcgcgtgagaggaatcgcttctcttttgctgctttcagaattctttcyttgactttaattgtcgacagttggattataatgtgtcttaatgtgggtctctttgactttatcgctgagttaaatttgggtttccttggcaccttaagcttgtagattcatgtattttatcaagtttgggaagattttgttcatgatttcttccaataatcttctgcccctttctctttttctcttttcccccagaawtttggaaacacttcaagtttgaaaatggaatcagctatggatgagaaaactgtagtagactaaagaaaacaaaaatctctaaacattctgcccttagatttgttcaaaaacttatcactccacttttaagaaactaaaactagaaatgacagaaaatgaattatgaatgtgatattttcaagaaaaatgaaagaaacttcaagtcaatggtcccatatgcatagaaaaggccttgatcctatatccaacaatcaacagatgaatcagtattgcttatgttttaagttaaaataaattatcaaaattgttcttgtatgcttcawttttttaaaacaattatcttctttaactgattttttttccattaatcaacccactatatgttccagttacatcagtcaagaaggtagatatgtaccagaccaaacaggtaatgtaagtgacattctgaacatgccacttgaatcggtggaacagtactccatctacaagttgtgaccacctgaatatttaattaccaattcaaatgtggtccaaagggcttattgctgctttttagaattattttttatttttactgttgagcgagggggtgcctctattttgcacaggctggcc

SEQ ID NO: 279191 - DNA, 517 bp, Homo sapiens
gtcggtttgggttccctaagaagcaaaccttgagccaaggatccaatcttatttgagatgtgaccccaggaagcactgatatggggaggagggagagggaagtgagacagggaagggaagaaggctcataaagtgtttattagaaagccagttagcaccgtgggccacgggagctcagtcctcctgggagttctgcgagacggcaccgagagtgcctcagagttgcccacttcaagggtaggaggctggaggatctcaatgccaattcctagagtaattggttggaggctactcccaggaggcatcaattcctggtgagcagggtccagtgccagataaaccctcaagcagagactcatgtgccagcagccagacacagggcccatgtgtcctgaaacagaaaagaaatgccaaggggactcaggtgggrcattaagagcatctgcccctgtggaattctgaaagatagtcagtgggcatactgggagactccaacatctggcagagaggcagacgc

SEQ ID NO: 279192 - DNA, 1116 bp, Homo sapiens
gcctcctcaataactcctcatttttccattttgccaaagaaacaaaggcacaaaacggggaccaagaagaggcttccccaagatcacccagccatgtccaggagggtcagtctggcagcaattgccttccccagggcacatcctctgtctactagaataatcaaataagtccctctgccatggggatctgttgctctgggcaccactgagacagccatcagaaacaacagcctctacccaaaatcagtgttgggctgggatacagcattgtcagctacacaaaacccccctcatcaagctgttggcgcctggtggctgcttaattattcatccctgctgaacatgcaggcccagggcttcagccatggtttttggagctcaaccatggggragcctcggtgataagcccagacctgttaagaagtttggaatgtatgtgtctgcccacaaattgttccctggtcctcccacaccagcctcgtcaggcatagtgaaagatgacaatgagccaggagwcttcctccctggagaacagtccttgagaactaatttcatagccaaacatgctaaaactgttagaaggttgaggtgacttaacggccatttataaattaagctctgtaaaattatttggcaaataaatattattaaatgccactagcataataaatgaacaagtccaaacatctagtgaaaattagaatttcaattagatttaggacatattttatattgtcagtgctttattttcacagttgccaaattataaagtgaaatgtcttctcatttcttaaggagwctttttcaaacttgtctgtcttctcctggaatcaagatagtgactgcacatttcagagtgaaccatctggtgcaggtctatagtaggttcttgatgtgttgttgaaagtggtgagtgagtgaacacttcagaatgaatgacacacatattagatctagttatacacactttgccaaaccattgacatgcatgcaagcacacctgcttctccagctgcaaggcaaatagttatatcaatccataattctgccttccttctagaatggtgaccttgaggagaggtggctatctttggcagattaattactgtatccaca

SEQ ID NO: 279193 - DNA, 513 bp, Homo sapiens
acataactatttcttactggtcatggagggtcatgagctgtttatgtgaactgaagtctgtgagggcattactggaatgtaacttatcagttatgttttcaaatccttagagcagaacttcttgacctgtgtgctgtaaatggctatgggtgtgccggaggyggatagacagggcctagggtggcaaaaaaccaggaaagcattgaaataaatcactccagcacactgtaagtacctacagaaaatgttatttttcttggcagtagaatccactctctaagaagaaacaagcttttgttggaagactgctctgataaactttttggagggctgggccttcaggaaggctgaggacctaaagtggataaaaaggagagggtatgtagagagtcagagggtatgtagagagtcagagagagagaagagaaagacttaagggctggtggctcaagagaaactttggggaaacagaaataatggatggggacatcagcagatctacagtgctccata

SEQ ID NO: 279194 - DNA, 599 bp, Homo sapiens
gtgtttacatacacttattatgttgtaggctagcagcggagtgaacrgcttttattaaataagataccatttcaccctgacatcatatgttatataaaacaaaaaggcttcctattttggactcttcagattaaaaaaggtattaagaaatgttatgaattgaaaagtaacataagagataaggcatggttatggttgataatgaaatattctggtacttttttgtacacctggatggtgtttaatattcctgagcaagtttatctacattataaagttgttgtgcattgtgttggtcagcttccagcagctgaagggaaaaccagtcattctttgaggtgtttactgatggaagttggctacttgattttcatttcagtaatttggtttccaaaggtaagaacatagtagaaattctacttttctcttctgaatattacatttgtagtgtggtagacttaaaattatattatgaacaaagtaataatgtagacagaaataggaattacactgaataattacacaggtagaatgagaaaattggtaaatgatgtatattacatgcaagcaacttggtaaatgtggttgatgagtgaaaa

SEQ ID NO: 279195 - DNA, 592 bp, Homo sapiens
accgtactgttttccttagcagctgcatcatctcacattcccacaacagtgtacaaggattccaattctccacatcttggtcaacattgtaatctttttttacagtagccatcataacatgtgtgagatgataactcattatggttttgatttgcatttctctgatgattaatgatgttaagcattttttaatacacccaatggctatttgcatgtcatcttggaaggaatgtccattcaattcctttacccattttaaatcagattatttgttttttcactattgatttgtatgggttmcttatatattttagatatgaatattttatcagacatatgatttgcaaatattttcttccattctgtaggttgccatttcactctgttgattatatcttttgctctgcagaagctttttagtttgatgtggtcccacttctctaattttgcttttttgctggtgcttttgttgtcatatccgagaaatcattgcctggaccaatagcatgaagattttcccctatgtttctttctaggaatgttatagttcacaacacaattcactctgtgttgacttttgtgtatagtgtaa

SEQ ID NO: 279196 - DNA, 412 bp, Homo sapiens
cagtctttttaataacctaattttggaagatcatctcattacttttgctgtgttatgttcatgagaaaaccactaartcctgcctacactcagatggaagaaattaagtttcatcacttgcaaaggaggagtataaagaattgtcccatcacaacactatatgatgtcatgctactgcatatctcttcctaacactgtattcagtgatacaacattggtagtttgaaatcagccatggtgggaatatttaaaccatggaaattagcaaacattctaagtcagacttttccccccagacagctgacatttaccagcacacatcaggatgaatatagagctatgtgttcacaaaatttttatgaagtagacgaattttaggaagggctttgaaagaaggaaataaaatattatt

SEQ ID NO: 279197 - DNA, 619 bp, Homo sapiens
ccactctaccacacccatagcaatgggctgccttactgtgtcatttttgatcgtcagtccactatccagtgaattattgcatattcataagctagaatgtggacagtcagggaaggccagcatggaagaggtaaacacctgaaacttgattatggagacagagtcagagggtagtgatgttctttggttgtggtgctacatcgtgggttgctgagttccagtactgctgtgaataagctctgtggtataggggaagatatttaaactcctgatgccctaggttttctcatctgtaaaacgcagatgaaaakagttcctacttcttagcgtgtgtttgtgtgcacacaggcacatgcacctgtgtgtatttgagtgtatattaaatgaattaatacacagcccttggaaaagtccccaccacagggtaagcccaaaagtacatgaaggccattattatgattatcaagaccaatcctcagattctaggtctaataagatagtttacttttggcatgattagcctatgattaccaatgtcataatgctaatgcctgcatttataccatgagtttaaagaaggataagatcaggtcgaggttaataaccatttgaattctga

SEQ ID NO: 279198 - DNA, 572 bp, Homo sapiens
gttaaattcattttaagcttctaatctttagttattcttctaaatatttaaaaaataggttgctgtgatttacagaggcaatgaatattttacttaaatctaattatagaatgatatgctttgaaataggtcatttataactagtgaatatatattgtgaaatttgataaatatctctttatattattaacatttaaaatattattcatcgaacatattttcaaaatacttatgacaagtacagtgatgcatctcttaataatggggaagcattctgagaaatgcaatgttgggtgattttgtcattttgtgaacattctagagtgcacctacataaacctgcatggtgtagccyactacacacctaggctatgtgatatagcccatggttcctaggctacaagtctgtacagcatgttactgtactgaatactgtaggcaactgcaacacactagtaactatttgtgtatctaaacatagaaaaggtacagtgaaaatacagcataaaagataaaaacagtacctttggacagggcttttaccatgaatggagccagaagttgctctgggt

SEQ ID NO: 279199 - DNA, 648 bp, Homo sapiens
gtagctcagggctaggtggacacatttacatatccactaaacatttggtgcatctttgaaccaatattgtcatcagtcacttggaggacaaattgagcccatcttggaggaaaggtgaagaactgctgtcagcagccctctattccttctctattgttctgggtatttctgctttcatatgtcccctacatgtagtgtctttcctaagtgagagctcgcaaagtaccatttctccatttyattctagttgctgggtcattccagcagctcttggcccctggaagctgccggctggtttattccttaagctggcttcgataccctatagactcaactcataccaactcttttgtgctcctaaacataccattttctaacaattttatgtcttcagatgagttgctgctccaactgtctagaattctcttgtctttccttccatgccactccctctgtgaagtcatcctctactcttcaagacagattcttttttcacatgttcttcatctatacttccagtatgggcttactgttacatccagctttatgtatgttatttgtttatacacctgttttcccctttgattctagaatttgatcacttgattgtaagaattacgattaatatttgattatgacaggcagtag

SEQ ID NO: 279200 - DNA, 580 bp, Homo sapiens
tgttactagttgctcctgaattgagcaacacagtcctaggtcattattgataacatttcaagaatactttgttaaattgggctttaagtagatgtgatggttatctaacttaagtttatgaattttaatgtttaagctagctggaaaggaaaggtrtggtgatttgcgcatattttgcagttcaccccaactctatgttccagtaaatctaagggactgttaatacactacgaccttgatcagggctattcaagttttttttccctaaatatatggtaggtagttctgcagcattcgtatcatcccaaataaggaggtgatgctcctcgtttctggatatttgcttcattgcactaaatgttgagaggtcgctatgtacatgacaaggtgaaatctcatatgtagcctgtgagcttgacgtgagaatttggagtagcttattagaaagatgaattatttgttagaatttgtaagctgatgatagtttctagtgtttgctgtttacttttcataaaaagtcattccaaactaaaactcaggggcacacagtcttggtagaaagtagaccattgagagtatt

SEQ ID NO: 279201 - DNA, 610 bp, Homo sapiens
cttttttcaaaattcttgattctctccaatagcaaacatcctctgcttccttcttggtatagggtctggaatacaactgggcttcctgtgtcttctcaggggcaaagaaacactgtcttgtatcagtgcagagtcttggataagtggatttcttgcctatattcctcccktaacagcagcagatggcttctgccagctgtcagtgaagtacgtaggacaggtgggttttgtgcccttccttcattggcagatggattttatttgtgataataagggtaatttgtagtgacaaattattgttgttttttcataaatttgtgcatactctcccaagaattcctcaaagtaaatactaagatttgtgggctgacttcaaacttttggaaaagcaaaccattcatccagatcttccccacagctcttaacaactagattgtctttgtagaatagttatagtttatttcatctctagttctcatggttctgtttatcttaatcttgccctatgctgctgggtgcagagtcttaaccaacttttcacttaaaaggggtgaaaattactcaaagacatatgaatggatggcattattcttcatttatggacatctga

SEQ ID NO: 279202 - DNA, 610 bp, Homo sapiens
cttttttcaaaattcttgattctctccaatagcaaacatcctctgcttccttcttggtatagggtctggaatacaactgggcttcctgtgtcttctcaggggcaaagaaacactgtcttgtatcagtgcagagtcttggataagtggatttcttgcctatattcctcccgtaacagcagcagatggcttctgccagctgtcagtgaagtacgtaggacaggtgggttttgtgcccttccttcattggcagatggattttatttgtgataataagggtaatttgtagtgacaaattrttgttgttttttcataaatttgtgcatactctcccaagaattcctcaaagtaaatactaagatttgtgggctgacttcaaacttttggaaaagcaaaccattcatccagatcttccccacagctcttaacaactagattgtctttgtagaatagttatagtttatttcatctctagttctcatggttctgtttatcttaatcttgccctatgctgctgggtgcagagtcttaaccaacttttcacttaaaaggggtgaaaattactcaaagacatatgaatggatggcattattcttcatttatggacatctga

SEQ ID NO: 279203 - DNA, 610 bp, Homo sapiens
cttttttcaaaattcttgattctctccaatagcaaacatcctctgcttccttcttggtatagggtctggaatacaactgggcttcctgtgtcttctcaggggcaaagaaacactgtcttgtatcagtgcagagtcttggataagtggatttcttgcctatattcctcccgtaacagcagcagatggcttctgccagctgtcagtgaagtacgtaggacaggtgggttttgtgcccttccttcattggcagatggattttatttgtgataataagggtaatttgtagtgacaaattattgttgttttttcataaatttgtgcatactctcccaagaattcctcaaagtaaatactaagatttgtgggctgacttcaaacttttggaaaagcaaaccattcatccagatcttccccacagctcttaacaactagattgtctttgtagaatagttatagtttatttcatctctagttctcatggttctgtttatcttaatcttgccctatgctrctgggtgcagagtcttaaccaacttttcacttaaaaggggtgaaaattactcaaagacatatgaatggatggcattattcttcatttatggacatctga

SEQ ID NO: 279204 - DNA, 530 bp, Homo sapiens
ttgagttactccatattgctttgttccctttactgtgcatgtgttagaggacggaattttccattgtgggcatatctgggaagtcagctgtgtaacctttcttatatgtgtggctgcaggcatgtcttaggcaagccccytgtgcaaaattatctgtgcctgcagcttgatttctcaggctgttcttttgattgaaagaattcaactgagaacccatcctaactggctgcctgatcagtttcttcctttctcttctctcactttagcaattacctttttgtttttttttcctgtgcatatgtctttgtataaattataattttgtccaacctttttttaaacattttgtcataaacatttcctgaaccattttctataaacattttctcaaccattttctataggtatttgtaggtaatatcaatggttgtataatattccattttatggacatggcataatttattaaatcactttatagggtataatttctgaattaaaaagaaaattaatatgggcattgggtaaga

SEQ ID NO: 279205 - DNA, 530 bp, Homo sapiens
ttgagttactccatattgctttgttccctttactgtgcatgtgttagaggacggaattttccattgtgggcatatctgggaagtcagctgtgtaacctttcttatatgtgtggctgcaggcatgtcttaggcaagccccttgtgcaaaattatctgtgcctgcagcttgatttctcaggctgttcttttgattgaaagaattcaactgagaacccatcctaactggctgcctgatcagtttcttcctttctcttctctcactttrgcaattacctttttgtttttttttcctgtgcatatgtctttgtataaattataattttgtccaacctttttttaaacattttgtcataaacatttcctgaaccattttctataaacattttctcaaccattttctataggtatttgtaggtaatatcaatggttgtataatattccattttatggacatggcataatttattaaatcactttatagggtataatttctgaattaaaaagaaaattaatatgggcattgggtaaga

SEQ ID NO: 279206 - DNA, 664 bp, Homo sapiens
ggaagtaagaaagagggaagctgccagtgtgaagggtatatgcaggaagaggagctaccacaatacctggtagttgagtgcgtgataacacaacatctgccatagcttggtttgtttgacccctccaaatctcatgttgaaatttgacccttagtgttggagatggggcctaatgggaggtgtttatgtcatgggggcagatccctggtgaatgtcttagtgccatccttactgtaatgagtgagttttgctcttagtcccctcaaaacctgttgttaaaaaaaagcctggcacctcccttcttttgctctggctttctctctcaccatatgatctctgcacatgctggctcccctcaccttctgccatgagtggaagcagcctgaagccctcaccagaagcagatgctggtggcatgcttcttgtrcagcctgcaaaaccatgagctgaataaacctcttgtctttatgaattacccagcctcaagtattcctttatagcaacacaaatggactaagataacatctttgaagctagtttgccaaagttataggaaaaaagatggaaaagcaagagtctcaaataagttatacagcctcaatgaaatgataaaggaccatgactttgcatataatggctttctgagaaagttgaaatgctaatg

SEQ ID NO: 279207 - DNA, 1201 bp, Homo sapiens
ggaagtaagaaagagggaagctgccagtgtgaagggtatatgcaggaagaggagctaccacaatacctggtagttgagtgcgtgataacacaacatctgccatagcttggtttgtttgacccctccaaatctcatgttgaaatttgacccttagtgttggagatggggcctaatgggaggtgtttatgtcatgggggcagatccctggtgaatgtcttagtgccatccttactgtaatgagtgagttttgctcttagtcccctcaaaacctgttgttaaaaaaaagcctggcacctcccttcttttgctctggctttctctctcaccatatgatctctgcacatgctggctcccctcaccttctgccatgagtggaagcagcctgaagccctcaccagaagcagatgctggtggcatgcttcttgtgcagcctgcaaaaccatgagctgaataaacctcttgtctttatgaattacccagcctcragtattcctttatagcaacacaaatggactaagataacatctttgaagctagtttgccaaagttataggaaaaaagatggaaaagcaagagtctcaaataagttatacagcctcaatgaaatgataaaggaccatgactttgcatataatggctttctgagaaagttgaaatgctaatgwccacagagcttgcttttgtgagtgattccatggtaagggcacaaaagagcactggcactatggcaggcgggagctgtgtgggcaggaataagaacacagaacaataagatttatcttctggcccagactcatggcaaaaacagttatgggactattatcaccatgacctctgggagacacaggggcagacttcactctgtacttgtgccctgtgaccaagtgtcccatgagatgcccaaggttagagataaccaggttcatgcacatttgtgtctttccacaatgtcagacttttactgaagctgtctcaaacataaaagacacgagctacatggagttcagcaagaaggcagttctccttagtacttctcattcactcagttgtcagagccacgggcacataggcccaagcctgtgggcaggaaatcaatcattattgcaaaccatacatagtagtatacttgatcaatatgtaaatgttataaattaaatattccaccacaawcaaagtaacatttatcatcaagagagaaggg

SEQ ID NO: 279208 - DNA, 1022 bp, Homo sapiens
attataacaatagataactaataaaacaacattcttctagcacaattttaaacaaatggaattaaatgtaacacatcttgtataaatattgataaaactcttaatgtgtgaaatgaaagtaaatgtttaataatactaagatatattcaatagcatggtgggggaartgtattatgcaagagatatattgggaaaatttatgagatttctttggagaacactgataatttctcactccctcacctctgggaagagaataagaagctactttccaacataaacctattgagagggagcttccggggcacattgagaaagcttggtgtgtgttctctgcagctggggaggggagatcttagattcctgcctaactcaggcctgagaaagctgaagttgcttgtgaccaaaagacagatgacctgcatttccaggatttgttggagggttgaaggttttccatagaacaawttggcccttccccacctgttccgtgccccagagtgacctctttaaactgcatcaatagactcttgttctctggcttaggttgagtgcagcccatgaggtgctgcagcaaaaggtcagagggaggagaggaaggacaggtgattatgcccccacacctccctggaatgctcctcaactggcagtgttgctcacactatgtcactgtgccctctcactcaactgttgctggctttgggcttttcctacaccttggtaaacagtccatttattaaactctactgaaatgactcactttatgtgtgccatctgttttctgtcaggactcttgttgatacagtacgttaacatttgtgtttttttaaaaaaaaaactggtaagtatgcttgcaggttgaggtacwtgcacttatttatgcttagaatatctctggaaaactgcagaagaaactggtaacagtggttgcctcgagggaaggaaaatgggtggctgggaatagggggagaagaagggatatgtatgtttcctgcaccccttttgttccttttaaattttgt

SEQ ID NO: 279209 - DNA, 601 bp, Homo sapiens
aaaagaaaacatggacttctctaccccacactactttagctgggctttagggttgccagaattttcacctgatggctacagaaaccatttgcctaggggtacagaacattcttctaggttctgttggttcccttggtgataacaccctatcaaagattgacctgtgcttcagtcatctccttgcccaccccatcccctcaattcgtgtcagctctagaaccccatgagtctcatggacgggtcccgactcccttggggatgcctccagcagctgctgcttaayggagaagctgggctgggctggactggagggagcaggagcaagggcagaggacaagggggaagaaaaggagactggggggaagggaacaagggacccagcaaaggtgggcctccgggggggcagcagggttaggagtttgtgagaaaggtaaatgcaaggagaaggcaggagatgaaagagaagcagatctcagattcagaagttaaataccccactcacccccttcttcctgggactgccaagatacttttggtgacactgacttttctaactcatagctggaaatgaggggctattacctgtcctgataaataccca

SEQ ID NO: 279210 - DNA, 634 bp, Homo sapiens
agggcagggagagagattcaggtcagcaagcagagctaatataaataacgatgcagtgtggggtcgctgctgtgggcaacaggaatcaattccaccaggacccactgagaaactaacagaatgtcttcctgcccataggagggaaactatgctgtgtcccgcgctcgttaaccctatgcttctgactggtgcatgtttgagatgagtctggacttcctgggaactgtcygccttggctgagctgggggcgctgaagggatgaccactctttggcaagttactgaccattcccggaatctaggttcttcacaggtaaccctctgcctcacagagctgtaataatctataaatgagagaactcctgagacactgttagcacagtgcctgacccagaataaaggctccataaatagcagctactattcccgtgctgcgactggagatgtggaagcgcctctgttgagccctaaggctctgagagtctgtagtacacaccccacccccatctctctggcaggacctagattgggtaggactggaaatgacataggaaatggctgctgaggaagcaacctgatttccagatctaggaaactccgacaagtcttttgcttatttctcaaaagaaagacaa

SEQ ID NO: 279211 - DNA, 624 bp, Homo sapiens
gaaagagaacccaaaagaaggatgaaggaggaagagagctgagtggtgatggacaggttggggcgggggaaggaggagaatagacatggaaaatggggtataaaactgcagtccaagtgagcgccaccgagccttcttacccaaattaagactcagccagttccttgtcttcaagctcatttccccaccccagcctagagaagtatattcctcaggcagctgactccaacagttgcttctcctatagaaaaccaaccccaaaccagggagtcaacagctactatttgtcaattcagccacactgaccctcagaccaggtcaccaagagaacactctgggctcagaggggtccctgttgacttgcccttgtctacctctctgtcaagggsaaggagcattctaggaacatctgctgcagggagacatgggagatcaatatagggaaatgtgagggtatcaaatcaatgggaattattaatagcagagaatcgctgacagtgcctgtaagactgccttaggaagaccacaacataacactgcctgcctttgcagttccagagtaggaaaagtgtgtactcttacctacctcaaaagtcaggaatttaggaataagtcagtaagggc

SEQ ID NO: 279212 - DNA, 626 bp, Homo sapiens
atctcacaccccagtcgacacaggatgcgagagtggctcgctaagtcagctaggaaactggagatggtaagagtggctcgccaccccaactaggaaactggaggtggcaagagtggctcaccaccccaactgggaaagtagagggggtgagagtggcttgccaccccaattacaaacacgggaactgggagtggggaagtgtgtggaagtgtgtgaatggaggggcctaattaggctcatcagctgtgaagtggggagtcacagatctcttagcatggactgtatcctccaagaacrtgtggggccaactaagactagtggtgatctgcatatggctaataggagctgccccatagctcagagttgcagtgagaataaggacctctgcaaagccaagcagcatctgaaaactcccataataggagatggtatattcggccgaaatgagaggaacagtgagtgtgcaagagtgattgtgctgtgtcgtaaagggaggaatgggaggaaagtcatcaaaagttactccattggagtacatgttacagaaccttaagaaagattttgcaagggattatggacttaagctaaacccccaaagattgagaactctctgtgaattagagtgg

SEQ ID NO: 279213 - DNA, 626 bp, Homo sapiens
atctcacaccccagtcgacacaggatgcgagagtggctcgctaagtcagctaggaaactggagatggtaagagtggctcgccaccccaactaggaaactggaggtggcaagagtggctcaccaccccaactgggaaagtagagggggtgagagtggcttgccaccccaattacaaacacgggaactgggagtggggaagtgtgtggaagtgtgtgaatggaggggcctaattaggctcatcagctgtgaagtggggagtcacagatctcttagcatggactgtatcctccaagaacgtgtggggccaactaagactagtggtgatctgcatatggctaataggagctgccccatagctcagagttgcagtgagaataaggacctctgcaaagccaagcagcatctgaaaactcccataataggagatggtatattcggccgaaatgagaggaacagtgagtgtgcaagagtgattgtgctgtgtcgtaaagggaggaatgggaggaaagtcatcaaaagttactccattggagtacatgttacagaaccttaagaaagattttgcaagggattatggacttaagctaaacccscaaagattgagaactctctgtgaattagagtgg

SEQ ID NO: 279214 - DNA, 597 bp, Homo sapiens
tttgtccttgctggatatgaatatgctgtacattgctttgctgttgttaccccccttaaccatgctagaagaatcacccacagaagggtgtctccaccgtacacatactacttggtcagggaacagcataactaaaactctattgtaccatacttattatgggtgtatggggaatcgcttaggaacttgtacttatagtcaaaccacctactcagtttgtgacccagraaataaccaactttatgtatgttatgaccccaagttttcacctggtgaatggtttgaaattcgtgcagtcaaaagaaggtctcctcttaaaccaaaccagggtccctcccttttactgagggactatttctctgtattttgatgctcgttaggtagcataccaagactcacccatctgtggtaacctacctttggaaagatactatagaaataactacaaatatgtatgcacgccaagagcaactccacattgttcccctgggaccccagagaaagattgtcggtattgcatatcatggcaccctagccacaacaaaggtcaattatgcttaccaaaatgctggtggactgcaggttcctccttacatg

SEQ ID NO: 279215 - DNA, 597 bp, Homo sapiens
tttgtccttgctggatatgaatatgctgtacattgctttgctgttgttaccccccttaaccatgctagaagaatcacccacagaagggtgtctccaccgtacacatactacttggtcagggaacagcataactaaaactctattgtaccatacttattatgggtgtatggggaatcgcttaggaacttgtacttatagtcaaaccacctactcagtttgtgacccaggaaataaccaactttatgtatgttatgaccccaagttttcacctggtgaatggtttgaaattcgtgcagtcaaaagaaggtctcctcttaaaccaaaccagggtccctcccttttactgagggactatttctctgtattttgatgctcgttaggtagcataccaagactcacccatctgtggtaacctacctttggaaagatactatagaaataactacaaatatgtatgcacgccaagagcaactccacattgttcccctgggaccccagagaaagattgtyggtattgcatatcatggcaccctagccacaacaaaggtcaattatgcttaccaaaatgctggtggactgcaggttcctccttacatg

SEQ ID NO: 279216 - DNA, 566 bp, Homo sapiens
atgtgagtccgctgagccagtgtgtacctaaaataaacaatcctcctatactctcatatcagtctctctggtcctcagtttcccacaacaccataagtgaaggctgttgctgtgctttgaatatttgcatgcctcaagaattcatgtcraaacttagtccccagtgcaacagtgttatgaggcaggacatttaggaggtgattaggccatgaggattccactgtcatgaatggggttaatgcctttataaaagggtttgaggtagtgagttcctcccttctatcccttctgtcatgtgtggacactgtgtttgtcccctccagaggtcgcagcaacttggacacagacagtaagcccttaccagacaccaaattcactggctccctgatagtgggcttcccagctcccagaactgtgagataataaatttctgctgtttataaattacccagtctaagatcttttgtgatagcagcaggaatggactaagtcataaattggtgccaatgaagcaggaaatttccctgaccttttcgtgggcaggaactggagtgcataggcactag

SEQ ID NO: 279217 - DNA, 566 bp, Homo sapiens
atgtgagtccgctgagccagtgtgtacctaaaataaacaatcctcctatactctcatatcagtctctctggtcctcagtttcccacaacaccataagtgaaggctgttgctgtgctttgaatatttgcatgcctcaagaattcatgtcaaaacttagtccccagtgcaacagtgttatgaggcaggacatttaggaggtgattaggccatgaggattccactgtcatgaatgggrttaatgcctttataaaagggtttgaggtagtgagttcctcccttctatcccttctgtcatgtgtggacactgtgtttgtcccctccagaggtcgcagcaacttggacacagacagtaagcccttaccagacaccaaattcactggctccctgatagtgggcttcccagctcccagaactgtgagataataaatttctgctgtttataaattacccagtctaagatcttttgtgatagcagcaggaatggactaagtcataaattggtgccaatgaagcaggaaatttccctgaccttttcgtgggcaggaactggagtgcataggcactag

SEQ ID NO: 279218 - DNA, 641 bp, Homo sapiens
ttgcagcaatgtagacacagagagaaagtcctcaccagacacagactctgctggaaccttaatcttcaacttcccagcctccagaactgtgagagaataaattttggggctggrttgcccagggccttgggggacaacccctgccccagtgtgtctaaaaggtgagacatggagccaaataagattattctcaagcctcagtatttaatgagtagacagtgttgtttgccttattgggttttggacttactttggacctattgcttcttttttcttttctatttcttccttttggcagttctgtaaggagcagttcatttcaggtttggaaggctgttggaagagacattttccatcctgggtcaggaggaaggaggtatgggctccaagaacccttcctagctcccttatttccagaggcaactataccttcctcccttaccaaacaatttttactctgtcagaaaaattttcttaaacttggaaataggcagaagagatgacagggcatttaccagtgtagtgggcttagttttctattgtctattgtctttgggcaaaagttaatgtttggtttttgtttgagatgtgaataatttctgtccaatacaacagatgatcctaaaggttctggtttgttt

SEQ ID NO: 279219 - DNA, 641 bp, Homo sapiens
ttgcagcaatgtagacacagagagaaagtcctcaccagacacagactctgctggaaccttaatcttcaacttcccagcctccagaactgtgagagaataaattttggggctgggttgcccagggccttgggggacaacccctgccccagtgtgtctaaaaggtgagacatggagccaaataagattattctcaagcctcagtatttaatgagtagacagtgttgtttgccttattsggttttggacttactttggacctattgcttcttttttcttttctatttcttccttttggcagttctgtaaggagcagttcatttcaggtttggaaggctgttggaagagacattttccatcctgggtcaggaggaaggaggtatgggctccaagaacccttcctagctcccttatttccagaggcaactataccttcctcccttaccaaacaatttttactctgtcagaaaaattttcttaaacttggaaataggcagaagagatgacagggcatttaccagtgtagtgggcttagttttctattgtctattgtctttgggcaaaagttaatgtttggtttttgtttgagatgtgaataatttctgtccaatacaacagatgatcctaaaggttctggtttgttt

SEQ ID NO: 279220 - DNA, 641 bp, Homo sapiens
ttgcagcaatgtagacacagagagaaagtcctcaccagacacagactctgctggaaccttaatcttcaacttcccagcctccagaactgtgagagaataaattttggggctgggttgcccagggccttgggggacaacccctgccccagtgtgtctaaaaggtgagacatggagccaaataagattattctcaagcctcagtatttaatgagtagacagtgttgtttgccttattgrgttttggacttactttggacctattgcttcttttttcttttctatttcttccttttggcagttctgtaaggagcagttcatttcaggtttggaaggctgttggaagagacattttccatcctgggtcaggaggaaggaggtatgggctccaagaacccttcctagctcccttatttccagaggcaactataccttcctcccttaccaaacaatttttactctgtcagaaaaattttcttaaacttggaaataggcagaagagatgacagggcatttaccagtgtagtgggcttagttttctattgtctattgtctttgggcaaaagttaatgtttggtttttgtttgagatgtgaataatttctgtccaatacaacagatgatcctaaaggttctggtttgttt

SEQ ID NO: 279221 - DNA, 641 bp, Homo sapiens
ttgcagcaatgtagacacagagagaaagtcctcaccagacacagactctgctggaaccttaatcttcaacttcccagcctccagaactgtgagagaataaattttggggctgggttgcccagggccttgggggacaacccctgccccagtgtgtctaaaaggtgagacatggagccaaataagattattctcaagcctcagtatttaatgagtagacagtgttgtttgccttattgggttttggacttactttggacctattgcttcttttttcttttctatttcttccttttggcagttctgtaaggagcagttcatttcaggtttggaaggctgttggaagagacattttccatcctgggtcaggaggaaggaggtatgggctccaagaacccttcctagctcccttatttccagaggcaactataccttcctcccttaccaaacaatttttactctgtcagaaaaattttcttaaacttggaaataggcagaagagatgacagggcatttaccagtgtagtgggcttagttttctattgtctattgtctttgggcaaaagttaatgtttggtttttgtttgagatgtgaataatttctgtcyaatacaacagatgatcctaaaggttctggtttgttt

SEQ ID NO: 279222 - DNA, 572 bp, Homo sapiens
ccatgctatgttacacaagaaaattagacatttctttttgagggtttgggggtcaactttgtcctagagctttagaatagagcctagaggcgagtcagaaggaattgacaggggttttcccatggtgggactggaaaacacacagctgggggctaattgaactgtactttcacttggggcacttcaccaatgaaaagggtttcacttatgtcagctgagagactcagggtgcactttctaaaggggcatcccacctgttggaaaagaccatttggagctcaggggtcttatactagatggctagtctaggtactgtcttatactgggtgattagcccaggtacaagggaaaaatgtgtcaggagttggttccttctggtgggttcgtggtctggctgacttcaagaatggagtcacagaccttcgcggtgagtgtyacagctcttaaagatggcatggacccaaagagtgagcagcagcaagatttattgttaagagcaaaagaacaaagtttccacagtgtggaaggggacctgagtgggttgcagctgccggctagggggtggcaggctt

SEQ ID NO: 279223 - DNA, 542 bp, Homo sapiens
agtcccagggaaagaaccctggactagaaattaggagttctggtttattatgmagtttctgccatcaagtatcttcaagagaagcagctaattcttcggagctatgattacttcatctgttaaaaggtactcatggcccggcacagtgactcactcctgtaatcccagcactttgggaggccaaggcgggtggatcacctgaggtcaggagttcaagaccagcctggtcaacatggtgaaaccccgtctctaccaaaaatataaaattagccagatgtggtggtgggcacctgtaatcccagcttctcaggaggctaaggcaggaggatctcttgaacccaggaggaggaggttgcaatgagccaggattgtgccactgcactctagcctgggcaacagagtgagactgtcaaaaaaaaaaaaaaaagttagtcttggagaaatatttcctcagtaggcaagtccatctgtgacatacattattaacctgtataatttaatattaccctggacacgctatcctctttttgtgtgacccacac

SEQ ID NO: 279224 - DNA, 385 bp, Homo sapiens
tttttttgaaggcaaacgagaaaattgcccaaagaaccaagtaatcttcaaatgtcaaaaacatctagtgcttgaatcacacttaagtaagagcataggaatttggcaaagtgacaagcagtggtttacaacatgaaaggtgacttggaagcagtcaaacagaagcagagggagaaggatgcctgygctgctgaaccagccatctccctccaaggccgacacctgccatttcccattttgcgagcttcttgcggaggagacaagtggtcctcatagcatcccgtggaccaccctggccagctacacccagtctgtcagaggatttccgcagtgttgcctttgacccctgtggaacttttttgtccaggcccaggtgcttgaaaga

SEQ ID NO: 279225 - DNA, 603 bp, Homo sapiens
gtctttacaacctaccatggcatgaccacagcacatatttagtatatcatcacrgcataccgatatgatgagtcagcatgatagagcaaactagcctgttgtatgtcagacaaacaacatcttagcaagtaaaagatgcagaacagtggtgtgacaagtttacagtgccattgtcctaagtgagctgcatcacgtccacacttgaggaaagtgatatgactcatgtatatagttataaagctactgtatggttttaaacaatggtgcagatttgcattttgctcaaaccgtccttgcaataaatgctcacagtgtgtttgctatattgacagatggatggaaggatggatggacagagagatggaaggagggatggatggatggatggttggtagatgcatgaaaaactaatgattaggacggaagagctgtgctggaacattttccaaccttcagaaactccaaattggttgccaggaagagtcacctggatcatggaagaaggggggaccaactgaaatccctgacctgaatgagacatgtttctcccagaactcacaactttgcccacaaagtcccttccatggttacaattaggctgtt

SEQ ID NO: 279226 - DNA, 603 bp, Homo sapiens
gtctttacaacctaccatggcatgaccacagcacatatttagtatatcatcacggcataccgatatgatgagtcagcatgatagagcaaactagcctgttgtatgtcagacaaacaacatcttagcaagtaaaagatgcagaacagtggtgtgacaagtttacartgccattgtcctaagtgagctgcatcacgtccacacttgaggaaagtgatatgactcatgtatatagttataaagctactgtatggttttaaacaatggtgcagatttgcattttgctcaaaccgtccttgcaataaatgctcacagtgtgtttgctatattgacagatggatggaaggatggatggacagagagatggaaggagggatggatggatggatggttggtagatgcatgaaaaactaatgattaggacggaagagctgtgctggaacattttccaaccttcagaaactccaaattggttgccaggaagagtcacctggatcatggaagaaggggggaccaactgaaatccctgacctgaatgagacatgtttctcccagaactcacaactttgcccacaaagtcccttccatggttacaattaggctgtt

SEQ ID NO: 279227 - DNA, 603 bp, Homo sapiens
gtctttacaacctaccatggcatgaccacagcacatatttagtatatcatcacggcataccgatatgatgagtcagcatgatagagcaaactagcctgttgtatgtcagacaaacaacatcttagcaagtaaaagatgcagaacagtggtgtgacaagtttacagtgccattgtcctaagtgagctgcatcacgtccacacttgaggaaagtgatatgactcatgtatatagttataaagctactgtatggttttaaacaatggtgcagatttgcattttgctcaaaccgtccttgcaataaatgctcacastgtgtttgctatattgacagatggatggaaggatggatggacagagagatggaaggagggatggatggatggatggttggtagatgcatgaaaaactaatgattaggacggaagagctgtgctggaacattttccaaccttcagaaactccaaattggttgccaggaagagtcacctggatcatggaagaaggggggaccaactgaaatccctgacctgaatgagacatgtttctcccagaactcacaactttgcccacaaagtcccttccatggttacaattaggctgtt

SEQ ID NO: 279228 - DNA, 545 bp, Homo sapiens
aatctgtgtttgggatatgagatttcactttatagacaygtttcacagggatataccaatccagaatattaatgatcgaacagtcaaagtcattccaaatcttccatatacagtagaattttcagagtaagtgtactggtgagcatttattgttattgctcaggtaaagctgaacttttttcattataacaataggaatccttcttgctttgagttttatagcaatcagcaactgagaagaaacatctccagataatttgacaaggaatttttctgcattgttaccaaaattatatataaaactaaagtctgagaaagcattgcaagtagccagaaagtcttagaagcccctagtagaagtactcacgaagcacagtggccaatgcctacgcattttttcagtctctaaattatttcataaacatcctttgcattttacagtgcaatgaatgatggttgatctcaatataacactccttcccatacaaaattatatggcttttgaggcagagttatctctggcttggtcacaaatattttaagaa

SEQ ID NO: 279229 - DNA, 555 bp, Homo sapiens
ggcacaaaccatgcttatgagcacatgcattcctacacttatgacaaatatcaattctcaatgagaactctaaggacagcagaaaaccataggattaggaaggacatccaatgcttcttggcctcagagaagcccccacccaaaacaggtcatcagacatgtttcctaaactgtaacatgaagaaattaacaggtgtgatacgttaataggtgttcagatattaacaggtattctgccatagaaagattcagtggtcagctaagtctagaaaatggtagattacacaagccaaataggttgggggtttcttgtttgtttgtttgtactgttggtcttcaatatgcctttaatatgctaatacacactgtgcattccatggagtacacatcrttttctgcacccttctttgataggggctaccactcttctgtgggaaatatgtctatagaagacagttatctctggcttggtcacaaatattttaagaatcatcttggccctgtagattttctttgacccacccatgtaaagacggtctctccctccttgtacct

SEQ ID NO: 279230 - DNA, 603 bp, Homo sapiens
gcctttgctatgggcttttgtgtcaagaaataggaaagtaaaaaccagatactcgacctcgaggaaggattgcaattgatgrgattttaaaaatgagaaaacagtccaggtccaaggaaatggtgttcagtcacagtatcctaagagtgttcactggcaggattttctcctcctgtcattctgagaatcttaatgggtttgaattgattcactgagccatgccattgaaagggaagagaaatgtcaagaccccatgtttccagtcatgcatttggggccagaccaaaatgcacttcagaacttctaggtttaaatgtttccaccaccacaaataaatcatttgacaagtctttccacgcacctatagtgttccccgccttgccctaaggtccctctatatggagcacagaaggtgaggccaacctggtcctccctttcaggagatgaccactgagatgtgggggtcagcctcacgcctaaggataagggagctatctaagcagcttcactactccaagggacctgggactaatgcatgtggtgagggtggcagggagagaacatccagcaccccctgcaggagccaagaagacctcctgcagt

SEQ ID NO: 279231 - DNA, 384 bp, Homo sapiens
acttaagtctatctcttacattgacaaaaccaaatatatacaaacttcccaccttttccactcttttattcacagacaagcttcttaaaatgatagcaagcctcctaaatggaatgattttktgcatacccccactttttaaaccccagggtattcatacataacatgatcccttgggggtaggaataaagtatcagaatcttaacttttatttattttatctaagaataacaaagtaaaattatgttttactaattcataaaactctgccatataactcataaacagagtccaaaaaactcaatcatgcgaaattaagagtggtgtttttgtgaggttaatgaaaaatagaaattgaggggtcagtttctgccatcagtaaac

SEQ ID NO: 279232 - DNA, 634 bp, Homo sapiens
cattaggtgacaagttcttgggaaacagcatatctgctccttgccaaagtaccacccgaacagattacttgctaattacagaaggaaaaaaatctaccttcacaatggcatcgcctcatgttcatccctttaacctaatgattaaaccaagtcaactacaggggacacctgacattatgtgctggaagtgatgccatatgcaggacatggtatcatttataaaaatattcttacgaaaagtgcataacctgcatctagtctagcctttgaatataactttcaatttacaggagatacaggggatagaagaataagttagacagcactgcaaggaaataactgggcaaatgtactaygtgggacattctgcaagataactggcctggtctcttccaacagtcaatgctatgaaagggaaaaaagtggagggttattttagagtaagagactagagggacaataactaaatgtaacatatgaatagatttttaaaaaacaattctaaaaatttgttttggccactcgggaaatttgaatgtagactgtatgttagatgattgtggagaattttttatcttattaggtgtaatgaccactgtggcaaagcaggagaatgtccctatagttaggacac

SEQ ID NO: 279233 - DNA, 540 bp, Homo sapiens
aactcaggaaatgtatctcccattagtcccttatgaagaaagttttgatgacaaagtcgagccattcaagaatgaatacagttatcgtaaaggacctctagtgagcgctgactcagtgttagacggaaattgtgatggctgattccatgtgtcaactcaactaggcacagggtaccctgattaaayatgatttctgggtgtctgggaagctgttttcagattgactagcatttaaaccagtgtactcagtaacactgactgccctccccattgcgagtgggcacaatccaatctgctgagggcctgaatacaacaaaaggcagaagaaggagcaactctcaggttttgcttcctgcctgtctgtttgagctgggacatctcatctcatcttcttctgcccacagactacgatttacaccattagctcccccggttcccaggccttcataccgaaactgaattacaccaccagctttcctgagcctccagcttgcaaaaggcaagtcatgggacatctccgtctccatatcacataagcca

SEQ ID NO: 279234 - DNA, 503 bp, Homo sapiens
ctaatgtcctttaagaaaattttgtttactgtatgttcaagaagatattcttctaagtttccttctgggagctttatagttttaccttgaacatttagttttgtacatatcttgaataattttttgtgtagattatgagtcaggatttgtttatggggagaattttatatatgcatactgaattgtctcaacattgcttattaaaaagactttgttttctccattaaaacacatcgacatcattgttgaaagtcaattgactatatttatgtagctttatcttgagatcttaaaatctgtaccactgattggtctaccctaaaaattaccacacagctttcaaaatgcagtgttataagtcttgatatcaagtaggataagtcttccaactttgttcaactttttcaaaaagttttaactaccctaagcatcatagaatgcttagaatgtcatataattttatatattagcrttttcatacaatgttaaagtcagcttgctaa

SEQ ID NO: 279235 - DNA, 529 bp, Homo sapiens
gttgggagggtgggggctctgctctaaagaatacttccttctggtggctcttccacctccaagggccttggggtcctccccagtcttctctgtgaccctgcctacagccatgcaaatggaggtggaagactgtgtgggaggctcggctctgtgggttggacctggaggagcacccatccatcctgcccatattcccattggccagaacatgyatacaagcaaccgcaaggagagtgggaaatgtaacccgacagctctgtctggcaaaaaagagaaacagttttgaaaagaacccactggtgtctgcggcaatctcctttgcttctttctggcaggtgaagctagccagtgctgagagggttttcacactggggccactttctcagcctgtcatctctttctttggtgtcacagggaagcccactccagctgcagcctttcctgaatggccttcagttttcttcctgtagaggcagagaaaatagcttgagggcgtgacagccacagacccatattcctggagatatac

SEQ ID NO: 279236 - DNA, 529 bp, Homo sapiens
gttgggagggtgggggctctgctctaaagaatacttccttctggtggctcttccacctccaagggccttggggtcctccccagtcttctctgtgaccctgcctacagccatgcaaatggaggtggaagactgtgtgggaggctcggctctgtgggttggacctggaggagcacccatccatcctgcccatattcccattggccagaacatgtatacaagcaaccgcaaggagagtgggaaatgtaacccgacagctctgtctggcaaaaaagagaaacagttttgaaaagaacccactggtgtctgcggcaatctcctttgcttctttctggcaggtgaagctagccagtgctgagagggttttcacactggggccactttctcagcctgtcatctctttctttggtgtcacagggaagcccactmcagctgcagcctttcctgaatggccttcagttttcttcctgtagaggcagagaaaatagcttgagggcgtgacagccacagacccatattcctggagatatac

SEQ ID NO: 279237 - DNA, 1085 bp, Homo sapiens
gaccccgggctctctgcgcgtcgggccggggccggagccgcgcgccggaggtaagagccgggccgggctggagcgcctcggatgcggcgccggagggagacccaggtcctggccgccgcgtggggccgggccgggccgggcgtgggagcggggccggaacccggaaccctgggctcggcttcggcggcggcggcggcgacaggagcctcccgcgtctggactcgcaggctgcaggagcccttgcgcctgcgctgctccagggggaaaaaaagggggggaaaaaacttcctgcccccgggtgtgtatgcaccggggctgcctggggccactgtcacggtgttcggaggtgctggaggcktgtgtgacccctggccggagcagcccccctgctgggcccggcggcgcgcgcccctctccaggccacgttcccctgagcggcccagggcccggccgggcaggagacctggaggcgacggagggctggccccaggggcggccgcgcgcactgtcctttggggaggtgcgcgcctctgtgcagcgagwgaccccgggctctctgcgcgtcgggccggggccggagccgcgcgccggaggtaagagccgggccgggctggagcgcctcggatgcggcgccggagggagacccaggtcctggccgccgcgtggggccgggccgggccgggcgtgggagcggggccggaacccggaaccctgggctcggcttcggcggcggcggcggcgacaggagcctcccgcgtctggactcgcaggctgcaggagcccttgcgcctgcgctgctccagggggaaaaaaagggggggaaaaaacttcctgcccccgggtgtgtatgcaccggggctgcctggggccactgtcacggtgttcggaggtgctggaggctwgtgtgacccctggccggagcagcccccctgctgggcccggcggcgcgcgcccctctccaggccacgttcccctgagcggcccagggcccggccgggcaggagacctggaggcgacggagggctggccccaggggcggccgcgcgcactgtcctttggggaggtgcgcgcctctgtgcagcgag

SEQ ID NO: 279238 - DNA, 596 bp, Homo sapiens
tgtggtgcttcagtcccagactaatggctttaatgtggctaaagagcatctcaaccagcctcaaggcttcaatccagaaaggaagaggccaagctggggacaggccacccaaaccctgcctggggcaggggccgctctactcctccacctccaccctagcccccttgggtatctgatcacatctgcaggtggccgtcggagctggggaagggtgtggcagctatcacagctcagggacgtcaacctgttaaggccatctgtccacttcctgtccctagtgctgagtcaccaaaaaagcaaaacccccagcaccgaaaacttgaagtgtggcaagctcactctgccrggacactccccagtggtcagctgacatcttcactcactgtcagcggtctccaaaccacagtgccatctcaatgtccacccacaggagaatggatgcacaaactgtatgggatggagtactagttagcagtagagttaactccagggacacgcatcagcacaggtcaacagcagacggcaggctgagcaagaccagcagggcacacaagagtgcacactgtgagtttctgtctacaagaacatcgagaaca

SEQ ID NO: 279239 - DNA, 631 bp, Homo sapiens
aaaagggcaaataatgacttatattgttgcaaaaaatagttttgaccttggagacccccctgaatgggtcttggggggcaccatgctctgcagatcacctgttcagatgctcaagaatccatattccatggattctaagaaacacatttcttcacattttaacrtcttgagaatcaagatatcttttacaattataattggcagtgattaagtaatgtctttcacaagtgatagcatcttatatttgatggagtacagtatagccagtcaataatccaaggggagccaggaggctgcgggaggtccatgtcgcatactgagttttgtggactcagggaaggacagcagggtgaatgcggtcgtggtgcagcccaggctccatgcaagacaggagatttgggtgggaactggaaagacacagggtgtggacaagtgacagggaaatgagagtccgcactgggagtgaggagagtgactctgggccaggagccctcagctcagtccaacagccattcctgccagcacctgaatcctctttgttctgttcttgcatcttacccaagtggcagagcttctcctgtccccctttctggttccaggttctgctcagggactgctaagttctgttggt

SEQ ID NO: 279240 - DNA, 1259 bp, Homo sapiens
ttggtcatttagactgtcttttaattattgatttgtaggaattcgttttatattgtggatacaagtcttttgtcatgtatattcattgtgaatatttcctttcagactgtggtatttcacttttaaaattttgtcttttcatgagtagaaatttataattttgatcaagctcaatgtataaattttaattttattgttagtgcttttaatgtcctgtctaaaaattctttaaacacccatgttcaaattttgaagatattctcatattctttctttcagaagctttatagttttaggtttcacatataggtctgtgatccacttttaattgattttttaatgtaaggtatgaggtagggattgaggtttatttcttttccatatggttatacaggtgtcccagcagtatttgtttaagaaattttgtttttctcatttaattgttttggcatctttgtcaaagaccaattgacaacgtttaatggatttatttctagactctttgtkctgttacattagtttatttttttctatccttatgccaatttcacactatcttgatcactttagatttctaataagtattaacatcagacagtatgagtwattcaataaaaaaacaccaacttttttttttaacaataaagtgtttctgaactttaagatagctggggccaggcatggtggctcatgcctataatcccagcactttgggaggccgaggcaggcggatcacttgaggccaggagtttgagaccagcctgggcaacataaagtgaaacgctgtctctactaaaaatacaaaaattagccgggaatggcatgcacctgtagtcccagctacctgggaggctgaggcaggagaatcgcttgaatctgggaggcagaggttgcagcaagccgagacggcaccactgcactccagcctgggcaacaaagccagactccatctcaaaaaaaaaaaaaaaawatatagctggatagaaataaaacattgtcaagtatcattttttggttaaatgatacttttttcatcattttggttaattgctactttttcattattttggttaattgctacttttttcaattcaatgatttttagtaaatttatggtattgagcaactatctttataatccagtgttagaacattttaatcaccccaaagtgttccctcatgtccatttgcaattagtttttgccccatcctcagccctaaacgaccacagatctgctttctgttctcataaacttggg

SEQ ID NO: 279241 - DNA, 1307 bp, Homo sapiens
attcaataaaaaaacaccaacttttttttttaacaataaagtgtttctgaactttaagatagctggggccaggcatggtggctcatgcctataatcccagcactttgggaggccgaggcaggcggatcacttgaggccaggagtttgagaccagcctgggcaacataaagtgaaacgctgtctctactaaaaatacaaaaattagccgggaatggcatgcacctgtagtcccagctacctgggaggctgaggcaggagaatcgcttgaatctgggaggcagaggttgcagcaagccgagacggcaccactgcactccagcctgggcaacaaagccagactccatctcaaaaaaaaaaaaaaaatatatagctggatagaaataaaacattgtcaartatcattttttggttaaatgatacttttttcatcattttggttaattgctactttttcattattttggttaattgctacttttttcaattcaatgatttttagtaaatttatggtattgagcaactatctttataatccagtgttagaacattttaatcaccccaaagtgttccctcatgtccatttgcaattagtttttgccccatcctcagccctaaacgaccacagatctgctttctgttctcataaacttgggwattcaataaaaaaacaccaacttttttttttaacaataaagtgtttctgaactttaagatagctggggccaggcatggtggctcatgcctataatcccagcactttgggaggccgaggcaggcggatcacttgaggccaggagtttgagaccagcctgggcaacataaagtgaaacgctgtctctactaaaaatacaaaaattagccgggaatggcatgcacctgtagtcccagctacctgggaggctgaggcaggagaatcgcttgaatctgggaggcagaggttgcagcaagccgagacggcaccactgcactccagcctgggcaacaaagccagactccatctcaaaaaaaaaaaaaaaatatatagctggatagaaataaaacattgtcaagtatcattttttggttaaatgatacttttttcatcattttggttaattgctactttttcattattttggttaattgctacttttttcaattcaatgatttttagtaaatttatggwattgagcaactatctttataatccagtgttagaacattttaatcaccccaaagtgttccctcatgtccatttgcaattagtttttgccccatcctcagccctaaacgaccacagatctgctttctgttctcataaacttggg

SEQ ID NO: 279242 - DNA, 584 bp, Homo sapiens
attggaagtggggtacagaaacaactggactggttacagctcagcatttgccttatttcaacacagtctgaacacagccgtgtatgagtggttgaagtagggccactaggattggccaagactcagctattgttacaggtgcatactcctaagttaagttttcaatcttgtctacctattaagttaggttgcagttcatccacaaggactcaaacatggaagtatggagtccttctcaggccacagttagtttgctttaacaactcttggtatggccgggcgcggtggcccacgcctgtaatcccagcactttcggaggctgaggcaggtggatcacgaggtcaggagttcaagaccagcctggccaacatggtgaaaccctgtctctactaaaaatacaagaattagccgggcatggtggcacatgtctgtaatyccagctacttgtgaggctgaggcaggagaatcgcttaaacctgggagagggaggttgcagtgagccaagatcgtgccattgcactccagcctgggcaacaagagcaaaactctgtctcaaaaaacaacaagaacaacaacaacaacga

SEQ ID NO: 279243 - DNA, 445 bp, Homo sapiens
agagccccaggatcgtgctctcacgctgatctttggcaacgatgaagggaaaatgggtctgctttcacccggctgcttccagcccactcctttccctgccccttcctgcctcttcccccttccctgctaccctccatcactgccttctggtcctgtgccctgtcrcctcctgtgggcctagccaagcccctgaagtcccctgccccgcccagctccccccttccctccgccctctctgcctggcctgcctctctgctcttcactcttcctgtgctcttgacttcccttctggcctttctctggcctccagccacctgggcagactgctccactgccccatctccctcccatccgtccaccgcatcctccacctgccctccgttggcccttcctgcaaaccgtctcctgggaccctgatgtccctgctaggggaagtcaggaacct

SEQ ID NO: 279244 - DNA, 594 bp, Homo sapiens
tgatgccaaaaagagaaaaatgataaactggatttcaccaaaatttaaaccttttgctctgtgaaaaattctgttagattaaaataagggagaaaatatttgcaaaccacgtatctggcaaagcactagtatctaaaatacagaaagaattttcaaaactgaatagcaaactaagaatccagttagaaaatggacaaaggtcatgaacagattttttgccaagcagayacacgcatagcaaacaagcatctgtaaagatgttcaacgtgcattaacaaacacaaattataaccgcagtgagatacaactacacacctatcagaacagctaaaataaaaaacagtcacaacgccaaatgctggcaaggatgcaaagaaactgaatcactcatatattgcatatgagaatgaaaaatgggacagccaccctagaaatcagttcagtagcgtcttagaaaaaaaaaaaaaaaaaaaaaacgtaaccaccattcaacccagcaattgcactcttggatatttacgtcagagaaataaaaacttacattcacacagaaactgtgcacgaatattcatagcagctagccaaaacctggaa

SEQ ID NO: 279245 - DNA, 564 bp, Homo sapiens
ggaaatacaattcagttcacagtgcatagatagatattaattgatattatcaaaagaaaccatgggcagataaacccaaaaccaaactgttttaatggttatctrttgggaagaaaaagaaacagggtgaacgggaagttacagaagcaagatttctgtgactgtaactggataaatagagagtttgggaggacgataagtgttttatgtgatttttaaaaattaaagtaaactgaaatgaatgagtcttcctgcatataaagtgtgtggcataaccacataaagcaaacaattacttaaagtggctttaaaacgcagcattttgactatacatcccaagtgagagatatgctatggacaataaaaaaaaggaaaagaaaaaaggaaagaaatcataaatggcattcagtagccatatattagtattgacatttttattaaattactatgtttccatcattaggaaccataattttcagtataaaaatgacatagcataaaatcaaggaagtttaagtaaaaatcttgtaatcttaaaagtgaattggaaattgcagtatgaac

SEQ ID NO: 279246 - DNA, 564 bp, Homo sapiens
ggaaatacaattcagttcacagtgcatagatagatattaattgatattatcaaaagaaaccatgggcagataaacccaaaaccaaactgttttaatggttatctattgggaagaaaaagaaacagggtgaacgggaagttacagaagcaagatttctgtgactgtaactggataaatagagagtttgggaggacgataagtgttttatgtgatttttaaaaattaaagtaaactgaaatgaatgagycttcctgcatataaagtgtgtggcataaccacataaagcaaacaattacttaaagtggctttaaaacgcagcattttgactatacatcccaagtgagagatatgctatggacaataaaaaaaaggaaaagaaaaaaggaaagaaatcataaatggcattcagtagccatatattagtattgacatttttattaaattactatgtttccatcattaggaaccataattttcagtataaaaatgacatagcataaaatcaaggaagtttaagtaaaaatcttgtaatcttaaaagtgaattggaaattgcagtatgaac

SEQ ID NO: 279247 - DNA, 1196 bp, Homo sapiens
ggaaatacaattcagttcacagtgcatagatagatattaattgatattatcaaaagaaaccatgggcagataaacccaaaaccaaactgttttaatggttatctattgggaagaaaaagaaacagggtgaacgggaagttacagaagcaagatttctgtgactgtaactggataaatagagagtttgggaggacgataagtgttttatgtgatttttaaaaattaaagtaaactgaaatgaatgagtcttcctgcatataaagtgtgtggcataaccacataaagcaaacaattacttaaagtggctttaaaacgcagcattttgactatacatcccaagtgagagatatgctatggacaataaaaaaaaggaaaagaaaaaaggaaagaaatcataaayggcattcagtagccatatattagtattgacatttttattaaattactatgtttccatcattaggaaccataattttcagtataaaaatgacatagcataaaatcaaggaagtttaagtaaaaatcttgtaatcttaaaagtgaattggaaattgcagtatgaacwttcctctcttcctctctcgctcaaccccagcactttgggaggccgaggtgagtggatcacctgaggtcaggagttcaagaccagtctggccaacatggcaaaagcccatctctactacaaatacaaaaaattagccgggcgtggtggcaggtgcctgtaatctcagttgctcaggaggctgaagcaggagaattgcttgaacctgggaggtggaggttgcggtgaactgagaccatgccactgcactccagcctgagcaacagagcaagactccaaaacaaaaaaacaaaaaaaggaaagaaagagagaaagaaaagaaatwaaggtgtttggtaaggcatacgaccactgcctaatggaagacagacatctgaataagctcccaggggaggagggctagatagacgtagggctatgtcctagtgttcatgcaggacagaggaagcaacatccccctctgtctaggggttcaggtaaggctttgggaaggaggtgatatttgctttgaggatgcataggaattctccaattgcaaaacactttcttaagcacagaaattcaccacaagctttacttagtgaagaatctaccttgatcccatgatgagtcagactggaattccctttcatct

SEQ ID NO: 279248 - DNA, 543 bp, Homo sapiens
tttggactactgcaataatttcctaagaggtctcaagtattactgtttttttctaacttctgtagccagaatgatcttttcttcaaacataaatccttatcaaataattgtttgcttaaaatatccaataacttcctaatgcctttgaaacaaaagtccaaattcctaaacatggcttcaggccatgcaaaaaccagagactacttagctctctagtctcatcttttgcatttccccttcaacaatatgctccagtcatgcmgatcattctgaactttcttttaggtccactaacttgctgtgggctttctcatttctgagtctttgtacacactattccttctggctagtgtctagagactgtaaaaccttactttgccttcctgcccctcctcagctgattcacaaaacagcccaactgttaagtcacagatatttattgagaatctatgtgccaagcactgttgtagaagttggggatatagtgataattaaagcaagatggtgcctgccctcaaggaccttaagtgcaaaagctctgag

SEQ ID NO: 279249 - DNA, 1142 bp, Homo sapiens
ctttcttccttctctctcttcacccattttcttttagttgcaatcttactactttatcagaaaaaaaaatttggggggaaatagtgtctcattttgtcactcaaactagagtgcagtggtgtgaccacggttcaccgtggcctcgacctcccaggctcaagcaatcctcccayctcagcctcccaagcagatggaactacaggtgtgcacaaccacacttagctaaattttttttgtattttttgtagagatgtggtttttctgtgtttcccaggctggtctcgaactcctgagctcaagtgatctgcctgcctcagactcccaaagtgctgggattacaggtgttagccatcatgcccagctgacataatgtttatataccattcttttatatgtattctcaccattgtttgtcttagttctataactgaatatatgaaatgttcatcatttacgtttttgtcaatgtttctccagttactcttggacgcatgaagctcattttctgtagagtcctcaggaagagcaaatgtgtgtatagtattccaagttcttatactccaaaccttttttctctagcttgcatatttgacatctwacttccgacaatttatcctacagaaaatttccaacaagcattaaaaacatacatatgtgtataacgatcttcactctagcctgaattacatttggaaaaaagagaaaccttatgcacacttacatggttgaaagttctgtattaatatacataggtgccaagattaatgtgcagtgaaaaagataacagagaagcaatatagcatagtgattaagaatgcaactgcagcactactgcctggatttactactgctgtactactgactatatcactttgagcaagttaattaactttgctaagccttattttattcataaaaccagatttttaatatatctatctcaaagacttgttgcgaagatttaaaattwaaaaaaaatcaatttaagcacttagcagacagtatctggcatgtaataaacactttaggtaatagagctactggccaggaacagtggctcatgcttataatcccagcactttgggaggctgaggagggaggactgcttgaggccaggagttctaccaacctgcaacatagtg

SEQ ID NO: 279250 - DNA, 544 bp, Homo sapiens
acttccgacaatttatcctacagaaaatttccaacaagcattaaaaacatacatatgtgtataacgatcttcactctagcctgaattacatttggaaaaaagagaaaccttatgcacacttacatggttgaaagttctgtattaatatacataggtgccaagattaatgtgcagtgaaaaagataacagagaagcaatatagcatagtgattaagaatgcaactgcagcactactgcctggatttactactgctgtactactgactatatcactttgagcaagttaattaactttgctaagccttattttattcataaaaccagatttttaatatatctatctcaaagacttgttgcgaagatttaaaatttaaaaaaaatcaatttaagcacttagcagacagtatctggcatgtaataaacactttaggtaatagagctactggccaggaacagtggctcatgcttataatcccagcactttgggaggctgaggagggaggaytgcttgaggccaggagttctaccaacctgcaacatagtg

SEQ ID NO: 279251 - DNA, 465 bp, Homo sapiens
tcacactgatgttcagtcgcttgagaccagggactgggtcctttgactccacactagagacatggcagaccatcactaaagactggttaaccaaggacttccygtggggagtgtcatttcctggaatgggatagtcatgctccattatcatgttaagcatccaatataaccattacaatattgggattcttgaaatctggtgttcttgggcattcatctccccaggttcgcattgacccaaccacatggcaccactcagtgaataggaaatgggtgaatcacagaggagtttccattcattcatctgacaaataattattagattccaaaaccgttcttagcacctgcaaggagtttcaagagaaaaggcatatatatatgataaagacccactttctagtctagtacagtgacaccaggttataagcagaccaataaagttggataaagaagcaggcaagagat

SEQ ID NO: 279252 - DNA, 465 bp, Homo sapiens
tcacactgatgttcagtcgcttgagaccagggactgggtcctttgactccacactagagacatggcagaccatcactaaagactggttaaccaaggacttcctrtggggagtgtcatttcctggaatgggatagtcatgctccattatcatgttaagcatccaatataaccattacaatattgggattcttgaaatctggtgttcttgggcattcatctccccaggttcgcattgacccaaccacatggcaccactcagtgaataggaaatgggtgaatcacagaggagtttccattcattcatctgacaaataattattagattccaaaaccgttcttagcacctgcaaggagtttcaagagaaaaggcatatatatatgataaagacccactttctagtctagtacagtgacaccaggttataagcagaccaataaagttggataaagaagcaggcaagagat

SEQ ID NO: 279253 - DNA, 465 bp, Homo sapiens
tcacactgatgttcagtcgcttgagaccagggactgggtcctttgactccacactagagacatggcagaccatcactaaagactggttaaccaaggacttcctgtggggagtgtcatttcctggaatgggatagtcatgctccattatcatgttaagcatccaatataaccattacaatattgggattcttgaaatctggtgttcttgggcattcatctccccaggttcgcaytgacccaaccacatggcaccactcagtgaataggaaatgggtgaatcacagaggagtttccattcattcatctgacaaataattattagattccaaaaccgttcttagcacctgcaaggagtttcaagagaaaaggcatatatatatgataaagacccactttctagtctagtacagtgacaccaggttataagcagaccaataaagttggataaagaagcaggcaagagat

SEQ ID NO: 279254 - DNA, 528 bp, Homo sapiens
ttgtatcctgagaaagttgctcgtgccctagggaagatggagctgtgagctacctggagctacctggattattctatgagagagaaacaaactgttctttaagcctcttcatctctaccattcccctgccgaacttactcctgacacagttctcaagccagctcttactaagtctgaagaataattgtgatattacttatgagcagactactgactattgtgtagcaatgatcaactgttatctatacaaagcaaaatgggtacagcaccaaatagtttaaagtcgatctctcaggagggaggatagagagtgattgataacagtattggttccattaggagttataaaaatgttctactatgaaatagtggtgatggttgcacaactctgtgaatacactaaaaaacagaactgcrtactttaaaagggtgaattttggcccagtgtggtggctcatgtctataatcccagcactttggaaggccgaggcaggaagattgtttgagctcaggggttcgtgatcagcg

SEQ ID NO: 279255 - DNA, 571 bp, Homo sapiens
agctgccctgagcgtttcatctcatcgttgatttgttcatttttttctatattctctttgctgtctctcacctcttcctgggtttgactctctattttctccctctactgggttccagtcttctcccccgaccacatctcatagggcaatgttattagccttgtagatatcatcttcatcatccgtataaagttttgctcctcatccatcctctcacgtttctggttgtttggtcctgtcagtttccccagctcttggaagacagattccaatgtarcaaggctttgaggagtatattgttcctccactatttcatttgtgcgtttaaaggggttatccctggaattctcttcatacataggagggaattgcatgtgcttaagctttctttctggccactgctgtgtctcataatcatcactcatgtccattggaaagttcttttctgaattcaaggcatagggcttattttcttttggtgcagactgaggctcattttcagcctgtctcaaagcttcgagtattattctcatccagtcttcttcactcagtgaatccctctcgggcaagt

SEQ ID NO: 279256 - DNA, 526 bp, Homo sapiens
atgagtttcatcaaaaactgttgattacttttaccacaattcatcatttaaggtcaggaaaatatttttaaaatatattcaaactagcagattaatgcatcagaaaaacaaataaataaaaatgaaggaaaatggcatactaagacagtgcattagatggtatcacaaattcactagaagtcagaagagctttaagaaaaataaggatgaaaacagcagagttgtgtctgttagcagtgagaactaaaaggccataactttttttatgtagaaggacctcactattctgtacaaatatacaataatatcatgcaatcccaacaaataacaatataatattaacgcttttgtagtagacayggttgcccctgtaacatccgtcctcccattctttcttgctgggtgtccaccttcttctatgcaatatgctcagggaaggtggcccaatccccaatccaagggtatatttggacagatttttgactttcgcagcaatcctgttttccttgtgtattagtctgttctc

SEQ ID NO: 279257 - DNA, 499 bp, Homo sapiens
atgagagaggcaggcaagcagctgcctcctccaaaccactgacacctggcaacatgtagtgttcgccaccattgaagggggaaaggcgtccaccctgcccaaggcaagggtgtgctttgtgtttaaggattagcagatcacagaagtaacccacagaattctgaaaagaaactgaagctgcttaatagcaaactgtcatcctcgcagctcaccgtgtccccattatgcctcctgcacaggaagagcagaagtgttgacactgaactcatccaacaacctcgagacatataatccctttgacaaattcytgaaagacgctctggagaaataactcagcttccaatgtaattagacataaaggaggaaatcaggagacattgatgtggaggggattgagttgattgcaaaacccctttgctgagagaaatacctacgtaaatcaattgaatgggaatgattttgcccttgttacacatactggggacaaaagcatcatttg

SEQ ID NO: 279258 - DNA, 499 bp, Homo sapiens
atgagagaggcaggcaagcagctgcctcctccaaaccactgacacctggcaacatgtagtgttcgccaccattgaagggggaaaggcgtccaccctgcccaaggcaagggtgtgctttgtgtttaaggattagcagatcacagaagtaacccacagaattctgaaaagaaactgaagctgcttaatagcaaactgtcatcctcgcagctcaccgtgtccccattatgcctcctgcacaggaagagcagaagtgttgacactgaactcatccaacaacctcgagacatataatccctttgacaaattcctgaaagacgctctggagaaataactcagcttccaatgtaattagacataaaggaggaaatcaggagacattgatgtggaggggattgagttgattgcaaaacccctttgctgagagaaatacytacgtaaatcaattgaatgggaatgattttgcccttgttacacatactggggacaaaagcatcatttg

SEQ ID NO: 279259 - DNA, 558 bp, Homo sapiens
ttctcatttctctcttgcctgccaccatgtaagatgtcccttgctcttctgccatgattgtgaggcttccccagccatgtggaactgtgagttcattaaacctctttttctttataaattacccactcttgggtatgtctttatcaacagcgtgaaaacagactaatataatgatgtaatagccacagtggtatctcctgctgctccagttcgtacttatatcttgcttttggttcctccctcctttatctgctattaatattttagtcatcctttgaggtttagtgcacacactgctacctcccctgagagtactccttggcttgcccagtatttttaaaaaatttctttgtaatatttatttttcttggtcttgctacgcagctgtggctaggcaggttgacctgtctgtctcacctattaaattagaagctctttgaagtcagggaccagttctcaatatcctttcagtaacctgtacaatgtccagcactgtgcttctttcatgtgagctgctcaaaactcaygtgttgaataaataagcaggtattattaagc

SEQ ID NO: 279260 - DNA, 624 bp, Homo sapiens
ttataaatgggcttaaacacccagggggatcaggggaaaaaaacatcagaaatggcaaaaatattaaaatgaattaattaattttctacaaaaatatctaacaacactgatattaaactggcatattttgcttgaaaagtccttctgcttatgaaaccaacacattaatggctatcatttacaattgaaaatgagttaaattaatttataaacacagtaatttgatctaaataaaaagtcatcatatgtaactaagccttctaccactacacatattaagtcattgcctttgggcacagtttccacaaaataatgactgacttttgaaactttagaagatttacatcttcttattttcttatggtcagctttattactggagttcccatagtggatgacaaatgtagccaacatccacaattaagccaaattaaaatttcatcatcaactttygtgagaaagagaaaattagcacataattttttattaagcatgcactattatcactttagcttatttctgtgccaaaggtttattgtaaaattaaaaaaaaaaacaatatcttatgagataataaaattaataattagctattgacttgcaatgtacaacaaatgatagaat

SEQ ID NO: 279261 - DNA, 599 bp, Homo sapiens
tatctgagactcaacaacccctaagataggtatggtaagtagtagtattcacattttgtttttgagcgaaattagttatgaaaaggtcaggtggcttgcgtaaggttcctgagaaactgacagggttatagttgtgttctccacactaggctgcaggatttccctcttgcaccatgttagtgtttatagcatccattaagctacaagtggcattaatgaaacccaaatatatgtcattttaggcaaagtacatgcaaactgacttttattctttttgatgcttttttacacatctagattgtcagtaatcctttggaatcacctgatggtgttggaaacaacccagtggaagtcatgtgtttttactttgggggtcagtaagggtctgagcacaagatgatagtcttttagtcttatggtggtataggactggcagtttctatatagargttattgatttcattactctgcttgtggccaggattatatttcagtgtacttgaaaagtagtaggttatccatttcataaagttctccaggtaaggaggcacttttatggtaaccccaggtaagtgatggtggtttgaggaagaaggaat

SEQ ID NO: 279262 - DNA, 484 bp, Homo sapiens
ttgaagaaggtggtgatgtggacgatttagtaagtacttttaatatgcacctggtgttctrtgattgaagtcacctgagctgtaaatacagccacaaaggctgattatcttacacttgttgcttatttgtgttttaatttccaatacaccagaagcttcctacaccattatatattgccattataaattcaatcagataggtaatttcataatagaaattcctgtgtttcatggtgtcggctatattgttcattcagattaatcctctcccttgaagggctgaaaaagagctagggaggctattccattagtagcaaaatgttgtaattcactgaaattgctgttaaccaaaaataagtaatacaacatgcagtttgtgtgggttgacaaatgaaacagcccttaaaagggctacttcttaaatgttctcaattaacttaatgtaaacaaaatagaccgataggcatttgaggatttctggacc

SEQ ID NO: 279263 - DNA, 1077 bp, Homo sapiens
ttcttcctttcttccaccatgtagtttgggtggttgmgggctgggtctttcccctccctcccccaacagatgattgtggctgttgactctgaagatatggtccaagcagctaaggaggtggggaagcgctggtcagacatcccaccctagaactctcaggttatcccctaagtcacagtcctgggagcattagagttccacagttatcctctcccggtgttgttagtatgtatattgtattaaataagctacacttctctgtttggcagaaaaatatctattagctagaatttggctgggatgacgtttgtgtgaatttctttggagttctttaatattagggatcagaaaagcctggagacttacatactggttgcagcagccagagaccagggatgctggaacttgtaaacttctctaagccatcttgctgtctctccacattagctaaaccaatatttcaactccaagttcaagagtcttttaattatagcacctagtcagtgagagaagcagatagcccaggtttggaggactawttcttcctttcttccaccatgtagtttgggtggttgcgggctgggtctttcccctccctcccccaacagatgattgtggctgttgactctgaagatatggtccaagcagctaaggaggtggggaagcgctggtcagacatcccaccctagaactctcaggttatcccctaagtcacagtcctgggagcattagagttccacagttatcctctcccggtgttgttagtatgtatatwgtattaaataagctacacttctctgtttggcagaaaaatatctattagctagaatttggctgggatgacgtttgtgtgaatttctttggagttctttaatattagggatcagaaaagcctggagacttacatactggttgcagcagccagagaccagggatgctggaacttgtaaacttctctaagccatcttgctgtctctccacattagctaaaccaatatttcaactccaagttcaagagtcttttaattatagcacctagtcagtgagagaagcagatagcccaggtttggaggacta

SEQ ID NO: 279264 - DNA, 538 bp, Homo sapiens
ttcttcctttcttccaccatgtagtttgggtggttgcgggctgggtctttcccctccctcccccaacagatgattgtggctgttgactctgaagatatggtccaagcagctaaggaggtggggaagcgctggtcagacatcccaccctagaactctcaggttatcccctaagtcacagtcctgggagcattagagttccacagttatcctctcccggtgttgttagtatgtatattgtattaaataagctacacttctctgtttggcaraaaaatatctattagctagaatttggctgggatgacgtttgtgtgaatttctttggagttctttaatattagggatcagaaaagcctggagacttacatactggttgcagcagccagagaccagggatgctggaacttgtaaacttctctaagccatcttgctgtctctccacattagctaaaccaatatttcaactccaagttcaagagtcttttaattatagcacctagtcagtgagagaagcagatagcccaggtttggaggacta

SEQ ID NO: 279265 - DNA, 538 bp, Homo sapiens
ttcttcctttcttccaccatgtagtttgggtggttgcgggctgggtctttcccctccctcccccaacagatgattgtggctgttgactctgaagatatggtccaagcagctaaggaggtggggaagcgctggtcagacatcccaccctagaactctcaggttatcccctaagtcacagtcctgggagcattagagttccacagttatcctctcccggtgttgttagtatgtatattgtattaaataagctacacttctctgtttggcagaaaaatatctattagctagaatttggctgggatgacgtttgtgtgaatttctttggagttctttaatattagggatcagaaaagcctggagacttacatactggttgcagcagccagagaccagggatgctggaacttgtaaacttctctaagccatcttgctgtctctccacattasctaaaccaatatttcaactccaagttcaagagtcttttaattatagcacctagtcagtgagagaagcagatagcccaggtttggaggacta

SEQ ID NO: 279266 - DNA, 579 bp, Homo sapiens
cagtacgagaaactaggaagcagatctaggtctgaagaccagaatagctactatattagtccattttcacactgctataaaggacttccctgatactgggtaatttataaaggaaagagatttaattgactcagttccacatggcttgggaggccccaggaaacttacaatcatggcagaagtggaaggaggcaccttcttcacaaggcagcaggagagagaagaatgaaggaggaacttccaaacacagatcttgtgagaattcactcactatcacaaraacagcatgggggaaaccgcctccatgatccaatcacctccctcccttgacatgtagggattataggtccctttcttgatacacggggattacaattcaagatgagacttgggtgggaacacacagccaaaccatatcggctactaatcacctctatggccttggacaagttactccctctctctacagttagttcctcatctataaatgagaggggtgaaaccgacaacctccaggttccttccaggtctgacatcccaggattttgatgtcacctccacactgagatgccagggctt

SEQ ID NO: 279267 - DNA, 619 bp, Homo sapiens
caagcctacatcattacccaacaygtgtgtctcaacacaactttgtgattcctcactgcatacccagcaagtctcatgaagtgatcagaatgttctttgcataaagagacagtaagtggaagttaaaacttcagcagaagcaaggaatggtggcgcacacctatagtcccagctatctgggaaacagaggtaggagaatcgcttgagcccagaggttccaggccagcctgggaaacatatgagatcttgtctcttaaaaaaacaaaacaaaataaaacttcagctaagttgtggtttgacagtatatactagacttccatgattcccaacaggatttgattcaagagaaatccatgaagtaggattctcaaatttgaagattcatgtatgctaatattgtgctctaataattcattcagaacagggtagaagccaaacattttcttcccttaactgttctgagataataatggcatacccatccactatatcagcaaccagctaccttccagaagtgaggagaaaaagagaactatactagttataccaccaccctacccccaccccaaacaagccttctacatccagtttattaattacaaatgcaaatacttcagga

SEQ ID NO: 279268 - DNA, 426 bp, Homo sapiens
tgggtgtctaactacaagcaacatataaaaaggaagccctgggaatctggttgatccaggaatagcgttacctatatgacttctgtttgtttgtttgttttgttttttgagatgggtctctctgtgttgctcargctggtctcaaatgcctggacttaagtgattctcctgcctctgcctcgaagtagctcaaattattgacactcacccctaatcccagctccaactatctgacatttgaagaatcattcagtgatgaaggaaagacccaaacaatatcaaaaaaccgagttgaggtggcaagacatgagaaaaacaagagaagacttcagcagaggacaatgtgtgtaataaagttcacaaaaatgggtaaggaactatgttatgaagacaggcatctaagtcaatcctcatgggcaccatggc

SEQ ID NO: 279269 - DNA, 571 bp, Homo sapiens
atagctagtgaatgtttggattcttggaatttgaatactctatcatggaggccaacaaaatatagctgattgttttcttgtgtgtgtgtgtgtgtgtgtgtgtgttttaacaatttgatcatagtatgattgttaggagtttcttgaaagattgctttagcctatagctgcaagaaatgtacttgcgtttttgaaatacaataatataggaaggaaaatgaactgcttttccattgtgaaggatggaaatagacaacacaggccttgcatcttattttatagagctttcctgagctgtgtgcctaacattgtggttttcagagctattttctcagtaaaaaaagagtccttcmgatcctttgtctatattgaagacaccttaagttgagagatggagtaatgcaaccgaacatatatagcaatgtagccctgtacaaagcatgtttgcttccattatgttttttaatcctcacaacaaccctttgctatatgaagttgacttttcccagggtttttagtccttcaaaccattggtatttggccatgcttttgcaagagattttcaaacagt

SEQ ID NO: 279270 - DNA, 567 bp, Homo sapiens
ttgtctttgtactctgttgatagtatcttttgatgcattaaagtttttaactttgatgaagtccaatttatctactttttcttttgttgtctgtgcttttggtgtcatagccaataaatcattgctatattcagtgtcatgaagctttcccctatgtcttctgtctccattaaattttgtgtgtggtgtgaggtagggatttagactcaacgtatctgaaattcaacctctaagctttcccatccaacctcctgctcccctgggatttgctgttgccaccaaaggcctcatcttctctccaggtggtcagcatagaatccagsagccacccctgcctctttcttctccatcatcaaagtcctattcattttcctccttcctacatttcttgaaacccataatttccctgcacagcccatgtccttgtcctagttcttctcatctcttgcctaggtgactgctgtggcctctaactggctgatgtggtttggctctgtgtccccatccaaatctcatcttgaattgtaattcccatgtgtaacctggtgggaggtgactggatcatgg

SEQ ID NO: 279271 - DNA, 616 bp, Homo sapiens
cttgtattgtgtttttggccttgaaagtagcaagtgaccagaatctgccatggcaacaggctttaaaaaagacccttaaaaagacactgtctcaactgtggtgttagcaccagccagctctctgtacatttgctagcttgtagttttctaagactgagtaaacttcttatttttagaaagtggaggtctggtttgtaactttccttgtacttaattgggtaaaagtcttttccacaaaccaccatctattttgtgaactttgttagtcatcttttatttggtaaattatgaactggtgtaaatttgtacagttcatgtatattgattgtggcaaagttgtacagatttctatattttggatgagaaatttttcttctctctataataaatcgtttcttatcttggcattttaatcaatctcttgtcatgattatagaggtttagctaaaagtattttttcttagaagacaggttctataaactgaatmtctgttgcacactggtcatgctggaaaaacatttgatgaggaatgaagatgctctgtatatacatgtttaggttttacaggaaacacaggagtagcatgttttaaaaatttctaaagtcaaaacatgg

SEQ ID NO: 279272 - DNA, 590 bp, Homo sapiens
ggtacttagcacagtcctgacactcaggaaggctgcaggaagtgcctgaggcatcaggacagaattttacagaagcagagcagcagaacagggggttgaaagctgcctagtggcactgggatggcttgccaggaagaggcacgaatgaaggaaaaattgtcctcaatatgcacagagttaaatgtcacattgacttgtcctgtgcttaatgagtgaaatttcctttttaaaatgaggaacaaacctactagtgaaatgaatgtgtaatcagagtaggyaggagcttctccaattgaaaatgggttattaacaagtctttccactgaccaaatctggctttaacccacgttatatcttcactgatttgccattctttctaaaatggagtgtagaggggaaaaaaaaagcaaaaagcccaactggtactgaaatattatgtattgctgtgctgagaaagaaatgcctaaaaaccaccactacagcccaccagtgctttgacagcagaggttttgttaagcagaccacattgaccctctcaggaaaaaaaaaaacagttaattcaagatctggtcccagatcaggttccaaac

SEQ ID NO: 279273 - DNA, 590 bp, Homo sapiens
ggtacttagcacagtcctgacactcaggaaggctgcaggaagtgcctgaggcatcaggacagaattttacagaagcagagcagcagaacagggggttgaaagctgcctagtggcactgggatggcttgccaggaagaggcacgaatgaaggaaaaattgtcctcaatatgcacagagttaaatgtcacattgacttgtcctgtgcttaatgagtgaaatttcctttttaaaatgaggaacaaacctactagtgaaatgaatgtgtaatcagagtaggtaggagcttctccaattgaaaatgggttattaacaagtctttccactgaccaaatctggctttaacccacgttatatcttcactgatttgccattctttctaaaatggagtgtagaggggaaaaaaaaagcaaaaagcccaactggtactgaaatattatgtattgctgtgctgagaaagaaatgcctaaaaaccaccacyacagcccaccagtgctttgacagcagaggttttgttaagcagaccacattgaccctctcaggaaaaaaaaaaacagttaattcaagatctggtcccagatcaggttccaaac

SEQ ID NO: 279274 - DNA, 459 bp, Homo sapiens
aacactttgtaaagtacatgcccacttgagcgagggttgcagggccccaacctcagccctccaggccttgtgctgtgtaccttagctccagtgttgagctgtacatgggccttctatgggcaccatcttggttcctacaccctgggagctctaggcattctgtccctgatggcaaaccttccctggtaatcgcacctttaagggaatgttccagccctctagtcacctgagagcctgctgactcccctrcccttcctcttgccaggtgacctcctccctgccgacggcctcttcatccagggcaatgacctcaagattgatgaaagctccctaactggagagtctgaccaggtgcgcaagtccgtggacaaggaccccatgctgctgtcaggtgagcttcagcctgatgttgggcccattcccgtcgccatgcacaggggatgcctgtgtgtccccttc

SEQ ID NO: 279275 - DNA, 587 bp, Homo sapiens
cttcagaaagactcaaatgacctcaacactcagggcaccaaggaaatcatcaaaaccaggcaggtttcccctaccttcctaccctccagggacggacaggcagacacgagcccatgtctggtgtatcttcaaacgggacagagtaaaaatattcagaaattgcaaactcatatgtctgcagggccaggtagggagagcacaggtgccaaacccaaaccacagctgcttcctgttgctgcctgcagaagcgccagcccaatctgacctcagtgctcactttgcaagaggagccagaaatccagatttccctgtaccagctctcaatgtttaagtattggcaagaaattcccacattttaaggtccctatgggtcaagccacatatgggtgggacctagagtgcaaactctgacctaggcctattttttagctttgtattttaagataatttcaaactttcagaaaagttgcaaggatggcrcaaagaatacgggcatgcccttcactctgattcggctgttgctaaccttttgccgtctttgctctctgacaaatctcactctcctcctcatcatgcagatgtgatgg

SEQ ID NO: 279276 - DNA, 585 bp, Homo sapiens
taagccagagaaccaatgccttcatttccagcgaacctttctactcagascagaatgtgtctcagaccagaatgtgagggccttgcccctggaggctaagtggaaggtaacaaagacaacaggctcagggacagcagagagttcaagtccaggctctgcccctcacctgcagagtgactcggcagtccacccctccactctgagcctcagtttcctccagtttgaggactagatgagatcattgagcgtggagggcagcatgtgccctgcacacagtaggtgttctacagaggtcagcttgggtggctgttactgctttctgtgccctatgaatgcagcgtagtgttccttcctctcctttgaagagtctccagtgatacccgccatgagaccccagtttcttatctgtctaatgctgatatgtaacagcccctcctcctagcaccctaacaagccgagctggtgcccacggaggcatcttgtcagcaagttattataatgaacaaggccctgttactggccctcagcagggtgacagagcagggtggggtgctccagggtctgcctgtgatgagaagccaccag

SEQ ID NO: 279277 - DNA, 585 bp, Homo sapiens
taagccagagaaccaatgccttcatttccagcgaacctttctactcagagcagaatgtgtctcagaccagaatgtgagggccttgcccctggaggctaagtggaaggtaacaaagacaacaggctcagggacagcagagagttcaagtccaggctctgcccctcacctgcagagtgactcggcagtccacccctccactctgagcctcagtttcctccagtttgaggactagatgagatcattgagcgtggagggcagcatgtgccctgcacacagtaggtgttctacagaggtcagcttgggtggctgttactgctttctgtgccctatgaatgcagcgtagtgttccttcctctcctttgaagagtctccagtgatacccgccatgagaccccagtttcttatctgtctaatgctgatatgtaacagcycctcctcctagcaccctaacaagccgagctggtgcccacggaggcatcttgtcagcaagttattataatgaacaaggccctgttactggccctcagcagggtgacagagcagggtggggtgctccagggtctgcctgtgatgagaagccaccag

SEQ ID NO: 279278 - DNA, 545 bp, Homo sapiens
tcctgggtcacaggggtggagggtsggggagaggggctggcactgtgtactggtgtctgcatcttaatctccttacacgcaagcaagaaggagttccattcacttgcccccaaagcctttagaagatttcggatttctatccccttctggcttcagagcaacagacaaggcttttgtttactcagataccacccctatccctttttaaagtgacataatagtcccccaggctactcctgaactgttgagagccattagggctccatcatgaaaacattgccccagaggagctgagggcaggggaaaatctttttcccaccgtctctgcataccaggcactgggctgtgggtttctcatccattatatcatatcattcacttctcaccactcctgcaaaatatggagacttgttccccgcagcctcccatcccctgccctagacctctccccaagccacctgcattcaaagtgcccaaagatggaagcacctagtaggtgtcggggctgagtaaggcacttctgcgagcagtgccttgccaagaag

SEQ ID NO: 279279 - DNA, 545 bp, Homo sapiens
tcctgggtcacaggggtggagggtgggggagaggggctggcactgtgtactggtgtctgcatcttaatctccttacacgcaagcaagaaggagttccattcacttgcccccaaagcctttagaagatttcggatttctatccccttctggcttcagagcaacagacarggcttttgtttactcagataccacccctatccctttttaaagtgacataatagtcccccaggctactcctgaactgttgagagccattagggctccatcatgaaaacattgccccagaggagctgagggcaggggaaaatctttttcccaccgtctctgcataccaggcactgggctgtgggtttctcatccattatatcatatcattcacttctcaccactcctgcaaaatatggagacttgttccccgcagcctcccatcccctgccctagacctctccccaagccacctgcattcaaagtgcccaaagatggaagcacctagtaggtgtcggggctgagtaaggcacttctgcgagcagtgccttgccaagaag

SEQ ID NO: 279280 - DNA, 564 bp, Homo sapiens
ttttaaattttttcctgttcccaccttttttgtctattagaaatgtcgactctcatggacatacttttttttaacttttattttargttcaggggtacatgtgcaggtttgttacatatgtaaatatgtaaattacataccatgggggtttgctgtacagattatttcatccctcaggtaattagcataacacctgataggcagtcctttgatcctcttcctcctcccaccttccaactttaagtgggccccagtgtctgctgttccattctctgtgtccatgtgtattcaatgtttagctcccacttacaagtgagaacaagtgtagtatttggttttctgttcccacattagttcccttaggataatggcttccagccccatccatgttgctgcaaaggatgtgatctcctctttttatggttgcatagtattccatggtgtatatgtaccacattttctttaaccaggctacaactgatggacatttatgttgattccatgtctttgctcttgtgaatagtgctgcagtgaacacgcatgtgtatgtgtctttgtgggaga

SEQ ID NO: 279281 - DNA, 564 bp, Homo sapiens
ttttaaattttttcctgttcccaccttttttgtctattagaaatgtcgactctcatggacatacttttttttaacttttattttaggttcaggggtacatgtgcaggtttgttacatatgtaaatatgtaaattacataccatgggggtttgctgtacagattatttcatccctcargtaattagcataacacctgataggcagtcctttgatcctcttcctcctcccaccttccaactttaagtgggccccagtgtctgctgttccattctctgtgtccatgtgtattcaatgtttagctcccacttacaagtgagaacaagtgtagtatttggttttctgttcccacattagttcccttaggataatggcttccagccccatccatgttgctgcaaaggatgtgatctcctctttttatggttgcatagtattccatggtgtatatgtaccacattttctttaaccaggctacaactgatggacatttatgttgattccatgtctttgctcttgtgaatagtgctgcagtgaacacgcatgtgtatgtgtctttgtgggaga

SEQ ID NO: 279282 - DNA, 564 bp, Homo sapiens
ttttaaattttttcctgttcccaccttttttgtctattagaaatgtcgactctcatggacatacttttttttaacttttattttaggttcaggggtacatgtgcaggtttgttacatatgtaaatatgtaaattacataccatgggggtttgctgtacagattatttcatccctcaggtaattagcataacacctgataggcagtcctttgatcctcttcctcctcccaccttccaactttaagtgggccccagtgtctgctgttccattctctgtgtccatgtgtattcaatgtttagctcccacttacaagtgagaacaagtgtagtatttggttttctgttcccacattagttcccttargataatggcttccagccccatccatgttgctgcaaaggatgtgatctcctctttttatggttgcatagtattccatggtgtatatgtaccacattttctttaaccaggctacaactgatggacatttatgttgattccatgtctttgctcttgtgaatagtgctgcagtgaacacgcatgtgtatgtgtctttgtgggaga

SEQ ID NO: 279283 - DNA, 574 bp, Homo sapiens
ggttaagtactgagtttttaaaaaccacaaatattgggaaaaactgcacaagcacatccaagtcaaaatacctggtcaaactaagctaagatgaacctggacagaacagacatgggatactgcattgtgctatatggctggctgttttcagcagcatgagggcaagttacattcagtgagggctgctcagtagtgcaaaagattaaagggctgatgtgagcccaaaatgatccaacataacttctatgttttactaatattattccgctagcggccagctagataggcactatgtcacatttagaaatacatgtcatgatatcgcagaactaaatcaatcatccagatggcatgtctaccaaatgtttattctcttctactcgaacacttctgcctgagatagcctcatccatttttggacagccytaataattaaaagctcttctgtattttgagctaaaatttgttttctgtagtgtctactcatttatccgagtgtaattgtgcttccacatgacacagcttttcatatactcagaaatgggcctcttactttccctatatcttctctttg

SEQ ID NO: 279284 - DNA, 570 bp, Homo sapiens
aatctatacaaattggggaaaagggcaccactgaaatctctccattatgaaataccactgagacattagactcagctcacctctgttctgaggcaaatagtaccaaaatgtcatctaatatttagcggtgacatgaatttctgtggtatttcaggctatttattgcaaaaatttatatatttatattttttccaaacactggggagtttcagtaaaggcttcattctccgccttcctccctctctcttcccaccctcatttcctttttctctcactctgattctaggtccttctcttgttaatctttcgaatccttggttcttattccagcaacagcgtggaggtgggcaatgtgcattgacatacttcatcttcatttctttttatgttcatgggaatcttcatagcacattgatctgatgctttctataagtctattataaaatgttgaygggattttgtgggtcttcctgatactagacagatcttctgaaatttagttattcttttttggtttgtttacaagataaaaaccatctgagtgtctggggcccaaggcctaaaaacctc

SEQ ID NO: 279285 - DNA, 580 bp, Homo sapiens
aggcatctgaattttaaaaagacatttcaactctcttcattttctaataattaaaatattttgaatgcacaaatatatgaaatcctttatctgttgagccagagctgaatctgctggatgaacattaaaaacatacaaagagcagtcttcagtgaataatcagttccagacagctctatgcacagaatatttttaatacaagtcaaaaacacaacaaaacaaaacactcagcattccctcccaggagaaaattcttttagggggctatatgacatgaattctgcttctggtgagattttgtacattcacatgaatgcacttcagacaaaagaaagaccaatgtatagaagagttcaygactttactacaaatgttatttcaacatgggtcttttataagcaagctgaaggtgatcttttgccattttggtggaagagacagcaagggttgagcaaggttatatccccatcttgattacgctaccatactgaaaatccaaggaagccttgagacttgacagccttgaaaataatccatctcatcatggttccccaaaacattagaagactggctggcactg

SEQ ID NO: 279286 - DNA, 564 bp, Homo sapiens
atgcaatgtggagaagaatggaagcttctatggcagatctacattcttttttctgtcctctccctctctctacacccaatgtactttattttttggcccatttttgctcctatatgccctttcatcatcctcagaacctgtacccttggcattttgtcggtagacatttatatttcctggcattgaggctatagatctctaatacttgaattgattttcaaaattagggaaaagagctgcgattttagctatatatttgggctgtttgagttgaaaatgatgaagagtaaagtaatgtttgstgtaagaggtgggaggcaggactgtgacacggtcagctgactcttagatgtgtaataatggtctggcaccaccagtctctcactgtcttcttgaaatcacctctaaagaagagtttgatctggaaggtcaagcctagcagtgaactgaagctgttctctctgagtgcatttattcatttattcacaaagcagttactggtctatgtgcctcaagattcctaaatctcattgagccaccaacccttttattgaaagctacagg

SEQ ID NO: 279287 - DNA, 435 bp, Homo sapiens
tgtacccttggcattttgtcggtagacatttatatttcctggcattgaggctatagatctctaatacttgaattgattttcaaaattagggaaaagagctgcgattttagctatatatttgggctgtttgagttgaaaatgatgaagagtaaagtaatgtttgctgtaagaggtgggaggcaggactgtgacacggtcagctgactcttagatgtgtaataatggtctggcaccaccagtctctcactgtcttcttgaaatcacctctaaagaagagtttgatctggaaggtcaagcctagcagtgarctgaagctgttctctctgagtgcatttattcatttattcacaaagcagttactggtctatgtgcctcaagattcctaaatctcattgagccaccaacccttttattgaaagctacaggctctttttt

SEQ ID NO: 279288 - DNA, 564 bp, Homo sapiens
atgcaatgtggagaagaatggaagcttctatggcagatctacattcttttttctgtcctctccctctctctacacccaatgtactttattttttggcccatttttgctcctatatgccctttcatcatcctcagaacctgtacccttggcattttgtcggtagacatttatatttcctggcattgaggctatagatctctaatacttgaattgattttcaaaattagggaaaagagctgcgattttagctatatatttgggctgtttgagttgaaaatgatgaagagtaaagtaatgtttgctgtaagaggtgggaggcaggactgtgacacggtcagctgactcttagatgtgtaataatggtctggcaccaccagtctctcactgtcttcttgaaatcacctctaaagaagagtttgatctggaaggtcaagcctagcagtgaactgaagctgttctcyctgagtgcatttattcatttattcacaaagcagttactggtctatgtgcctcaagattcctaaatctcattgagccaccaacccttttattgaaagctacagg

SEQ ID NO: 279289 - DNA, 464 bp, Homo sapiens
tagattattattgaaaatatataaatgcgtatagctaatttgccaaaagctgtgttttaaatccagtaaatgtgtttttaaataatgcaacttctgacctggttagtattcaaaaccaaaaactgaaattctgccaccctctttgcagtctattgatttgagaactacagctgctgaaattaaactttattgttagcatagagctttcagctgaggaagcaatttcaaattggtttcttttctagcccagcttaatattaagtaaatatgtgcctataagtgtctctagctagattattacctaaagtggtgcatgcaastttgcaggtgcagctccgggaaacgaaaatctactttggtgatgaatcttcctatccaatgggtaaacacatgttttaaaattgaatgcatggttatccccagagtacaagaatgttttcaaagttagaccttttttgtttaac

SEQ ID NO: 279290 - DNA, 606 bp, Homo sapiens
ttatttataaaatcaatagcactgaatgataatttttttaatgacagtcatgtattttattaatgatatctgaaagctgcttaaccattaggaattacaattctttatggttggagtatgatgatttcatcaaatgtttgaatatttacataatttttatgtaaccataattaaaccaaattagtctttttttcttcatacttttcttcggtaaatagtgaagaaataatgggcatatctaattaaccagttctagtgggtgttgtgatatctttatataaaaaaacagtctcagatgtatgaatatgattatatagtcatgattgaagttcaaaatgaggaagyatacaaaatcctcagccactgaaaaattcagttaacttgtttatactcctgtaagctctagttagtcacaagacaaagtatatagtaacactttgtaatgaagtaacattttctgcccacattaattttactaaagacctaaattgttaaaattaattgccaatctctggatatattatgcttagtaagtgttttgaaattaaagaccttaaacatttcagcaagtaaattttggattctagctctgttttaaattgaatc

SEQ ID NO: 279291 - DNA, 531 bp, Homo sapiens
ggttttgttaattctaaaagcctacaatcatctgcataagcaaagagaatttatctttaaaagggaagcagagcataaaagttcggaaaatttgcagcctgatcatggggtagaaaagaaacasccattttgggggaaggaattcaaggctgcagaaatttgcataagtaaagaagagccaaatgttaacagccaagacaatggggaaaatgcctccaaggtatttcagagaccttcattgctaccccctcccaccacaggcccagaggcttaggagggaaaaatggttttgtgggccaggcccagggccccactgctctgtgcagcctcaggacatggtaccctgcattccagacacttcagctccagctgtggctaaaaggggccaacataaaacttgggccattgcttcagaggggcaagcttcaagctttggcaacttccatgtggtgttggtcctgcaggtgcacaaaaggcaataattgatatttggagcctctgcctagatttcagaggatatatggaaacacc

SEQ ID NO: 279292 - DNA, 602 bp, Homo sapiens
gaaattaaattgacataggattaacagaagaaaacaattttaattatgtgcatgggagtcccacaaaagtatgatacctaaagaagttgtcagatgattaaggtttatgtgtcacctggaactacagaaaagaatagagatttggggttgggggacaagagtggaggcaaattacaggaggctgggaggaaaggccaaattaagaggagatggccatgaaaagcaggttaaacaaaagtaagatttgttatgccttcaccattgattgagtctcgagatttagttgtctttttctttctggtgcagagagggaaacaccattacaaatggaagttttctttattgatgtaaatttctcttaaaaagggtaactttttagacattctgtgtctgcagtttctcagaataaccagctcaaaataatcaatatgccaaaaaggcacattttagggtggcatattctgatctcccgcagtcatattttggtgtggtgtstcctgaacccatcatttgttcttcaacatcagcaaaaacctggagaactcaaccattgctgaggcttatttgcaatggtcagcatccagtctggaaaacagaaccca

SEQ ID NO: 279293 - DNA, 506 bp, Homo sapiens
caatccttttaatgccctggatggagccttaggtttgtgttcatattgttggacctcattaagtatttccagtgttgtattatttttcttaaaaagagttacccgatttgtgtaagattcagctgaaacaaaatttgtatcgtgattctataattatcagaaataattatagaaaaagttttagtcactttgtgtcttattctatttgagttgccataaaaatatcaatyaactgagtagtttataaacaatagaaatttattgcttacagtttcagagactgggaagtccaagatcaaggtactgaaagatgtggtgtctggtgaaggcccactttctggctcacagatgtgacttcttgttgtatcctcacatggtggaaggggtgaggggtatctcttgggtctctttataaaagcactaatcccactcatgagtgctctgcccccatgatctaattacctcttaaatacccaccttctaataccatcatgttgtgggtgagg

SEQ ID NO: 279294 - DNA, 537 bp, Homo sapiens
ttgtcttcttacaggttagggattgtaaaggagattyggttgcttttcctcatcagttacataacaaattcaaaatacacacataaaatctaagtaaaaactttaccaagcctctagcctcccatttcagctaggttgctgcttctaagtcacctgccatgtagaatttatcacaaccagtaaacaagcaaatttatgctttcctccataaaaacaaagactcaggaaatttaggtaaattttttaacgtcacaaagtggttgctcaaactcttccttatgtaacctaagcaatgtagattctctaatgatagtttccaataaaagcttaatgaacattcgtgttattttaacctgctattcatgttaagaagttcaaacactgaagtacttgcatttgataaatactgttatttataacagaaagcttaattaactggatacattaacctcattataaatataatatttgatagcttagtaattctgcagttgaaaacaggttaatatatgagttccgtgttcagtctaagttaat

SEQ ID NO: 279295 - DNA, 537 bp, Homo sapiens
ttgtcttcttacaggttagggattgtaaaggagatttggttgcttttcctcatcagttacataacaaattcaaaatacacacataaaatctaagtaaaaactttaccaagcctctagcctcccatttcagctaggttgctgcttctaagtcacctgccatgtagaayttatcacaaccagtaaacaagcaaatttatgctttcctccataaaaacaaagactcaggaaatttaggtaaattttttaacgtcacaaagtggttgctcaaactcttccttatgtaacctaagcaatgtagattctctaatgatagtttccaataaaagcttaatgaacattcgtgttattttaacctgctattcatgttaagaagttcaaacactgaagtacttgcatttgataaatactgttatttataacagaaagcttaattaactggatacattaacctcattataaatataatatttgatagcttagtaattctgcagttgaaaacaggttaatatatgagttccgtgttcagtctaagttaat

SEQ ID NO: 279296 - DNA, 537 bp, Homo sapiens
ttgtcttcttacaggttagggattgtaaaggagatttggttgcttttcctcatcagttacataacaaattcaaaatacacacataaaatctaagtaaaaactttaccaagcctctagcctcccatttcagctaggttgctgcttctaagtcacctgccatgtagaatttatcacaaccagtaaacaagcaaatttatgctttcctccataaaaacaaagactcaggaaatttaggtaaattttttaacgtcacaaagtggttgctcaaactcttccttatgtaacctaagcaatgtagattctctaatgatagtttccaataaaagcttaatgaacattcgtgttattttaacctgctattcatgttaagaagttcaaacactgaagtacttgcatttgataaatactgttatttataacagaragcttaattaactggatacattaacctcattataaatataatatttgatagcttagtaattctgcagttgaaaacaggttaatatatgagttccgtgttcagtctaagttaat

SEQ ID NO: 279297 - DNA, 567 bp, Homo sapiens
ctcagggtcttactaagctgaaatgttactcacaggtacaatttcatctgaagcttgggtcctcctccaagctcattgcttcttggtagaattagttctgtgtgattgtaggacagaagaccctatttttcttgctgactgtcagttgggaattactcccagttactagaggtcacccttaggttcctgctgtattgtctcctccataagtagttcacatggttgtttgttccttcaaagccatcaagacagcatttctgttgcttgaaatctctctcacttctagatcctctttcaagggttcatctgattaggtaaagactcctcagaataatctccttttttaattaactcaaagtgaacttataggggcttcaattacctttcacctttgctatataacctaacctaaccrtggacgtggcatccatcatgttcacagctcctgcctagactcaaagggaggggattacacagggtgtgtacaccaggggataggaatcttgtgggccatcttagtgttctgcctaccacaatctgaaatcaaatactaaagcaataaaacat

SEQ ID NO: 279298 - DNA, 537 bp, Homo sapiens
ctgttgcttgaaatctctctcacttctagatcctctttcaagggttcatctgattaggtaaagactcctcagaataatctccttttttaattaactcaaagtgaacttataggggcttcaattacctttcacctttgctatataacctaacctaaccatggacgtggcatccatcatgttcacagctcctgcctagactcaaagggaggggattacacagggtgtgtacaccaggggataggaatcttgtgggccatcttagtgttctgcctaccacaatctgaaatcaaatactaaagcaataaaacataacagacttacttattctgtaatggtgtcaaaattatatttttaaataaagagagaaactaagaaataataataatagacttggataaacataatggttgaatatatgtatatatctcttttatctttcccaaatgcatgcaaatgacagtaaaataataaaacatttcaaygttttttagacaaggagaataggagagtatggacaagagatgttgataagcattt

SEQ ID NO: 279299 - DNA, 626 bp, Homo sapiens
atacacttccctcctgttaacctgtctgatgtcagtttgattctcaggcccagccagatgcagggggttggtaggtaattctgcctcctctacatcactgagctccttcctgggtaagatgctgccaaaaggccctgccatctttgtccttagacaagtttaacagtaataattccctaaatgaggaaaaaaaggaccatctgctaccttttcaccctcttagagaagcatggcatagttttatgtaagggaaggacgtacccaaaacaagccaataaacctgagataattacacgaaatcagcagcttgtgcactgtagacaaaaaaccttcctctcaaatgttaacagacaggtattgataatattgataacaagtctgcattctcttttggaaggaaaggcccagggaaccctttttctctgggaataacttgaaagcatttttggatggaagcagattttctgaactcaccagattcarctaccagactggaaaaagtttttttttaatgttataagcatacgacttcacaaccagacctctactttgttgttcttaaataaatggggtaataggtcatgttgcaaaccaccaatgaaattaaaagtctgataattgtgaaa

SEQ ID NO: 279300 - DNA, 610 bp, Homo sapiens
gtgtgagctattaaatttatgcagatacttatacaataaagtatataaagtgagaataataggctagagtagacatgtctcatttctttcctatattcataactctacttttttcttctaatttatgctgtcttccaattttacttttctttctttagagacaggtcttgctctgttgcccaggctggagtacagtggcatgatcacagctcattgcagcctcaacttcctgggctcaagtgattctcccaccttggcctcccaagtagctgggactacaggcatatgcaccaccatgcctggctaatttttaacatatgttttgtagagatggggtctcatggattgctcagactggtcttgaactcctgggctcaagtgatccccctgccttggcctccaaaagttctgggattayaggtgtgagtaactgtgcctggttcagttttccttttcatgttaacttgtaccttagggaaatgaacattctacagatcaggactcattagggggcacatttctcaaggatggagcttatgttttcttctctgtttataaattcttgcaaccccaagcactgatttgtgcttgctgcattcctcagtaactg

SEQ ID NO: 279301 - DNA, 575 bp, Homo sapiens
tccaaattaacataagtctaattaagtattgctttaattaagagaaaatctgaacagtgttcttcctcccagataaagcataataatgctatgattcctggccactttccactgtaaaaaattatcccactcttagagctcagaaccttatggtgttactccacaggtcttggctgaaatatacacaataagattcatccttgggatgcaagaaccttcatttaaccccttcttcctgtgtgtgctgattaagcagcaaattttgtgtcccctaagaagctgcatgaaaaagaaaaaaaaagaaaaaaaaaatttcactggaccgtatataaaatggaaaaaaaaaaaaaaaagaggctgtaaccaygtttttttcttttttctttttgagacggagtctcactcactctgtcacccaggctggagtgcagtggtgcgatctcggctcactgcaacctccgcctcccaggttcaagcaattctcatgcctcagtctctagggaggtgagattacaggtgcctgccaccacaaccagctagtttttgtatttttagttttgccatgttggtcaggc

SEQ ID NO: 279302 - DNA, 595 bp, Homo sapiens
tttgctcaatgaaataagccaatcacaaaggactacatattgtgtgatttcatttctatgaaatatccagaataagcaaatctacagasagaggaaagacactagcagccagcagatggggaaaggagactgaagagtgactgcttattacagtttcttaatatacatagggtttctttttggggtgaagacaattttctaaaattaagtagagatgatggctgcacaactctgtcaatatattgaagccaatgtactgtacactttaaagggggtgaattttatggtatgtgaattatatctcagtaaagttgttttttaaaaaaaggcagagacagaattaaaaagttagaataaaagaaccaagagcctgagacagacataggattccaacattagaagaagcttttttctcactggtttaagttggctaaagaggtttccagacaactttgatgtgactaattggaaattttttaaaaagcaagttaaaatcaacatttggcttgtgccagccagattcagcgaatattgtccaggcacctactatgcactagccacctaaaatatgaggagatcatggcccttttggagt

SEQ ID NO: 279303 - DNA, 1191 bp, Homo sapiens
tttgctcaatgaaataagccaatcacaaaggactacatattgtgtgatttcatttctatgaaatatccagaataagcaaatctacagacagaggaaagacactagyagccagcagatggggaaaggagactgaagagtgactgcttattacagtttcttaatatacatagggtttctttttggggtgaagacaattttctaaaattaagtagagatgatggctgcacaactctgtcaatatattgaagccaatgtactgtacactttaaagggggtgaattttatggtatgtgaattatatctcagtaaagttgttttttaaaaaaaggcagagacagaattaaaaagttagaataaaagaaccaagagcctgagacagacataggattccaacattagaagaagcttttttctcactggtttaagttggctaaagaggtttccagacaactttgatgtgactaattggaaattttttaaaaagcaagttaaaatcaacatttggcttgtgccagccagattcagcgaatattgtccaggcacctactatgcactagccacctaaaatatgaggagatcatggcccttttggagtwtttgctcaatgaaataagccaatcacaaaggactacatattgtgtgatttcatttctatgaaatatccagaataagcaaatctacagacagaggaaagacactagcagccagcagatggggaaaggagactgaagagtgactgcttattacagtttcttaatatacatagggtttctttttggggtgaagacaattttctaaaattaagtagagatgatggctgcacaactctgtcaatatattgaagccaatgtactgtacactttaaagggggtgaattttatggtatgtgaattatatctcagtaaagttgttttttaaaaaaaggcagagacagaattaaaaagttagaataaaagaaccaagagcctgagacagacataggattccawcattagaagaagcttttttctcactggtttaagttggctaaagaggtttccagacaactttgatgtgactaattggaaattttttaaaaagcaagttaaaatcaacatttggcttgtgccagccagattcagcgaatattgtccaggcacctactatgcactagccacctaaaatatgaggagatcatggcccttttggagt

SEQ ID NO: 279304 - DNA, 573 bp, Homo sapiens
attcaagcaagaaagcctgggccctttgcaccctgaagggtaggtaccatcctctcaaatccattttttttttctttttgaaagtgaaaataagtttctacttttacaattcatgcatgaatcctattaatccttcacaaaggcagctttaccccctcaaaaattccagagacagggcccggcatggtggctcacacctgtaatccttygggaggccgatgcgggtggatcacttgaggtcaagagttccagaccagcctggccaacatggtgaaacctcatctctactaaaaatacaaaaattagctgggtgtggtggcaggcacctgtaatcccagctactcaggaggctgaggcaggagaatcacttgaatccaggaggcggaggttgtagtgagctgagatcgtgccattacactccagcctgggtgacagagcaaaaactccgtctcaaggaaaaaacaaaagaaaaaaatatccagagacaggaagtaattggaatatgggtccttgaattggttattctttgctgacaactccatctcccaactctaatctattttctgctcttgc

SEQ ID NO: 279305 - DNA, 498 bp, Homo sapiens
aatatagtgaaagcccgtgtctgctaaaaaaaattagccaggcgtgatggtgtgcttytgtagtcccagctacttggagactgaggtggtaagactgcttgagcctgggtggtccaggttgcagtgagttgtgattgtgccactgcactcaggcccaagcaaaaaaaccaaaatcaaaacccctgatctctcattcataaagagacctaatcataccttttccataggttccacatttgatggcttaatatcaggattagtttcaagttttcttttcttttctagttccttctgcctgtcaagtttctgctgctgttttagttcttcaagctgtcagagccataagggaaataggtgaaccagtgactagtgttgttaccttactctgaaaaatatcacacataacacactacaccactcaatgaaaattctggctaacataacttaccctctgtttccttagctcagcttccctaagaagagcctccttaaagggag

SEQ ID NO: 279306 - DNA, 456 bp, Homo sapiens
gtaactactgatcaatctattcattcagtcagcatttattgaacatttaccatgtactagacattgttttagaggctagggatatataaataagccaaacacaaaatctctgtcttcctttgctgtgggggatgaatgaaaaattatataatatattgtcaaatgaaatatatggaaataaatatgataagaagatcgkgaataaatacaaaactttgatgagataggcaggcaaataatctctgggtgggtgtcatttgagcagaggatgcatgaagttgatcaattgtaaaagtcataagtctctagagatgggaataggaatagaggttttaaggaatggtttagccattctcatcaatgtatttgcttttataggactattttctgctatgtatatgaagaagttcattctaaatactattcaaatcatagaattaaactaggaacataaat

SEQ ID NO: 279307 - DNA, 472 bp, Homo sapiens
tacaaacatgtaaaattacaaataacaaatagcagaatgaacaaaaaggataattttaaaatcatagttgtttaccacttgaagaagttgatatttcatggaaaggaaagacatagtattgacaggcactgttgctgtggtggtaagtaaaggttagtgagccttagaacatataaacctttctggaaggaggtgtgatactccagggacaacagttgagacatgactgcagggcattctacattctctaaccagttctcattagttactttaatgtttatgctatggcacgtatgtaaattcaccacagtgaatttttaattcagagagtttgtggtaaaaaataatgacattctgattttagtgcrttaaaaatcaaaaactattgcttgacaattcaataccataaaaaagtaaaaataaaagtgaaaatatccaactgagaaaaagtatttgctacctgtatcacaaa

SEQ ID NO: 279308 - DNA, 529 bp, Homo sapiens
attattcatcttttcagggattcaacttcttggttyaatcttgggaggttgtatatgtccaggaaactatccatttattctgagttttctggtatgtgtgcatagagatattcatagtagtctgtgagggatttttttatttttgtgaggtcagtagtaatatcccctttatcatttctgattgtgtttatttggatcttctctctttttgcctttattaatcaagctagtggtctatatatcttattaatttttcaaaaactcactcttggacttgttgaggagtttgttatgtattgtttttcatatctcaatttccttcacttcagttccaattttggttatgtcttgtcttctgctagctttgggattggtttgttcttgtttctctcattcctctagtagtgatgttaagttgttaatttgagatatatctaaatttttgacatggtatttagtaccataaccctcttaatactgccttagctctgtccaagagattctggtatgttttatttttgttctcata

SEQ ID NO: 279309 - DNA, 529 bp, Homo sapiens
attattcatcttttcagggattcaacttcttggttcaatcttgggaggttgtatatgtccaggaaactatccatttattctgagttttctggtatgtgtgcatagagatattcatagtagtctgtgagggatttttttatttttgtgaggtcagtagtaatatcccctttatcatttctgattgtgtttatttggatcttctctctttttgcctttattaatcaagctagtggtctatatatcttattaatttttcaaaaactcactcttggacttgttgaggagtttgttatgtattgtttttcayatctcaatttccttcacttcagttccaattttggttatgtcttgtcttctgctagctttgggattggtttgttcttgtttctctcattcctctagtagtgatgttaagttgttaatttgagatatatctaaatttttgacatggtatttagtaccataaccctcttaatactgccttagctctgtccaagagattctggtatgttttatttttgttctcata

SEQ ID NO: 279310 - DNA, 550 bp, Homo sapiens
atatcaaatcaataataaaataacaaataaaaatacatttcaacagatgttagagtaaaatatattgaatgaatttgttagtggaatggattctaagtaaattaagtaactatataaataaataagtatatttcaaactgagtattttgtaaagtaaaacaaataaaaagaattataaaaccaaatacattaaataaaacccctgcactgttacaattgactttgaaatatggaaaatataacttaggattttattaaacataaatattytcattgctttagtaaaattgcctggaacttttatcatgcctcccctgcctctgctaatagcaaagaatatccctggcaaacaaagtgtcttctctaattctgctctaactctattttggaggccaggaaggtatatggcaagcctaggacatatttttatattagcaaaccagaaagctgttttagattaaagcagttatgtaaaaaatatatttgaataacgaggaatgatttcccacgttcaaggtgtgagaattgagaattaaaaataataataaat

SEQ ID NO: 279311 - DNA, 546 bp, Homo sapiens
ccccttccacctatgagcctgcaaaatcaacattagttaccttctaaatacaatgagggtacaggctttgagtaaatacacccattccaaatggaagaaattggccaaaaagaaggggtgacaaaccccatgcaagtccaaaatctgaagggcaatcactaaaccttaaagttccaaaatgatctcctttgactccatgtctcacatccaggtcatgctgatggaagaggtgggctcccacagctttgggaagctctgcttctgtgactttgcagggtacagttcctcttctggctgctttcacggctgacattgagtgtctgtggtttttccaggcacatagtgcaagctgtaggttgatctaccattctggggtctggaggacaatggccttcttctcacagctccacyaggcagtgccacagtgggctctgaccccacatttcccttctaaattgcccttgcaggggttctccttgaagactctgcccccgcaacaaacttctgtgtggacatccaggtatttccatacatcctttgaaatat

SEQ ID NO: 279312 - DNA, 546 bp, Homo sapiens
ccccttccacctatgagcctgcaaaatcaacattagttaccttctaaatacaatgagggtacaggctttgagtaaatacacccattccaaatggaagaaattggccaaaaagaaggggtgacaaaccccatgcaagtccaaaatctgaagggcaatcactaaaccttaaagttccaaaatgatctcctttgactccatgtctcacatccaggtcatgctgatggaagaggtgggctcccacagctttgggaagctctgcttctgtgactttgcagggtacagttcctcttctggctgctttcacggctgacattgagtgtctgtggtttttccaggcacatagtgcaagctgtaggttgatctaccattctggggtctggaggacaatggccttcttctcacagctccactaggcagtgccacagtgggctctgaccccacatttcccttctaaattgcccttgcaggggttctccttgaagactctgcccccrcaacaaacttctgtgtggacatccaggtatttccatacatcctttgaaatat

SEQ ID NO: 279313 - DNA, 575 bp, Homo sapiens
gtaaaatggttcatcagtctttcagagggaaagatattcaaagtatttgtgaatgtcagaaaacattgtaattcaacacaaggaaagagttaagtcttaagagaaatgttgtctcttttatcatattagttaagaaagagaccacagattcaaataccagcagatgcgttaatgtagtaagaaaatatgactttctctctgatgacttccattttctgtgtgaagtaagaaatgaagtcatccaataagaagggttggaaagttgagtggtgggatgttttcaagaacatagaaaaggttaaagcaactaccatgaagatgagaaagtatagtaataaagaactcataagaattatcttacggtgtaaagcaatattaagggaacaattgaggttcatggaggtatttttgtacaactgtccaattctatgatgttctaaattggtatacagaaacttaaatttgagtatgtagaaaggagtttgttggcttcatccaagggttttaccagttagatacattggaaagaaaakggaaaatggtatatgaggatattggcaagttatatgtcacag

SEQ ID NO: 279314 - DNA, 534 bp, Homo sapiens
tccggctctgcaaggagaatgcttttgtctgtaattttctcttttcctcatacaactagctaatttctactttcccttcagaactaagattacaaattactctcctcagaagccagttgtatgcctcccattctcatatacatgttttatcccaagatcagtcagtttttcctttgttctcatcactaaagagtctggaaaagctaaatatccacttttccagcttgcctatagctaagggttctttgtgacaytcatgagtaaagtaaaggaatgaattcgtggggtggcaagggaagttttgtttttctatgtattttcattctttctttatttgtcctccttggaagaggatgagttgctcagagtgtcagtactcttgctacaataaaggaaagtccaaaaaatgctaggtgttctttccaatccaaacattattgagtcactaaacctacattaacattgacccatagtctgaattttttttatgtgagaaaaaagattgctgttatcacagtagtcttggtttgctat

SEQ ID NO: 279315 - DNA, 549 bp, Homo sapiens
atcacaagtaagattttaatacgctgtcatagtgtttttcaaaactgctgactgtaaatacgtgtcctctgaatttatattaggcaattatccatggaagtcaaatatcctcaagtaactgggtaaaattgccttttgattaagcattttctaaaaaaggcagaacagcagcagtctaaataatttttaaattataattatattctgtaccttgatttttttcattgcattactattaaatggctcttttttctgacataggtttaaagcattagtattttgaacctcactctttgagcaagaggatctggatttaagtckcaagcctccagcaccaattgctgttaaattattgaaaagacacaaatctatatattttttataccttttatatgttaaacactgtcctccgtcattgtcatgtcctattttatttttatagtttattatacatttattataattttttacaattagacaaaggtacatgggtaggtaattggcaaaactagtattcaaactcatagatttaatcaccaaaatgtacat

SEQ ID NO: 279316 - DNA, 549 bp, Homo sapiens
atcacaagtaagattttaatacgctgtcatagtgtttttcaaaactgctgactgtaaatacgtgtcctctgaatttatattaggcaattatccatggaagtcaaatatcctcaagtaactgggtaaaattgccttttgattaagcattttctaaaaaaggcagaacagcagcagtctaaataatttttaaattataattatattctgtaccttgatttttttcattgcattactattaaatggctcttttttctgacataggtttaaagcattagtattttgaacctcactctttgagcaagaggatctggatttaagtcgcaagcctccagcaycaattgctgttaaattattgaaaagacacaaatctatatattttttataccttttatatgttaaacactgtcctccgtcattgtcatgtcctattttatttttatagtttattatacatttattataattttttacaattagacaaaggtacatgggtaggtaattggcaaaactagtattcaaactcatagatttaatcaccaaaatgtacat

SEQ ID NO: 279317 - DNA, 520 bp, Homo sapiens
aagttgaagtcaaatgcttatttaccattctgaaaatccaagggcctttaggaattgtactaaatctactctgtctgtgctctataaatgcarcaacaaagcctggatgacagcacatctgtttacagcatggtttactgaatatcttaagcccactgttgatacctactgctcagaaaaaaatattcctttcaaaatattcctgcccattgacaatgcaccttgccacccaagagctctgatggagatgtacaaggagattaatgttgttttcatgcctgctaacacaacatccattctgcagcccatggatcaaggagtaattttggctttcacatcttattatttaagaaatacattttgtaaggctatagctgccgtagatagtgattcctctgatggatctggaaaaagtaaattgaaaaccttgtggaaaggatttgccattctagatgccattaagaacattcatgattcttggggggaagtcaaagtatcaacattaagaggagtttggaag

SEQ ID NO: 279318 - DNA, 580 bp, Homo sapiens
actccttgattcttctgctaaattcaccttgtgggcattagttcttttgctcattatggttcctgtccagaaagatataagccctggaatagagcaactgaaactcccatgggtcagttctatctacgacaactgctgttctgtaacactcccattggcttcctgttagacaaagaggacacttttctttaccctttgttttcgtttttgcaagcagggagaacttagttcttgtaggagactttcctgacccaactgagctgaagagggtaaaagggagaggctgtgctcactgtggcctcacagatctacctgagcccacagcccaggtgttggttgagcagggccaggatgaaggtaaggtcagtgaggcgttcaccctgggcacaaamtgtaagtaggtgccaaaaaactcagggatgcgacattttttaaaataaaaattaatgcagaaaagaaatgtggtgaacaaaatatcaaaatcttaagtaaagacaggatccgaccctgcacttgcctctcaactcagcctcactgacctcaccctgatcctggccctgggattgtccgcttgtgccaa

SEQ ID NO: 279319 - DNA, 1123 bp, Homo sapiens
ggaagtccaaaccaggaggatgccacataaagtatacacatttgctctgaagtttgagtatgtgtctctttcatctttttttccagtgcctgtgacccaggtgctaacccagacactaggatgtcttggtgaagatgacggtccctgtgcttgcaaaaagtgtacatcagtacatgtctactaaagataaatgagaaaacatggtttgaaagtctatttcatcatgctgaaggagccttgtacgttcaccattsacaccatcctgccttgccatattattttaaaataccaagatggttcgtcgtcctcccaagaggtgacttaacagtgggggatatggaagcacatacaactccactctcagaatggaagtcaagtaaagcaatgcctgtttttcagcaggccacttagaagtcagacgttgaggattattaagttaaggcctcagtagaacaagatttccaaatcccaagtactggagagatgaaattcactttattgctctgaccattaaaggaagaagaatggtaggaaaggatgctggtgtttggaggaactctawggaagtccaaaccaggaggatgccacataaagtatacacatttgctctgaagtttgagtatgtgtctctttcatctttttttccagtgcctgtgacccaggtgctaacccagacactaggatgtcttggtgaagatgacggtccctgtgcttgcaaaaagtgtacatcagtacatgtctactaaagataaatgagaaaacatggtttgaaagtctatttcatcatgctgaaggagccttgtacgttcaccattgacaccatcctgccttgccatattattttaaaataccaagatggttcgtcgtcctcccaagaggtgacttaacagtgggggatatggaagcacatacaactccactctcagaatggaagtcaagtaaagcaatgcctgtttttcagcaggccacttagaagtcagacgttgaggattattaagttaaggcctcagtagaacaagatttccaaatcccaagtactggagagatgaaattcactttattgctctgaccattaaaggaagaagaatggwaggaaaggatgctggtgtttggaggaactcta

SEQ ID NO: 279320 - DNA, 1293 bp, Homo sapiens
tgtatttgcttattttatgcactcttaataaattctgaccttttcccatgacattkccttggaaagtaatagttgtctaaagtttatgtgtaaagtatttggtacttgcaataaatattgctataaaagctctcttctactctagattatcttaccttactcttccacttaagactataattgataatttttctccaaataacgcacactcatttttgcaggagacctggaagctaactgataaatagatttaaacacacacatactaaatactagatacaattttggtttagccaacaaagcacctttttgacaggtttttttcttttaaatagaggtttgtcttcacttgtcaacatcagactataatatcaccatttcaaatcgaaataccacaaaatcattttctacatagccacattaaaaaataaatccaagttactcaacttatggccctattccattttctagaaagtttttcagttgatcttttggagtaacaaagaaatatttttccaacatagacaatcttgccctattttcttcattataccatcatgaccaccagtaaacccagaaatagcccagaaatatttgatagaattattcatatagtgatttctcaacagcgatggagttttcacaawtgtatttgcttattttatgcactcttaataaattctgaccttttcccatgacatttccttggaaagtaatagttgtctaaagtttatgtgtaaagtatttggtacttgcaataaatattgctataaaagctctcttctactctagattatcttaccttactcttccacttaagactataattgataatttttctccaaataacgcacactcatttttgcaggagacctggaagctaactgataaatagwtttaaacacacacatactaaatactagatacaattttggtttagccaacaaagcacctttttgacaggtttttttcttttaaatagaggtttgtcttcacttgtcaacatcagactataatatcaccatttcaaatcgaaataccacaaaatcattttctacatagccacattaaaaaataaatccaagttactcaacttatggccctattccattttctagaaagtttttcagttgatcttttggagtaacaaagaaatatttttccaacatagacaatcttgccctattttcttcattataccatcatgaccaccagtaaacccagaaatagcccagaaatatttgatagaattattcatatagtgatttctcaacagcgatggagttttcacaa

SEQ ID NO: 279321 - DNA, 646 bp, Homo sapiens
tgtatttgcttattttatgcactcttaataaattctgaccttttcccatgacatttccttggaaagtaatagttgtctaaagtttatgtgtaaagtatttggtacttgcaataaatattgctataaaagctctcttctactctagattatcttaccttactcttccacttaagactataattgataatttttctccaaataacgcacactcatttttgcaggagacctggaagctaactgataaatagatttaaacacacacatactaaatactagatacaattttggtttagccaacaaarcacctttttgacaggtttttttcttttaaatagaggtttgtcttcacttgtcaacatcagactataatatcaccatttcaaatcgaaataccacaaaatcattttctacatagccacattaaaaaataaatccaagttactcaacttatggccctattccattttctagaaagtttttcagttgatcttttggagtaacaaagaaatatttttccaacatagacaatcttgccctattttcttcattataccatcatgaccaccagtaaacccagaaatagcccagaaatatttgatagaattattcatatagtgatttctcaacagcgatggagttttcacaa

SEQ ID NO: 279322 - DNA, 644 bp, Homo sapiens
agtttaaattctcctgtgactgaagaccagcaagaatacagaactcatcaaccctatataacagtatttaatcaatatttatagtacactttacccagcaagaacagagtacacatttctttcaggtgcccacagaacatataccaagataaaccatattcgagkccataaaacaaacctcaaactatataaaataactgaaatcatatagcgtgtgttctctgaccacacagtggaatcaaattagaaatcagtaagataaaaatgacagaaaaatatctaattacttggaaaataaacaacacacttctaaataatccaggggccaaagagaaagtctcaaggaaaataaaaatacagataaactgaatgaaaatataaaatacaacatattaaactttgtaagactcagctaagcagtgctgagaaggtaattagtcgcactaaaaacacagcttagaaaaactcccaaatccctaatccaaattcttattgcaagaactataaaagaaaaaaacaaaaaaaactaaagcaaacagaaagcaaaaaacaagaaaagtacagaaatcaataaaattgaaagaaaaaagaacaaataatgaaagagccagttctttgggaaaataaaattgaaaaagactgac

SEQ ID NO: 279323 - DNA, 644 bp, Homo sapiens
agtttaaattctcctgtgactgaagaccagcaagaatacagaactcatcaaccctatataacagtatttaatcaatatttatagtacactttacccagcaagaacagagtacacatttctttcaggtgcccacagaacatataccaagataaaccatattcgaggccataaaacaamcctcaaactatataaaataactgaaatcatatagcgtgtgttctctgaccacacagtggaatcaaattagaaatcagtaagataaaaatgacagaaaaatatctaattacttggaaaataaacaacacacttctaaataatccaggggccaaagagaaagtctcaaggaaaataaaaatacagataaactgaatgaaaatataaaatacaacatattaaactttgtaagactcagctaagcagtgctgagaaggtaattagtcgcactaaaaacacagcttagaaaaactcccaaatccctaatccaaattcttattgcaagaactataaaagaaaaaaacaaaaaaaactaaagcaaacagaaagcaaaaaacaagaaaagtacagaaatcaataaaattgaaagaaaaaagaacaaataatgaaagagccagttctttgggaaaataaaattgaaaaagactgac

SEQ ID NO: 279324 - DNA, 644 bp, Homo sapiens
agtttaaattctcctgtgactgaagaccagcaagaatacagaactcatcaaccctatataacagtatttaatcaatatttatagtacactttacccagcaagaacagagtacacatttctttcaggtgcccacagaacatataccaagataaaccatattcgaggccataaaacaaacctcaaactatataaaataactgaaatcatatagcgtgtgttctctgaccacacagtggaatcaaattagaaatcagtaagataaaaatgacagaaaaatatctaattacttggaaaataaacaacacacttctaaataatccaggggccaaagagaaagtctcaaggaaaataaaaatacagataaactgaatgaaaatataaaatacaacatattaaactttgtaagactcagctaagcagtgctgagaaggtaattagtcgcactaaaaacacagcttagaaaaactcccaaatccctaatccaaattcttattgcaagaactataaaagaaaaaaacaaaaaaaactaaagcaaacagaaagcaaaaaacargaaaagtacagaaatcaataaaattgaaagaaaaaagaacaaataatgaaagagccagttctttgggaaaataaaattgaaaaagactgac

SEQ ID NO: 279325 - DNA, 596 bp, Homo sapiens
gatcaattggatgtccatagcaaatagtaagtttaacaccttatataaaaattacctcaatgtggattacaaatataaatgtaaaatgtaaagcaattagactcttaggaaaaaaataggggaaaggcttttgagtctagggctagacagagtttctatgcttgacaccaaaattacaaaccagaaaaagataagttaataaattggatttcataaaaattaaaaactttggctgcaaaagaccgcattaagagaataaaagtgtatgctgcagactgggaaaacacattcgcaagccaaatatctgacaaaagacaagtatctagaatataccatgaactctccagactcaacaacaaaaggcaaacaatccaattagaaaataggcaacaagcagaaaagtcaggtgacctaaaggacatccagacggcaaataagcccacgaatatttactctacatcaayagacatcagaggaatgcaaattaaaaccacagagaaataccgcacatgatatttcagccaatcagaatagctgaaataaaaataaataatgacaacatcacatgctggctagaacgtggagaaaattggttg

SEQ ID NO: 279326 - DNA, 641 bp, Homo sapiens
ggcactttatttaaagttatgttttcaaatgtttttctgactccttgctgtgacacctcattggcccagtagtaaagatattccaagtagctactgtacttgaagcctttcattgctattgttaagacatgaaggttacatgtctcgttttcatatcagacartatcaagagtgaatgggatacatctctgatgcctgttttcctcctctccaaagcacccaccacatctatgtgaatctggcttcacttaaaaggaaaacaaacccatgttcacttgtactgtgtccactgaaccacacattctaaacacaagacaactaggagactatcaacttgatacaaggaaaatcaggacagcttgtaccaagacaactacttcacatctaacgagtcccaacacctttctctatcatctagtacctactagggattaaaagtaattctaggtagcttgttatcttccttgtaagctgtagttcaataggaatacctaaatgatttgctaatgcaatatggaaatggtttttcacattaatttctggagtaaaaaggctgcatgcctggcatatgtgtatctctctctacatgtcagagcaggtatacacacagaagtatgttaacatgtattttcctacaataa

SEQ ID NO: 279327 - DNA, 641 bp, Homo sapiens
ggcactttatttaaagttatgttttcaaatgtttttctgactccttgctgtgacacctcattggcccagtagtaaagatattccaagtagctactgtacttgaagcctttcattgctattgttaagacatgaaggttacatgtctcgttttcatatcagacaatatcaagagtgaatgkgatacatctctgatgcctgttttcctcctctccaaagcacccaccacatctatgtgaatctggcttcacttaaaaggaaaacaaacccatgttcacttgtactgtgtccactgaaccacacattctaaacacaagacaactaggagactatcaacttgatacaaggaaaatcaggacagcttgtaccaagacaactacttcacatctaacgagtcccaacacctttctctatcatctagtacctactagggattaaaagtaattctaggtagcttgttatcttccttgtaagctgtagttcaataggaatacctaaatgatttgctaatgcaatatggaaatggtttttcacattaatttctggagtaaaaaggctgcatgcctggcatatgtgtatctctctctacatgtcagagcaggtatacacacagaagtatgttaacatgtattttcctacaataa

SEQ ID NO: 279328 - DNA, 537 bp, Homo sapiens
cctcctttcacacaatgttttgtgaacagtggctcagtttggttctttggcaactcctcctgtcaattgggaaacagattagcttatataatttgtagaattcaagttggatcagaaaattgcaaaagcgtgagactcattacagaaggatttggtccatactgatttaggaggcaaagaaagtcaaagtttagagactattccagagagagaaacgaatgcacagaggagggcccttcatgctgggtaccccaagagatggaccccaataccccaaaagaacaggagctccatgagggcagaagtgggtctcctgtaacccacagccgtatgctgagattctagaagtgctccacccgtatttgttgaaatataccggcaatcccctcccatcatacccaggatctcattggctcgggaagaaatccacgcccattcagttaagttctatgaaatgagggaatcctmtcctccatttttggccaagacttggggattcaatcagtggtcacccatcagggaatgaaaaagacaaga

SEQ ID NO: 279329 - DNA, 537 bp, Homo sapiens
cctcctttcacacaatgttttgtgaacagtggctcagtttggttctttggcaactcctcctgtcaattgggaaacagattagcttatataatttgtagaattcaagttggatcagaaaattgcaaaagcgtgagactcattacagaaggatttggtccatactgatttaggaggcaaagaaagtcaaagtttagagactattccagagagagaaacgaatgcacagaggagggcccttcatgctgggtaccccaagagatggaccccaataccccaaaagaacaggagctccatgagggcagaagtgggtctcctgtaacccacagccgtatgctgagattctagaagtgctccacccgtatttgttgaaatataccggcaatcccctcccatcatacccaggatctcattggctcgggaagaaatccacgcccattcagttaagttctatgaaatgagggaatcctctcctccatttttggccaagacttsgggattcaatcagtggtcacccatcagggaatgaaaaagacaaga

SEQ ID NO: 279330 - DNA, 1148 bp, Homo sapiens
cctcctttcacacaatgttttgtgaacagtggctcagtttggttctttggcaactcctcctgtcaattgggaaacagattagcttatataatttgtagaattcaagttggatcagaaaattgcaaaagcgtgagactcattacagaaggatttggtccatactgatttaggaggcaaagaaagtcaaagtttagagactattccagagagagaaacgaatgcacagaggagggcccttcatgctgggtaccccaagagatggaccccaataccccaaaagaacaggagctccatgagggcagaagtgggtctcctgtaacccacagccgtatgctgagattctagaagtgctccacccgtatttgttgaaatataccggcaatcccctcccatcatacccaggatctcattggctcgggaagaaatccacgcccattcagttaagttctatgaaatgagggaatcctctcctccatttttggccaagacttggggattsaatcagtggtcacccatcagggaatgaaaaagacaagawaaattgcaaataacttttgcataaatcagcataatcttgacatgaaagaaatgcagtcattgggcctaaatctaacaaaaataaatgttaaggcatagttgcaaatgaaaattaaaaattatwagatgaaagacttaaaaagaaaatcttacccatatattcaccaaattcaaaattttatcagcaattcattaggaaattctcctataaaatgactttttatctctaccactccactgaacatatatcatcaatgataccctagttttcaaataaaattaactgttactggacttatttataacatatctcaatattggttatgggaatgttttttaaaaagtttccctttgcttctgagatatcattatccctagttcttctcctatccttctaacaattattttgagttgcttcacaattttctttccattgtcacctggaatcacatggttaataaatgaaagaaggaggctacaacttaatattataaattccaaacccataattttccccctggtctaaattggcatgataaacagctattgtttctatttctttctctgtgtcatagttgtcatcacattaatgcaagccatttattcattta

SEQ ID NO: 279331 - DNA, 610 bp, Homo sapiens
aaattgcaaataacttttgcataaatcagcataatcttgacatgaaagaaatgcagtcattgggcctaaatctaacaaaaataaatgttaaggcatagttgcaaatgaaaattaaaaattattagatgaargacttaaaaagaaaatcttacccatatattcaccaaattcaaaattttatcagcaattcattaggaaattctcctataaaatgactttttatctctaccactccactgaacatatatcatcaatgataccctagttttcaaataaaattaactgttactggacttatttataacatatctcaatattggttatgggaatgttttttaaaaagtttccctttgcttctgagatatcattatccctagttcttctcctatccttctaacaattattttgagttgcttcacaattttctttccattgtcacctggaatcacatggttaataaatgaaagaaggaggctacaacttaatattataaattccaaacccataattttccccctggtctaaattggcatgataaacagctattgtttctatttctttctctgtgtcatagttgtcatcacattaatgcaagccatttattcattta

SEQ ID NO: 279332 - DNA, 596 bp, Homo sapiens
catcccagacagcttgtctatagcccttgactcagttttttggtatttcttttagtagaatattccagagcatgtggtcttttacctttccttggcctccagactgtgctactcctggatgatcacttcctctaaactcatcttcatcatgatgttgaatatcattacttctttgcaacccaaagcaaggaattttgaaacgattatctctcacttgacaaagtaaatctatttatatagccactggcttggcactacaaaaaaatcaagttcttaataaatgctgtcaatgattgtattttggggggaaatattaaccgcttttcaatttatgcataacctttccaggcccaattgtgtttcacagttataacctgtcatctctctttagtctcctttcccaaatccagcttgttctgtatatagtagctccactgaggagcrgggaggaaagacggatgagtggagtacacatggtggatgctgccatttaggcaaaggcaggcatttaagtaaagacaggtaagaatgggaactcgtgccccagtgaggaaattaccatactccaattaaagggaaggcagagcataaatagt

SEQ ID NO: 279333 - DNA, 601 bp, Homo sapiens
atcatcactgcaaccgaggcccaacacatgattttttgctaacttggcctgatgcattaacctggactcgtctaatgaacaagtgggagctggaaattaggggacagaaatggggagattcgggaagctggtctgtcctatgtctcgggaactatcaggcastgtgacaatgtgaattattgtcatcacctatgtgcggcttttaaaaggcatttttctcagagaatattcttgatggaatcactggtaaacaagagattttcctctcctacctgattctgcttcaaaattaaaccgaggtctgtaatggaatcatcacataatccagcaacactacttgcatattcaaaaaaaaaaaaaaagaaaaaaaaaggaaatcaggatgtcaaagaggttatctgtgttctcatgttcattgctgtgtaattcaaaacagtggaggtacagaaaaaatcctactatgtccactgattgatggataaagaaaatgtggtgtatatatagcccatggaggattactcttcactcttcaaaagggagatcctgccatagcaacaatatggatgaacctcaaggtcattatactgtgtgaaccaagtca

SEQ ID NO: 279334 - DNA, 612 bp, Homo sapiens
agttttgtgttactaatggagaatcctaagcctacaaatagtgactttgagaagagatgtaaattcaggggtraaaattaaaggcactaatacagaaggcagcttcgaaagataggatggtgtaatgagatcccaaaagagaatcaactacacaacagttaacaagcttaataaggagtaataatatatgtttacagtttccacacatgaattaagatcctggcctgcacacttcaccagcctagacatggggggtatacacttaattttcctaagagttaagaagcttaatatatctaaaatagcagtgatcaacagtttaaaacactgtttttaactgtgttaggatattggaaaagaggaactcattctctttaaagtgcagctttggtgtaaatttcttgctaatttggacgtttctttctagattaataatgtagaaatcttttgatccagcaaccttttgaaatatgccctacctatatgtgcatgtgcacctatacatattgtatatatttataagatgctcacagcattggtactataaccagaaaaatggaatcagctggaaagtctattaactgggaagcatgtaaataaatcattacatat

SEQ ID NO: 279335 - DNA, 612 bp, Homo sapiens
agttttgtgttactaatggagaatcctaagcctacaaatagtgactttgagaagagatgtaaattcaggggtgaaaattaaaggcactaatacagaaggcagcttcgaaagataggatggtgtaatgagatcccaaaagagaatmaactacacaacagttaacaagcttaataaggagtaataatatatgtttacagtttccacacatgaattaagatcctggcctgcacacttcaccagcctagacatggggggtatacacttaattttcctaagagttaagaagcttaatatatctaaaatagcagtgatcaacagtttaaaacactgtttttaactgtgttaggatattggaaaagaggaactcattctctttaaagtgcagctttggtgtaaatttcttgctaatttggacgtttctttctagattaataatgtagaaatcttttgatccagcaaccttttgaaatatgccctacctatatgtgcatgtgcacctatacatattgtatatatttataagatgctcacagcattggtactataaccagaaaaatggaatcagctggaaagtctattaactgggaagcatgtaaataaatcattacatat

SEQ ID NO: 279336 - DNA, 599 bp, Homo sapiens
accaaaatcagagctgaactgaatgaaattgaactgctaaaatccatataagagatcaataaaaccaaaagttgatgatttgaaggattaaataagattgatagactgtgagatagattaattttaagaagacccaaataaagacacttagaaatgacaaagctgacattacaacctatccaacagaaatacaaaaaatcctgagagtattatgagcacctctgtatacacaaactagaaaacctaggagactagataaattcctagaaatacacaacatctcatattaagccaggaagaaattaaaatcctgaacagaccaataagttccaaaattgaatcggtaataaaaagcctaccaaccaaaagtcctggaccaaatgtattcaaagccgaattttaccagatgtacaaaaaagagctagtacctatcttactaaaatgattcccaaaaatttgagaaagagggacttctctctaagtcactttatgaaaccagcatcattctgatattaaaaccctggtagagacacaasagaaaaatgaatcttctggcaaatattcctgatgaacgtagaaaataccagcaaactgaatcc

SEQ ID NO: 279337 - DNA, 564 bp, Homo sapiens
cctctgataaattcagcacacattcatgttaaaaaccctcaacaaattaggcattgaaggaatatatctcaaaaaaatgatcatctatgaacaccatactgaatgagaaaaagctagaagcactcsccttgagaacaggaatgagacaaggatgcgcactttgaccactattcaacatagtactggaagttctagccagagcaatcagccaagaaaaggtgtctcacttcactgacaatgtaactctatacctagaacaccccataaagcctgccagaaggcttctagaactgataaacaacttcagtaatgtttcaggatacaaaataatgtacgaaaattagtagcatttctataccctatcgaagctcaaagccgaattaagaacacaatcctatttaaaaatagcacaaagaataaaatacctagggatataacttaccaacaatgaaaaatatttccacagcaagaattacaaaacactgctgaaagaaatcagagatgacagaaacagatgaaaaccattcagtgctcatggtcaggaagactcaatattgtgaaaat

SEQ ID NO: 279338 - DNA, 1194 bp, Homo sapiens
cctctgataaattcagcacacattcatgttaaaaaccctcaacaaattaggcattgaaggaatatatctcaaaaaaatgatcatctatgaacaccatactgaatgagaaaaagctagaagcactccccttgagaacaggaatgagacaaggatgcgcactttgaccactattcaacatagtactggaagttctagccagagcaatcagccaagaaaaggtgtctcacttcactgacaatgtaactctatacctagaacaccccataaagcctgccagaaggcttctagaactgataaacaacttcagtaatgtttcaggatacaaaataatgtacgaaaattagtagmatttctataccctatcgaagctcaaagccgaattaagaacacaatcctatttaaaaatagcacaaagaataaaatacctagggatataacttaccaacaatgaaaaatatttccacagcaagaattacaaaacactgctgaaagaaatcagagatgacagaaacagatgaaaaccattcagtgctcatggtcaggaagactcaatattgtgaaaatwctatgcagccataaaacagaaaaaaaaaagaatcacgtcttttgcagctacatggatgcagttgaagaccattatcctaagtgaagcaatgcagagacagaaaaccaaatgctgcatgttctcataaacgggagtgaaacactgaagacagtgacacaaagtagggaacaacaggtgccgggtactacctgagtggggagggtaggagaggctcatggattggaaggctatctgtcaggtactgtgctcactacctgggcgacaggctcattcctaaatcaagcctcaacaacacacagtttccccatgaacaaacctgtacgtggataccctgaacctaaaaacattttcaaaaaagaaaaaaataataaaactttaaagatgaaatattttgatwtcaaaagaaaattactctttaagtagatttttagtgatgtttccttggtggaatctagaaaagtcaaaagatcaaaacctctggagggtaatgccaagagtaatcaggacttgactataaattcggtcaccggagtcagctattcaaatctggaagctcagcctaaagcacgtggcagaaagtctcaggctggatcagaggctggagtttgccttaggttttaaccacagga

SEQ ID NO: 279339 - DNA, 461 bp, Homo sapiens
ccttgtcctcagccacaagcaccctccattacaagagagttgaatgttacctaactaaactcactttcaaattagtatttgaggaaaagattgaggtccagccaggttttacaatccagccagaatgacatgttgagagaggtggagatggcctcaggccctcagtctcaatccccttggatttctacagcgggacattgtatccagagcttaccactgacttgtctcctttgaattttgataagaattctgktaatttatttttatatctaaaatataattataaataatacgacatttctgactagcactcatacgaggcaaattagaaaaaaaattcaaaattgcaatgaagatttcacttaccatttttttcttttaaatttgattcctgctgaagattgaaatgaaatcagtcaagaacaataacgaaaagcacgctcaagcccaaagactgaaag

SEQ ID NO: 279340 - DNA, 594 bp, Homo sapiens
atgaaaatacttattataatttttaaaacacttctcttggcagtatttaaaagtaaataagccttaaaaattagttattgagttgaccagggccatatgctacaggagatgtasgagaaaaacaaattgaagtggtagtgtctcatcagaactgttccacatatttctaatacggaacgtgtaggatgagaaagatgagccccagtgcacacatcaagatgatatttccttatggacctagtcgaagctcccctggtgaaaagaaaaagctgcaaaggtcagatcaccagacacagactttgtctcctaggagatgaccacatgctctagtgcacatagtctgctttttgggttagtttctattagataaaaatatactttattccagctctattgatatataattgacaagtaacattgtatataacttgtacaatttgatatttgatatgcattgtgaatcatgtacgcatgtacatcaccatgatcaagctaagtaacatattcatcaccacacatagtgaccatttttaataatttttttatggttacaacacttaaggtcagctctcttagcaagagaatattaaattc

SEQ ID NO: 279341 - DNA, 594 bp, Homo sapiens
atgaaaatacttattataatttttaaaacacttctcttggcagtatttaaaagtaaataagccttaaaaattagttattgagttgaccagggccatatgctacaggagatgtacgagaaaaacaaattgaagtggtagtgtctcatcagaactgttccacatatttctaatacggaacgtgtaggatgagaaagatgagccccagtgcacacatcaagatgatatttccttatggacctagtcgaagctcccctggtgaaaagaaaaagctgcaaaggtcagatcaccagacacagactttgtctcctaggagatgaccacatgctctagtgcacatagtctgctttttgggttagtttctattagataaaaatatactttattccagctctattgatatataattgacaagtaacattgtatataacttgtacaatttgatatttgatatgcattgtgaatcatgtacgcatgtacatcaccatgatcaagctaagtaacatattcatcaccacacatagtgaccatttttaataatttttttatggttasaacacttaaggtcagctctcttagcaagagaatattaaattc

SEQ ID NO: 279342 - DNA, 580 bp, Homo sapiens
ctgagttacgggctttaactcctaagtctaaaaaggacaccaagtcctgctaaatcttaaacactgacagcaattaaagcctcatcttcaggccctgtagaagatgccaatcaaaataaactgcatttcctgagacatarggcaaaagaattaaagctattaagttcctcaagggcccagtgactatcatggaagtggtggacatgtaagattacaagggccgattttgaaaaataaaatatattcagtttctctataaattaatcattagtgtcaaaggcacactgatgcaaaaccagtatatggccccctgtgtcagattaacaagattttcttgaagcattaaccaactccttaataaaggttataaaaggcctatggaagctatattttataatcaagattaaattttatagattgtttacaaaattttggaaaagaaaagtaattggcttcttgctatttttattagggcttgtttagaaaagtaagtctcctatctcaaagaatgaaggtcttcatctttttttttttttttttttaatcctcgagttatcactttggttaaataaatgacttt

SEQ ID NO: 279343 - DNA, 1135 bp, Homo sapiens
cttgtctttcttgaccttgacagttttgaagatttctggtcacctattttttaaaaagtcccacatgttgaggctttctgatattttcccrtaatttggttgaatttatgaacttgggggcagaatactacagaataaatcagccatttccagtgtctcaaattacaggggctgatatatctgttatttcacttatgatgttaacattaattacttggtaaggtggtgtaggctgaatatctccactataaaattccttttttttcctctgcagttaatggatattttgaagaagatactttgctactttcttaatccatctgagctgtgattacaaaatatcataaactggaaggcttataaataataggaatttatcacaattccaggggctgggaagtccaagacccaagcattgcggattcagcaactagagaaagggctgactctctgtttcatagattatgccttctatgtgtcctcacatggcagaaggggaaaaagctcccttgacgtcttacaagggcagtaatcccattcatgagagcagagctctcataacctcatwcttgtctttcttgaccttgacagttttgaagatttctggtcacctattttttaaaaagtcccacatgttgaggctttctgatattttcccataatttggttgaatttatgaacttgggggcagaatactacagaataaawcagccatttccagtgtctcaaattacaggggctgatatatctgttatttcacttatgatgttaacattaattacttggtaaggtggtgtaggctgaatatctccactataaaattccttttttttcctctgcagttaatggatattttgaagaagatactttgctactttcttaatccatctgagctgtgattacaaaatatcataaactggaaggcttataaataataggaatttatcacaattccaggggctgggaagtccaagacccaagcattgcggattcagcaactagagaaagggctgactctctgtttcatagattatgccttctatgtgtcctcacatggcagaaggggaaaaagctcccttgacgtcttacaagggcagtaatcccattcatgagagcagagctctcataacctcat

SEQ ID NO: 279344 - DNA, 567 bp, Homo sapiens
cttgtctttcttgaccttgacagttttgaagatttctggtcacctattttttaaaaagtcccacatgttgaggctttctgatattttcccataatttggttgaatttatgaacttgggggcagaatactacagaataaatcagccatttccagtgtctcaaattacaggggctgatatatctgttatttcacttatgatgttaacattaattacttggtaaggtggtgtaggctgaatatctccactataaaattccttttttttcctctgcagttaatggatattttgaagaagatactttgctactttcttaatccatctgagctgtgattacaaaatatcataaactggaaggcttataaataataggaatttatcacaattccaggggctgggaagtccaagacccaagsattgcggattcagcaactagagaaagggctgactctctgtttcatagattatgccttctatgtgtcctcacatggcagaaggggaaaaagctcccttgacgtcttacaagggcagtaatcccattcatgagagcagagctctcataacctcat

SEQ ID NO: 279345 - DNA, 543 bp, Homo sapiens
cagagtgctagacagagaataatttttgagatttttacaattgatatcatgctcttctgttttaagccaacttgcgtgcaaacgagtgagctaatttctcatgattatgttccacctacattcattaaatgtcaaagttcaaaaacagcaatttataacaatttaatagttactttgcatggattatataacagggacaatgtattgacaaatgttaatagaaaagtaatkttaaggaaatctcatcagtacataacacgactaattcgttggacgccgattagagtcgcaatatctagagtataagtgaataatggaaatattgaagcatgtacactccatgccacccgtaaaatttggcttctgtgttttgcatctacttcaccttcggagtctgtaattgaatgagtagtgggtgttacacttacctgtatattagagggaatacaaataaaggaattacaaatatatttaaatgttgttgacagcactacaattctatcatttgctataatcaatattatgagggccatttgttaagta

SEQ ID NO: 279346 - DNA, 543 bp, Homo sapiens
cagagtgctagacagagaataatttttgagatttttacaattgatatcatgctcttctgttttaagccaacttgcgtgcaaacgagtgagctaatttctcatgattatgttccacctacattcattaaatgtcaaagttcaaaaacagcaatttataacaatttaatagttactttgcatggattatataacagggacaatgtattgacaaatgttaatagaaaagtaattttaaggaaatctcatcagtacataacacgactaattcgttggacgccrattagagtcgcaatatctagagtataagtgaataatggaaatattgaagcatgtacactccatgccacccgtaaaatttggcttctgtgttttgcatctacttcaccttcggagtctgtaattgaatgagtagtgggtgttacacttacctgtatattagagggaatacaaataaaggaattacaaatatatttaaatgttgttgacagcactacaattctatcatttgctataatcaatattatgagggccatttgttaagta

SEQ ID NO: 279347 - DNA, 650 bp, Homo sapiens
cgtcatatgtgagaaattgatgagcctttcaaagaatgggtatgattttactggcttttcctcatgttcacgcttaagttcaatgtccttagcttaacattcaagaaactttcctctctgaatcctggccacctaactggcataatcccccttttttgtctttataccacccctggatcttgccatatttgtagttgtaacaccatcctagatgtcaacaatgtgaatttcaatcagcacatattgtagtctgcagctgaatttattagtacagaaactccttttgaaaaaagcagttttaccttgaatctaatgaagayttttgttttatacatcaggctcctgaattttcctcatgtgagtctatttctaaaagatgcatctgcttttaggaagctattaaaataagttttctaagccattaaggtgagagaaagatcccagattaaaagtgtaccaaagtagtaaatatcatcattttaagctctcatgagaagtaaaaggttggcttttttctccagacctcatctagggctctctggaccaatgtattagcaccaggttgataagcctttctttccaagtgaattcccacaccatctagtggaggtagacagacacacacataattaacttatggacagtatcag

SEQ ID NO: 279348 - DNA, 627 bp, Homo sapiens
tttcaaaatttctcaccttagctccagatgacattcagaagtatataactctgagtactgacccagtatgttaatggtggttttggaagtagattctgagcagcattgtctagtacagtttgtattcctttccaagggcaagataagaatgttaggcggtgggcatggggggatctctgagtcaaagaagattttatgatgagagagttttcttttgcttatggaaatgtttacttgggggctacatttactacatgccttgcctcatttcygttaagtccagccagataccatgaatttcacagtagttcctaatacttcatacacagtgatctgtcgtctgtaattttattccaggacaccaacaagccctggctattgcagacaggttgtggtaccagaagcatttataaacctcaaatctgattacagggccctgaaacatggaagtgtttaataaagacgtgctgattaaactgagaatcaactatgtacttcagtgttcagagaaatattccaaagaaagaaaccaaaatattacagtgtgggaaacctaataaaaaccctgtcccatgagaaattccacatgtgcagataaaaaaaatttccttttctatcagcatcacc

SEQ ID NO: 279349 - DNA, 459 bp, Homo sapiens
ttcttaaataggtgtttgatgtttattcatcagrctttcaaaatactatctgttcatgttaaacaatgatgtagtctgacaggcagtcacctaaaacgggcccttcactgccacaaataaccgacgtggccccagccttaacatttgttctgaagggcaaatgcatgcacttgctacagcactgatttcacttagtacatgtttcttttcttagttttatttttaaattcatatttaaaatagatatttggagcttagtactaccgtattagtagtcttaagaatattaatctcctttcatttttttggactgcacattactacagtgtattgtttttaaggagtaagaatgttattaattgctgatttaatgtatttatgaatcagtaacagatgcaaagacaattggcatcatcctgtaggcattatccaaagcacatgctaaaaatagtaatatag

SEQ ID NO: 279350 - DNA, 638 bp, Homo sapiens
tcatgtctggtaatttaaaattttactctcagaagacacaatcatgttaaacacataattgaatccatttacaccaagcatctattttaccacattcctgatgaatgaatgtccrcctcatttggactaatgtcagaagtaaaccaggactaaagatacagctgtctctgcccagctaaatgtaattatttaaaaacttacttctaccaacagtcccactaatgggcatctacccagaggaaaagaagtcattatacgaaaaagatatttgcacatgcgtgtttacagtggaattcacaattgcaaaatcatggaatgaacccaaatatccatcaaacaagtggataaagaaactgtgatacacacacacacacacagacacacacacacacacacacacacgaacacatgatggactgctactcagccataaaaatgcatgaattaatggcatttgcagagacctggatgacattggagactatttttctaagtgaagtaactcaggaatgaaaaacaaacatcatatgttctcactgatatgtgggaggtaagttgtgagcatacaaagggcataagaaggatacagtggattttggggactgagggggaagggtgggggggtgatggataaaaga

SEQ ID NO: 279351 - DNA, 638 bp, Homo sapiens
tcatgtctggtaatttaaaattttactctcagaagacacaatcatgttaaacacataattgaatccatttacaccaagcatctattttaccacattcctgatgaatgaatgtccacctcatttggactaatgtcagaagtaaaccaggactaaagatacagctgtctctgcccagctaaatgtaattatttaaaaacttacttctaccaacagtcccactaatgggcatctacccagaggaaaagaagtcattatacgaaaaagatatttgcacatgcgtgtttacagtggaattcacaattgcaaaatcatggaatgaacccaaatatccatcaaacaagtggataaagaaactgtgatacacacacacacacacasacacacacacacacacacacacacgaacacatgatggactgctactcagccataaaaatgcatgaattaatggcatttgcagagacctggatgacattggagactatttttctaagtgaagtaactcaggaatgaaaaacaaacatcatatgttctcactgatatgtgggaggtaagttgtgagcatacaaagggcataagaaggatacagtggattttggggactgagggggaagggtgggggggtgatggataaaaga

SEQ ID NO: 279352 - DNA, 555 bp, Homo sapiens
actactttatttaaagtactctaaagcataatgtctacatgaatattacaaactttatatatctcccgccctactaacaaacatgtgggttgtttccagttttccactgttataattctaggatgaatagctctgtgtatgtcctatgatatgcatgcatgatgtacttgctcatcatttaggaatattttttaactttcctagatattaccaatttgcttttcacaaattgctatactaatttacattttctagagcaatttgagaattaccacttctatgcattctcctaaacatttggtattccataatttttaatgctcagcaattggactttaattcattgtcatcccattgtgttttaatttgcatttcctgagtctggctggtataaacatgtttttgaccagtcaggtttcctcttttgtgccttcttcttggggaaaaagaaaaacyaactacttttttaaaactgtcacgaggagcaatcaagttatctcttattgaagttaattgggaaaagaaggaaaagagaaataaccataataataccac

SEQ ID NO: 279353 - DNA, 551 bp, Homo sapiens
cttcctgtgcaaatatcctggttcagtaatgccctcttttctgcatacccaggcagatctaaaggcatttggaacaccagctcgtctggatcggcagcctgagccaccccagctttcctgtgcagaaatcctgttgtagggaggtcctctctgatacacaggaagatatccaggaatctggaacacccactctcctgaaatagaaacttagtccatcggccattcccatacagagaatttggagcaaagraagtttcccagctccatgcctaggcactcttctgggtgtttgagaaccaactggattctccttcagcactgttgcttgtgcctgcaactgggggacctgtaggcagacttgcttgatcaacaccctgcatcccaaatagaaaaagagaaagttaaactatctctctttgtgagtggtattactctatacctagaaaattctaaagattgctgaaagtctcctggtactgatgaacaacattagtaaagtctcaggacacaaaacaaatgtacaaaaatcaatggcatttctatacatcaat

SEQ ID NO: 279354 - DNA, 551 bp, Homo sapiens
cttcctgtgcaaatatcctggttcagtaatgccctcttttctgcatacccaggcagatctaaaggcatttggaacaccagctcgtctggatcggcagcctgagccaccccagctttcctgtgcagaaatcctgttgtagggaggtcctctctgatacacaggaagatatccaggaatctggaacacccactctcctgaaatagaaacttagtccatcggccattcccatacagagaatttggagcaaaggaagtttcccagctccatgcctaggcactcttctgggtgtttgagaaccaactggattctccttcagcactgttgcttgtgcctgcaactgggggacctgtaggcagacttgcttgatcaacaccctgcatcccaaatagaaaaagagaaagttaaactatctctctttgtgagtggtrttactctatacctagaaaattctaaagattgctgaaagtctcctggtactgatgaacaacattagtaaagtctcaggacacaaaacaaatgtacaaaaatcaatggcatttctatacatcaat

SEQ ID NO: 279355 - DNA, 1192 bp, Homo sapiens
gtttcccagctccatgcctaggcactcttctgggtgtttgagaaccaactggattctccttcagcactgttgcttgtgcctgcaactgggggacctgtaggcagacttgcttgatcaacaccctgcatcccaaatagaaaaagagaaagttaaactatctctctttgtgagtggtattactctatacctagaaaattctaaagattgctgaaagtctcctggtactgatgaacaacattagtaaagtctcaggacacaaaacaaatgtacaaaaatcaatggcatttctatacatcaataacgttcaagctgagagccaaatcaagaatgcaattccatttaaaatagcctaaaaataaaataaagtacttaggaatacatataaccaaggaggtgaaatatatctatgaggagaactacaaaacactgctaaaagaaattacaaacgacamaaagaaatgaaaaaacattccatgctcatggattggaagaatcaatatacttagccatactgcctgatatggtatggctgtgtccccacccaaatctcgtgttgaattgtagctcccataatcctcatgtgtcatgggagggacccagtwtgtccccacccaaatctcgtgttgaattgtagctcccataatcctcatgtgtcatgggagggacccagtgggaggtgattgaatcatgagggtgggtttttctgtgccgatctcatgatagtgaataagtctcacaagatctgatagttgtatatagagcagttaccctgtacacgtccttgcccaccaccatgtaagacgtgcctttgctccttcaccwtctgccatgactgtgaagcttccacactcatgtggaactgtgagcccattaaacctcattttctttataaattacccagtctcgagtatgttttcattagcaacataagaacagactaatacagtaaattggtactgggtagtgggacacctatataaagatattcaaaaatgtgaaagtgactttgaaactgggaaacaaagagaggttggaacattttggagggctcagaagaagataagaaaatataggaaagtttggaaatacctggagacttggaggcctcagaagacaggaagatttgggaaagtttggaacttcctagatacttgttgaatggctttgaccaaaatgtgatagtgatatggac

SEQ ID NO: 279356 - DNA, 522 bp, Homo sapiens
tttaaaatgtttgatctttatttagaagcttggtgatgtttctgtgaccaggaatacgctacaggaattaactcttgtttatatcaattagcctatggtaaacttggtttgtttatatcttctttcacttagagtaacagtttccaagaacataccaagattgttagtgagggctgggcgcagtggctcaggcctgtaatcccagcactttgagaggccgaggcaggctgatcatttgaggtcaggagttcaagatcagcctggccaacagggtaaaaccccatctctattaraaatacaaaaattagccaggcaggtggcatcacgtgcctgtaatcccagcgactcaggaggctgaggcaggagaattgcttgaaccaaggaggcagaggttgcagtgagccgagatcgtaccatgcactccagcctgggcgacagagccagactccgtcttaaaaaaaaagaagaagaaaaaagaaaaagaaaaaaaaaaaagaaacattagtgaggacttcttgtata

SEQ ID NO: 279357 - DNA, 588 bp, Homo sapiens
ttgtttcaaagaacaagaatctgaaactgtattcaaaaatataaacttattttaaaataaatctctcaagttgatccttaaattattttaaaccatattttaacaaaagaaatttgcatttttatactaaatacacttttgtattttcacgtgaagttgataaatacccaatatatatgaaccaaaatgaatttaactgaatctacttgcttttmttctagaggttataaaatttttagtacttttcattaataaaatgatttatcaactagttaaaaattgactttttggaaaaactcttaattttgcaaggatacttttgtagtatcaagacaattttctgttttccaagctgtaattttttctgacagttttagaaaatagaaacagaacatggggtaatattctatatggatttgattactataatatgttatatagtctaatttcattttttgagcccaaacataattactattctttaatttttgtgtttaaaaactgcattatttaattaattataaaaataaaggcatttgtctttgcatatcatcaagaattattaaatatatgtatgtttttatttta

SEQ ID NO: 279358 - DNA, 518 bp, Homo sapiens
ggctattcatttacaatttgtgtagttccactaacaagaagtttctcctttcacttgagtggcagcaaacacaggttaaaggcaaggatcctaaagacaatcttcccagactttgtgggtttaaatcaaggtgttaccatttattagcatcatactatgtgtatcacattacctttctgtatatcaagtcattcatccataaaagcgggaaaagaataatgccttttgggggaaactagtatgaagaataaatgtgacataccacctaaatcctgaagcgcaatttttggataacaatccatgtaagaaacttttttgttatgaattattctaaaataatgtttagtcacttgtcctaaaatatcctatgcccaatctgactgtcactggaaaggctttctaatatttattcctttacttttacaagggaaaatarttctatgttttcgagttttctttgtaagattcatttcctaccttcatcactctgtttaccttctagacacaaaacatttgct

SEQ ID NO: 279359 - DNA, 503 bp, Homo sapiens
ttatatttcaatatttgtgttgaggactctggcaaccttgtatttaactggctgtttttatttgaggattgagttaagaggacagctgcttttctgtagttaaagcaataagggcatgaagagaatgagatattaaatttattttgggatgtaaatatttttcagtgtgtgatggcttacgagaaatcccacatgggcgctrgtaaatgatctatatttttgcaaactttcctcaagccatgagattctgcaatgctgacatgatttgatttggtgaatgatgcgggtggtgttgaaattgagccttttcttacatttaccttaaggagttaacttgccctttgtttaaaattgaaatttttcctgattcagtgagtaaccacatcccttaacagtgacactcctaggctggctagaagatacacacatcattactgtgaatttagtttaaccattttcatttttaaattaacatgaacctttaaccacctatcacaacccac

SEQ ID NO: 279360 - DNA, 602 bp, Homo sapiens
tctcagtatattgtagtagtcagacatgatgacagacaaatatggaagtgcccagaagtattcaacatccagcttttttcttcccaattactattcccaccaaccaatagcatttttgagtcaaccctcaagcatttcactgcaattttcatagtgatgacagctgccacatatctccctatgagctctctgttgattttggcagtcagactgaaaataaacaaaccaacaaaagtctggaattttcctgtaagttccaaccaacmaacttacacaaatgtttttgttggtgattttctctgatcctccacatcccttatatactctatgccttaagttctccagatatttctatatttatgtaagctccaatttctgttgcaaataatctgttccaatcaaacatttaatttgctctatttttttttagacactgactgatatgccacttatagctgaatatgtaccatttatggatgtcctttctatattgtctcatcctggttgccatatataggcacaatcttataaaaatagatcattttttataataaaccataatggaaaaaatcacgtttttaccaaaattataatgtggataa

SEQ ID NO: 279361 - DNA, 637 bp, Homo sapiens
aactaacttgcttttgattttacaggctcataggtggaaggtattaattttttctcaaattagactttgaagttggacttttgggttagtgctggaatgagtttaagactttggaagactgttggaagggtatgattgtgttttataatgtgaggacatgggatttgggaggggccaggagtggaatgatattgtttgactctgtgtcaccacctaaatctcaccttgmgttgtaattatcataatccccacatgttaagggagggacccagtagggtaattaaatcatggggtgcttgtgcccaacttctcctcgtgataatgagtgagtctcatgtgatctgatcattttattgcatctgacatttcccctgcttgcactcactccatcctgctgccatgtgaagaatgttcctgtttttcctttgccttctgcccataattgaaagtttcctgaggcctcccagcaatgtggaattgtgagtgaattaaacctttcttttataaattatcgagtcttgagtatttcttcatagtggtgtgagaagggactgatatactgtaacagtatgaccagcaaaacctaaaatctttactaactagccctttacagaaaaaagttggctggctcttgatc

SEQ ID NO: 279362 - DNA, 637 bp, Homo sapiens
aactaacttgcttttgattttacaggctcataggtggaaggtattaattttttctcaaattagactttgaagttggacttttgggttagtgctggaatgagtttaagactttggaagactgttggaagggtatgattgtgttttataatgtgaggacatgggatttgggaggggccaggagtggaatgatattgtttgactctgtgtcaccacctaaatctcaccttgagttgtaattatcataatccccacatgttaagggagggacccagtagggtaattaaatcatggggtgcttgtgcccaacttctcctcgtgataatgagtgagtctcatgtgatctgatcattttattgcatctgacatttcccctgcttrcactcactccatcctgctgccatgtgaagaatgttcctgtttttcctttgccttctgcccataattgaaagtttcctgaggcctcccagcaatgtggaattgtgagtgaattaaacctttcttttataaattatcgagtcttgagtatttcttcatagtggtgtgagaagggactgatatactgtaacagtatgaccagcaaaacctaaaatctttactaactagccctttacagaaaaaagttggctggctcttgatc

SEQ ID NO: 279363 - DNA, 449 bp, Homo sapiens
gtatttactttctaatattcactagattgagcaagttccttttataatattttgatttgaattcaatgaatttgtgttaaataatattgctagcttscttagacttaaattccacttctgctacttactacatgtgttgacttaagcaacttatttaagcccttaatgcttttgtattttctcagtgaagtgagaattattgtagcatatttatcatggcagtgttatgataatttatatatagtatttaactataatagtactcatcatatgggaaatactatataagtgactgctattagaattgttatctttctcttctctattatagctattataaccttgtaattggaaaaaaaaacagcttatctgacaactcattaaggccccaattatcaacttgtctcttctaatgccaaatttgtgtaatctactatttatagttgatc

SEQ ID NO: 279364 - DNA, 1038 bp, Homo sapiens
aacgtttctggaggtgcagacattggacttctctgagccagagctgtaacaccatagccctcccgtcctctgctagcattgggtggccacctcacatgaacagaagtagcagcagggccaggccagcccaggagccatgggctggagcaggatggaattactaaatgagctgtaacacaaataggctgaaacataccccttcaccatttgctgtgctgcaggtggtrggaacgagagagctgtaacatgctgaccctgacaggtatatagaggatttacagagttcaacataggtgtttgaatctcctggaaggatgttatgttacttttgaatcaaaccctgactactgctaaagcaggccaccctgcaagcagcagaaaattttggggatgagctttatatatcatattgtwacattctcctttgtgccccaactgaggaagtctctcaggagcacagtagggttcttcttaattttgcagctaacagaggaaataaggtctcaaatctaagactcagctctgtcagccttcagtgaagaacctaggcctagtcttgtcagaggggaccaggagactaagcaaagaaatgttcaagcctgagtcctcctttctcctccccaaagccctcaaggaactgaggggattcttgggcattacagggttctacagcttatggatatagatatccgggtatggtgaaatagcttgtctcttacatcacctaataaacgaaactcaggcagctaaaacccactccctaatttggaaaccagaagctaaaagggcctttggccaattaaaacaaggcttgtttgaggcatcagcccttagtcttcccatggggaagatgttcaatccttatgtatcaaaaggagatwttagattaccagaaagatgttaatgaaacatatggtaaacatggtttctcagaaaactttgttacctatcatatttctaacatgttattgtcctttttgccagtttggtttatttataatcataaaaataaaaggaataaattgggaaactaccata

SEQ ID NO: 279365 - DNA, 561 bp, Homo sapiens
ttatgcaacatagttcaagaactgttagatttctcttttctatttatttagtaagtattacattgcttatttttaaattccttccttgaatggcaagaagtcatttatagttctacagagaagcagactggtatagtaagacctccagaagctaaagtaatattatgaaaggattttggtattttaataatcaatttgttttggggacctgaataactgcacataactccctaaatccatttatacactccactgattaggctaatttggaactgtgttcaaatatcagcaatttgagcatgtagaaaacaagatatttttgtttttaaatatcytaaggtgtcaaagaagcaaacaagcaaaaacataatgttgatcaagtatttttgagtttaaatattacatatcagtttgtatgtggatggaagacttagccattagcacctgtgagctgttatgaaagttggtttcaatagtcaggtttaaggcattccctagaaagtcagcttttatcttatacaggaacttgggatcaggttgtgaatgacttccacataatta

SEQ ID NO: 279366 - DNA, 565 bp, Homo sapiens
aatgtcatactctgaacttcagtggacaataacttcttataaatatgtctaacatttagaataagttttaacactaaactaaacattttttaaaacttaaaagatctcatttcatttccatttcagctaatcttcccatgccttaaacttatgttccttccatctccaaaattttaaaattcagcctatgtatgaaccatttcttatgggtttctttctcttatttccactacatttaaacttgatatttgtatacagccaaccctattgtttacarggtggaaactagctcttgactttatttacctctaaccttaacctaaatctttgatttattttgaaacctctttgttgccagaatcttcccctttctaacacactgccctttttaacacaatccaacacatcccagcatgcccctatttttcttatgtgtttctacttctttgtggctgaagattgctaatgacaatttcattctggtgttattactcttagccatttcttcagcctccaatcttcctttaatttaattttattcttatatcagtaatgcctacagctt

SEQ ID NO: 279367 - DNA, 1194 bp, Homo sapiens
aactctgctaaatttaatttgcctaaaggttttttttaatatcttcatcacttcacaagcagtaagcatttattatagaagtaatyttctataagtcttatgcaatttgaaatatactttaagataaaaattctgaaaggtacttacatatatctaccttgcttcaaatctcaagtcttaattgaagatttccaaatcacagaggcatcctattttttgtaaagtttttcttttttaaaatagaagaaaaaatgaattagaatgctttatagagcatgttgcattattattagagactgctcttttcttaagattatgttttttatgaaaacatttttctttcataccctaaaatgttacaaccctttttctgaaagtaaaggtttctatttatttctagatatgaatttttctttttatcttttttcttttaccctttaatagtttcatgaaaaatgtcactggatcactaattttttttctttgtttaaaaagctataagcataaatattacctagttttctaagtctatcaaaagttttcagcacaatctattgaagatgggtgtaattaaaagtaaaataawaactttcacattaacccattatccacatgtctgtagttgtaaaatagaaaatacatagttaaggattggttgattaaaaaatcatacaaactaaacattacatagagaaaaaaatgtagcctatatgtctgagtgaaaaaagaaaatcctaaagtagactattagaatttttgagattaggactatttgggttttaattgtactaccaaaaawgtatacgtaattgtactgtcattattaaaccatatgacaattataaataaatattatttgaccttatttctttactaacttgttttatcatctttgctgtatggaaaaatcactcctgttattttatacagacagatgattcagaaaagagagcgtatggaccttctgagttcatctgtatggacatttgcaaaacttattaaaagctaacatttttttaagctttagagagcaataactattgcaaatgctttacaggtcatatctatttaggactggttcagtttcacatattagagaatcattctggagtggcttaaactccctaaagaccaggagaacatgccatcatgtaggtaagcttcccaaggcttgttcaagtaagtgtcatgata

SEQ ID NO: 279368 - DNA, 624 bp, Homo sapiens
tgtgctttccacaatggttggactaacttatactcccaccaacagtgtataagcattcccttttctgagaggagagtttcaaagagaaagtagtctgaagtattggttgctacagagtgactaaaaagaggctatataaggatttggcagttaggaaattgtagcaaatctttaccagggtaactttacctgcattgtcaggaaagagaggccagttacagggttggaagtgaagaagctgagttacgagtagaggttgttccattaagaaaattgtctttgaagccatgcagagagaaaggtgagtagctagaaggggacactgagtttggggggatggttttagaagttagagtcttgaacgtgtttatccattgagaagcagcctgtggaaaggaaagctgaagaggtgaagagatggaaagggatggattctggaccagggttggagacattaatctgcaacaacaggaagagcacatctccatctgaaattgtaagaaaggaaatagatgtaaaaagktttgtgtgtgtgtgaaaagaaaacttaggaattttaagtccaatgacctcaattgcccaggtatgaagaaagccattttccaaggtgaaggatcaagaaag

SEQ ID NO: 279369 - DNA, 601 bp, Homo sapiens
tgtaagaaataatacagaaggatcctgttcatccttcacctgtttctttcaatggtaacatcttgtgtaaccataatatatcaccaccaggaaatcgacattgatacagcccactgactttatttagattttaccagtttcatgtgaacatgtgtatgcatgtgtgcgatattatcatgtgtggagtcatgtgacccccatcattgtagacacagaacttttcgccacatggatccctcatgttgcccttatatagccacagcctctccttgcctctccgccgttcctaacccctgggataactaatctgttttccatttctatgattttgtcattttgagaatgttatatacatggaattgcacagtgagtaaaccctttgagattggctgttttcatgccccataattcctttgagattcatccagctatcagtacctcattccttttgattactgtgaatatccacagtttaccttttcacccattgaaggacatgtgggttggggatattatgaataaagctgtgatgaacattcatgtatacatttttgtataaacttgttytcatttctcttggataaacacctaaaagtacaat

SEQ ID NO: 279370 - DNA, 556 bp, Homo sapiens
acctcctgccatgattctgaggcctccccagccatgtggaactgtaagtccaagtaaacttctttttcttctcagtctcaggtatgtctttatcagtagygtgaaaatggactaatacaaaggcctcgtgtgtgatgatgtaacagcttcctattgctgctgtaacaacttggctgaacacaaatttatcatcttatagttctgaaggtcaaaaatccaaaacagctatcactaggctaaaatcagtgtcaacaaggctgcattcctttcttcaacatctaggggagactccatttccttgctttttccatcttctagaggccacctacattctgggcttgtcaccccttcctccatctgcaaagcagcaccataatgtctttaaatttccctctgacttgtgcttctgttttctacctttaagaaaagtagaaatgtgattaaattgagtccacctggataatcctgaatcacatcctcatctcaaggtcagctgattagcaattttaatttcatctgcaatcttcattctctctttacatccaagattatatat

SEQ ID NO: 279371 - DNA, 498 bp, Homo sapiens
tctccattttacttgggcttatgtgtgtgtctatgtctgtgcatgtgtgtgtttgtatttagcactatgcaatttttattgcctgtgtaggctggcatatttaccaccaaagtcaaaatacagaatggcttcaccaccatgaggatacagtaggttgtcctttgtaaccataattgactattttggacattttatataaatggaataatgtaatatatggtcctttgtgactggcctcttccatttagcataatgttccagggttcatctctattgtagcactttccactgcttcattcctttttattgctgaataacatttcactttattgatataccatattttgtttatttattcattagttaatggacatttgagttgtttccactttttggctattatgartaatactaatgcgaacattcatgtacaagttttggtgtggtcctatgttttcatttcttttgggttgatacctacgagtagtgccgctgggt

SEQ ID NO: 279372 - DNA, 425 bp, Homo sapiens
aggccctggccctgacaatatgttgaatgaatacgaaaagtgaaacaccaagaaacaccaacatttaagagacagaacaaggaagagaaaaccacagagagacggaaaagacacatcagaagaagagataattactcagaagatgatgccacraatgtcacaggagcagaaaatttgaaaaggagtttaccaagggcagcagacaatgtggagagggggaatagaatcaggatgaaatggagaattagaaggatagtgtgggtgttagaaagatcaatttcagtaaagctgtagtgtggaggccagaaggcattagacagaagaaatattcagagaagtgaaagtgcagctattcctttaagaagtctggcagcaaggggagaaatatgggaagagaaggataaaagagcaagatcaaggaacag

SEQ ID NO: 279373 - DNA, 425 bp, Homo sapiens
aggccctggccctgacaatatgttgaatgaatacgaaaagtgaaacaccaagaaacaccaacatttaagagacagaacaaggaagagaaaaccacagagagacggaaaagacacatcagaagaagagataattactcagaagatgatgccacaaatgtcacaggagyagaaaatttgaaaaggagtttaccaagggcagcagacaatgtggagagggggaatagaatcaggatgaaatggagaattagaaggatagtgtgggtgttagaaagatcaatttcagtaaagctgtagtgtggaggccagaaggcattagacagaagaaatattcagagaagtgaaagtgcagctattcctttaagaagtctggcagcaaggggagaaatatgggaagagaaggataaaagagcaagatcaaggaacag

SEQ ID NO: 279374 - DNA, 518 bp, Homo sapiens
gatggtagttgtgttagtccattcttcgttgctataaaggaatacctgaggctacttaatttataatgaaaagaggttcatttggctcgtggttatgcaggctgtacaagcagcatggtgctggcatctgtttctaatgargcctcaggaaatacaatcatggtggcaggcaagagggaagctggcatatcacatgatgagagcaagcaagagaaaggaggaagtcccagcttcttttgaacagccaaaccccatgtgaactcatagagtgagaactcactcataaccgtcatgatggcaccaagccatttatgagggatctgcctccattacccaaacacctcaaaccaggccccacctccaacactggggatcacatttcaacatgagagttggagggaacatacatccaaactacatcaacagtgatgcattgattctgagcctagttcccagtttctctgtccctgtaagaggcagaaaggctggtaaagtttagaagccttgttagaaaggct

SEQ ID NO: 279375 - DNA, 598 bp, Homo sapiens
taaaaataataataataattcagtggctcaaacaagataaaggtttctgattctggggaaaatggagtaaacataccttatgctgaatacggctatttgaggactccaaaaattatatggtagctggtgactggcaaagaagagcggaatttaaagtaccataaaacttatggtgggtttaccattttttcccttttacatactcaggctgaactctaagcaacacaaaatttatttatttatttatttgtttatttatttactgatgtattttgagacagagtctctctctgttgctcaggctggagtgcagtggcatgatctcggctcactgcaacctccacctcccaggttcaagtgattctcctgcctcagcctcctgagtagctgggactacaggcgcccgccaccatgctttgctaattttcgtattttcagtagagataggtttccccaggttggccaggctggtctagaacycctgaccttaggtgatccgcccgccttggcccaaagtgctgggattagaggcgtgagccacatgcccggccaaagcaacacaaaatctaaatgtgggcatttgcatgggcagagggat

SEQ ID NO: 279376 - DNA, 614 bp, Homo sapiens
ttgtttgtatcatctatgatttatttcagcaatgttttgtagttctccttgtagagatctctcacctccatggttagatgtattcctagatattttatttgtgtgtgtgtgtgtgtgtggccattgtaaatcaaacttcattctttaaaaaaraagaagaagaagaagaagtagagatggggtcttgttatgttgcccaggctaatttcaaactcctaggctcaagtgatcctcccattgtggcttccccaagtgctgggattacaggtgtgtgccactgtgcctggccttggatcatgttcttgatttggttctcagcttgaacattactggtgtatagaaatgttactgattttcgtatgttgattttgtatcataagactttgcacatcaaaaagttaattcactgtgatcaagtgaatttattcctgggatgtaaggaaacaaacacagacccataaatgtgattcaccacataaataaaattaaaaaatgatatgatcatcttaatagatgtagaaaaatgttcaataaaatccaacatcccttcatgatatttaaaaaaaccctcaacaaattaggcttcaaaggaatatatctcaaaattataagag

SEQ ID NO: 279377 - DNA, 582 bp, Homo sapiens
tgaatataaaggatggaatatgactatagaccttgtagacatgaaaatgataataaaggaatactacaaacaataaaaccctacacacaaaaattcaacaacttagatgaaatggactaatttctcaaaattcacaaactacaaaactcatccaaaatgaaataaataactggattgtactatagctattaaagagactaaatttacagtttaaagtcttgcaaaaaaggaagccccaagcccagatggttccactggctaatctgcaaaatgtttaaaggagaaataacatcgtttctaygcaatttctttcagaaaatagaagatgagggaatactttccaacttactttatgaggccagcattatcctgataaaaaaagcagacaaaaatagtactagacaagaaaacttgagaccaatatagcccataaatagaaacacaaaaaccccagcaaaatgttagcaaattgaatccagcaatatattaaaaaaaaataggcactacaatcaaaggagtttatcctggtaattgcagtgttggttcaatatttgaaaatggttcgatataatccttcatgtt

SEQ ID NO: 279378 - DNA, 582 bp, Homo sapiens
tgaatataaaggatggaatatgactatagaccttgtagacatgaaaatgataataaaggaatactacaaacaataaaaccctacacacaaaaattcaacaacttagatgaaatggactaatttctcaaaattcacaaactacaaaactcatccaaaatgaaataaataactggattgtactatagctattaaagagactaaatttacagtttaaagtcttgcaaaaaaggaagccccaagcccagatggttccactggctaatctgcaaaatgtttaaaggagaaataacatcgtttctacgcaatttctttcagaaaatagaagatgagggaatactttccaacttactttatgaggycagcattatcctgataaaaaaagcagacaaaaatagtactagacaagaaaacttgagaccaatatagcccataaatagaaacacaaaaaccccagcaaaatgttagcaaattgaatccagcaatatattaaaaaaaaataggcactacaatcaaaggagtttatcctggtaattgcagtgttggttcaatatttgaaaatggttcgatataatccttcatgtt

SEQ ID NO: 279379 - DNA, 582 bp, Homo sapiens
tgaatataaaggatggaatatgactatagaccttgtagacatgaaaatgataataaaggaatactacaaacaataaaaccctacacacaaaaattcaacaacttagatgaaatggactaatttctcaaaattcacaaactacaaaactcatccaaaatgaaataaataactggattgtactatagctattaaagagactaaatttacagtttaaagtcttgcaaaaaaggaagccccaagcccagatggttccactggctaatctgcaaaatgtttaaaggagaaataacatcgtttctacgcaatttctttcagaaaatagaagatgagggaatactttccaacttactttatgaggccagcattatcctgataaaaaaagcagacaaaaatagtrctagacaagaaaacttgagaccaatatagcccataaatagaaacacaaaaaccccagcaaaatgttagcaaattgaatccagcaatatattaaaaaaaaataggcactacaatcaaaggagtttatcctggtaattgcagtgttggttcaatatttgaaaatggttcgatataatccttcatgtt

SEQ ID NO: 279380 - DNA, 545 bp, Homo sapiens
tattccaaagtgccttgtcattcaaatgcaaagacatgatgaaaccaatttttaaaaaattgttacatatccatgcctcccattagacctttaagaaggacacctttgaaaatgttaggactatactgaaaaggttaggacctttgctgatcaccaaagattttaattgtgcttayagaattaacatgtgtaaaatactcattgtatctgttctgcttaatattctgtttctctttcttcttcatcctcctgaaatcatgggcagtgaattcactcagaaaacaggagttaggtagcactgccaaaacagaccagtatcattagcttagtgaaatagttcaggggtgagacttttatcagctattaaatgtcttgataggagttcagtcattaccagtcttttaaaaaataactttgctgtaccttcatgttcagctaatttttttctgtaggcacagctagatcctaacatatgtttaaatagaaagtaatcaatgtaaagctatagaacatcacataaatgtcaggttctgttactattcacc

SEQ ID NO: 279381 - DNA, 359 bp, Homo sapiens
agaaaaaaaaaggatatacagtaagccaataatagagataagatagaatactaaaatttattcacttaattacaaagcatrgaagaaaagaagaaagaacagatgaaacacatagaaaataaatagcaagatagcagtcttaaaactaacatatcaataactacattattcaatagtggaaatatccaattaaaaggtagattgtcagactataaaaaaacaagacgcaactatatgctgatgaaaataaagctactttatagagacagatggactaaaagccaaaggttggaaaaaaaatatgccatgcaaactctaaatgtgacaaagtaggaatgactttattagataaagactga

SEQ ID NO: 279382 - DNA, 632 bp, Homo sapiens
aaatccaaaaaatcaaagttgaatctttgaaamtgaataaataaataaaactgttaaacctctaattaaactggccaaaaggagagaaaacataaattaccaatatcaggaaccaaagtgaatctatcattacaaattctaaaaatattaaaagagtaagagaacattatgaataattttatgctaattaattcgacaatatagataaaatgagaaaattccttgaaaggtacagattatacaatgggcaaaaaaatctaggaagtctgaatggatggaggtagtgaatacaggagagaatagtacaaaatttagtccaagaagaaaataagaatcagattatgtagagtttcatagaaaaagatgaggagtttggatttaattctcagtgtaagaagccactgagagagtttaaagagcggtgcagtctaatttcagagtttaaagattactggctactgcaaaaagaacgaattcttgagacacaagattgaaagacagaagattgaaaagaaggaagttaggaaattatttcagacaagagataatggtggcttagactaaagcaacatcagcagagagggagagaagtgggcagaatcgatatatctccagcttagctcagttatcac

SEQ ID NO: 279383 - DNA, 632 bp, Homo sapiens
aaatccaaaaaatcaaagttgaatctttgaaaatgaataaataaataaaactgttaaacctctaattaaactggccaaaaggagagaaaacataaattaccaatatcaggaaccaaagtgaatctatcattacaaattctaaaaatattaaaagagtaagagaacattatgaataattttatgctaattaattcgacaatatagataaaatgagaaaattccttgaaaggtacagattatacaatgggcaaaaaaatctaggaagtctgaatgsatggaggtagtgaatacaggagagaatagtacaaaatttagtccaagaagaaaataagaatcagattatgtagagtttcatagaaaaagatgaggagtttggatttaattctcagtgtaagaagccactgagagagtttaaagagcggtgcagtctaatttcagagtttaaagattactggctactgcaaaaagaacgaattcttgagacacaagattgaaagacagaagattgaaaagaaggaagttaggaaattatttcagacaagagataatggtggcttagactaaagcaacatcagcagagagggagagaagtgggcagaatcgatatatctccagcttagctcagttatcac

SEQ ID NO: 279384 - DNA, 599 bp, Homo sapiens
agaaatcataattttgctcatgcagcattcccaaatacaacttaatgttcctgtatcttcaattttgactcctcttaatttttccttaatcatttcccactgatagctcaagaaagagatttaacatatgaaaacttaatagatttacctgctcatgtgttatagaaagttttgacagtctcaaccagaaaaaataatgccacttttgttttcaactgaagaaattaaacttgttttcctctgaaacattcatgaaatcaacttgtaaagatgacaatctaactttagattatttattgccttgtgttgcaactcatgtaaaaaaaaagaagcaagttttataactgaaaaattatacttaataatgaagcattatatattacagtaattttrttgctagaaactatttgaatttttcttctcaaagaaatgtaacattagttgttaaataataaaattacttgatttaataaaatgattgtaaaaatgaataacctaagtaagattactctaattgtcctctaaatccttactactcaaagtatggtccatatatctgtatcactggggagtttattagaacctcaagttcccaatcc

SEQ ID NO: 279385 - DNA, 1117 bp, Homo sapiens
agaatgagtttatctctcaactgataatattatatatttagtaagtatttattaaatgcttactatcttccagtactatgctaaatttctgcatatgttttttctttgattgtcacaacacatgaaagtaggcatatagttatccttctattacaggtaaggaaaacaagtcacgaacccagactgtttttgcctgcctaaatttgttcctttctctctgattttgtagacctgctcggaattaaatcctyaccatgtggatgttttgtttgattgtttgattgtttcttacctctcggaagtcttctgcactaaataaatctgcatgatacttatggtctcctttcctaatcacccatctcagttggttccttctgtgctcctacacctgtctgcttgattggcagtatctggtggactcctgtatagccagagatctgattctgatccttttggaaggccaagccaaggcctatagatgcattttaaaatgcttacaggaaatagcccatacaaactcctwgttttatttttttaattagggagcatttgaacaaagtgagaataaggtaattttgcagaacaccagaaaaggggttacccctgggaacattttaaggagatagtttaaagtcataaagctattacagcaagtgttaagtatttgaaacttattacgtattgggagaagtatcaaatataaataggctcaagaagatctctgataagatagtagttaattatatatcaggwtaaaggaacagtagacattatgatgaatgctaaatcaagcaatacagaaagaaacataacatgttaatttaaacatttataggttataagcaaatttatataagcaaaacatttataggtttataagccataaaccttcatctcctctttggaagcctacatacagatctaattaataaactttatatttaaactagttttagatttacataagattgaacagaaagtgcagagagttcccactatcccctcacacctcagcccctggcctgtaacacacacacaaaattccactgttaatatctttaactggtgtggcatatttgttgcaattgataagccaatattgttacattattattaa

SEQ ID NO: 279386 - DNA, 615 bp, Homo sapiens
atcctctgtacagattggaagggaggctctgttttggtgtttgaagaagtccagcggagtgaggcttcacctagttatagatgccataattatataatatccaataatatgttagagaaagagaagactaaagattcaagtataaatttttgacccagaagttatagctatagcttccattcacattttattccctagaattagttacacggttatgcagaaaattggaatcttcatgtatctagaagttaaagagaatagacaccggtgaatagtgatgcttaccaaaatatggcttcttgccaacactatcactggtatacagtggctgactacatcatccctaagagtcctggaactcagaaatcaaatgtggctaaaataaaaccttggtccartgctttttgtattgttttgaaagcagtgaagcatggaggacagggcttaaacagaaagtcaagaaatcttttagaataaaaatagactctctgaattgctgtgtgattttagaatatatcttttatttctgagcccaacttttctcatttgaataatgaaaggatggaattgactatccaaaaatatattccaaaattcagttatttctgataataa

SEQ ID NO: 279387 - DNA, 480 bp, Homo sapiens
gttcacttgagtcccttttaattgcaatagcattaaacttcaagtgtctagtacttcatagttttacttcatactccatagctttcacagcctttccacacatgagagttataagccccgcaactgtgctgtgaagtattactctctcattmtgcaaagtaagaaacagtggctcagagaagtggtcagaatctctgggacagaacaatggcagagtcagaactggagctcatggttctaatgcaaaatccacttctctttcctcttcccatcccatgccaacttagagcttctcactggcttgagttcaggcttcacaacaacctcttcttgccaagagacaaaccatgtagcatattcataactgtccttgcatcttggcttttgtgtttgtgaagcaaggtatcacccttacttctgatcaggtactgaatgctatgtttcttatgaaaagtaatctccataagaactcaaaaatat

SEQ ID NO: 279388 - DNA, 569 bp, Homo sapiens
aactcacaacttcacaaaacagactataagtttacttggacattataaataatgataataataatagctaatatttatggaactctcggtatttagcaatcacaatgccaactgctttatagcattttttcatttattagaatccattccatccaacactttccaaacaattataatgtgttaggtatggcaatgggttatgaaagtttgcagtcatgtaaaattattaacagttaaattaaacacaattatatgtttcaaataataaatgatgagattgcagttctggtattaactggattaccaatgaaacttttggccaagggagccttgtgtacttttcttattgtggtctagatgtttgttctctaataaaccactattagccatataaactatttacatttaaatctaaatttattaaaataaaaaatttaaatttagtttcayggtcacactagccacctttaaattactccataatgacatgtagctggtgccaattgtgttggacagcacgatatggaatatttctgtctttctagacagttctattggaccacactgag

SEQ ID NO: 279389 - DNA, 534 bp, Homo sapiens
caacattttgcttaaatatatatgcctataactgcaacaaattcagagagcaaaattatctttctaactttattggcttttcatgaaaataaacgcttccaagtcatgataatgacaacccttgccaaatgttggcagtttagattttaacaaagatttttttttgttcaccagcttagctgctggtgccatctagtgaccagttcaattgataaacaaagatgggttcagaaaatgtacttagaagaatttgatagtcttttatttaatattgcaaagaatgatacccaaaaaaagtaaccagatagctgtaatatttaagctataatttaaaagttataaaagggcagaaattttaaagatgacaaactggttttttaaacacacttaaaggtaaaagtacgcttttttaaaatatgcttacaggtaaaagagattaaataacaatttataaaacttatagtragcaacaattctggaatcatcctttttatattaaagattacacataacaataatgaaaatttgttaaaa

SEQ ID NO: 279390 - DNA, 582 bp, Homo sapiens
tcttctgtctttttaaaatagattttaattctccatcttctcctctattttcttggacatattaattatagttattttagtttctatgtggtaactctaatatctgaatcacccacaggattgtttttattatttgtcttttytttttatatacagtcagttggtctttttttttttattaacacgacagagagttttttattaaatgccttcatcttatatggaagattataggggcacagaatgatgccctattcctccaaagagggttgagttttctttggcaggtatatcaagtatcagcaattcaccttgatcctgtcaagggttgttttaggctttattggggtctagtctatttcaattttgtccttatttctatggcatggcctctttgggatctctactgaaagcctggtatgtttgccagagccaacctgccatggcaggaattggacttcaatctctgtctctctagcattacagggctaccaaaatatctactaagcaatttaggttttcagttgctgtttttgctgaattccttgggatttctccctccacggtgtaagggggaaactg

SEQ ID NO: 279391 - DNA, 409 bp, Homo sapiens
caggaaacaggaactccagtgccaaggagattctccttctctactacatacaagcacgtgcacacacatgcacacctctgcttttctgtgtgtcacctctgcccctctcctcctataaaagagctgctttcttttacacaacagtgaccacagtcactattcccttccaggcttatttttttccggattcacccatcttcactacccaagaggtactaccattgttctcttagtttcaaatggaaaaaaaatgaaggaaaatattcttgcccattcagagagtaggaatctgtaagagatttgagttcctgcccraattgcctggttgaaaggagcatttccctgaagaaaaaggcagaggcaaggaggggatgggttcaagggaaatgaaacagtagtgatatggttt

SEQ ID NO: 279392 - DNA, 582 bp, Homo sapiens
gaaaacccagcatagatgttgtttttgagcagtggcaatgccatgagtacttaggctccaacaagtagaatcagcttccctctcaaacacagtatcagttcaagatcatggaccctccgctatctccagccagcctgcaagccctcagcccctcacatgtatgaatactagaataatcactgtttccaggcacccttgctctgtcctctaggatgactgtctctttctctctgttcccacagtttttaagtatacctccattacaccactcatcataacatattttaattgtttttggcatattgatttttcyatctgagagcagaaattaatactatacagattaagtagagtgcttagaacacaatagcattcaataaatgcagttgacttgctggttcaagacattctatctattctagcctgacatacagcacttagaaattttcacataattattaatacatttgctcaatagagcatgcataaaacacttaaacaagaaaaaataaccactattaaccaacaacttgttccaagtgtgccttttctacatttgtttatgatctttcggtttacata

SEQ ID NO: 279393 - DNA, 518 bp, Homo sapiens
gaatatttaattgtttttaaataagacagagatcactttaaaaatcayagaatgttttcaggaacacgaaatacatgattctaaaatgattgagttagtaaaattaggaagttctgttggagctaattcattagatctgagaagaaacatcagtattgtaatagcagcatttattaaccccttgtccattttatttgaaagggaaaacatgggtgcaaatagtttgtctgcaatacttagagattctactagcttcctagggctgccctaacaagtcaccacaaactaggtagcttaaaacaacaaaaatgtattcttttttaaagttctggaggtcagaagtctgaattctaaacgctgtagggtaatctctccttaccttttccagagcctggtagccattgtcattccttggcttccttgactgtggccacattcttctaatcttttctctgtcttcgtatcacttactctgcttctgcctcacaaatccctcccatttatctctttcaaggaca

SEQ ID NO: 279394 - DNA, 518 bp, Homo sapiens
gaatatttaattgtttttaaataagacagagatcactttaaaaatcatagaatgttttcaggaacacgaaatacatgattctaaaatgattgagttagtaaaattaggaagttctgttggagctaattcattagatctgagaagaaacatcagtattgtaatagcagcatttattaaccccttgtccattttatttgaaagggaaaacatgggtgcaaatagtttgtctgcaatacttagagattctactagcttcctagggctgccctaacaagtcaccacaaactaggtagcttaaaacaacaaaaatgtattcttttttaaagttctggaggtcagaagtctgaattctaaacgctgtagggtartctctccttaccttttccagagcctggtagccattgtcattccttggcttccttgactgtggccacattcttctaatcttttctctgtcttcgtatcacttactctgcttctgcctcacaaatccctcccatttatctctttcaaggaca

SEQ ID NO: 279395 - DNA, 420 bp, Homo sapiens
ttctattgcaactcataactaaacacaatgtgyttagaaagacaataaagaactggagcagtaatttagtcagcttaaggaaatgaaatgtattacatagttcatgtgcaagttcctctgacctatcatgtccattccattttgcatttgctgatcttttatctacgcatagcgagcacaatcaatctatagaaatttcactgagaataccatgctcaattttcactactgatccttgttgtcagtgtcatagagagggaagtatgataattgtgatctcacatccataccaaccagttttaccatgcttgaattcccctattatattaggcatagtcccactaaacataatatttcaagttttcaagttttagacatattaagattttcaaaaaacataacacttgaaccttgtctaaa

SEQ ID NO: 279396 - DNA, 791 bp, Homo sapiens
ttctattgcaactcataactaaacacaatgtgcttagaaagacaataaagaactggagcagtaatttagtcagcttaaggaaatgaaatgtattacatagttcatgtgcaagttcctctgacctatcatgtccattccattttgcatttgctgatcttttatctacgcatagcgagcacaatcaatctatagaaatttcactgagaataccatgctcaattttcactactgatccttgttgtcartgtcatagagagggaagtatgataattgtgatctcacatccataccaaccagttttaccatgcttgaattcccctattatattaggcatagtcccactaaacataatatttcaagttttcaagttttagacatattaagattttcaaaaaacataacacttgaaccttgtctaaawcaaatcagttgcaaagcagtgacttggaaagtttctaaactttaggaatttatttacttaaatgcaaattttgtttaagaaaaaaaatcctttctttgtgttttctgaaatgtgtatgttagtgtttccagtttgccccactactgcaatwttctatcatacaatatcacatctgctaaacacttagcagaaaatcacaacaaaaaatcagcactgtgacttgctaaacaagacatttagtctcggtttatatattacattcatttcccatctaaagatactcttaaaggaaatgattgctggagaaaaacaaagatgacgaaataatagaaagcagatgaaaaagattacctgagaaacaaagaagtgt

SEQ ID NO: 279397 - DNA, 579 bp, Homo sapiens
ctctcccccactgagctatgctgtcaccgcagttgtgaatgtccacacagtggccagcaccctggcacccactagcaccctgccacagccaacaggcatgcaccttgccatgctgccactgctgctggtgtatgcaaatgaaaacagatcccactgccacagccctacaaagagttttggctggctccacccatcagagtgttataaccagctgtccaggagcaccttggcctctccagtgcagcaggttccccaactcaaggagccagaaaacaaagccagggcctgataccagtccccagaattaaagcatgtagtccaggagtcctgagytgaaccttggcttccaaaaatctctcagaaacgaagccagttgactaaacccaccttataccacaatgaaacctccaagatcatcaaataggataaaagaaaaacaaaacccattgaaaggagaacaacatcaaagattgaaggaccatcagcccacaaagatgagaaaggccaagcacaagaattctgacaattcaaaaagctagagtgtcttctttccttcagactaccagactagttctccag

SEQ ID NO: 279398 - DNA, 451 bp, Homo sapiens
caactggaaaaccagggaatcaagagcaaaccaaccccaaagttagcaaaggacaagaaataaccaaaatcagagctgaagagactgaaaattaagaaccattcaaaaatcatgagatcaacagatacaagagatggagttttttgagaaaattgttaagatatatagaccactggactaatgaagaaaagtgagaatatccaaataaatgtatttagaaatgacaaagaatattaccagtgaccccaaagaaacacaaataaccatcagaaactactaygaacacctctatgcaaactagaaaatctggaagaaatgtgtaaattcctggatacatacaccctcccaagactgagccaggaagaaactgaatccctaaacagaccaataatgagctccagtattgaataagtaagaaatagcctaccaaccaaaggcaaggaccagacag

SEQ ID NO: 279399 - DNA, 661 bp, Homo sapiens
ttatattattaaaggttaattacagtactgaaaagaaaaagaaaagattttaatagggtatttaaaaaattctactgcaatgcaagtctaataatgcagtgtgtcatagactagtaattctaaagtttcaacatttattaaattaaggttaatctggaaaagaactctgcggtacagtattatctgttgttacttacaaaatatcataagcaaaaagattatcatatattttataaggcaattgttagcctgagtatatcattttcacagaaataccacataaaacctaagaagcatgtggctaacattttcagttattgaccacgaggtatttatagattcagctaacatttgggaatccaccctttcctcgktctcagttgatgtttatctggaaaactgtgtgatatgtgcatcaattctcaggagcattctgttccgtggccaccctaagtgtactggaagttggcatatgatccaataactatgaggcccagaatccaatgactatgaggcccaggaagtttactgaaataattataaaaagctgcaccatcttagctgctgaacataaatttacgtggaatttagcctttttagttgaaagtctttatgctagtacaaggtaaccatctctttggaaatgcaaccaacacagaaa

SEQ ID NO: 279400 - DNA, 661 bp, Homo sapiens
ttatattattaaaggttaattacagtactgaaaagaaaaagaaaagattttaatagggtatttaaaaaattctactgcaatgcaagtctaataatgcagtgtgtcatagactagtaattctaaagtttcaacatttattaaattaaggttaatctggaaaagaactctgcggtacagtattatctgttgttacttacaaaatatcataagcaaaaagattatcatatattttataaggcaattgttagcctgagtatatcattttcacagaaataccacataaaacctaagaagcatgtggctaacattttcagttattgaccacgaggtatttatagattcagctaacatttgggaatccaccctttcctcggtctcagttgatgtttatctggaaaactgtgtgatatgtgcatcaattctcaggagcattctgttcygtggccaccctaagtgtactggaagttggcatatgatccaataactatgaggcccagaatccaatgactatgaggcccaggaagtttactgaaataattataaaaagctgcaccatcttagctgctgaacataaatttacgtggaatttagcctttttagttgaaagtctttatgctagtacaaggtaaccatctctttggaaatgcaaccaacacagaaa

SEQ ID NO: 279401 - DNA, 661 bp, Homo sapiens
ttatattattaaaggttaattacagtactgaaaagaaaaagaaaagattttaatagggtatttaaaaaattctactgcaatgcaagtctaataatgcagtgtgtcatagactagtaattctaaagtttcaacatttattaaattaaggttaatctggaaaagaactctgcggtacagtattatctgttgttacttacaaaatatcataagcaaaaagattatcatatattttataaggcaattgttagcctgagtatatcattttcacagaaataccacataaaacctaagaagcatgtggctaacattttcagttattgaccacgaggtatttatagattcagctaacatttgggaatccaccctttcctcggtctcagttgatgtttatctggaaaactgtgtgatatgtgcatcaattctcaggagcattctgttccgtggccaccctaagtgtactggaagttggcatatgatccaataactatgaggcccagaatccaatgactatgaggcccaggaagtttactgaaataattataaaaagctgcaccatcttagctgctgaacataaatttaygtggaatttagcctttttagttgaaagtctttatgctagtacaaggtaaccatctctttggaaatgcaaccaacacagaaa

SEQ ID NO: 279402 - DNA, 602 bp, Homo sapiens
taaaaacattgatggttcaactgatgtgtgttcaaatatttaatatctatatataaaaatatttcatgaattctataaaaataaaacttgctgcaatattatgctactgagattcaaytaaatattactacaatacaaagctcatttgaaaatattcacatttgttttgtattatcttaagcaacttcctataatagtttggtttacttttttttcccagtgatcaatataattaatttacttatttgaatatttacctcaaaggaggtgtttgtacacctaaaaatgggtaggcaaaagaatcataccttgtcaagtataaagcttcctaggcaagtagacctaatgggaaaacattctctaatagaaagctgaccgagatcatatttctctatttaatgtacaaagccaaattgaaagactggcttgtcagcaaatgtttaactacagtgaaattcatgcctacctctagtactctaattagaaattccaacataattgaactagaagacattctacactttaatactgtagcaccctttcattaaaattcaatactccatattttcattacatgttcatcattctgagtataaatttct

SEQ ID NO: 279403 - DNA, 602 bp, Homo sapiens
taaaaacattgatggttcaactgatgtgtgttcaaatatttaatatctatatataaaaatatttcatgaattctataaaaataaaacttgctgcaatattatgctactgagattcaattaaatattactacaatacaaagctcatttgaaaatattcacatttgttttgtattatcttaagcaacttcctataatagtttggtttacttttttttcccagtgatcaatataattaatttacttatttgaatatttacctcaaaggaggtgtttgtacacctaaaaatgggtaggcaaaagaatcataccttgtcaagtataaagcttcctaggcaagtagacctaatgggaaaacattctctaatagaaagctgaccgagatcatatttctctatttaatgtacaaagccaaattgaaagactggcttgtcagcaaatgtttaactacartgaaattcatgcctacctctagtactctaattagaaattccaacataattgaactagaagacattctacactttaatactgtagcaccctttcattaaaattcaatactccatattttcattacatgttcatcattctgagtataaatttct

SEQ ID NO: 279404 - DNA, 563 bp, Homo sapiens
gtgtttgtacacctaaaaatgggtaggcaaaagaatcataccttgtcaagtataaagcttcctaggcaagtagacctaatgggaaaacattctctaatagaaagctgaccgagatcatatttctctatttaatgtacaaagccaaattgaaagactggcttgtcagcaaatgtttaactacagtgaaattcatgcctacctctagtactctaattagaaattccaacataattgaactagaagacattctacactttaatactgtagcaccctttcattaaaattcaatactccatattttcattacatgttcatcattctgagtataaatttcttcagaatattctctccttaaaggaaaatagaaagraactttacttcagagcagaaatcttagattaataggataaattgtgtattagatatagaaagaaaaaatagtcattttgcaaccaaataataaagtgccaccataaaaacctacaacacataataagaataataaaaagaacgagttataaagagaatcttcatcaacattagagtaaatggcatctaagcaa

SEQ ID NO: 279405 - DNA, 1090 bp, Homo sapiens
gtttttctttaaatggctttttaaatcaacacttgaggtattcattttttattcatagtttttgtttgtttgcttgcttttgactcagtcccttcatattgaccaccttttccttgaatccttttacacatttatcttcgttaaagtctctacctgatggttttaatatttgggtcttgggtttctctaaatctgattgttttgaatgctctgtttcttcatattggtgtgtgtstgtgtctcataatttttgattggacagtggcattgtatacagaagaacagagaagaccaaggtcagtattatctatccctggaattaagcagcttcatctcctgtcaggccattcttgcagtgggtagagttaaaatagtggttagaagttgagctggatttccattttgtcattgctaccctttccattagtgcactaaaagcttcagtttcttcaggggagacctgctgttaccttgtgctcacaaggttgcttgggcttctgagtgaattttctcagtgttcctgctccaccttcagcttttagcagtcwtgtagttatttttctaacttttttcatgcttattttaagtttattttcataaataatgataatatacatgataaaataaaattaaatatatttattttaatccaaatattgtcttgtcacatttcataaaattttaagttacagcaattaggtaaaattaaattctaaataagttataatattcttttttwataattttccttatccataggcaagttttttgagcttcagatggttgtggggtttacccctcatttctgtgagctgatgataggaaacattctataaaagtccttatagctgaaattgtttgaggtgttcttaatggtccagagtggctttgatatttctaaatatcctttaatattctaagatgatttcttgtctttgctataggcttgtagattattctttttatggattatttattaataaagacctgcttactaaactaatcttctacatcatatgtctttttgtgtggtctatcaacaattgaaaaacaaaatgtattctaaagtctgtggctgtgagtgtagctt

SEQ ID NO: 279406 - DNA, 1138 bp, Homo sapiens
tgtagttatttttctaacttttttcatgcttattttaagtttattttcataaataatgataatatacatgataaaataaaattaaatatatttattttaatccaaatattgtcttgtcacatttcataaaattttaagttacagcaattaggtaaaattaaattctaaataagttataatattcttttttaataattttccttatccataggcaagttttttgagcttcagatggttgtggggtttacccctcatttctgtgagctgatgataggaaacattctataaaagtccttatagctgaaattgtttgaggtgttcttaatggtccagagtggctttgatatttctaaatatcctttaatattctaagatgatttcttgtctttgctataggcttgtagattattctttttatggattatttattaataaagacctgcttactaaactaatcttctacatcatatgtctttttgtgtggtctatcaacaaktgaaaaacaaaatgtattctaaagtctgtggctgtgagtgtagcttwgctgggacatggactctacacaaaaattactcacttgggcagggcagaccataagcactgaagaagctgagaagaggacaaaatcaatattaagagctcttaatgaataaggtagccaggaaatggaaaacaaattcaagggtgagaagtttagctccaccctagtccgggactaattacacacwcacacacacacacacacacacacacacaattcacacatttattgacctaaagaaagaaactgaggcacaaaatgttattttaaagactttacttgagccaaaatgagaacatctgcctggaagactcagacttgagtaacattgtgtcaaactcctgtttggccattgttacaagcagactttttaaggcagaaaaaaaaaaagaaaaaagacaaggagtgggttgatacaaagctgtttgtctagaattctcatttgtttacagaaataatactggttagtaattgaccatacttgatatgggttatggtgtctggtgtgcagcatttttaggtgaatttatagctacttctggtgcaaacagctttaaaatatgattacttaggggaaaatgggacatgattgctgtg

SEQ ID NO: 279407 - DNA, 595 bp, Homo sapiens
gctgggacatggactctacacaaaaattactcacttgggcagggcagaccataagcactgaagaagctgagaagaggacaaaatcaatattaagagctcttaatgaataaggtagccaggaaatggaaaacaaattcaagggtgagaagtttagctccaccctagtccgggactaattacacactcacacacacacacacacacacacacacaattyacacatttattgacctaaagaaagaaactgaggcacaaaatgttattttaaagactttacttgagccaaaatgagaacatctgcctggaagactcagacttgagtaacattgtgtcaaactcctgtttggccattgttacaagcagactttttaaggcagaaaaaaaaaaagaaaaaagacaaggagtgggttgatacaaagctgtttgtctagaattctcatttgtttacagaaataatactggttagtaattgaccatacttgatatgggttatggtgtctggtgtgcagcatttttaggtgaatttatagctacttctggtgcaaacagctttaaaatatgattacttaggggaaaatgggacatgattgctgtg

SEQ ID NO: 279408 - DNA, 486 bp, Homo sapiens
gacatggcgatgccacagtatcacatagtatgtgtttgtccagactaagacaactgctcaacaagatcacaaagcaatgaaaatggaaacttttctttctttccttttattcattaatcattaaagtatcagcactcaaaaggaaatctatctctcccccagagtaagttgcttatttttccaattgttttgattttggattaaagaactgttaatgcccagaagcacaagaacaacaacaaaaaatgtttacagtcttcacagtctctctgtcaatattatmgtaacttacattaaaataagtaagagtaatatttacttggaaataataagtgcttgagaaaaaaatcaaagaaatggttaattcactaattaggcaaatatttgttgaacacctgtaattaccaaaaagattgttggtgttgaaaatacaacaataaacacatcaaagtctctgttccatggtgcagatagcttagtgctgga

SEQ ID NO: 279409 - DNA, 486 bp, Homo sapiens
gacatggcgatgccacagtatcacatagtatgtgtttgtccagactaagacaactgctcaacaagatcacaaagcaatgaaaatggaaacttttctttctttccttttattcattaatcattaaagtatcagcactcaaaaggaaatctatctctcccccagagtaagttgcttatttttccaattgttttgattttggattaaagaactgttaatgcccagaagcacaagaacaacaacaaaaaatgtttacagtcttcacagtctctctgtcaatattatartaacttacattaaaataagtaagagtaatatttacttggaaataataagtgcttgagaaaaaaatcaaagaaatggttaattcactaattaggcaaatatttgttgaacacctgtaattaccaaaaagattgttggtgttgaaaatacaacaataaacacatcaaagtctctgttccatggtgcagatagcttagtgctgga

SEQ ID NO: 279410 - DNA, 170 bp, Homo sapiens
tattttttactgtagctttgtaataagtaagtcttatagtcaggtagtgtcacttctcccacttcattcttctcyttcgacaatgagttggctcttccaggtcttttgacaaaatcagtttgtcaatagccatgaaataacatgatgagattttgactcagactgacttg

SEQ ID NO: 279411 - DNA, 518 bp, Homo sapiens
aattaattgacacaagccagaacttagtggccaatttaagcactatctttcattttctataagatccactttgtgaataagtagctccattatcctcaaaccctagcaatttaggatgtgaataccacgtgaaatgtgacattttcttatcctgcaatacctacttgaaaatgaataagtgctaaattttgttttgcctaggaattaaatgctaataacctgtctgtcttgatgcagactccagacaagattctaatatgacaaatccaggagttaattcatcctgttatctacattcctgaaactaaaytacaacacggatcttttgttatataatttacatcgagtccctaaaagatatatgaattgaacaagatgattttatatgtatattacttaagatttgcaattctgctcaggagagtctattaactcgtgtatggcccagcagtttttttaaacaaaaggaaagaaaaagaaaaatgagcccaaggctatcaaattatcatttgatcatt

SEQ ID NO: 279412 - DNA, 579 bp, Homo sapiens
gctcaggagagtctattaactcgtgtatggcccagcagtttttttaaacaaaaggaaagaaaaagaaaaatgagcccaaggctatcaaattatcatttgatcattccaastgagattatttccttctgatcccgactcaggtttcttctttatattaaattgaacaaaatgaaatacaatgatacaactacaactttagcacaagtaaatatatacatattttttccagagtttatttttagttgaactcaaccctacaagtcttgggaatcagaaaacaaacaagtcattcatagatgcttctctcaaaaacttaaaatataattgagaaacccacacccagttgtgattttaaaaagctgaatatgagaagagtaaatgtatagagagctttggtagcacaaatgagaacattacttcaaatggagaatattatacatgaatcattgattcacagaatgagtgggtccctgagcaggaaatagaaggaaggctaaagaattatgacgcataaatgtagaagagggaaaagctgaggaaaagcacagtatgaacacaaacacgtcaggtggatttggg

SEQ ID NO: 279413 - DNA, 373 bp, Homo sapiens
tttctaatactttatgggttttttaatgtttaggtttataattcatttgaaaattatttcatgaatggtgtgaaataggagtttcttttaattatgtggagtaaattatacaaatgcagtatgattatgtaagtatgcatctattgaataaatcactttctccacagatctgagacaccatatttattataaacttttataacatgattttgtatatgaacatcatctgctctattggtacagtatttgttcttgtactcatactgtatgattttaaggaatgatatctttataaaatcttaaccaatgataggataattcctactccctggttcttttttasgacaatcttggctattgagtcttttctata

SEQ ID NO: 279414 - DNA, 618 bp, Homo sapiens
gatttattgaaaaagatgcatgaaggccaaaaaagatcatgttaaatagatagcaaattaaccagagatctggtttgtagattataagacaagctaagtttttgtgaaattacttataaaaatgaacttaagacaatgttatatagtggtacaaattggctagcaaataataataacagcctcttctaaaatttttactgagttaagcctctttctaagctctttccatttaataactcatttaaactttccagtaatcctatgaagaatttacagacagaattccagtttttccaataagcaaatagaggcttagtgaaattaatgaactagtaagtagtacaccaagattttaaatccaggcaatctagtccaagaatctgtgacctgatatgccaatgattcaaagtacagtaataataaaatcaaatgattattagaaaaaatgtttttgttaatattctatttgtctttttgtaatgatacaagaaaaaatgaatttaayatatacatatttgcaagagctatattggtcattgacaactgtaaaaaaaagaattcaataaaattataaaaatgactctgatgaccaaagaagcaattttgaaatttcaagac

SEQ ID NO: 279415 - DNA, 566 bp, Homo sapiens
attttatgaggcttcttatcaaaatacagttgacccttgaaaaacataggtttgaattgtgtgggtccrcttttacgtggatttttaaaaataaatatattggaaaaatatgtagagatttatgacaagttgaaaaaacttgcagataaaccatataacatagaaatactgaaaaaaaaatccaagaaaaaatagatattccctgggtgtataaaatatatgtagatattagtctattttatcactgacgctcaaacaacaggagtttgaactatattggttcagttctatgcggattgttttttacgactgccacccttgagatagcaagaccagctcctcctcctccttctcagcctactcaacaagaagatgaggaataagacctttacaatgatccacttctacttagtgaatagtaaatatattttttctttttttataattttcttaataacattttattttctcaggtttactttatcataagaatatgatacaaaatatgtgttaatcaactgtttatgccatttgtaaatctcctggtcaatagtatgccattaaga

SEQ ID NO: 279416 - DNA, 505 bp, Homo sapiens
ctcctggtcaatagtatgccattaagagttaaatttaaggggagccaaaagttatattcagatttttgactctatgtggggacagcatcccccaacccccaggttttttaggggtcaactatatattctttccttgttctgcgaattatctttctgagtggtctcatctacttatggagctttctattgttatttctattcttaaagcacttaaatcttaattttagatgtttgatttgagtctcaggctcarttttttagtctgtattacacttgtcaacctaaaagtatgttaagaatttcaaactcagtatgccccaaactaaattgttgatatgtattccaattccagttatcaagactactacttctattttctttcaatatcctaatggcatcatcttgtacttaaacactgaagcttgaattctgaaaaacaaatgtaacaacttctccttccaccttccagatttaatcagctgctaaatcctgttgagtctaccaa

SEQ ID NO: 279417 - DNA, 609 bp, Homo sapiens
gttgggttaaaactggaaagcagaggcaatgccccaatggcccagaaaactggcatctaatctgagagagatatgatacagttcgacaagctgacaggttatttataaagcataagaagcctccagaatctcactagaactcatattttttgttctacagatggaaaagccctgatgataatctcagaatagtttaagtcagtggtgaactaaagctgtaggaatgcctatacccagattaactacatatcagattgatccagcctccatctctagcaaactgaaagaaaatgtcrtatattttctggaggtaaatactacataattcagtctccactgttaaaaaagtgactaatagtcaaagaagaaatagtcaacagagaaaacatagatggcttgatgacacagttatctgacaatattagataataaggaaactaatgtatctgcaggaaatgaacacatgcataataacatattgaaaatacataaaagaaccaaatgaaattgtagaaatgaaaagcaaaatctattatctgaaatgaatttgttagatttaacaacagattgagcagagcagaatatggaatcaatatattaatatttgaa

SEQ ID NO: 279418 - DNA, 1219 bp, Homo sapiens
gttgggttaaaactggaaagcagaggcaatgccccaatggcccagaaaactggcatctaatctgagagagatatgatacagttcgacaagctgacaggttatttataaagcataagaagcctccagaatctcactagaactcatattttttgttctacagatggaaaagccctgatgataatctcagaatagtttaagtcagtggtgaactaaagctgtaggaatgcctatacccagattaactacatatcagattgatccagcctccatctctagcaaactgaaagaaaatgtcgtatattttctggaggtaaatactacataattcagtctccactgttaaaaaagtgactaatagtcaaagaagaaatagtcaacagagaaaacatagatggcttgatgacacagttatctgacaatattagataataaggaaactaatgtatctrcaggaaatgaacacatgcataataacatattgaaaatacataaaagaaccaaatgaaattgtagaaatgaaaagcaaaatctattatctgaaatgaatttgttagatttaacaacagattgagcagagcagaatatggaatcaatatattaatatttgaawgttgggttaaaactggaaagcagaggcaatgccccaatggcccagaaaactggcatctaatctgagagagatatgatacagttcgacaagctgacaggttatttataaagcataagaagcctccagaatctcactagaactcatattttttgttctacagatggaaaagccctgatgataatctcagaatagtttaagtcagtggtgaactaaagctgtaggaatgcctatacccagattaactacatatcagattgatccagcctccatctctagcaaactgaaagaaaatgtcgtatattttctggaggtaaatactacataattcagtctccactgttaaaaaagtgactaatagtcaaagaagaaatagtcaacagagaaaacatagatggcttgatgacacagttatctgacaatattagataataaggaaactaatgtatctgcaggaaatgaacacatgcataataacatattgaaaatacataaaagaaccaaatgaaattgtagaaatgaaaagcaaaatctattatcwgaaatgaatttgttagatttaacaacagattgagcagagcagaatatggaatcaatatattaatatttgaa

SEQ ID NO: 279419 - DNA, 1074 bp, Homo sapiens
atgtgcctaatttttccttgttgtgagacaagaacccggatttaactgagctaaggagcaaaaaatcttgcatcgatattgtatatcaggttaaatggtgaagacataatagatttgtgtgtgtgtgtgtgtgttttcctctctttcactcagaaaatctttttgttggtcttattgaacctaaactagcctaattctagtggattaaattttatttattccccaaaagtaaatataggtttaaagacaaatactccaaaaagttgattttctcttctggattataatattgactttaaataacttttatatgatgcttctctgagcacattttaactaaatgttccagagcaatttatgtgtgactcaggactcagttacagcaagtgaaataatttgtctttgataaattacaattaactatcaatatgccagaactaaatgcatgggttgaaatatcaaaaaaagaaaaaaaaacccaaccatcggttagtttttcctttgggctctgcaggaaatgttgtagaggtggaagagcatrttttgagatctactacatatagaawaacaattgctccccctcccgacctccccaagcaggagtatacctttttatattgctgtttcagcaagtgaaaaagatgtctcttcctgctgctcaatttagcttataaacaatcttcatttctgaggatactgcaactctcccagatgctctattagatgactaagtgtgtgtctctcatttcatataggtatgtatacttacttatatttacatataggaacatttgtttctcaaagttgaagtatattcattcaactacactcattgaattagatwgacttaattttgtccaaatgacttaggtagaactgtaccgaaattcgtactaatagtattccagaccgtcatccacaaattaagttgtgactcattagctggatttatcataggaacgtgagttgtctgattttctttccataaattatttgtttgtgggttccacattcatagcttcaatgcaacgcaacatttttggagcacctactctgaccatggcattgtgcaag

SEQ ID NO: 279420 - DNA, 633 bp, Homo sapiens
tagatagatgttgctcggcgattggttctcagttgcttctgtgtttggatgtgacccctttctctggcttttcacaagaattgaaatcagtggcgcatcataagccaaggaattcacagatccagctctacaaagtcatatgttaactgacctaagctatgtcactcttcagccaaagctctttttgacaaatttgggtagtcttcartgggtagaaataggagagggttttatttcctatccaaaaatgaagaggcatactgcaatgaaaataaatatttgacaagttcctggtaaatagtaattttttccaaaaggtgcataaaaacagtcccaaaacctctcactattttcaaagcttccttttcattcctaggcatgaaccttaagtgaaaagtcagtgacactaacattcccagagcttcgtagtcaggacaggaagaagggtgctccactcaccaccaataggaccccaatctcaggagctaaaatcagataattgaatatttatgcaagggtggagaatattgtacaatattctcaaccaatataacattcatgataaatcctcaacctgacaaaaacattaaaaacctaccattaaaacatacttaatagtgaaagtggaggccg

SEQ ID NO: 279421 - DNA, 633 bp, Homo sapiens
tagatagatgttgctcggcgattggttctcagttgcttctgtgtttggatgtgacccctttctctggcttttcacaagaattgaaatcagtggcgcatcataagccaaggaattcacagatccagctctacaaagtcatatgttaactgacctaagctatgtcactcttcagccaaagctctttttgacaaatttgggtagtcttcagtgggtagaaataggagagggttttatttcctatccaaaaatgaagaggcatactgcaatgaaaataaatatttgacaagttcctggtaaatagtaattttttccaaaaggtgcataaaaacagtcccaaaacctctcactattttcaaagcttccttttcattcctaggcatgaaccttaagtgaaaagtcagygacactaacattcccagagcttcgtagtcaggacaggaagaagggtgctccactcaccaccaataggaccccaatctcaggagctaaaatcagataattgaatatttatgcaagggtggagaatattgtacaatattctcaaccaatataacattcatgataaatcctcaacctgacaaaaacattaaaaacctaccattaaaacatacttaatagtgaaagtggaggccg

SEQ ID NO: 279422 - DNA, 434 bp, Homo sapiens
agaaagaaagaaagaaaacacaaactgaccaatgtgtgttattgtgaagtgcttatgtacatgtatgtttccccactagactgggaacaccttgaggagggaaaggttttatttgttattgtatcaccaacacctagcacaatgcctgctacatgataggtactaaatatatgttctsagtgtgtacagtagagtatttgaactaaaaatatcttatttgtgtacacaattctttgtcctatccatttttaataaagagataaagttctgctttgctgggccattttgcagcaagacaagatgtgctcttgtacatatggtactggttagatatttgagaaacatcagacaggagtcttcttgggctttcagaagaaaatatatgtgctttatgcttccacatagtcaatgcatagtgcacagggtgtgcctga

SEQ ID NO: 279423 - DNA, 605 bp, Homo sapiens
cttaggctgattccatatctttgctattataaatggtgctatcataaacacatgagtgcagatatctttttaaacttttaaaagtttttaaattttcttcatgtcagacaggtaatattccaacattgccacaaggttcgagggtgacacatctcacacatgtacgtgaacaaccaatcatcatgctcatgaactacaaaaggatcaggtatcttttttatataattatttcttctccttaggttagatacctagtagtgggattgctggatcaaatagtagttctagttttagttctttgataaatctccatactgttttccatasaggttgtactaatttacattcccaccaacagtgtataagcattcccttttctctgcattcttgccaacatttattgattttgactttttaataatagccattctgactggtgtaagatgatatctcattgtggtgttaatttgcatttgcctgatgattagtgatgttgagcattttttcatatgtttgttaactgttggtatatcttcttttggaaaacgttcatgtcctttgcccattaaattttttttaaaaaaattttgagttctgtgggtaca

SEQ ID NO: 279424 - DNA, 1211 bp, Homo sapiens
cttaggctgattccatatctttgctattataaatggtgctatcataaacacatgagtgcagatatctttttaaacttttaaaagtttttaaattttcttcatgtcagacaggtaatattccaacattgccacaaggttcgagggtgacacatctcacacatgtacgtgaacaaccaatcatcatgctcatgaactacaaaaggatcaggtatcttttttatataattatttcttctccttaggttagatacctagtagtgggattgctggatcaaatagtagttctagttttagttctttgataaatctccatactgttttccatagaggttgtactaatttacattcccaccaacagtgtataagcattcccttttctctgcatycttgccaacatttattgattttgactttttaataatagccattctgactggtgtaagatgatatctcattgtggtgttaatttgcatttgcctgatgattagtgatgttgagcattttttcatatgtttgttaactgttggtatatcttcttttggaaaacgttcatgtcctttgcccattaaattttttttaaaaaaattttgagttctgtgggtacawcttaggctgattccatatctttgctattataaatggtgctatcataaacacatgagtgcagatatctttttaaacttttaaaagtttttaaattttcttcatgtcagacaggtaatattccaacattgccacaaggttcgagggtgacacatctcacacatgtacgtgaacaaccaatcatcatgctcatgaactacaaaaggatcaggtatcttttttatataattatttcttctccttaggttagatacctagtagtgggattgctggatcaaatagtagttctagttttagttctttgataaatctccatactgttttccatagaggttgtactaatttacattcccaccaacagtgtataagcattcccttttctctgcattcttgccaacatttattgattttgactttttaataatagccattctgactggtgtaagatgatatctcattgtggtgttaatttgcatttgcctgatgattagtgatgttgagcattttttcatatgtttgttaactgttggtatatcttcttttggaaaacgttcatgtcctttgcccattaaattttttttwaaaaaattttgagttctgtgggtaca

SEQ ID NO: 279425 - DNA, 550 bp, Homo sapiens
ggcgagacaatagcagtgggatgaggtgagacagyaggcagtggtgggttaggctaccatgtcagtctttgtaggccatcataaggactggactttgtgagtgaaatgagaggtcattgagggttttagcagagaagccacttgacctgataataatgtcaagaataattcaaagtggggaaagagtggaagcccagtcaagaagctactgccataatccaggtaagagatgatggctcggactgggatggtagcagtggatgggtaagaagtggttggattccagctaggtcttgaagtagaatcattaggatctactgacagcttggaagtagaggaggaaagggtgaccttaagattttaggcccataataactagaaatctcatgctaaagtggctagaaatattatcaaaaggcatttttagtcaaatagactttagagtctctgacactcaaacatcattcccgtaatctattctataagtactgaagaatgtaccatgctaaaatcctccagtctagcttcacagtaccggatgccttccacc

SEQ ID NO: 279426 - DNA, 550 bp, Homo sapiens
ggcgagacaatagcagtgggatgaggtgagacagcaggcagtggtgggktaggctaccatgtcagtctttgtaggccatcataaggactggactttgtgagtgaaatgagaggtcattgagggttttagcagagaagccacttgacctgataataatgtcaagaataattcaaagtggggaaagagtggaagcccagtcaagaagctactgccataatccaggtaagagatgatggctcggactgggatggtagcagtggatgggtaagaagtggttggattccagctaggtcttgaagtagaatcattaggatctactgacagcttggaagtagaggaggaaagggtgaccttaagattttaggcccataataactagaaatctcatgctaaagtggctagaaatattatcaaaaggcatttttagtcaaatagactttagagtctctgacactcaaacatcattcccgtaatctattctataagtactgaagaatgtaccatgctaaaatcctccagtctagcttcacagtaccggatgccttccacc

SEQ ID NO: 279427 - DNA, 550 bp, Homo sapiens
ggcgagacaatagcagtgggatgaggtgagacagcaggcagtggtgggttaggctaccatgtcagtctttgtaggccatcataaggactggactttgtgagtgaaatgagaggtcattgagggttttagcagagaagccacttgacctgataataatgtcaagaataattcaaagtggggaaagagtggaagcccagycaagaagctactgccataatccaggtaagagatgatggctcggactgggatggtagcagtggatgggtaagaagtggttggattccagctaggtcttgaagtagaatcattaggatctactgacagcttggaagtagaggaggaaagggtgaccttaagattttaggcccataataactagaaatctcatgctaaagtggctagaaatattatcaaaaggcatttttagtcaaatagactttagagtctctgacactcaaacatcattcccgtaatctattctataagtactgaagaatgtaccatgctaaaatcctccagtctagcttcacagtaccggatgccttccacc

SEQ ID NO: 279428 - DNA, 550 bp, Homo sapiens
ggcgagacaatagcagtgggatgaggtgagacagcaggcagtggtgggttaggctaccatgtcagtctttgtaggccatcataaggactggactttgtgagtgaaatgagaggtcattgagggttttagcagagaagccacttgacctgataataatgtcaagaataattcaaagtggggaaagagtggaagcccagtcaagaagctactgccataatccaggtaagagatgatggctcggactgggatggtagcagtggatgggtaagaagtggttggattccagctaggtcttgaagtagaatcattaggatctactgacagcttggaagtagaggaggaaaggrtgaccttaagattttaggcccataataactagaaatctcatgctaaagtggctagaaatattatcaaaaggcatttttagtcaaatagactttagagtctctgacactcaaacatcattcccgtaatctattctataagtactgaagaatgtaccatgctaaaatcctccagtctagcttcacagtaccggatgccttccacc

SEQ ID NO: 279429 - DNA, 424 bp, Homo sapiens
cttttgttgtctttcttcccccccycaactccatgccagaatttctgctccacaatggcaggaatctcaatctattttattcattgatacagtgcctgactcataataggaattgaattgaatgccccgctggtgtccagagaatcagaaaataggttattggtgtggaaaacctccatacctttgaggtcagaagtgttatgaggagatacaatacagctcaacagtacacatttattatctcatcatttctgtgagaaaagaatttgggagcagcttttctggttggttggttggtattgaatagttggtgaatgaactgatgagtgctggcagcataagaatgaataaaacataccaaattctctgtcttctacaaattcattcattcatttattctctctctctctctctctctctctcc

SEQ ID NO: 279430 - DNA, 550 bp, Homo sapiens
tatgaggagatacaatacagctcaacagtacacatttattatctcatcatttctgtgagaaaagaatttgggagcagcttttctggttggttggttggtattgaatagttggtgaatgaactgatgagtgctggcagcataagaatgaataaaacataccaaattctctgtcttctacaaattcattcattcatttattctctctctctctctctctctctctccctccatgcatatagttgccattcactgggttaagtccagctatgatgctatcacattgttccgacctgcaaatatcatttcytacaaatgccctgggcaatccgtggcttctttccagagcagcctaaatgcccttgctacaaaacctagatccctagtgcactgcatattctaatttcccatttgtttttatgaaaataaagtttgcctttcaaatgtaaatgctccagggccccagtcaggcttcctgaactctctgcacagcagtacctctgggtttagggaagaaaacagatttatttttactttcatattggtctaacaa

SEQ ID NO: 279431 - DNA, 511 bp, Homo sapiens
ttagcagcatgtggtctctctggtggcaatttaaaatacctgtaaatgtcaacttgttacatgataaaacattatgaagtaaacttggattagaaactcctttctttgaagcaagttattcaggactaaatgtttataccaaaggttgtaataaggtcccacaactctaaagagcaacacagatgaagcagtcagagctccacaatggaaaggtgagaggagaaggacctggagtcttcttagcagcaggacctactgttagcctggctcttcaaactcaaatggccaagaagtacttcccatcccttgatttaaccacatcagcygcatggatgccttcaacgccgataatgcatttattgacattgaagactatatttccttgagcctattacggaatttgctattataatttaaataaatcttctcataaagtgtaaaatcatatggcttcattttgtatttatttcttttattttaatactttttttggaggactggcattagtgta

SEQ ID NO: 279432 - DNA, 530 bp, Homo sapiens
gtatctaaacctgaagtatcaacaatacatttctatgaagtcttgaaatcactgacactttaatttctgcatatctgaacaaagtactctttgcttgttgactttgggagcaaacaaacaaacaaacaaaaatccaacatagagttgagatggaaattagtgaaggtcgggttttaaatcacatactcaactcgatttatcagtagaactctttagaacgggcagagttacagtttctttagcttcttcattttttactttcaactccattgtctaccccttagtaatttcatttcactttagtactgccaatgagagtgccagttattaaagacaagctcatatcattccattcctttttctgtttgttatctcctggmaagtttattcattcagcgtatagaagtgagtgcctactgcaggctaggtaatagaaatataaataggtatattatccttcatcaaagactacagacaaataagttagtcagcatccaaacagatataaactagtagtgttgagaggatat

SEQ ID NO: 279433 - DNA, 530 bp, Homo sapiens
gtatctaaacctgaagtatcaacaatacatttctatgaagtcttgaaatcactgacactttaatttctgcatatctgaacaaagtactctttgcttgttgactttgggagcaaacaaacaaacaaacaaaaatccaacatagagttgagatggaaattagtgaaggtcgggttttaaatcacatactcaactcgatttatcagtagaactctttagaacgggcagagttacagtttctttagcttcttcattttttactttcaactccattgtctaccccttagtaatttcatttcactttagtactgccaatgagagtgccagttattaaagacaagctcatatcattccattcctttttctgtttgttatctcctggaaagtttattcattcagcrtatagaagtgagtgcctactgcaggctaggtaatagaaatataaataggtatattatccttcatcaaagactacagacaaataagttagtcagcatccaaacagatataaactagtagtgttgagaggatat

SEQ ID NO: 279434 - DNA, 582 bp, Homo sapiens
gttatttctctgatattttaaatagttgaagcctaaagtgcacagatgatatttgaacataatgaggtttttctttctggaatgtagtccttgttataaaaatatgaatgatagtagcaatgagtaggatatgttaataattatttataatggttcattctaagtttaataattaacataaaatggcaaaaagaaacatttgatcatgtgtaatatgtatattgtaaaatgacattgcacaatcagtctagaggaagttaatgagtgcccatttgaaatccctactcatttatgtttatgcttattagtatataataattaataaaatagttggtgataagaaaatggaatatgtaaatagttctccatatgtaagccccagtgatgatattttctttggaaaaatgattcttatatgtcacatttttaagaggccaagtttagtatatccatttcagacaccagaattaacttttatggagtagaktcaggactcttattttctattaaaagaaataaacacgtttctcctctttgtgtttaggagaatactaacaataatgtatcatgggtttaaagaga

SEQ ID NO: 279435 - DNA, 437 bp, Homo sapiens
tttgttgtctgccacagactgatttagggtaattacttccctcacttattttttgctgtaatttcatgatctaactctctattccacacaatatctctggcaatgaactttattaccactatggcttatcctggtgtcctaacactcattcaggttacaaggagaacagggaataaagaggaccattcaggatgatgtgggaccacctcgaagcatcagtgtgctctgagggtcttcaggaaaatacctttctcgctycacatctctctcctgctgctcactcacatgactactggaagcacattccccaccaccacacaagcccacatacccgcacacaaccctcacccaatgctggagagaaagcactccaggaggagaattctgtcatactccttcacaccatttcactcttgaaactcttcccaccgatatct

SEQ ID NO: 279436 - DNA, 547 bp, Homo sapiens
caaaccagcactaatgcattttttttgttgttgttggaaaaatagtgagagccatgtgagcaacaatcttagaaaaactgtaataacaaagagaattaagccctcctgaggtcatagttcacacatgttaaaatgctttttttttttagcttatccacaattagatggaattaacacattttcatggtgtttaatgaaaaatggctaaagcatacctcctttatttttaagtggattaaaaacatttytgcaaagtcttgtcttccaaaatatggagaaaaaataagaaaggaaatatctcctcagggaaagctaactactgttttagttaatagtttgctttaacttagaaaaacttaattcggaaaaatatggtgtgaattttgcatttggatgaaattgaattcttttgagggttttaggtaatagaactataaggtatctactagtttctctccttttcataaatgtatattataaaagtacacttgaaggaaactaatcaaatctgacagaaaaaacattttaaatggtaatgtgatttttt

SEQ ID NO: 279437 - DNA, 526 bp, Homo sapiens
gaacttttctcaaacattctctaaagtgaatactttgccttactgataaccagtgccattgcaatacaaaccaagcacagaacaacagagattgggcaacctacaatctgcattcaacttgaagacctttgaggacggggttctgtctgcactgtcttcttctgtgggatggtggtggtgtgtgtgaacaagcgcaaagtccatatccagtgatacacttttaatattctattccttaaatgacatatttaatgcaactggcatttattgtcatgcattaacaggcaaacatataagtcgcgggaaaacgccatcccatgcaaaatttatatatatatayacacacacacacacacacacacacacacacacacacacacatatgtatatatataaagcatcatttcccaaattgcaacatcaacatatagccctactctgagttatgtggtcctagaagtcatgtgtcttctcatatatgtgtgtatgtgtgcttgcctaaacacacaaattcaaaatactgttc

SEQ ID NO: 279438 - DNA, 562 bp, Homo sapiens
catccactggggtccatgaaacgtagcccccgtggataaagggggggctactgcacacttaaatatggactactgttattccctctgcaaatacttcttggaaagttattaaatgaagataatgtggagtcctgtacaaaaatcagtcaacttaataatactccaaagacattaggctttttaattactggtagaaaagctgttgtataagtctcactttgtatttcaacttgaagcagcttcctaggattccataccaagatcttcccctttacctgtctatattttacactgagcttgaagagatagtttaagattggctgtaggagaaaaagccagaatacaatggtgcatttataagaacctaatacctgggcaatgtgttatgatgtttaactatttaaaaagaaagactttatactgggaaattaagtcataaagatgccaccattcccatccattgactccacataccrctaccctccaatgccaaagtccacagaatttggccatcaaatatctatatatagttttgatgaagttaggagatttacctaaattt

SEQ ID NO: 279439 - DNA, 512 bp, Homo sapiens
tttgcaacacttatcttatttgatctatctcaacataggtctaacaaatgcatggcaatttaatgttcaatacaaaaataaatgaatttagaataaatcccactataattttakgtttaaaaatatgttgcaaaatacactatagggagaaaaagcatgggaacaaagattaccagacctctctgaaaattaatcatcatgtaaaatttgtcattggaacacttacacggaaaaaaatagatgaaggtttgtcccttttcacccacaaagccaattctgtgccttcttgcttctttctcaccaaagaataatgtctttttgtacttaccacagtggtcccttttggcaaatgaatatttttattatactagcatttggaactttaacaaagaaagacagatagagatatccacccacaacattaaggttttgcttttctcattcatttacatcaaaaaaagagttacaatatttaaccaaagttaatactcagaaatgtttagattggacac

SEQ ID NO: 279440 - DNA, 548 bp, Homo sapiens
ggggggggaggcagattttaggagagtttccttaattatagtttttatattctctttgagattgttcatcctcaataatggggaggggtttggagcatttctaacacaagggaagatcgctggctaagaggaagaggggtagatggttaggtcctttgaggaggagaggtctgggttgtcatcagtgatagggaaaatggcagttatcgaggcaggacataaaacaaaactgttgagctctagcatgaccttcccccaaacgcyatgcctcattgattagcggtggcacaaattggaaggctgagtgatttccttgaaaaagggtcagctgtttaaaggtgggaatagaaatcacagatagtttgatttacccatagttagaggattgcataaaatataaaaagataaggagaaaaggaatcaagcacttaaaaataaagcgggaatcgagatattggagctatatactagggacttgatcataagagcaaggaaaagtccattttctactgtttttgcacagaaacaaaataggtctaggagggtta

SEQ ID NO: 279441 - DNA, 1136 bp, Homo sapiens
gaaaaacaaagtgacaacaaagtaaagatatctgaagataacaacagttccttgatttcttaaacagtgcaaagaagttaaagtagaaggaagttaggcctttgcacatttaaatttcatcagggcatcttataaaactttggcaattttattagatcttrgattcctcacctaaaaatattaatgtatgtactaaactaactttaagttctcttcatgctctttattataaaaatatagtacattaacttggagtacatcttagggacatcttgaaaaccatattttaaaaaataatctctaatggagaaagaaaggtgtctctctctgacaatacaggtgaaatttgtaagctactttaggcaagttccttcctcacttttccaaaggaatgcattttgattttacaaaatgctgtataatcttaaaatattttcatagatatttcctatatgaatagaatattttttccaataaaaatgtgaaggaaatggtgaaccacagctatcaatttctctctgaatactatcttttaattataccttgctttcagctcctccttagtaagacagatgtgawgattgcttgagtttaaaataacattatatgttctttcaggtaagtacaaattaacctgatcaaatatagaagcatattgggaaatgccacaaattcaaaatgttgaatactaattatatcaatactttaatctcattactgtcttatttttgaaaaaaaaaaggtaaattactattagagacaaaaaagtttctcttttttcctcaaagattcagttgttcttagaatgaaggatacagataaatacccaactgagatattcatcaatttatttcttctttctttctwtttatttatttatttatttatttatttatttatttaatttatttatttgagacagggtctcattctgtcacccaggctggagtgcagtggcacaatcttggctcactgcatcttcgacctcctgtgctctagtgatccccccacctcagcctcctgagtagtggagactacaggtgtgtgccaccattgcatttttagtagagatggcatctcaccaagttggccaggccagtctcgaactcctgacctcaagtgacccacaccccctt

SEQ ID NO: 279442 - DNA, 585 bp, Homo sapiens
gtaaccctgggcacatccaaacctactgattcagttttccagggatgggttctgaaatctgcatgttctacatgtttctagatgaatgagaacaattgatctaatccatttcagcccaccttctcacttggttgatctaatactagactagattattcctgttgaaactagtatttcattattgccatcaaatcccattgttttccacctccrccctattcccataccagctcttaaacatggcttttctcaaatcatctgatatatttcaatcacttttaccacagaggcttcactttttcctactttatgcaacattatatttaataaatatcttctccaaccaaattaagctctgtgataacagggacatttttagccttgttgagctttgcatacacagggccaaataaagagtctagtgcatagtaggtatccaatacctatctgagaacgaatgaatgcatgaaggagagaacttgctcttggctcccttgtgctgcttctacaatcatagggcatttcttcatttggaatataccatcaaactattccacatccctcttcaaattcattgattaagac

SEQ ID NO: 279443 - DNA, 578 bp, Homo sapiens
tgtgggtgtttttttcttcttctttttctttcccagagactggtcaaatcacactggctccagagtttggccctcctgccctagcaataaaggtcatcagtagcatggagtcagctttggatatctcccaatcagaaacaaataacagagactcctttgggaatccattgagaccattacagaccttccaatgaacagttaagctttgtagtgtgcctcctcgagaaacagctgtttgtctaacctttgaactgaccgatacattaatctgaagcataatttagttctgtctgagctcttgggtacagcatgaatagctggcttggctcatattataccagtctccaaaataatactttatgtgcttgtttaaaaatagtcattttcccttcccaatttaattatgtatgattattcgataaggggatgccagagctggtgtatagttcctacactcccattctgataactctactkctatctagccttgatcctgctgttatttcctgatattcatcagaatccgtaaagcagctactctctggagcctcttttcacaccaaagagaaagttgcacc

SEQ ID NO: 279444 - DNA, 499 bp, Homo sapiens
tcacaccaaagagaaagttgcacccagggcttcgctcaggtgaggagagattaagagagtgatgcacaggcacaagcgcccacattgtgatgtgctgcggttgtcgagtaacattgtagcattcaacaaaatagccttattctgagggagcctcctgtggagtctctttttgcaagctggagaaggttcrtagcacacaaaagtccgattttgtaattcctttataagaaccagattcctatcaattcaatagaaagaatgggagagaaactctagcaactaggaagatacttggataacgaaggtgtaactggaatactacaatctcattcctctatgaaatgaagcacattaagtcgttaagaagaaaacaagagcatgttaactgaaatagtttacaattaaagagaaaatgataagagcacattgtaaattactcagaaaccttaggtacgccatggtcttaaggaactctgtttatttttaaaggaaacgggaa

SEQ ID NO: 279445 - DNA, 622 bp, Homo sapiens
gaatatttattattttaaaaattttagaaagatatctttccacatgtatgccttgcatttctcttgcttttctttttatttctttcttatatcttccttttttcctcccttctttcttttctttccttctctctctctcttcctcctttcttttgcttgtttatttttcagctgtgctctttaggacaatgttgaacataagtacaaaagctgattaaaaatatttttgacccctttctctgataacatctcaggcaccatctaagaatagaaaatgaaagtacttattttaataaaatttatattagaaacccagagaaaacataatatataatagaaaaacatcaaaaaagtacaggctatgcctgtagactttcttcaagattaaaaaaaaaaatctcatattgggagttgtgatcctttcatttgttcaaaacttgtttatttctgttctgtttttcattgttcagaactgctaaagaaagtttattttcttggtgttatgctagtctccaaaaataatccracatgctttaccatttttagatgctcttggaaggctttaataagatagggaacactggtttcctgatgaattcacatcttgtcaaaacaaaaaaga

SEQ ID NO: 279446 - DNA, 1226 bp, Homo sapiens
atgccttaataaaatagtgcatggagtgggccccctcaggtgtcagtttgtaagaactgttttacaaaagggraaaagttgttagactcagcagtggttatgatttggggaacaggcgaggaatggagaggaaagcatggcacaagtctccaagccctgctcaagggttgcacacacacatgaagacagtatgtgcagtcaaagaagtggagctctttcatttgagaccgagtgacccaaggccacaaccaggcagcagcatcactgctcgaggatcaaagtgggacctgagagcaggagtcatatagcttgaagaatgctgagaaacagtacacttggcattcgtgtcgtcattggcaggaaggaaccagcagtggtggagagatgcttcatacagcaggtgcagcaagtggcagactgcaattacagaaggtggggtgcaggatattatgtggaacaactacacgtgagcttagaaaacatcatctctgagcacactcagaaatcactatttgtgaatttgagttatgcgccaaccaccaacgtgcatacacaggtggtgcagaaacccgtgacatgtgttgccaatgtgwatttttaagctattgtttattgagagaatttaatacaaatcattgttcatataccaccattaatcatcataaacatcttacaaagtaaggttcattcctatgtcacttgttagaaaactaagttttaccaaagcttgggacttawccacactacacaattcttaaaattatatctgaagcatgtctcctgggctcaaaacctagggatttttatcactttactctctattctaacacatgatttaatgtttgaagacatcaatataacaaatcttatgcttgtgggttaagagtcatacaagttttaaaagacttgacttaacatgtagaaaccttacataattctctaccaagtcagttcaaagaatattatatagcatccaatgataagatacaaaggtaaataactattcaatctattatatactgtgagcatcattcttttgcttttgtgaagaaatttcataaatcccagtttatcctgttaaatctttttgggctttctgtagccattttctaactttgagatgagagatggaaaagaaataaaactgatgagtttttttactctatataccatagtgttggaaaagtcaaattcataataatcagtacaactaattaacacaaaaa

SEQ ID NO: 279447 - DNA, 1187 bp, Homo sapiens
aagaaacaaacaataaaaactaagtggcagagtcagtatttgaaccaaagcaatttggctcaatacagagctcttaaccattgcaaaataacgcttgtgtagtcttttaaattccttgatcatttgaaaaattatctttatactcgggaggctgaggcaggagaattgcttgaagccaggaggtggaggtttcagtgagctgagatcgcaccgctaaactccagcctcggtgacagagtgagactcaatctcaataaataataataataatmatcatcatcatcatcatcatcttgtggaaggcatcaaaacttaattaataagtgaagatacttggaattaggcacattttaattcaaaataagcatgattcaaaacatattcaaaactgatgactgtttgataacctaatatacattgcaaacatattgaagaggactttaatacatactgtatcttatgcatgcaatcttctctgtgataattattatttcagcatatataacaagcacaatgagttgtctttgcaggcagaagagaaacatgacatctaaatgaatactttccccttcaaaatagtcacttttwatgtatgtaaatttacgtggtggttattgttgtatttgttggaggctctccgtaggcctaatagatagcatttgttaaatctaaaatgtgtaaaaatcaggaaataagatgatgaactactaaatgctagctaaacttcgcatttctcataaaggctgagatggaagacacagcttagcatgacaactaaatggtcctaagatataatatagaccccccaagttaggtgggcatacctagggaaaatactggattgaaacagatttggcaacaggtgaggtcttcccaggtagtactaaagctattawagaacgagtcattaaagatacttaaaacattgaagcacccaatcccagcaagtagcttgctcctaagagaaatgaagaagttgctgagccaaactttgtctctccaaatttactcctacaaatttatcagtcagataagtcacaacacctcccttgggccagaataaataatgggacaaagagagagcagggatgtcacattgttgagcttctgttacaggtatgaaactaataagagcggagaatacacatctcccacaaaactctctatatacattataaattatatcc

SEQ ID NO: 279448 - DNA, 599 bp, Homo sapiens
atgtatgtaaatttacgtggtggttattgttgtatttgttggaggctctccgtaggcctaatagatagcatttgttaaatctaaaatgtgtaaaaatcaggaaataagatgatgaactactaaatgctagctaaacttcgcatttctcataaaggctgagatggaagacacagcttagcatgacaactaaatggtcctaagatataatatagaccccccaagttaggtgggcatacctagggaaaatactggattgaaacagatttggcaacaggtgaggtcttcccaggtagtactaaagctattaaagaacgagtcattaaagatacttaaaacattgaagcacccaatcccagcaagtagcttgctcctaagagaaatgaagaagttgctgagccaaactttgtctctccaaatttactcctacaaatttrtcagtcagataagtcacaacacctcccttgggccagaataaataatgggacaaagagagagcagggatgtcacattgttgagcttctgttacaggtatgaaactaataagagcggagaatacacatctcccacaaaactctctatatacattataaattatatcc

SEQ ID NO: 279449 - DNA, 581 bp, Homo sapiens
ttgttcttaaatctgtgtacaattatcttacttttattattggatttctagcatctctatagcattttaggtaaaatgcaggtatctttattgcttcagcattgttgtggagatacaatttcaattccgtactatatatcttaaatgtttttaccatttttgaaatgagaaccaaatataatcaaggttttcactacaattacagcattcaatgactgctgctttgcattctctttgtcctttggttatgagccaggacaattagcaagttgtttttctagagatgaaactggaatctaaaaagtttaggatgccttgccatggccactcaccctgttagttcaaagctttccagtagttttatcctctgctttatctagtgctggatctccattatttttcacatctatttttacttatactctcttactaaaatgcatctaagtgtgtaaatgaaagtaattacacagaagccctggcccatgtccaagccttaagaactttctcaagcagaagatatattctacctygaccttatcaatgtacagctaaaaaataaaaagaatgcctatagataccaa

SEQ ID NO: 279450 - DNA, 1054 bp, Homo sapiens
atatgtcacataggaagttcattttatccaacatcagggagttacacttctcaaaattaggtgtctcatggctaaaagactgcaatttctctattgccgttgtgaacactggtaacgactgaaggtttgctggcaaaaattcctcctacatccagccagagcatcagagaactgaaatatatgtctttgatgtgactatattgtcctctcagagagctgatttccctgaaatggggtgttatgttgtgtctatagcttatagttatttcatgtattgtatagatgaacatagggatggaggatactttatctcactgtatctttcctataaaggggaaaaatgtttttgagacctcaatatcaagaaaatctgcatatactgagtagcaactgtgggtgggtatgtttttgtgtgtacctgtgaatatatgtgtgcatgagaatataagtgaatacgtgaaagtcagagagaatatacgtgtgtgtgaaacgatgtgtgtctaaatattaatggatgtgttattaacagcstggtgaatctcaaaactaattatgccttttacttggatttggctwttcattccttgagatacgtctgtgaagctcctataactggttaaccactatgataggtgttgaagacagagaaataaatcacatttactaaccttgagttgctattattagatggaaggggtttttgcaataggtttactttggggaagaggaatgttgagwttcctttgtataaccggttactgctggcacccaagttgaaaactcttactggcttgtccacatgggacctgttggggaaagcatcaacccatatatggacttataaatctctttactttgggggagaagacaaaaagaaagcaccttattttctatatttttcagactcctcaaaaaatcgaatatttttactcccattttacagataaatagtataaatagtttgcctaaggccacaaatgtataagtggtaaatttctgagtggaactcagataatctgtctactgactctgctattcctgaaacttactagtc

SEQ ID NO: 279451 - DNA, 478 bp, Homo sapiens
ttcattccttgagatacgtctgtgaagctcctataactggttaaccactatgataggtgttgaagacagagaaataaatcacatttactaaccttgagttgctattattagatggaaggggtttttgcaataggtttactttggggaagaggaatgttgagtttcctttgtataaccggttactgctggcacccaagttgaaaactcttactggcttgtccacatgggacctgttggggaaagcatcaacccatatatggacttataaatctctttactttgggggagaagacaaaaagaaagcmccttattttctatatttttcagactcctcaaaaaatcgaatatttttactcccattttacagataaatagtataaatagtttgcctaaggccacaaatgtataagtggtaaatttctgagtggaactcagataatctgtctactgactctgctattcctgaaacttactagtc

SEQ ID NO: 279452 - DNA, 520 bp, Homo sapiens
ttaaatgtctacaacatatcaacaggtattaatgtttctcattaatgcccctcaatttatctcattttctagggtatctggcaatgtggaaacatgatgacaaggctatttcaatgcaggtatctgctcattgtgagaataagcaacggagaaggtcatgcttagtccctgcctcagcattaacttttatatgttgcacaggtagaggccacttttgtaccattgtattccccaatccaacccaaccactatacatacacacacatacacacacacgygcacacacacacacacacacacacacatcaattgttaacaaggacaattttagagtataaccaattagtaaagatataattttactaagtagaacagggacctaaaatacaataataacagaaatagaaagcaaaaaacaaaagtaaacctcaacaattattacttatggacccaagcactctgcttaccattttacaaacatatctcacatgttctttacaacattctcacaagggcaata

SEQ ID NO: 279453 - DNA, 603 bp, Homo sapiens
aaggaaaagacaaaaaaaataagcatgtactaaaaactctaaaaaatgtaatgcagattaaaacagaatgaactcagaagttttaaaaatatgcctgtacaactagacttgaaatctgtttttcaaattctaagattaaatcagagctttcagattaatatcaccaataaaaatggattatcatcaaaagaaaatacaaaaataactggaattttaattgatatgattaagaaggattatataatctctagagggacatgaaaggcaatcataaaatccaagaaaaacttaaaaacaaaaagcttagataaagcaatgatggtgagaamcttttagaatatttggaaaaagatctaatctaacttcgaaccttagaattctctccccattgcacagaggtatggttgcttaggactgaatttctttcctatttattgctttaggaaataaaatgctgcctgaaaatagcatagtattttaggttgctagctctgtatttaaatggcctggacttttatttcaaatctgatatttattaaaaatgtggctttggcagcttccttaaatattcagtggctgtctccttgtggttaaatgaggatt

SEQ ID NO: 279454 - DNA, 509 bp, Homo sapiens
atcagaacctaattgatctgggggaaaggaaatactcarcttaagcccacgctaggcatcttgccctatctaagggttggggtgagagtgggggaggttgagaatcacttgtaatgttcatagcccaggagcataggctcataaaatactgagatctagtcataagactgtagtagactacttgttcccacacattttaccaacacattgctaaagacctatttaccagagttccttttacccagtatagcattgccctctttcaacaaaatattacaagtcatactaaaaggcaaaaaaaagcacagattggaaaggctgagcaagcatcagaaccacactcagacatggcaggtatgttggaattatcagtccataaatttaaaacaactataattaatgtgcaaaaaaacagttatggaaacagtagacaacaagcaagaatgtatgggaattgtaagaagacaggtgggaattctaagaaagaaaataaaatgctggaggcaaaa

SEQ ID NO: 279455 - DNA, 655 bp, Homo sapiens
tatcatatatttatatctctctctatgtagagacatgcaattcatacacacagtttattattgttgaaaaggccttctctaaaaagaaactaccagaggctaacctattgtggttttatcagaacctaattgatctgggggaaaggaaatactcaacttaagcccacgctaggcatcttgccctatctaagggttrgggtgagagtgggggaggttgagaatcacttgtaatgttcatagcccaggagcataggctcataaaatactgagatctagtcataagactgtagtagactacttgttcccacacattttaccaacacattgctaaagacctatttaccagagttccttttacccagtatagcattgccctctttcaacaaaatattacaagtcatactaaaaggcaaaaaaaagcacagattggaaaggctgagcaagcatcagaaccacactcagacatggcaggtatgttggaattatcagtccataaatttaaaacaactataattaatgtgcaaaaaaacagttatggaaacagtagacaacaagcaagaatgtatgggaattgtaagaagacaggtgggaattctaagaaagaaaataaaatgctggaggcaaaaaaaaatcactgtaatagaaatgaagaatg

SEQ ID NO: 279456 - DNA, 655 bp, Homo sapiens
tatcatatatttatatctctctctatgtagagacatgcaattcatacacacagtttattattgttgaaaaggccttctctaaaaagaaactaccagaggctaacctattgtggttttatcagaacctaattgatctgggggaaaggaaatactcaacttaagcccacgctaggcatcttgccctatctaagggttggggtgagagtgggggaggttgagaatcacttgtaatgttcatagcccaggagcataggctcataaaatactkagatctagtcataagactgtagtagactacttgttcccacacattttaccaacacattgctaaagacctatttaccagagttccttttacccagtatagcattgccctctttcaacaaaatattacaagtcatactaaaaggcaaaaaaaagcacagattggaaaggctgagcaagcatcagaaccacactcagacatggcaggtatgttggaattatcagtccataaatttaaaacaactataattaatgtgcaaaaaaacagttatggaaacagtagacaacaagcaagaatgtatgggaattgtaagaagacaggtgggaattctaagaaagaaaataaaatgctggaggcaaaaaaaaatcactgtaatagaaatgaagaatg

SEQ ID NO: 279457 - DNA, 525 bp, Homo sapiens
gcatgcagtgaaggccaatagatgaaggtagagtgctgatactttcagttaccacatcaactacaaaataagcctagagaattataaaggcggtgattcactgaaggtaacaatagcaattgcaaaacccaaacaccaactcttaactatgagggttggaatcaaccctcatactaacggcctagcatcctagcaaaagaaaagctatgatcaattcaggacacgaatattacttacctcagtctctaatcctttatgtatgacacctagccctcagtaaaaaatttagtgacacgcacaaaagcaagggcrctggtggcaaggtacaacccactgtgaagagacaaaacattcaacagcagcagagtcagagaaagctcacaggtggaatgagcacacaggaaatttaaattaattatgattaatgagctaaagactgtagtaatgaggtggaaaataaggcataaacatgtgggggatttcactgggaagaccagaagtataagaaacaattaaatggaaatg

SEQ ID NO: 279458 - DNA, 653 bp, Homo sapiens
ccacatcaactacaaaataagcctagagaattataaaggcggtgattcactgaaggtaacaatagcaattgcaaaacccaaacaccaactcttaactatgagggttggaatcaaccctcatactaacggcctagcatcctagcaaaagaaaagctatgatcaattcaggacacgaatattacttacctcagtctctaatcctttatgtatgacacctagccctcagtaaaaaatttagtgacacgcacaaaagcaagggcgctggtggcaaggtacaacccactgtgaagagacaaaacattcaacagcagcagagtcagagaaagctcacaggtggaatgagcacacaggaaatttaaattaattatgattaatgmgctaaagactgtagtaatgaggtggaaaataaggcataaacatgtgggggatttcactgggaagaccagaagtataagaaacaattaaatggaaatgctattaagagcaaaaataaaagcaacttcagcagcaaaatggtaactgatgattaatgccattggcaggcatcagttaactttacgtatctgaggaaaggatcagtaaacttggacataggtcaatggaaatcacctaaaatgatatactttaaacaaagagtataaatactataaaac

SEQ ID NO: 279459 - DNA, 653 bp, Homo sapiens
ccacatcaactacaaaataagcctagagaattataaaggcggtgattcactgaaggtaacaatagcaattgcaaaacccaaacaccaactcttaactatgagggttggaatcaaccctcatactaacggcctagcatcctagcaaaagaaaagctatgatcaattcaggacacgaatattacttacctcagtctctaatcctttatgtatgacacctagccctcagtaaaaaatttagtgacacgcacaaaagcaagggcgctggtggcaaggtacaacccactgtgaagagacaaaacattcaacagcagcagagtcagagaaagctcacaggtggaatgagcacacaggaaatttaaattaattatgattaatgagctaaagactgtagtaatgaggtggaaaataaggcataaacatgtgggggatttcactgggaagaccagaagtataagaaacaattaaatggaaatgctattaagagcaaaaataaaagcaacttcagcagcaaaatggtaactgatgattaatgccattggcaggcatcagttaactttacrtatctgaggaaaggatcagtaaacttggacataggtcaatggaaatcacctaaaatgatatactttaaacaaagagtataaatactataaaac

SEQ ID NO: 279460 - DNA, 607 bp, Homo sapiens
aattaccacactgtcttccacaatggatgaactaatttacatttccagtaacagagtaaaagtgttcctatctctccacaacctcgccagcatcttgttgttttttgacattttaataatcaccattctgactggcatgagatggtaactcattgtggttttgacttgcatttctctaatgatcagtgatgttgatcttttttttcatatgtttgttagctgcatttatgtcttcttttgacaagtgtctgttttcatatgcttatttgtcatctgtaaatctttgatgggtgcacgttcaggtctttgcttatttttaaattgagtgttcattttcttattgttgagttttaagcattctttgtatattttgaatgagtccttyataagatatgtcttttgcaagtatcttctcccagcgtgtggcttctcatctcattctcttgacggtgttttccaaagagcagtttttatttctaattaagtagagcttatcagccacttcttccacagaccatgcctttggtgttctatctaaaaagtcattgccaaacacaggatcatctagattgtttttctatgttatcttttaaaagttttatggttt

SEQ ID NO: 279461 - DNA, 607 bp, Homo sapiens
aattaccacactgtcttccacaatggatgaactaatttacatttccagtaacagagtaaaagtgttcctatctctccacaacctcgccagcatcttgttgttttttgacattttaataatcaccattctgactggcatgagatggtaactcattgtggttttgacttgcatttctctaatgatcagtgatgttgatcttttttttcatatgtttgttagctgcatttatgtcttcttttgacaagtgtctgttttcatatgcttatttgtcatctgtaaatctttgatgggtgcacgttcaggtctttgcttatttttaaattgagtgttcattttcttattgttgagttttaagcattctttgtatattttgaatgagtccttcataagatatgtcttttgcaagtatcttctcccagygtgtggcttctcatctcattctcttgacggtgttttccaaagagcagtttttatttctaattaagtagagcttatcagccacttcttccacagaccatgcctttggtgttctatctaaaaagtcattgccaaacacaggatcatctagattgtttttctatgttatcttttaaaagttttatggttt

SEQ ID NO: 279462 - DNA, 510 bp, Homo sapiens
  misc_feature (1)...(510): n = A,T,C or G
taatcttcttccatcatgaaaatgaactgtaagacattgatcaccatcaatttttattatctattaagataggttaggtcaatatgaattgattgatggaaaattaaaataactaatggctactaggcttaatacctgggtgatgaaataatctatacaacaaaacctcatgacacaaatttacctatgtaacaaacctgcatgtgtagccctgaacttagttaaaaaaaaaaaaaaacagcagtctatctctactttgagataaatgaaagcacctttgtttgctgctgcatctgttgtataatgttttctctgtgtatttctaaaaatgtgtatgtaaactgtattatrtatttccattataaaaagaaaaatactagttattttataaaataatttatatgataattacattgaaaactgtacaattttttaatgactataatgatctcttctatcaactctatacctggnnnnnnnnnnnnnnnnnnnnnnnnnnnnnnnnnnnnn

SEQ ID NO: 279463 - DNA, 619 bp, Homo sapiens
ccctaaatattttgagaatttttgctctaatataattgtatttcttttttcaattatttattgttgttatataacattacatatgattattgtatattaacaccatggtctgcactagctaggatcattagtacaatggtatatagaagaaatatgtatggacatcctttcctttttcagatgctgytggaaaaacatttagtcctgaactgtttgtttaagcataatttttgtttggtgttggcatagattttctttattttaagccattttgaataagttctaatgtatctctatttttctgagatgttttattataaatttgtattatgagaatatttttctgagttaagatatatgatcttaattatgttaataaattgaataacaaatattaaaccaaccttatatttatgaaataaatctgtttggcaagctttacttttctctttctttaaaatgtgccaaccaccattgtaaatatgcatttatattgataaagcaacatatttttgtaagtctgaattaacaaatgtgataaagtataataaattaaaatgttggcaaatgtagaaaataagtatacttattcttccagagtgccaattctagtccgaaa

SEQ ID NO: 279464 - DNA, 557 bp, Homo sapiens
tgatcacattacaattaatccttggtatggtttggatttgtgtccccactcaaatctcttgtcaaatggtaggaggggaccgctggaaggtgattgaatcatggggcagatttcctccttgctgttcttaagatagtgagtgagttctccctagatctsatggtttaaaagtgtgtggcattcctccttcactctttctcctgtcaccttgtgaagaaggtgcttgctttcaccttctgccatgggggtaagtttcctgaagcctccccagccatgcagaactgtgagtcaaataagctcacaattatgtcaatttatgaattacccagtttcaggtagttctttatagcagtgtgaaaatggactaatacaatcctcaaaataagtaaaataaaaatgttatgcttgagtaattatttcacaatgcataataaaactaaacaatggtgagcaggttgagggaggggtgaaacttgcagtgggataaaataaaataaattattacactgtgcaatttattgtgttgtagactaaaatattagatagtaaactattaa

SEQ ID NO: 279465 - DNA, 598 bp, Homo sapiens
ctatgaaaacctttaaaaagtgacatgggtataagagaagaaaggtacttcaattaatastctcattgaatagttttcacctacttacagaatagttaactgcctctttcttgctaacagaaaatattgttttataataataaaaataaaagatactaatgctagttattataaatacagaaattataaaagtatgaggaatatactgtaagttatcaattactatacacttctgagaaaaacagccaagtaaatttttataaatttccatatttgacaaactgtgaagaggttcttagaagcttatagattttgaaataatattgaaggtaacataaaccagtcattagtagtgggtagtactcaactgacatatgacatattgattaatttaaaaaaaatgtatgttcatgcatctattcaaaaataggtaaacagatgtaatatggtcccatcactatcccggcacttaggatacacctattaaccacaaagacaaagatccctgctcttgtacagcttatattctattggggaaacaaagaataaataatatgtataacacatgatgaagttgcgtagcatgtgagaaagtgat

SEQ ID NO: 279466 - DNA, 598 bp, Homo sapiens
ctatgaaaacctttaaaaagtgacatgggtataagagaagaaaggtacttcaattaatagtctcattgaatagttttcacctacttacagaatagttaactgcctctttcttgctaacagaaaatattgttttataataataaaaataaaagatactaatkctagttattataaatacagaaattataaaagtatgaggaatatactgtaagttatcaattactatacacttctgagaaaaacagccaagtaaatttttataaatttccatatttgacaaactgtgaagaggttcttagaagcttatagattttgaaataatattgaaggtaacataaaccagtcattagtagtgggtagtactcaactgacatatgacatattgattaatttaaaaaaaatgtatgttcatgcatctattcaaaaataggtaaacagatgtaatatggtcccatcactatcccggcacttaggatacacctattaaccacaaagacaaagatccctgctcttgtacagcttatattctattggggaaacaaagaataaataatatgtataacacatgatgaagttgcgtagcatgtgagaaagtgat

SEQ ID NO: 279467 - DNA, 598 bp, Homo sapiens
ctatgaaaacctttaaaaagtgacatgggtataagagaagaaaggtacttcaattaatagtctcattgaatagttttcacctacttacagaatagttaactgcctctttcttgctaacagaaaatattgttttataataataaaaataaaagatactaatgctagttattataaatacagaaattataaaartatgaggaatatactgtaagttatcaattactatacacttctgagaaaaacagccaagtaaatttttataaatttccatatttgacaaactgtgaagaggttcttagaagcttatagattttgaaataatattgaaggtaacataaaccagtcattagtagtgggtagtactcaactgacatatgacatattgattaatttaaaaaaaatgtatgttcatgcatctattcaaaaataggtaaacagatgtaatatggtcccatcactatcccggcacttaggatacacctattaaccacaaagacaaagatccctgctcttgtacagcttatattctattggggaaacaaagaataaataatatgtataacacatgatgaagttgcgtagcatgtgagaaagtgat

SEQ ID NO: 279468 - DNA, 643 bp, Homo sapiens
tattaaccacaaagacaaagatccctgctcttgtacagcttatattctattggggaaacaaagaataaataatatgtataacacatgatgaasttgcgtagcatgtgagaaagtgataaatgctatggaagaaaaaaaaatgtggcaccagggagggaatggaaatgatagtgttaactaaggtggcaagagctcattgaaaatcttaaggcggtaaatgaaggtcgactaagcagatacctgggcattgggcatttgagacagaaggaagagccaaagcaacagcttggggaagtatgaggtctggctgagctggaggaaaaagaaagatggtaatgaaaaactatcataaagcaaagggtgatcaagtgagatactgagattatctatgcaatagcacatttgcttgtttctgccgaaggcatgtggaggtgggggcacagaagaaaacaacaagtaagggtgaaactgagggaggccaagaggagggatggtgtctttgcagcgtaaaacttgtgaaggatgattcttagaaatatgttacttagtaaatatttttaagtaatgattaaaggagcacaaacataaacatatgttaatagtttaaatggtgaattaactgtaaagatttttaaaatattaa

SEQ ID NO: 279469 - DNA, 643 bp, Homo sapiens
tattaaccacaaagacaaagatccctgctcttgtacagcttatattctattggggaaacaaagaataaataatatgtataacacatgatgaagttgcgtagcatgtgagaaagtgataaatgctatggaagaaaaaaaaatgtggcaccagggagggaatggaaatgatagtgttaactaaggtggcaagagctcattgaaaatcttaaggcggtaaatgaaggtcgactaagcagatacctgggcattgggcatttgagacagaaggaagagccaaagcaacagcttggggaagtatgaggtctggctgagctggaggaaaaagaaagatggtaatgaaaaactatcataaagcaaagggtgatcaagtgagatactgagattatctatgcaatagcacatttgcttgtttctgccgaaggcatgtggaggtgggggcacagaagaaaacaacaagtaagggtgaaactgagggaggccaagaggagggatggygtctttgcagcgtaaaacttgtgaaggatgattcttagaaatatgttacttagtaaatatttttaagtaatgattaaaggagcacaaacataaacatatgttaatagtttaaatggtgaattaactgtaaagatttttaaaatattaa

SEQ ID NO: 279470 - DNA, 582 bp, Homo sapiens
catggtattcataacatcagatttcacagatgctgatgattttacaaattgactatttcaatttacattccaaccagaactatatgagagggccaaagactagtttttgtcaacacttggcatttttcatagttttcattttagccatttttgcgaaagtttattgttgtttcaatttgcagttcttgatgatttgtaaaattgagcaatctttcatcacttattgatcacctggatacgtttttttttgtaatgtctattcaactctaattgcctatttcctattgtcttgactatccttttatcttaacattatgtagtctgcgcgtgaggtgtttattcttsttgctgttgttgttagatatctgtattataaatattatattctactctgaggactaccattttaatctcttcatagtatactttgatactgaattccttatttgtaacatgttgtaaaatatgtcaggtttattatgtttccttagtccttagtgctttttgtgcactctttatatatctatttaacaaatattttatgtgttttcttgtgaaagctctactattattcttaaaatt

SEQ ID NO: 279471 - DNA, 577 bp, Homo sapiens
tatctccatctattttgcaacttaatgccctattttccttcaatgcctacgttagtcattcttcactcacttatttactgtaccacactccaaacctaccaaaaaaaaaaaaaaagaaaaaaatgtttaagaaaaattaaagatacacttcaattttaaagtctcgtcttcttttttcagctctttcttaattcaggttcttatcatcgcctatacccttcccttgtcacctctgacctctctcgctgtatctaaaatcaggaactatagaaacagggtgacataagcttttctccctaaatactcctcctgtcttccgatttccaatgaaattatcgagacatgcttttgatgtgcaaggaatttcaatgttttacccaaggtagtaaagaaagaatcatattaataaaagagtggtcatcagtcatcatctagttctttttttttttttttctgaaatgttcaacatgacctacttctaaagaaaacttagagaaaattcctaacgtaatcgcactgcttaacttagaagggtctgaatagcaagaytggacacaagaacagttggcaggaaatt

SEQ ID NO: 279472 - DNA, 538 bp, Homo sapiens
taccctctggcttctgagcatccagagagaacatgatcaagacacttctttcctctctgctttctctggcactgtgttatagctggcatgtattcctttatgataagtagttctctagtagaaagaacatttgacaatgcctagagacctttttgattgtcacaactctgatgctacagaaatctagtaagaggacaccgaggatgctgatattttacaatgtacaggacaacttctctcccaaaataacaccacacacacacacacacacacacacacacacacacacacacacacacacacacgagacagagagagagagagagaattatccaatcctaatgcaacagtgccacgattgagaacacctgatcaatgaccacaggtccytgtcaggagccccttgtccatggcaccagctcacacacagctctacctcctccaacttttaagcttattacaggtagtcatgtcttcccactaatactggtctctgtgtggctcagcagctttctttgttttctaaaggctaattata

SEQ ID NO: 279473 - DNA, 559 bp, Homo sapiens
tttcgtcatttttctgagttattttgtattgtgtggacccagactgaaagactaattatcatggaacgttayactcaggatctaattaatttggttaaccaaaacccatggaaatttgcattgtttaactataggatataaacatatacttggtccctcgattacaagtgactctttttcaacccattgtgaaattaatgagaacagatattaatatagtacttgtgacagcagctaggcaaactgtcatgtttataagaaaatcttgaaagcaattcatgcaaattgcaatgtagcttgtcatctttggatcttgtatgctctgggcagagtctattacactggtactgacaggttgcaaaaacaataacaaagaatggtgtaacaaaaaatattgggaagtataaaaaatttcagagaatgaagaagaaaaaatatagatgttgacaaataggacttgctaaaaatgatttcagtctttaaagaaactagggaaagggaaatagagatgagaagagatagcttctgaggagacaaagtaattaaaaacaaagagaaa

SEQ ID NO: 279474 - DNA, 1151 bp, Homo sapiens
aaagcccacaaaaatgctgggttccctttaaaactgcagtccacaggaaattctcacactttcttccaacactctgccttgaggaatttgtcaaaattaacattaaagagtttcagccagttatggactcagtggcttctatttcaggtaggaagatttcagatagatctctctggatgatcctgtctctccagatttccaagaggtagtttcccctgacttgaattatctgatatgtaaaaaataagtcatttattttcagtttctccagcctttgcttattttaaggtgagtgagaacttgtcagctgtttatttacatgttggagctgaaattgaaagtccaaatgctattagtactataataataatatttttaacttagctatgtcaatgccacatcatcctatgtcagactttatagatttgaaacattgggaataacaaagggacaratataatttaaccatagtcaccatctgtagcaccatggatataaaaactacttactgggtgtaaaataggtgtagaaataaagcacctggatcttacttctttatagaagtcatctagataaacagcagaaatcawcaaccaccaccttgatcgttagcagccaccaacattgaggcaaaagccaccaccagcaaaagagattgcctctagcccaatggttcaatgatcatttgcaatttttagtaataaagcatttttaagtaaggtatatacattttttagatataatgctattgcacccttaatagactactgtatagtgaaaacataacttttatatgtactgggaaaccaaaaaatttgtgtgactcactatattgctctatttgctttactgtggtgatctggatccaaatccacaatatctctaaggagagacagacagagagagagagagagagagagagagagwgtgtgtgtgtgtgtgtgtgtgtgtgtgtgtgtgtgtgtagaaaaagaataaattataaggcaaatgtgataaaattttaaaaattggtcaataagtataaagtttttttcaaaatatacataatgactaagaattgtgaaatacattgaataaaatgcagttttatccaataaaaacatatttcgtgattaaacatgtatttaatcattgtttataaatgtatg

SEQ ID NO: 279475 - DNA, 565 bp, Homo sapiens
actatattgctctatttgctttactgtggtgatctggatccaaatccacaatatctctaaggagagacagacagagagagagagagagagagagagagagagtgtgtgtgtgtgtgtgtgtgtgtgtgtgtgtgtgtgtagaaaaagaataaattataaggcaaatgtgataaaattttaaaaattggtcaataagtataaagtttttttcaaaatatacataatgactaagaattgtgaaatacattgaataaaatgcagttttatccaataaaaacatatttcgtgattaaacatgtatttaatcattgtttataaatgtatgtacagttataaggattttacacataggattttatacatgggattttaaaaatcaagtttatgattatttttgctctgaatacagagcatacaactttatgtttaagcttatttrtttaaaaattgttgattatataattcatactataatctataaaaatcatttctccttcattctagtttctaaaccaatataaaatcaaggaaaagaaagcaaattagcaacaggaatgaaaaatac

SEQ ID NO: 279476 - DNA, 583 bp, Homo sapiens
attgtttttaagcgttattgtctttagcatttggcaataacatccaatcattattgtgacaatggatatcttgtttcaaatttttatagcaattatgcscactctgaatcaactaagtgtgacaaaaatgtcacaagctagaaagaagtaaaatgtgttttatgtatgatttaataggttatttattcttttatcacaaattatacttaaacatctttgataaaaataagatatggtttccagatactttatattgatgtgattaatatagcaaaacaggtagaataaaagactgtttcttcacatcaagtatatttatagcaaatatttgcaacaatgcttgctcaatattttggacatgtttgaggctaaatgggatattatctatgatgggcactatgagataatcataaaaatattgttaataataatgtgtattcacaaattatgaaggtattcttcacatctaacaagcagctttttaaataatagactttaggttgattctgtgtctttgctattgtgaatagtactacaatgaacatatgtgtgcatgtgtctttataatagaatgattgatatt

SEQ ID NO: 279477 - DNA, 583 bp, Homo sapiens
attgtttttaagcgttattgtctttagcatttggcaataacatccaatcattattgtgacaatggatatcttgtttcaaatttttatagcaattatgcccactctgaatcaactaagtgtgacaaaaatgtcacaagctagaaagaagtaaaatgtgttttatgtatgatttaataggttatttattcttttatcacaaattatacttaaacatctttgataaaaataagatatggtttccagatactttatattgatgtgattaatatagcaaaacaggtagaataaaagactgtttcttcacrtcaagtatatttatagcaaatatttgcaacaatgcttgctcaatattttggacatgtttgaggctaaatgggatattatctatgatgggcactatgagataatcataaaaatattgttaataataatgtgtattcacaaattatgaaggtattcttcacatctaacaagcagctttttaaataatagactttaggttgattctgtgtctttgctattgtgaatagtactacaatgaacatatgtgtgcatgtgtctttataatagaatgattgatatt

SEQ ID NO: 279478 - DNA, 566 bp, Homo sapiens
  misc_feature (1)...(566): n = A,T,C or G
tcactctcatgatttaatcacctctcaaagtgtccacctcctaatgccctcacatccgggattaggatttcaacttacaaattttgtgagggcacagaccttcagactgttaggatagtntatagaattcttgtgtaccctagacccagttttccctattaacatcttacttgaatatagtacagtaggttcccccagtatctatagttttgctttccccagtttcagttatgcatatgaactgtggttcaaaatattactgtattttgagagagagggaatgagagaaagagagaaaggagagagagagaccacattcacataacaattattacagtatattatggttttatattttattattacttattgttgttatttcttatggtgcctgatttataaattaaactttatcatagttatgagtgcataggaaaaaacgcatagtatatgcatagtatatatagggtttggtactatttatggtgtcaggtatcygctgtggtcttggaatatatcccccaggcataaggcagactactgtatatttgtttaaattaatgaac

SEQ ID NO: 279479 - DNA, 583 bp, Homo sapiens
cagtaaatgagatacataacttctactcactgatgaaacggtaaragttcatccatctttgaaaacacattccacgttaaaaagtccttctagtaaaggatcaaaccaattgagagttccttagtgatgactaagggaaatgtaatatttcttattgggtttacacttaattttgttatcataaaaatatcttaccacacttgtaatgtttaataaaaaattagaattatacttcttacaatcagaaagatgacctactgaaagtattacaaatgtcagggtcagaaaaatgtaagaataaagctggtatcatgaaagaacatttctgacttctgtaaaaatatcaggatttggtcccatctccttcattaataacttttcatcttgagcaatttatctaatcaatctatacaaatatatacaattttatataagtaataacaagaataaaaccttcatcattactttacctgagaaaaaagagagattatgtgtgggggaaaaatctaaggaaactgcaataagcttaagcaaaatttagttatacaaacgtatctcattttattgtcatttgctttattgt

SEQ ID NO: 279480 - DNA, 598 bp, Homo sapiens
aaagctggtatcatgaaagaacatttctgacttctgtaaaaatatcaggatttggtcccatctccttcattaataacttttcatcttgagcaatttatctaatcaatctatacaaatatatacaattttatataagtaataacaagaataaaaccttcatcattactttacctgagaaaaaagagagattatgtgtgggggaaaaatctaaggaaactgcaataagcttaagcaaaatttagttatacaaacgtatctcattttattgtcatttgctttattgtgttacaaataatgcactttctaaaattgaaggtttatggcaacactgygaacagcaagtctatcagcatcatttttccaatagtatgtgctcgttttgagtccctgagtcacattattgcaatatttcaaactttttcattacttgttacactaatctgtgatcggtgatctttgtcattactattataattgttctaggccacaaaaccattataattacatgggccgcaaactgcactcatataagatggtgaactgaatcagtaactgttgcattcctctatctctctccctctccttggggacccatatt

SEQ ID NO: 279481 - DNA, 585 bp, Homo sapiens
agtttgctatgcataaccttgtccaattcggtaccatgccgcatcttagtaccatgtgggaaggtcctctcttcagctgctcaacctttcactttttctactgggctggattaagccatgtctacaaagtatctctgcgtagtggttccctccaagaatactaaatgagaatcccaagcaagattccacctcacttcccttatgtaagaaaactttccatttctaccaaggcatggaaaggttaaaatttgaagaaaaatatgatatttcacttccgtgatttctttttgtttattttttcacaattgtttatggttgattccttttttattctcctcttaaacagcctctatctacaataaaaagcaaatatccaggctatgatgttayagatgagagggtgtcctctcaatagtaggaaaaacgctgtgaactgagacctttttgacacactaaatgaaggaaattatagaaaacattttatcaaaacaactcaacagcctttcacattttcaaaactcaaaactctttgcatttattttagaaatatttctaatcctcacccctatataaacaagagcacag

SEQ ID NO: 279482 - DNA, 563 bp, Homo sapiens
atctacatattattgatagctccctctccttttccaagagkgttcatctgaaaacttagtatttcatcaagcccacttttcttattatactctgccaaacatccctcactatttgacagtgatagcaaagaccaccatccaatatgaataacatcaccttatctcctcatgtaaaaaaaaggagtctatattagttaaccattctcacaagaccccttaggatctcaagggaaagtggtcactttttcccaaggacaagtcttctacttgtgctctactttcctctccttaccatttgtccagatactttcttccatcacctagtttatcagtccacccatcaacaggatctataatgaacatcatcaaatcacctgcatattgacagagattcttctccatgttccatagagctaaagcactctctttctcttcatgaaaaagctcccaatgtgaaaatagaggttgatatggtttagatctgtgtccctacccaactttcatgtcaaattgtaatcaccagtatcaaaggtaggtcctggtaggaggtgattggatggcgg

SEQ ID NO: 279483 - DNA, 563 bp, Homo sapiens
atctacatattattgatagctccctctccttttccaagagtgttcatctgaaaacttagtatttcatcaagcccacttttcttattatactctgccaaacatccctcactatttgacagtgatagcaaagaccaccatccaatatgaataacatcaccttatctcctcatgtaaaaaaaaggagtctatattagttaaccattctcacaagaccccttaggatctcaagggaaagtggtcactttttcccaaggacaagtcttctacttgtgctctactttcctctccttaccatttgtccagatactttcttccatcacctagtttatcagtccacccatcaacaggatctataatgaacatcatcaaatcacctgcatattgacagagattcttctccatgttccatagagctaaagcactctctttctcttcatgaaaaagctcccaatgtgaaaayagaggttgatatggtttagatctgtgtccctacccaactttcatgtcaaattgtaatcaccagtatcaaaggtaggtcctggtaggaggtgattggatggcgg

SEQ ID NO: 279484 - DNA, 533 bp, Homo sapiens
atcaataagaaaaaatataacaattcaatttytaaatgggcaatatatataaagagatatttctcaaaagaatgcatacaaatggaaaacaggtacatgaaaaggtgctcaatatcattgatcatcagagacatgcaaatgcgtactccaatatatatcatcttaacctagttcaaatggcttttatccaaaagacaggcaataatgaatgctgaagaggatgtggagaaaaaggaaccattgtacactgttggtcggaatgtaaattagtacaaatgacatgtgtatttatcttataacatagtttcaaaatatgtaaaataaatagaactgaaaggaggaacttaaaaattccatgtattatcattaaaagaaaaacacacagtaaaaagtaaaagcatcgacaaacttaacacaagaaacatgtacggaacatatgaaaggaaaatatcttggggccccaaaatcactcaggaaaactccagctggaaacttcttagggcaaacctgtctcccattctattcaaagttat

SEQ ID NO: 279485 - DNA, 418 bp, Homo sapiens
atggacaaaatcgtaaagggattaataattaagatagattcttagcgaaggcatttttttaagtgcttggcatcattatttttaatagctccactgtgttcaaaaactcaatcctagcttatttatgctacttctgaatgaagtcctaagatattagtgttttttctcctttcacagtctttaaaatctagaacttcctggtagttcttatcactcttytatgtgtaaaacctttgcttcttcaccagtattctgttgtaccttcatcttccacttatcacttcacataccatattcattcattcatgactattccccattaaaacatattaactgtcttactttttccaaaccttttatttttgctggaatgagcttttcctttaagtccaagcccaaatgtcactacctttataaa

SEQ ID NO: 279486 - DNA, 515 bp, Homo sapiens
agatgcaaaataacgagaagttactatttgcaagtgagatcactctaaatgcatcttcagaaaccatctgatgaggagagattaagattccaaataaatgactcacctaccaaagaaaaataagtatatgagaatattcttactacgaacccttctcagagaaggctgtgaagaatgagaaatcctttccattcattcttttatatgttcacyattttattgcatttattttgttctaggcattgaactgtatactaaatataaaccaaatgagacattgtctgccttcaacagagcttaaaatctaatggtatacaaaatttttaaacaaatagacactatacgtaattacagtaataaatgctactaaaaagaaatctatgagagaaaataacaagagaactctttataatggtcagagaagccctctctgaggtgacagttaagctaaaatctaaaggataagagagctcagccatgccaacagccagaagagttcaccacgcagaaggaat

SEQ ID NO: 279487 - DNA, 605 bp, Homo sapiens
ctgccttcaacagagcttaaaatctaatggtatacaaaatttttaaacaaatagacactatacgtaattacagtaataaatgctactaaaaagaaatctatgagagaaaataacaagagaactctttataatggtcagagaagccctctctgaggtgacagttaagctaaaatctaaaggataagagagctcagccatgccaacagccagaagagttcaccacgcagaaggaatacgtgtgtagggaaaggcctatgtgatttggaatgttgtgaacaatccggagctcaagaagasactgaagagttaagagtcaaagatgactctcatatttatggtttatccaaccagatgtatggtagtgccaatcagatgcagaacactgggagaaacacaggtttaggcagcacttacacgtttaggcttgagaatcctgggaggatctaaacagtgatatcacgtaagtagctgaaagtataaatcttgcttcttgtgaggctggtgcatcactccctcacctatactgtaccatgtgattagggtcccagatgtctcaaccctactggcagtgtctgtcctagactcagcctagtggtggcagcagc

SEQ ID NO: 279488 - DNA, 562 bp, Homo sapiens
ccgtcgcgatggcgccggaatggcgccctggaaccacagcatcgctcccttcgggcccaggcgctcgctcggtgtgtagtctccgcagtcccgaagccggctccgcctccgtcttcgtccggctctgcggcccccgcaaccttggctggttcggcccccacctccggctccgcacaagcgcgcacgcccgtcagcggcacccgaaaacgcgcgctagcgcgcgcgagaacacctcacgtcacagtcgcaacccgtcggtgtccgtgccccaggaccttctctcgttggcgagtcgatggtgcgggcgcgcgcccgctaggcctccggtcgcgcagtccaggaagtggaggaargcggtaagagggatgactaaccgctaagacacgtcgcggcgcctgcagtgaggcatgatgggaattgtagtccacttaggcttattcgcctccatattgtggagcatgtaactgtgggttctgaggcacagctaaagggggcagtagtgagggccactacacattctataaaggggagagggagaaataagtgtcactccaactggcat

SEQ ID NO: 279489 - DNA, 562 bp, Homo sapiens
ccgtcgcgatggcgccggaatggcgccctggaaccacagcatcgctcccttcgggcccaggcgctcgctcggtgtgtagtctccgcagtcccgaagccggctccgcctccgtcttcgtccggctctgcggcccccgcaaccttggctggttcggcccccacctccggctccgcacaagcgcgcacgcccgtcagcggcacccgaaaacgcgcgctagcgcgcgcgagaacacctcacgtcacagtcgcaacccgtcggtgtccgtgccccaggaccttctctcgttggcgagtcgatggtgcgggcgcgcgcccgctaggcctccggtcgcgcagtccaggaagtggaggaaagcggtaagagggatgactaacmgctaagacacgtcgcggcgcctgcagtgaggcatgatgggaattgtagtccacttaggcttattcgcctccatattgtggagcatgtaactgtgggttctgaggcacagctaaagggggcagtagtgagggccactacacattctataaaggggagagggagaaataagtgtcactccaactggcat

SEQ ID NO: 279490 - DNA, 1095 bp, Homo sapiens
cacattgtctgataataatgtcaatttttatttccctcatttccagccgttcyatatttttattttttcttgtttagcttcatggttaggacaacctctagaaccacatcaaatagtgtagtgatgggggttactctgtttctgcttttaatggcaatgtttctaacagttcaccattaactgtagtctttgcttgtaatcagtggttgagaatttgtctttgattctagcacctaacctggtatctgatatatagaaggtgcccactgaataattattgatttaaattctattattctttctagtatatgggcatatattaggtaagagcatttctgtcaggcataaaaatctcagaaaattatacacctaaatgcacagtgattaaagtttgcaatctggtgtagcatcttaaattatccagaggatatgtcaacttgaatatttaagaatctttttaatctctgtgataaacaggaagaagttactctgcaactgaggagaattgatttatgacaaaactgtcgtttttaaacatctgttaatgwcacattgtctgataataatgtcaatttttatttccctcatttccagccgttccatatttttattttttcttgtttagcttcatggttaggwcaacctctagaaccacatcaaatagtgtagtgatgggggttactctgtttctgcttttaatggcaatgtttctaacagttcaccattaactgtagtctttgcttgtaatcagtggttgagaatttgtctttgattctagcacctaacctggtatctgatatatagaaggtgcccactgaataattattgatttaaattctattattctttctagtatatgggcatatattaggtaagagcatttctgtcaggcataaaaatctcagaaaattatacacctaaatgcacagtgattaaagtttgcaatctggtgtagcatcttaaattatccagaggatatgtcaacttgaatatttaagaatctttttaatctctgtgataaacaggaagaagttactctgcaactgaggagaattgatttatgacaaaactgtcgtttttaaacatctgttaatg

SEQ ID NO: 279491 - DNA, 556 bp, Homo sapiens
ccagactgagaatataaatgactttacaataataactctgcaagtcccctgcggaaaacaatgggaaatattgcagaaagcaatgggaaacaggacaaacaagccatgtgtcctgtcaacaacacaatgatattgttttggtaccaaaagaggagcagtaagccttgttacatgcttcgcagcagggatattgaaagcttttccaactggtacaggaatttaggacaaattccagttctgcattagcaagcagaaaaccaaattaaagacagtaagagattccaacatactgaacaagagccacttttttctttaataaacaccaaactaattgaagagagatgcagagagaatgcccgcaagtctgaacttgaaatgcatctcccttttgacaaatctactraaggggagaagaacttactggagggtagtttctccttacaaaataatgccctctacatttttgtaggtcacttaaacccaaacgtgtctgccgtgtcaagtgccagatgtataagataaaccgcccaggggtgtttaacttaccatgtaaatg

SEQ ID NO: 279492 - DNA, 576 bp, Homo sapiens
gatgtgtcctctattatcctacttactgagggcagagctatgtccttgctcaccacagtaaccctaatgacctagcccagagaacagtagactactttaattaataaattaaatgtgcactttgggaggctgaggtgggcagatcacctgaggtcaggagttcgagaccagcctgaccaatatgatgaaacctcgtctctactaaaaatacaaaaattatttaggygtggtggcatgtgcctgtaatccccactacttgggaggctgagacaggagaattgcttgaacctgggaagcagagattgcaatgagccaagatcgcaccattgcactccagcctggacaataagaacaaaactccatctcaaaaaatactaaataaataaataaatgaactgtgtaagattatcaatccatctgtgctcttgactccatccctctcatatctgtggcctctttcttttttggcttctactcagcttatgaacttgctcaagcctttccaagcctaaagcatttcctctttggaatccacatcctcttctagttacatgagtttccttcctcttttcaccc

SEQ ID NO: 279493 - DNA, 509 bp, Homo sapiens
catatccaaccaatcaccatctcttacttttttttttcccccaagacagagtcttgctctgtacccaggctggtgtgcagtggtgtgatcttggctcactgcaacctctgtctcccgggttcaagcgattctcttgactcccgagtagctgggattataggggtgtgccaccatgcccggcttatttttgtatttttagtagagatgggatttcaccacgttggccaggctggtctcgacctcttgacctcaagtgatccacccgcctcagcccctcaaagttctgcgattacaagcgtgagccaccacacccggcccaccacctcttaaagcatttaccctatttgtctaacattctcctgttctttctccagttttgtatgctttgcatcctctctccaatagctgccaggatgatctaaaatacaayctcagtctcttttttaaaagcttcctcatcacctaagagatagaaatctatgtcttcatcttggtataaaaacctgtct

SEQ ID NO: 279494 - DNA, 584 bp, Homo sapiens
aggactaaccactgaaaccttaatcctaaaagaggtgttgcctatccaacaaatgacccatcttctctgaaggaattagcaaattcaactaagaatatttccaaaagcacaaaactsaaaataagccttcgcacagaaaaaatactcaataattttcaatttaactgatctgtttgcataataacaattaactttattcaaccttctcaaatatttaagatcatgacaaacccccggctgacaaggttttggcagaactgaacaaactgtcccacagattaactatgagcatgtttaaaacgaagtggtaagtgcctgattgtgggggagggtacagcatatggtgatttccccctctgaatttttgagttccacactcagaccaacagctgcaatgactagactggacagtggtgctgccaaccaaaatcttccttgtgcagattggttccaggacccccacgggtaccaaaatctgtgggtgctcaagtcccttatgtaaaatggcatatttgcatttaacctatgcacatcctcctatataccttttaatctctagattactaataatgcttaatacaatg

SEQ ID NO: 279495 - DNA, 607 bp, Homo sapiens
ttccaaccgtggaccatgatatctcacttccttaaccttaccttcatatgcttttcctttgtgtcttcttctgaaatgcttcttccttttgtccaggctgactcctgtttgtctgagacttgtgtctcaggaagcctttccgttcccctccagtcattcatacctctgtcataacacatagactgtatttttaatttgatttccaatctgtctcttttaggttgtcaccttttttgagggcaagacctttttgtttcatggctttagtttgctgtgtttgttacagtgcctggcatttggtaggggttgagtaaatgtatacagaataaatgaagcctgggagaaggagttccagttaagagttctaataaataactgttttttcaaaatcttggggctttcatcttgtgtgttgaatgttactggattaggggaaagttgtctttatgaagtgggccctttaaactagtattcctgtttttctgttatagttccctactccccgccccacaccccctctaaaaaaaaagtactagaagttacacacasaactgtagccttggaggctgtaggcagtgcatttaaagtacttctggagtggttttga

SEQ ID NO: 279496 - DNA, 572 bp, Homo sapiens
ttcaaatgtatttagagggcagtctgttcttctgatttcttatttaaaatgtttactttttaaaataattgtgtgatatattggctaaccccctctgcaaataggtttattcatttaaaacctttgggaaatgccttggaaatactgctacactactttcctttttcacttcagtttctagttttactctgtgcatcatytcttttgttactcttaagatgattcccttgattgtctgtctctctttgaagttcatgcctgcttttctgttcataacaggtacaacagttgattgctaaataggattcttctgaagcactgtctgttttaaaacggtgatccctcttagtagagctcccatagaatgccttccgaagttctcttctgctctgtactctctggctgaaagtttcagaaacagagcgactagagtggtctagagtcagaatacagtgtaaggaagcaaaggggatgaaaattgagaaaatcgtgaagtctgtattcttcatgagattttgcagctgaataggactcagaatagttgtagttctcttgggctagataattgtttg

SEQ ID NO: 279497 - DNA, 572 bp, Homo sapiens
ttcaaatgtatttagagggcagtctgttcttctgatttcttatttaaaatgtttactttttaaaataattgtgtgatatattggctaaccccctctgcaaataggtttattcatttaaaacctttgggaaatgccttggaaatactgctacactactttcctttttcacttcagtttctagttttactctgtgcatcatctcttttgttactcttaagatgattcccttgattgtctgtctctctttgaagttcatgcctgcttttctgttcataacaggtacaacagttgattgctaaataggattcttctgaagcactgtctgttttaaaacggtgatccctcttagtagagctcccatagaatgccttccgaagttctcttctgctctgtactctctggctgaaagtttyagaaacagagcgactagagtggtctagagtcagaatacagtgtaaggaagcaaaggggatgaaaattgagaaaatcgtgaagtctgtattcttcatgagattttgcagctgaataggactcagaatagttgtagttctcttgggctagataattgtttg

SEQ ID NO: 279498 - DNA, 595 bp, Homo sapiens
agttttatgagagaagacatttttcctgatgaattggaatgttttgattaaaattttttttttatgttttaagttaatttattagacattagtaagcacttaatttttggggcacagtatgtgtggagactaatgctcaactacaaagttagtttctccatagatgttatgtagaaacttctgtaatcttcagtacctagtttaaaaaaaattagaattaggaaatgatctatatagaagtgaataaatttagtacacagtgactagattgatccctagattgggggatttttgctaatttaatattagatttaatcctaatagttaaatcaactggtaatgccatgaataattttgatccttttgtggttttgaaagatgtattttcagaattaattttattacyctcataacatgctcagagaactttggtgtaaagataatgcgttgtttttcttggtggccaatacaatcttttaaagtgtactttttagcttaggtatccctggaagtttttgttctcagtttaatgatcttgtcaagtaaataccacctaattatctattcctattccgctatcatttatccaggcaat

SEQ ID NO: 279499 - DNA, 532 bp, Homo sapiens
atgtaagtaactttacttttaaaatattacctrggaaactaccactgtgaagataatgatcacatctgtcacccctaaaagatttctcctgccttttggtaattcctccttcctgttcctttgtcacaggcagccactaatctgctttctgtcactatagattagtttgcattttcttgaattttatataaagataatagtgtatgcgtttttttttttttttttggtttgccttctttcagttatcatggttatttgagattaatcagtgtttattttgttattgctgaataatattccattgggtgaacaatctgcaatttaactgtccgttcacctgttgagggacatttgagttttttgcagtttctagctcttacagatagagctgttgtatgcatccctaaacaagtctttgtgtggacatatgcttttacttctcttgagtaaatacctaggagtggaattgctgggtatttttaactttttaagaaacaagctgtttctcaaagtggttgtatcacttgaaatc

SEQ ID NO: 279500 - DNA, 608 bp, Homo sapiens
gctttgtctcccaagctgcttattttttagtagtgtgtgtgtattttgtttaatcttcaagtgaattttaagtttccagttagatagtacaatagtatggtataggggttcatagtagctgagtacatacgtgatccctaagtaacagtgctgatctggctccttgccttcagttcctgccttgtgttgtcagcccggtcttgtcagcccagtctcttcagcttagccaccctagtcttcttttagtgttaactaacgtatgatttttcttcctaccacagggtcgttttccatgtttttcctggctgagaccacccatscgtggccacccccttaccccaccgctggcccagacgtggccacaatttttgaaaaagtccttgatgttcctgtcctttggaacacttccctcatttgcaattttctatccatgtgtgtgattatttgcttgtttggctcccttattagaccaagctttttggatctgcctattcttatccacttttatttctagcatctcctcagtgcctgagatacagcagatgttgaatgaatgaataaatgaaaagtgcaaggtaactagacagaaattcaattagttgtatgtg

SEQ ID NO: 279501 - DNA, 608 bp, Homo sapiens
gctttgtctcccaagctgcttattttttagtagtgtgtgtgtattttgtttaatcttcaagtgaattttaagtttccagttagatagtacaatagtatggtataggggttcatagtagctgagtacatacgtgatccctaagtaacagtgctgatctggctccttgccttcagttcctgccttgtgttgtcagcccggtcttgtcagcccagtctcttcagcttagccaccctagtcttcttttagtgttaactaacgtatgatttttcttcctaccacagggtcgttttccatgtttttcctggctgagaccacccatgcgtggccacccccttaccccaccsctggcccagacgtggccacaatttttgaaaaagtccttgatgttcctgtcctttggaacacttccctcatttgcaattttctatccatgtgtgtgattatttgcttgtttggctcccttattagaccaagctttttggatctgcctattcttatccacttttatttctagcatctcctcagtgcctgagatacagcagatgttgaatgaatgaataaatgaaaagtgcaaggtaactagacagaaattcaattagttgtatgtg

SEQ ID NO: 279502 - DNA, 607 bp, Homo sapiens
cactgtaaatgtcacctgtggagagtaacttcccccagtagagaactatgaaactagaccaggtctccttcttatcatccatagcttcctggtcttccttgatcaccacactcacggcacatttttattttattttttgagacacagtctcactctgtcaccaggctggagtgcagcggtgataccttggcttactgcaacatctgcctcccaggttcaagcaattctcctgcctcagcctcctgagtagcggggattacgggcacccaccaccatgccttgctaatttttgtatttttagtagaggcagggtttcaccatgttggctaggctggtaataaactcctgacctcaagcaatttgtccaccttggcctcccaaagagctgggattacatgcgtgagccaccacgcccagctygtgacacatttttgaagtgacttgtctgattgtctcatctgcttccaaaggctgttatctaggagggcatggcacccagtaggcatgcagtctagcttcatggaagagtgggctctgtgatgggagcaacttcatctgtcatcttcatcattatagctttagtaaccagcgtggtgttggcacataa

SEQ ID NO: 279503 - DNA, 599 bp, Homo sapiens
agggaaacttccctttataaaaccatcagatcaggctgggtgcagtggctcacgcctgtaatcccagcactttgggaggctgaaacgggtggatcatttgaggtcaggagttcaagactggcctggccaacatggtgaaaccctgtctctaccaaagatacaaaaaataagccagacgtggtggcacatgcctataatcctagctactcaggaggctgaggcatgaaaatcacttgaacccaggaggttacagtgagccaagatcacgtcactgcactccagcctgggtgacagagtgaaaccctgtctcaaaaaaaaaaaaaaaaaaccatcagatctcgtgatacttactaactacctcaagaacagtataggggaaccacccccatgattcaattatcactacctggccccatccttgatacacggggatacagagatacagccaaaccatatcacataattcacacacacatacataccacacacaccgtgtatctggargtgaaacattatttcaaaacagctcaaaatattatactggctctatctgtcaggatgctttgattgtaagcaacagaaactgcctctactgatct

SEQ ID NO: 279504 - DNA, 1187 bp, Homo sapiens
ttaaaccgtacctctttgccatgtcccagctctagggctgagccagcaggcttattgcctaagggaaggagaacaagcagagaataaagaggccattgatcagcattagcgtctccaggctgacattcttgacctctgcggagggacaagggccttgaaagcaaggctttatggaggagaaaaggtatttctcaactcctcagatcccttctagcaaagtcaagctgacagctctaaggagatcttcccaatcagagtgtctcaccaccccctgagagatttgataacctctgcccttggagcagcctggcacgatctggrcaggtggggatctcattagtcttctggtatagcctccactgaggttccagatcccctcttggccatgcagcacatcatgcccttattattttatatgtgtgccactccatgaaaaaggtgttggccaggcacagtggctcatgcctgtaatcccagcactttgggaggccgaggcgagtggatcacttgaggtcaggagtttgaggccagtctggcaaacatggcaaaaccctatctctactaaacatgcaaaaattatctgagcatggtggcacatgcctgtaatcwtgatgcaggtagacacactttcagaaacagtgctgtggcaaaaagatcagaactcagggctctgwgtcatatagaaatgaatttcaaatcctgcttctaaggcctacaaaattattctttgggcaaatttcttaatctttgtgtccctcaactccctaaattataaatgaagataatgccatcatagagggctttgtaagataatgtttataaagaatttaccacagtgcctatcatgtagtaaaactccattaaatgatgtctattggtaattcatttacatgaatgagcttctcagataaactaatcattgctaattagaatccagtagcatataagattttgtagcaatgagacatagaatgtataagttttggtgtagaacaggggaagcaggctatattcctcagttccatagtttgaatgtgttccccaaagttcatgtgatggaaacttaatccctaatgcaacggtgttgattatggtgattacatcataagggatctgtccttataaatgaataaatgtcattatcacagaagggggttaattatcttaggtgtgggttagttattgct

SEQ ID NO: 279505 - DNA, 476 bp, Homo sapiens
taacataatcagagaggcaagagtatattrtatttgcttttctgcctcttgtctgggcttaaaatatttcacttggagtgttttcagaattttattatgtcagactggcaaacacacagttaatggactcccagaaaatacttaattgagatactttaatagtcaaaataaagtccacactattgagccataggggaaggagagagagagtaaacttagttttaccagttatggtagaaaaaattatagtcttaatgagcagagtggtccagaccaggggtccccaacccctgggccatagacaggcactggtccatggaggtgagcggcaggcaagtaagcatgactgcctgagctctgcctcatgtcagatcagccgcgcattacattcttataggagcctgaaccctattgtgaactgtgcatgtgagcaatcaaggctgcacactctttatgagaatctaactaatgcctga

SEQ ID NO: 279506 - DNA, 1245 bp, Homo sapiens
gctttttctcaaatttctgtagcatataatcaaaggcaccaaataattgatttatttctcagaaattgaggcaacatttttctctcacaacaataatgttatattttatatgtgtttggcacatcattttaccaagtgtgttttctctgccacatttaatgcttacaataagtctgaaaggtaggcagggcaggtgtgagccctgttttatacacaaggatcaggacatctagagaagttcaatgtctttgctcaaagcctatcattaagcggaagaaagagccagagatggaattcacgttcaatagagctacaaaaaaaatgttttgccytcaaatctttcaagtgtttcagaaaattgtctctggttggagccggtggtagacacagatagagacatgcattcaatgccatgggtggttttgaggagtgtttcatattcttttatgtgatggtcaatcaggtggggccactagaggagacaggagaggctcaggaaagcgagcttaacatattaagtggccctagagatcgaaggcatggcacgttgcatgaggccacatgggagagacactaggctggacaagaggcagaggcaggagcagaaagttgggagggggggwgctttttctcaaatttctgtagcatataatcaaaggcaccaaataattgatttatttctcagaaattgaggcaacatttttctctcacaacaataatgttatattttatatgtgtttggcacatcattttaccaagtgtgttttctctgccacatttaatgcttacaataagtctgaaaggtaggcagggcaggtgtgagccctgttttatacacaaggatcaggacatctagagaagttcaatgtctttgctcaaagcctatcattaagcggaagaaagagccagagatggaattcacgttcaatagagctacaaaaaaaatgttttgccctcaaatctttcaagtgtttcagaaawttgtctctggttggagccggtggtagacacagatagagacatgcattcaatgccatgggtggttttgaggagtgtttcatattcttttatgtgatggtcaatcaggtggggccactagaggagacaggagaggctcaggaaagcgagcttaacatattaagtggccctagagatcgaaggcatggcacgttgcatgaggccacatgggagagacactaggctggacaagaggcagaggcaggagcagaaagttgggaggggggg

SEQ ID NO: 279507 - DNA, 622 bp, Homo sapiens
gctttttctcaaatttctgtagcatataatcaaaggcaccaaataattgatttatttctcagaaattgaggcaacatttttctctcacaacaataatgttatattttatatgtgtttggcacatcattttaccaagtgtgttttctctgccacatttaatgcttacaataagtctgaaaggtaggcagggcaggtgtgagccctgttttatacacaaggatcaggacatctagagaagttcaatgtctttgctcaaagcctatcattaagcggaagaaagagccagagatggaattcacgttcaatagagctacaaaaaaaatgttttgccctcaaatctttcaagtgtttcagaaaattgtctctggttggagccggtggtagacacagatagagacatgcattcaatgccatgggtggttttgaggagtgtttcatattsttttatgtgatggtcaatcaggtggggccactagaggagacaggagaggctcaggaaagcgagcttaacatattaagtggccctagagatcgaaggcatggcacgttgcatgaggccacatgggagagacactaggctggacaagaggcagaggcaggagcagaaagttgggaggggggg

SEQ ID NO: 279508 - DNA, 599 bp, Homo sapiens
gaccactgatgagcgttgatggttgtatagatcccagggaaatctctctgccagactcttcgtcctactgaccaaattcccccaagttcagaatttgcagattttgtagcaggtggtattcttttccaaagatatcttgcattattcatgtcattayggagcaaacataaagctagacgctgaccatacactgggggtgtagcaattcctccaggggcctcgagctcctggttctcgcactgatccagcaactttttgaaactaaaggcgctttctgccatcaccgccactggcatcttcacggccggtctccgggcctaggcatcttgatgccactttatagtcattattttatattatcatcacaacaactctctaagatatgacctattattatctccaattttttgatgaggaaatggaatgtaaatgtaaaagacattgtgctcaggttaaaagtcaaagagcatggagttaaaagaagcagaagctgggatttgaccctaagttgaactctgaaaactgcacttttactacagaaaaactaggttaaaaaaattgtaagacggactactgaagtgggaaattaaagaagagtc

SEQ ID NO: 279509 - DNA, 468 bp, Homo sapiens
acttaactcataggattggtttgttaataaggcatgggcctgaygtaactggtttgttgattaactgggttgttgataaggcataaccccgatataagtaatcaatataatcaatgcatctcaacttttatttatggcaaaattttaaaattatgatttgtatttttctcttggtctttttccctgtcttcattgcagaatggtagccaagcctttctatgctctcttcctccattatgtttggtggggggcagaaaatagaagttaaacaatgtcccaagggcactggggagaatagaagtgtgtggggtgcgtgtgtacttaagaaaatgacaaaagttcaagctgagggagagaactacccccaaggcagggcccccagaacagggaaagtcacatgtattccctggcaaagcctagagtattagcaagaacactgagcagatggctatatggcttctctaaaaa

SEQ ID NO: 279510 - DNA, 468 bp, Homo sapiens
acttaactcataggattggtttgttaataaggcatgggcctgacgtaactggtttgttgattaactgggttgttgataaggcataaccccgatataagtaatcaatataatcaatgcatctcaacttttatttatggcaaaattttaaaattatgatttgtatttttctcttggtctttttccctgtcttcattgcagaatggtagccaagcctttctatgctctcttcctccattatgtttggtggggggcagaaaatagaagttaaacaatgtcccaagggcactggggagaatagaagtgtgtggggtgcgtgtgtacttaagaaaatgacaaaagttcaagytgagggagagaactacccccaaggcagggcccccagaacagggaaagtcacatgtattccctggcaaagcctagagtattagcaagaacactgagcagatggctatatggcttctctaaaaa

SEQ ID NO: 279511 - DNA, 543 bp, Homo sapiens
atttttctcttggtctttttccctgtcttcattgcagaatggtagccaagcctttctatgctctcttcctccattatgtttggtggggggcagaaaatagaagttaaacaatgtcccaagggcactggggagaatagaagtgtgtggggtgcgtgtgtacttaagaaaatgacaaaagttcaagctgagggagagaactacccccaaggcarggcccccagaacagggaaagtcacatgtattccctggcaaagcctagagtattagcaagaacactgagcagatggctatatggcttctctaaaaaaggcggacctggtctctggactcccatgtggggatgaaaggagagacacataagcctcaaggaaacaggggtttggaacatgaggattgccagctgcaatattataagctaaagaggctccactttgcaactaagttccctagattttactataatctagaagcaaaaggaagccccagtaataattgtagcaggaggtggctgaatgctcaccaaacccactttcctgcctaggt

SEQ ID NO: 279512 - DNA, 543 bp, Homo sapiens
atttttctcttggtctttttccctgtcttcattgcagaatggtagccaagcctttctatgctctcttcctccattatgtttggtggggggcagaaaatagaagttaaacaatgtcccaagggcactggggagaatagaagtgtgtggggtgcgtgtgtacttaagaaaatgacaaaagttcaagctgagggagagaactacccccaaggcagggcccccagaacagggaaagtcacatgtattccctggcaaagcctaragtattagcaagaacactgagcagatggctatatggcttctctaaaaaaggcggacctggtctctggactcccatgtggggatgaaaggagagacacataagcctcaaggaaacaggggtttggaacatgaggattgccagctgcaatattataagctaaagaggctccactttgcaactaagttccctagattttactataatctagaagcaaaaggaagccccagtaataattgtagcaggaggtggctgaatgctcaccaaacccactttcctgcctaggt

SEQ ID NO: 279513 - DNA, 548 bp, Homo sapiens
ctgagtcttgtggcatgtgcctgtagtcccagctacttgagaggctgaggtgagaagatcacttgagcccagagggttgagactgtagtgagctgtggtcctgccactgtactccagcctgggtaacagagtgagaccctctctcaaaaaaagtcagtggggaggggaagacaacaatggaacctactccctaggggttgttgcccagattaaatgttttgatatgtatgggaaaaagcactcaataaaactcaataaatgtgcctacttagaacaacatgtagcagatagtgcttttgaggcatttgttaygtgcacctgttgatgtattgttggctagaagttaacacaggggtttcagaatgggcccaaatgtgctttggcaaggagccctttcctgatgaggtaacagagggagccaatgctatacatcctctaccagggacaggggtgcgctcaggaaattatggcccatacatactgtgtcagtacatcacctgccaagggagagtcacatcaaagtctttaaacatgcttatcaatatcat

SEQ ID NO: 279514 - DNA, 565 bp, Homo sapiens
gaaaattgcagggtagcttacaatcccatttctcattattctttttttcctatgtcatacctttgttatactgggtattagaagaaaataaaaatgtcaccatgctttttatattcttttccacttttttccttagrgccttccctacctcatctttttaggatgcattaatgcagataggagagtggaaaaatgatatgtaatcacatgcctctccctccagttcttgattatatcccatctggttgtacagacttcacagtgccagggtgcttaagctcaagtgtgttttttttttgtttttgtgagacagtctcgctctgttgcccaggctggagtgcagtggcttgaacacagctcattgcagtcttgacctcctgggctcaagtgatcctcctgcctcagccttcctagtagctgggaccacataggtgcatgcttttttttttggtagagagaggatctcattatgttgcccagactggtcttgaactcctgggctcaagcaatcctcctacctcagactcccaaaatgctaggattataggcgtgagccacagcacct

SEQ ID NO: 279515 - DNA, 565 bp, Homo sapiens
gaaaattgcagggtagcttacaatcccatttctcattattctttttttcctatgtcatacctttgttatactgggtattagaagaaaataaaaatgtcaccatgctttttatattcttttccacttttttccttagggccttccctacctcatctttttaggatgcattaatgcagataggagagtggaaaaatgataygtaatcacatgcctctccctccagttcttgattatatcccatctggttgtacagacttcacagtgccagggtgcttaagctcaagtgtgttttttttttgtttttgtgagacagtctcgctctgttgcccaggctggagtgcagtggcttgaacacagctcattgcagtcttgacctcctgggctcaagtgatcctcctgcctcagccttcctagtagctgggaccacataggtgcatgcttttttttttggtagagagaggatctcattatgttgcccagactggtcttgaactcctgggctcaagcaatcctcctacctcagactcccaaaatgctaggattataggcgtgagccacagcacct

SEQ ID NO: 279516 - DNA, 609 bp, Homo sapiens
tgcatgcttttttttttggtagagagaggatctcattatgttgcccagactggtcttgaactcctgggctcaagcaatcctcctacctcagactcccaaaatgctaggattataggcgtgagccacagcacctggcctcaagtgtcttttgagatgtttccataaacaagaaagataatatatgtgaccacacttgataaagggcccattgcagaatacaggctggataaatggaaactgagtctcattgaatcaatagactctcttgatggttttaaaataaaagtcatgaggcacagtaccggttacttccatataaggctaagtatttttctatttaaaaaaaaaaatgctgtataggacgataaacaacaaagggaaaagagatgctgcacgcacaggagaatggaatcttgtaccttgttgatgatgtgtatcactccatttgtggctgcrttgtccccatcgacaatggaggccccttcaattgtgatattctgtaaatgcaaaccacagtgggaagatgagtctttatagagcgcaccttgggattgagatgatctctggggtttctgctttttgagcagcagtgaccttcatacttttggg

SEQ ID NO: 279517 - DNA, 447 bp, Homo sapiens
caccatcagggcttgtgctggtatccactgctgggagacctgaagtcaggtcacatcactggatcacttgcagacactagcccagagtcagtagccccactgggtggctagacctagaagaacaataacaacgctgtagtctggctctcataaagtcccattcctaggggaagagggagagcaccacatcaagggaacaccccgtgggacaaaaaaaatctgaacagcagaccttgagtcccagatctttctgctagtgaggagtttcttacagcagagacacaattgcagtgctgggcacagcagggaaagtctacacttctaccacaacagggaggcagcctctgtgatcatgaagggtcttggagaaggggtccttgtmcccttcagtacactactgcagacacagctggggcttctcccacaggaatgcggcatgtatgcacc

SEQ ID NO: 279518 - DNA, 613 bp, Homo sapiens
aacaccccgtgggacaaaaaaaatctgaacagcagaccttgagtcccagatctttctgctagtgaggagtttcttacagcagagacacaattgcagtgctgggcacagcagggaaagtctacacttctaccacaacagggaggcagcctctgtgatcatgaagggtcttggagaaggggtccttgtacccttcagtacactactgcagacacagctggggcttctcccacaggaatgcggcatgtatgcacctatagatggcgttcctagaacaattcaggtgacagcatctccacaggaggagcactccccagattcaggtttgcatgaaaggcagtcacaactcctstctacttggaacataaacatttctacagatgaaaagaggtgcttgtctgatctgaatagctgaaacactgggacaggagtgagaatggaaagtggatagctttcctgctggcctggcaggggagatgaggtagctcccacccgtcactctgattaaacctcagcacatcaaattgagaactaccctagccaacttcatcaagactggaacttcttcccaccgttaggtattacatctacccacctgctttagctacaaccagtg

SEQ ID NO: 279519 - DNA, 515 bp, Homo sapiens
acaccatgcagcccaccagagtaggaggctgccaaggttaggccagcagtggacctgaggtcataaacaggaaaagaaccccaggaggaacattaattctataatgtgacccaacacgacaggtgttgaggaagcctgtggtttggtgggctcacagcagccctagtactcaccccacacataccacaggattgcttattgcaacacggcaaatctaggcccttcagtgttgtgggaatgaacttcagaatgtttgcctcactgtggtcaggaacttatggctggatgaataacagcccccaaatgtgtccctatcctgatccccggacttgtaaatgttatcatatctagcaaaaaggacatgaagatgtgattaagttaaggatgctgagatacggagagtatcctggatcatctaggtgggcctgatctaatcacaaggtcctcttgagagtggaacaggaggacttcgagtcagaggaggtgatratggaagcagagatgggagtgttaca

SEQ ID NO: 279520 - DNA, 565 bp, Homo sapiens
ttgtaatccacttcacttttttttttttttgaggtggagtctcaatctgttgcccaggctggagtgcagtggcaggatctcagctcactgcaatctctgcctcccaggttcaagcaattctcctgcctcagcctgttgagtatctgggaccacaggtatgtgmcaccaagtctggctaatttttgtatttttagtagagacagggtttcaccatgttggtcaggctggtctcgaactcctgaactcaaatgatccacccacctcggcctcccgaagtgttgggattacaggcgtgagccaccgtgcctggaccacttcaccttcttgaggcatcttcgttcctcagtttccctgatctaatgggtatccccaacaatagttccagggagacaatggaaacgattctaccatgagtctgggtgaaaatctttctcatgacaggaaaacaaaattgtcagctagtgctccacaaaatattgagttacaaataatcttagattagttggtggctccatccttgtcacttacctctcatttataagtgagaacgtgcagtatttggttt

SEQ ID NO: 279521 - DNA, 585 bp, Homo sapiens
aagctctggcttcataaacctctaatgagtgagactcttgcctcagtcagtaattttggttaacataccccagaaatgcatcatctcctccaacctttacagccatggaaacttgatatgattattcttgtgtgcaaagaagaattaacctagcaggctgcagaaggttttctttatagcaaggccagcttgcatgattggccactggctggtgtcttagtcagcttggcttccataacaaaatccataggttgcttggcttaaataacagacatttattttttcacagttctgggggctggaaagtctgagattaaggtgctgggtctatttggttcctggtgactctctcctcccggcttgcagaatagggctcccttctctctgtgccctcatttgacacagagagakagagagagagctgtcaggtctgttcttataagaacaccagtcttatctattggatcaggatcctaccctatggcgtcacttaacctccttaattaattccataaaggcctcatttccaaatacagtcacagcgcatatcggcatttcaacatatgaatttggaccaaggggaca

SEQ ID NO: 279522 - DNA, 585 bp, Homo sapiens
aagctctggcttcataaacctctaatgagtgagactcttgcctcagtcagtaattttggttaacataccccagaaatgcatcatctcctccaacctttacagccatggaaacttgatatgattattcttgtgtgcaaagaagaattaacctagcaggctgcagaaggttttctttatagcaaggccagcttgcatgattggccactggctggtgtcttagtcagcttggcttccataacaaaatccataggttgcttggcttaaataacagacatttattttttcacagttctgggggctggaaagtctgagattaaggtgctgggtctatttggttcctggtgactctctcctcccggcttgcagaatagggctcccttctctctgtgccctcatttgacacagagagagagagagagagctgtcaggtctgttcttataagaacaccagtcttatctattggatcaggatcctaccctatggygtcacttaacctccttaattaattccataaaggcctcatttccaaatacagtcacagcgcatatcggcatttcaacatatgaatttggaccaaggggaca

SEQ ID NO: 279523 - DNA, 823 bp, Homo sapiens
cataatgtaggatgaaattttcatgccatgatayaacacttggaagtacccttcagcatgtagagccatcaggaaaagtgtccaaaaaaggacatgaaggggcatgggctaaaacacattgtagacagaaagaacaagtggaaacgcataggaaaagcatggcctctgactcattcctgtggactatttagaattaaacatctgttgctttcaactttcttggtgctctccctatttaccttaagtcatttagctctatcacacgagatacttacatctgaaaatggaagatcacctcttgatatgacagagagatagaattttcagaacwagaacaaagttaattcttcttcagcataacagccttgcaaatataacaaggtaattgttagtgactttgagccctttctccaggctaaataaawtcgatacaccattggtagaaatatgttcaccatcccaaagtcttttctgaatatacacaatagtacagagtttttcaaagtgccagttgcaatcagtgggtagtgatttcagtgcagtggatgagatttagaactgaataaaataaaatacaaaatgtttgtgtgttttccacatagtaagcatagatattgtttcatgaaatattaatttgtttcagatatgtgttcatggtggtgtttctgtgtaaactgactcccaaagtaaaatgtattttttaatgtgggtcacaagagataatataaagtaaaataaaatgccactgatgtatctggggtgaggtctatgaattgcatttttaataagcccccaagttctgaagatgatgatctatagagtt

SEQ ID NO: 279524 - DNA, 556 bp, Homo sapiens
cactacagtcgacactccctgtttcttccttctttaccccctaacctaaccccacactacatactacattaaactatcttgtggaaataggtaaacacaataagaaaatagagtgttatcctgttgccttttctattcctggataactrgatgctgccctgccttccattgtacatatgaagatacaattcagaattgacagccacctaagcctgtcaaatacattgtttagtgaaacgtggaccaatgaaaaattttctacacaatgcataattgaggtctttgagaccttcaagatctttagtgatcttgttttttctcgggcacctgcaacccttaacttgtgtacaaattgaccacaatttaatgaaaaatcagcctgaccactacccagggctctaggggtttctaaaatataaagaaatataagaagattagaaaaaccatgcgtaagtctgtggttgcagccagtaagactgggaggtaggaggcaaggcccttcatggtcttgagaaatgataggtggttggtttgtaaaccaccttctaaggaagct

SEQ ID NO: 279525 - DNA, 469 bp, Homo sapiens
gaactctctatgactgtcaggggatacaggtgattgatgaacatcacaggttgaatgttattcatcattcaggaaaaaaatacactgagatcaagcgctactttctctgggaggcctttcagacttgtcctcctctgttcacccccaccttattcctagcttccagcatagatgtatccatgactgcctttgttccctcgtgatgtcttatctcatgtatttcaatcatggccactctgtatcaataacagaatattggactgatttattttcatgtctgtgaacctgaattcacctataagcattttagggacagaactcacatctgattcatctcartattacaaggacaatgattggaacagagaaggtaccagatatgtagtttaaaatacgtaaatgaagagtaaataataaacatgataacaataaagacattaatttatctagtgcaatctcatttctctga

SEQ ID NO: 279526 - DNA, 513 bp, Homo sapiens
tgtttgggatggtgctttataacctgcatttttaagaagctcaaggtgatgccaaagctgttgttccacagaccacactttgaayaccaaatgtgaatttggtaaaatgttcaaggaaaagaaaagccaagcttagagtatatgaaaactcttcacaaattaaattatacattttcacttgggccaaaatttccccatagcctttggtcaaacaattttagagtaatctagtagaaataggatatgtgctatcaagactaaatcaatgccagtcttatgtgcataaagacttaggcacacagagctaaatttcactggcaccatgtattagtatcagtgaatacaatggaaatacaaagctaaatttccataatttggaaatattagctttccaaaaatatgtaaaaatatgatactattcacttgaataagtgagaatctattaagaacttttttcttggtagaggactaaataatgctttacctctttgcctgttggctacagtttaatct

SEQ ID NO: 279527 - DNA, 614 bp, Homo sapiens
ctcactcttctgcatgactaaactgggargatttcggcattaaaaaaagagctctgtctctgtgatgtagtgtatactttgagaatctttgctttcctctgctgaaataaggacataactctagagggtgcctattttcattgggtgaaaaatattcctttgctaaaaaaagtctttcatatgagtctactgatggatcttaattcatttgagtaaaagccaccatgctaatagcaaaagtcctatgttgttagtccttctctcattttatttttatctgtattattactaaagcagttttctcccattactgcaaaccacaaggaaaagcaatcaaattgattacatttattgtcttcgagaactccagttataaaactagaccattccatcattctattcattgtgatacttaaaactgtcactctgggtagtaaaatgtgttttcctttattataaagaatacagtttacagtaaaataactggacattctcacaagaattagcattggatgcaggtgccattttttcctgtactctatgcttgatcaaaaggccaagaagcaatctcctatactcttaatacaggtaagtatagaccatatttcagtatt

SEQ ID NO: 279528 - DNA, 489 bp, Homo sapiens
tttgatgggacttaagcttgtttagataactgcacacaatacccatatgtacctccagaaaggctcagctttaaatgcagccattacacttagaaaaacatcatgtggcattaacctaatctggaataagttaagtagcttaccctaagtacgtggtagaataccgtaactttgtaggactgggctttggggctttccagtacagaaagccttataatatgtaatctttgagaaataacttaagakggacacttaattgtatcttctaattttgtctctgtattaacaccgaaaacatggttttatttgtactgttaaatatttattgcttggattatttcatactctcctaactagtttatttcacataaaattggcttcctttttcttttttctttttgttttttttactgatgtttgcttgacagtctcatgaatttggttttctaagctagaaaaatcttcttcagacctaatgtaaataagcta

SEQ ID NO: 279529 - DNA, 529 bp, Homo sapiens
tttcaaactgctacaactccctgaatgacaatccaagcccctttctatgtctggctgaaaggtggtctggctcattaaaccacatcacaactcccctgaataatcaagccaaacagtttttacacatgatttgttaagttctactcctttgccttgtcattcaatatttgagcaaatatttatagcacacatatcatgagccaagactgggcttgatgttgaaactgttttttgtaaccctaagctaaaccctgaactgtgttaaaaaatacaagtttatatgcacatacacatacacaaacatatatttatagtttaatactttttttcattaaactaattttttagtttttgttgactactttcagttagaaatcccaaaatattattytactcctttgaaattgttaagtagtaaaacaatagttaaaataggcagaatttttaaatttgaaaatcaaatttgttgtctgcatcacagtcacttacctatatccaggtttctttggccaaggaagaaatgacctta

SEQ ID NO: 279530 - DNA, 492 bp, Homo sapiens
tcaggagtttgagaccagcctgaccaacatagtgaaacatgtctccactaaaaatacaaaaaatacaaaaaattagctgggcatgctggtgggcacctgtaatcccagctatttgggaggctgaagcaggagaatcacttgaacctggaaggtggaggttgcagtgagccgagatcgtgctattgcgctccagcctgggcgacaagagcaaaaagttcattaaaaaaaaaaaaaaaaaatttagttctctgagactaggttaccttatgtacaaattggaagtcataatattaataaagttataggacttaaatgagataaactaggaaaagaaattagtatatagcatatagtatgtamcctttatttttattattatgtaaatattgatatgtatattttggacactggagtttggttttgtctacctcaaaccagaaggtttacactaccttgcagaaacttcgtgggagaagagttggaatatttccc

SEQ ID NO: 279531 - DNA, 545 bp, Homo sapiens
ggggagaagctatggggaaaaaatgtaaaggctttctcatctggatttaactcgagttaaagcattacctgaagctctgtgcggccttgtttgggctttgttctctaaacagtttgtagatgattgtgttcagaattcccagcccacattagctaactgcacacatgtggaaacacagagaggctatgacctttagatccactccagaaatacaaacttggtctctaagtttagagaggaaattcttccctctcactagccaggatctgggactgatgttttgcccaggtcacacatatgtctgagccgtgccagttagtaggggaaaaaaatgacctcttgggtaatttgtacgtcatgaagacttggctctgtcttggtccagggagcagcagctcatttaaagygcacaggaccttatgagttttagggggccacaaaacatgaacccaaataaagtggaaatttgtgatgattggtctatgagaaggcaaccataaaaataatttaagaggcagtgagcaggcctcttgcctttttttctg

SEQ ID NO: 279532 - DNA, 545 bp, Homo sapiens
ggggagaagctatggggaaaaaatgtaaaggctttctcatctggatttaactcgagttaaagcattacctgaagctctgtgcggccttgtttgggctttgttctctaaacagtttgtagatgattgtgttcagaattcccagcccacattagctaactgcacacatgtggaaacacagagaggctatgacctttagatccactccagaaatacaaacttggtctctaagtttagagaggaaattcttccctctcactagccaggatctgggactgatgttttgcccaggtcacacatatgtctgagccgtgccagttagtaggggaaaaaaatgacctcttgggtaatttgtacgtcatgaagacttggctctgtcttggtccagggagcagcagctcatttaaagtrcacaggaccttatgagttttagggggccacaaaacatgaacccaaataaagtggaaatttgtgatgattggtctatgagaaggcaaccataaaaataatttaagaggcagtgagcaggcctcttgcctttttttctg

SEQ ID NO: 279533 - DNA, 2331 bp, Homo sapiens
ggcaatagaactgactgcagtttggcatcagggctctgtgatttccagccaaggggaattgcatgcaaaaaatatttaaaattctctttgtaaagarttatgttttcaatcagaaggagaagtatgtttcagacttagtctgctgcaaatgaaatgtggcatactgacatcttggttacagatggtggaactgcgtatgttggagggggtgaatgccatgcgaagttgaactttggtttggtggtaaggttttgtttacggtttttttaggccattgagttagtatcattctgtgaggggtactgtactggcctttcaagaagatggtctggatctacttaaaatagtgattctcaactggaagagatttcccaaccctacagggggacatttggcagtatctggagatatttttggttgtcacaactttgggagagggcagtgcaactagcatctagtagggagaggacaggaatgctataaactatgctaccatgcacaggacagctccctaaaacagagaattatcttgtccaaaatgtgagtggtgccaaagtatggaactaaggtttaaaattatctggctcatatatattcactacaaccccgwggcaatagaactgactgcagtttggcatcagggctctgtgatttccagccaaggggaattgcatgcaaaaaatatttaaaattctctttgtaaagaattatgttttcaatcagaaggagaagtatgtttcagacttagtctgctgcaaatgaaatgtggcatactgacatcttggtwacagatggtggaactgcgtatgttggagggggtgaatgccatgcgaagttgaactttggtttggtggtaaggttttgtttacggtttttttaggccattgagttagtatcattctgtgaggggtactgtactggcctttcaagaagatggtctggatctacttaaaatagtgattctcaactggaagagatttcccaaccctacagggggacatttggcagtatctggagatatttttggttgtcacaactttgggagagggcagtgcaactagcatctagtagggagaggacaggaatgctataaactatgctaccatgcacaggacagctccctaaaacagagaattatcttgtccaaaatgtgagtggtgccaaagtatggaactaaggtttaaaattatctggctcatatatattcactacaaccccgwtgttctcaggaagccccagccaattgcccccactttcctgtgattgactgctatggagttaattaaaatattgtgaaggaacagagwgcattgtttttctattataaagtaaacatgccgctgctaaggccacttgaaacagaatgcaggaaaatagagggaaactcttgggtaggtacatacatatttccagtccttaccagaagagcaggaaagtcaactgccctgcccccacacttttctccgtaaatgttttctttgctcaagtcatgacaccctagcatttccccctttaaaatgaaactctgaatgtcactttaacatttaaaaagagaggggaaacacccacaatgaaaagccagaggaacgaaatagaagtgtttgcgctggagagccgaagggtctgcccaagctaatctcccggacttttacacaaccctgttggatgtctcattatagtgcgtgctgaacgctgaatagtaagagccagactcaagtgccatccaggctccgagcgcagagtccattatacatggtgtcagacagttttgacaawtgttctcaggaagccccagccaattgcccccactttcctgtgattgactgctatggagttaattaaaatattgtgaaggaacagagtgcattgtttttctattataaagtaaacatgccgctgctaaggccacttgaaacagaatgcaggaaaatagagggaaactcttgggtaggtacatacatatttccagtccttaccagaagagcaggaaagtcaactgccctgcccccwcacttttctccgtaaatgttttctttgctcaagtcatgacaccctagcatttccccctttaaaatgaaactctgaatgtcactttaacatttaaaaagagaggggaaacacccacaatgaaaagccagaggaacgaaatagaagtgtttgcgctggagagccgaagggtctgcccaagctaatctcccggacttttacacaaccctgttggatgtctcattatagtgcgtgctgaacgctgaatagtaagagccagactcaagtgccatccaggctccgagcgcagagtccattatacatggtgtcagacagttttgacaa

SEQ ID NO: 279534 - DNA, 555 bp, Homo sapiens
tgttctcaggaagccccagccaattgcccccactttcctgtgattgactgctatggagttaattaaaatattgtgaaggaacagagtgcattgtttttctattataaagtaaacatgccgctgctaaggccacttgaaacagaatgcaggaaaatagagggaaactcttgggtaggtacatacatatttccagtccttaccagaagagcaggaaagtcaactgccctgcccccacacttttctccgtaaatgttttctttgctcaagtyatgacaccctagcatttccccctttaaaatgaaactctgaatgtcactttaacatttaaaaagagaggggaaacacccacaatgaaaagccagaggaacgaaatagaagtgtttgcgctggagagccgaagggtctgcccaagctaatctcccggacttttacacaaccctgttggatgtctcattatagtgcgtgctgaacgctgaatagtaagagccagactcaagtgccatccaggctccgagcgcagagtccattatacatggtgtcagacagttttgacaa

SEQ ID NO: 279535 - DNA, 620 bp, Homo sapiens
gactataaaaatttaagattctaagcaactacaacataatattaaaattagaaaatcattttgttcaaacaagtatttaatgagcacctgctacgtcgtgcccactactgggtgctcagtgagttagaaaggtgaaggagacaaaaaaatcttgagaggcagtggagggtagtggttaggagaatygacgctgaagccaggtagtctggatttgaattcaggttttgctactaactgtgtgatattgaagaaaatgttactgtgcttcagtttccccatctggaatattgagataatagtttttgttacttcacaaggctcttgtaagattaatgaggttactatatgaatgacactcatagcagtgctagtagataataagtgactgtgtgctcagcactactgttacaccgacaatgctgcaaaagagaagtactaagtaagggtcatgggaattctgcattcagaggacctctaaatgagagctccacaaaacagcacctcatgtgtgctggccaactccctgttggtctatagaaccagtctcatgctctgtatcctgcaaatctaccttttccagactcctttgtcaactagattccagtaggattggccaatgg

SEQ ID NO: 279536 - DNA, 2285 bp, Homo sapiens
gactataaaaatttaagattctaagcaactacaacataatattaaaattagaaaatcattttgttcaaacaagtatttaatgagcacctgctacgtcgtgcccactactgggtgctcagtgagttagaaaggtgaaggagacaaaaaaatcttgagaggcagtggagggtagtggttaggagaattgacgctgaagccaggtagtctggatttgaattcaggttttgctactaactgtgtgatattgaagaaaatgttactgtgcttcagtttccccatctggaatattgagataatagtttttgttacttcacaaggctcttgtaagattaatgaggttactatatgaatgacactcatagcagtgctagtagataataagtgactgtgtgctcagcactactgttacaccgacaatgctgcaaaagagaagtactaagtaagggtcatgggaattctgcattcagaggacctctaaatgasagctccacaaaacagcacctcatgtgtgctggccaactccctgttggtctatagaaccagtctcatgctctgtatcctgcaaatctaccttttccagactcctttgtcaactagattccagtaggattggccaatggwaaaagctaggagaaatgcagtataattttgttaggaataccagataatgatgtgtatgtatatactaataagaatttaataactcaaatatttggaaacataattctagttttatttaatagttacactggtgttacaagagaatatcaaacatggtaggataaacaatggtacagtaggattctaggtacatccagggttaagtaagattagaaataactttcattcacataagacataggaggtcatttttcccttggatcctcagtgctggatttccatttccgtttctaggtgaagagaactgaattgtgtaagggccattcacagaacttaatcactgcttaaaatgttgtatcaaagttataaataactgagtagwtcctgtatgaaattgggaacttccttttccataagataataaatgcctgcatcagggacatggtccttattctctttttgttccttttacttaaacttctcccttactggctgctattctatcctcccttctctaattacacatagacacatctatgcttccaccctctttctcctttcagaatgtgcttaaacacacttagtaaawtttagtttccactgctttcaagaaataaaggtactagaaaagaggctttccatggtgttggtttcttcctttacttgcttgatttccatgtggaccagccctggaaatgtctgttatccgccagagttaaatagttccacttaaacatwtcaccacaaatgcatgtcagtgtcacttgttaaaactaatccataggtaaaggatacctcatgtcctgtaattactctacctaaacatataacaaaatataatatcctgccctccttccagattcagggggttcaacacagaaatctgtatttctgaccgggcgcagtggctcacacctgtaatcccagcattttgggaggccgaggcaagtggatcacttgaggtcaggagttcaaccagcctggcccacatggtgaaaccttgtctctaataaaaatacaaaaaaaaattaatggggcatggtggcgcgcacctgtaatcccagctwctctcattcaacttagaacagaattaattatgaaatggcattggctactgacctgtctttacgtttttaaatggttaatgtagcatttatgtctgccgtaaggctcccagccttggctgaggggctgtgtgtgtgtgtgtgtgtgtgtgtgtgtgtgtgtgtgtgtgatggggcatggcctcaatgctccagcagggagtttatgactctgctttagccttcacttcctgcttgtatacagcctccaggttagcaagaggtgagattagggccttctcaggtcctttctgggcatgcgcacaactctacacatccatgtggttttctggattcccaggagtatggtggaactctttgaagcccccaactgacatctcattccccagtgtttcctatttacttttttggtcagcctcttcttagccccagttggcattaccacctcaagcaacwgtgacattgaagaatcactgctgatttttttttttaacaccctaggaataggtcacagaatgagctctgagctagcccaaataaagacaagtcctgagaatggggcttttcagggagctaccagatacatcagtgacaattctc

SEQ ID NO: 279537 - DNA, 537 bp, Homo sapiens
aaaaaaagtaatttgaagtggcaagccccatataaaccaagccaacatagaagcctgcattccaaaatacaaatcagtgattaaagaggtttgcattggaattcccaaaatcaatttctacataccccaggcttctcttaaaataatgatgcaagcccagggtcatcagcattacctagggactgtgctgaattccaagtagttcttctggttgcacctggcagagatctaggcccttataactaacttcatgcttcataactgagccaaattccaggcaatccaaacccccaatggttccttgatggcacatacagaagaaagaaaaatggtgctaaaaatggtaggaatgaacatcagcagttggctgggagtagtttcacagaagcyaaaacactctaagggtaaatctgatctccattgtgaaaattgtgtttagtcttcaatttgcaagtaagacacctagagaaatgttaagagctcacatttcttctttaacccttgctgttcagcacctttcaccagggtgagggcaga

SEQ ID NO: 279538 - DNA, 628 bp, Homo sapiens
acatcgtgccagagaaaagtcagcagcaatatttaggccaggaagtgataaaaatcttatctcagatgttagaaaattatttgaaatgtggaaaataaataggaaaagaaaaataaccagtgaatggcatctttcaagataagagataacaggagcctgactaggggcagtgacacaagaaataggaggggaaaaagycaagggacattttgcaggtagaatacaaaaggactggaggagtatgattatgtaaattatagagaaaagaaaatatactacacaaagaaatcataggacagtaataccattaatcagctaatacccacagggggagtagtggactagggagaaagggcaagatccatgatcatggttttctgcatatgaagattattttcgtcacttaaatgatcaccatgccaatgcttccgtaccacaaacacatcatgctgccagagcttgcatgtaaagaatcagataagcaagcagaaaaggtaaaattgggaaggtactgttaaaagaaaaactttacacaaattcaatttaacagggtttgaacaaagaacgattcatgaattgcacaacattcagatccagaagagggtcagagactccacccagcagcaca

SEQ ID NO: 279539 - DNA, 624 bp, Homo sapiens
acctgaggatggtgcctgccctcgcccagggccaacccagctcctgccaaagccactttctgccagacttgctttttacacagatcatattttgtcatgaaatgaaagcattattttttgaaatattttaaaacataccagcacatgcagaaaatacaaaactgtgttaagtacagagcagtttcccctgataatgagtactagaaaatacacacaataaggtattcagaccgtggaattcccttaccacccgcttttcccagtctcatctttgaagggagatgtgaaggaggcagagagaggaaagaagcactttggagagaaagatgtgggtgcactaaaagggagataggaagggaaatcagagaagggaagcagrgagagggaggggaaagagggggcagtgctaagtacaaccacctgagccaattaaaacgccacagagcaaactctgcatgaacaaggaaggaaggaatacattctcctaagatgggagcaagaattgtagaccaccctcagaaggtacaattatgtgttcctgtttcataaatgtgtgcctggagtgagcgacagaggtggggcctgcacctccatttgaatggtggcaaactagacaaaacaggt

SEQ ID NO: 279540 - DNA, 575 bp, Homo sapiens
atttgtattttatcaagtcctctgagtcgctctgatgcaggctaaagtttgagaactgctatcctagaacaaccagccctcagtagaggtggactccttcagctgcatggctttaacaaggtgagaatcaatgggactggcctgttagtctccacaagtggtaactttgagcttaagtacaaatcgcagcatcagcaattagtgacaagtcaggggccagcgatatctacataatggtggcaaaagcagcacgattttgtttgtttgttttgagacagtctcactctgtcgcccaggctggagtgcagtggcacaatcttggctcactgcaatctccatctcctgagttcaggtgattctcatgcctcagtctcctgagtagttgggactacaggtgtgtgccaccacgccctgctaattttttttttaatttaaattttttctttttaattcttagtggagacaggatttcgccatgttgtctagactggtctcaaactcctaagctcaggcaatttgcctrcctcgtcctcccaaagtgctaggattacaggcgtgagccactgtgcgctgcc

SEQ ID NO: 279541 - DNA, 580 bp, Homo sapiens
ctgattatttcattaaactctatctcaagctatgtcttatatgctctattcctactcgaatcctagcattttctgaatctaatgcataaactcttaaatcagtggtaatcaattgaggatggttcctcctcccccaaggacatttaggacatttggcaatgattggagacatttctcattgtacaaaggtcggggcaggggtgggatggggaccagatgtcagaagcgggaatgctactggcatttagagggtagaggccagggatgttgctaaacatgctacagtgcacaggacagtccccatcaaaaaaaaagagtcccaaatatctagaggctgaagaacctctacttagaagagggtccagaggagacatacaatcgtaggagtcctatcaaagcagacctgggtatgttaaagaaaaaatgtgtcttttaagacagaagattttcatgtaatagtccaggcaaactgtcacctgtcagagcttagcttttacagattactaagtgggsctccttttaatttaaaagtcataacatagtccaaacataacctcacataaaacatttttatgcagat

SEQ ID NO: 279542 - DNA, 569 bp, Homo sapiens
aaggggactcggtgcattacagcagaaaaaactttccttggcttcaaaagaacccttttttcctgccttgatcacatgttttagctgagtcatcttaggcaaatctgagcttccatattctcacttccatgggggtggtaacgaggaaatagcatatgtgaaaaaagcaaactgtgaattgtaaaatgttgatcaacattagttataattattagtaagatrtgagatgtattcgatagcaatgaaagaacacatgacctgttctgacacaatccacatatttggtggaaaaccaggttatattggcagttgagtaaggtgataaaacagactagcatatattaaatatatccctaggacccagggctggtaatattgaaggcaggtcatgaataaatctttgtgatcaccataagttacatgtgtataatattttacagtttttggagctctttggtgatagtgtttattttcctatagaaaggcatgccacacaggtggtgtattgtcaagcagagtgtgtgagccaggaaatgattgctgtgggcagtcacatccagataaacatt

SEQ ID NO: 279543 - DNA, 1674 bp, Homo sapiens
aggatccttctcagaattgtcccccaaggatgaaattgggcacgtatctgctgacagcatttctgttggttggagaactatacctggagctgggctatctgcttccyccaaacttccggctgcttctgtgtgtaggtgagcagctttctacagcctcagagaaagccttgaggcagaacgcttactctgcagggtgtacaacccacacttgatattcccagactgatattcccagactcccccagatgtaccatgcttttgctcatgtgtacatctgattcctttacctggaattcttttctccttgatgacttctgctttcctttagattttagggcaggtattgcttccttgaggaaaccttccctgcttggtgtccccatgccctgccatgtgcccataggaaggagttagtttgctcctcttttgtwtgcacttctaattcaggtcctggaattaacccactcaaccaaagcttgaaaagatttagatttactcagactagcaacaatacaataccgccttacaattgcacaaccaccctgtcttttggtgatacatccaatacactctaaattataattctaaaactcagtttgttgttaaaaaaaaaaatctgtgcatcatatcagagtttgtcttgttgcaatttaaaagggggagaagggactcacaaccagttttaatcaggctaggataacacctgagctcttcttataaacactttttaaaaaatgatttttaccacaatttttaactgtaaagaggtgaatttggaatagaattcctatattttcagcccattgactacaatgaaaagagtaactttcaaggcattgttgtatttggggtgcaattcaggtcatctgagctgccattttatttttccaaggttgattccaccagggattcatctcattgaaggtgggaggctgaataggttgggggagatggattagtggcaccgcctgtgwagcctgcctgtccgtgaaagttatttgaaggtttcccatgcaagcaatttagaaaaatgcagccatttwtcaggtaaataaatgtggagggtgttttaacatggggtgggggaagaagccttttgcattctttataaatgttgatttatgttcctcatgtttctgtaaaaggcatatagtctcctactggaaggaatagctcaatagtcaactatttccaaattgcatatatttcaaaattagaatatacagtaaaaatctcccttgaatattaattacagttttgtctgtatcaccaataaaattcagggagactgctgttgaataacaaggaactgtttataatagaatacaaggcagccattaaatgcgaggttacacataaaagcttaataatatagaaagatatgatgtagtattttgtaaaawtaaaagtcacgaaacagtattacaaaataaccactatttctgaaaactgtttacatatgtgcacagccacagacctttgattaaaggataggcagaaaggtggtaatagtttttatctaggtggtagggtcacaggtacttttaggcttttttttcttgaaatagactagaaatttcctttctaaggaatgtgatttacttttgcttcggacaaacaaatgaaaatatccgctcttgaagaaagtgatcattgagagtctgaaatttgaga

SEQ ID NO: 279544 - DNA, 610 bp, Homo sapiens
tcaaatgctcccagaaaggcaaacaaaaatgtgcaatgcctcttagggtataaggtttgaattggcacaaagtcccttctacccacatgccattggcaaaaaaaagtcacatggtcaagttcaatatcaatcacatggaaagtatactcttcccatgaaagttgagggagaggaatgaatattttttgaatcataatacattacaccatcggtaccagggttccccaagacttgtacatttggtgattcactagaaggactcacaggactcagaaatcattatgttccagttatggtttattacagtgaaaggatacaaagcaaattcaacaaagggaaaaatacatggggtgaagtccagaggaaaccaagggcaaacttccaagagtctctcccagtggagtcatacaggaagcacttatttctcccagcaacaagttgtgagaayctattctgttcagatttgtctaagagggaagcttgtcccagtctagggcttttatcaggtgtcagtcacataggcatgtggtttctatatgactgactacagtcactggagtcccaagaaggaaagcaggtatccatcataaatcacattgttggcacaaac

SEQ ID NO: 279545 - DNA, 617 bp, Homo sapiens
accctttcaattactttttaaatcttattcaattcacttctaccaatatttattgagtggccaactctgtaccactcaatgtgctagacactcacaacacattttcggttaagttgtcactgcatctccraaaagacagacgctcctaaagaaaagttagactgccatagaaataaagagtaggcaagttaaagtttaatcgttatttgctgacaagatgtgggggatgaagctgacagcttcaagcaggctacagatcctggagcccttcagcaactcttgcagcaaggaatccaacaggctaaaaccagagttttgctgctgctgttattgctgttttaggaacaagcagaatgactcagaaggaacaattttgtttggtttttttctccatcatgttctccagagaagggcatggagagttacttcatttgagagtcacaattagtgaggagccattgccatatattaactagattcttcaggcactgtttgcagaccacttaaaactccactgtgcttaattgctcagttggacagttaacagcatgatttaggttttctcccctccttgtgttagtagtcccttttttagagttttaaggtttgggttttct

SEQ ID NO: 279546 - DNA, 541 bp, Homo sapiens
tgggcaaaactaggtaaaaagcttacctgacagaattttaacaacatttatttctgtcccagtatgatacactttacacatctaccatgtaagatgagatatatttgaaattcacacagcttcagtaggttagaccaatgtaatttacaatacctacaacactcaacagttattttttaaaatcctgattagaagagagaaacaataaacacactagttgtaaatacttatagaaaagctgaagagaggctgtttcttctacctgtttttaacagtactattgggacatgagaagaaagcatttttattctcacacctttaaaggttgcctaatttctcagtctattcttcagcagggctacttgggctaacagaatagaatgaaaggataatccctagatttagcaatactttgtagccctatatttattacctagtaatgaycattttgacagatagttctcaaatttaaagctcataagaatcatctatggaacttattaaaaactcagattcctgggtatcatcaggagactttgat

SEQ ID NO: 279547 - DNA, 549 bp, Homo sapiens
aaatcctattatctatatattttattatccatttgtagaagtactttgtaagtatttaattttataaactatatatacagttaggcataaagaaagaagaccctgctgaggtcaaaagcctgaacctttagcatttgctccattaggaagtgtgtaaatattggtgatggagctttagttgctattgctacttttagctgcaggttatagaatcaccactggcaatagctaccattaaaaaaaaaatgttcttagtgtttaaacccctcttagttgggtttcctattatgccaagatctctacatcttggcagatatgcagaattgggatctctgcaattctcttgaggaaagacctttccctcatggtcacaagagggctgccacagtgtcarccatctcacctggccatagtcagaagtaggaaacaggtaagtagtcagggaagttagagagcactatccttgtacgcttttttcatcaatgagaaaatatctttcccagaacctccccaaacccggtaaacttcctttatcatctcattggcctg

SEQ ID NO: 279548 - DNA, 620 bp, Homo sapiens
tattcccatgttacatgaaatgacaaaactgaaactgagtggttatgttaattttccaaggtcatttagccagaattctgaaacgtctgtctggttccaaaatccatgtatgttgtataatatcctgctactcttattgtccatggctccctttcaatgtcrccataaaatgacactatggcaaaaaaagtcaaatcatacctgattttctacatagttgtctagaactaaagaatcagaaggaactctagaaataatctagattaaacatctgatctcagataaatgtatggtatttacctgtaatgctcagaggtaatagtaatgccactgaaaattgcaagctggtatcctttttgctacctagtgtattatttttagttttggaaggcgtgtggtgatattttttgctcagaattttttttatcttaatgataaacagaaatcacattcagtcctcagatttgctatttggattttcaacaatttagagaagtcttcagttcaatagcattacatttagctttggatttcaacaacttcagaaacccagctaaattagtcaggaatctttcaattgcaagtgacagaaatacaaccaaactgacataagcaaaaac

SEQ ID NO: 279549 - DNA, 394 bp, Homo sapiens
tgctatttggattttcaacaatttagagaagtcttcagttcaatagcattacatttagctttggatttcaacaacttcagaaacycagctaaattagtcaggaatctttcaattgcaagtgacagaaatacaaccaaactgacataagcaaaaaccatttaaatggctcacgtgactaagtagtccagaggattgtggttttaggcacgacttggctctaaataagctctcctcatatgttggcaagatgaccaccaccacttccaggcttgtgttctaccagctgaatgaccataacggtctctttcctaatagttcagcaaagtcttggggttgaatttcattggctcagtcactgttaaactaagtgtcatgactagcaaataaaaaatgt

SEQ ID NO: 279550 - DNA, 459 bp, Homo sapiens
gtgtataacaacaaacactgtatgtattgtatgtgctatgcactaagccagctccttgacatgccatatggataaagaaatcaagatccatggtgatttaacagctttctccaggtcaaagattagcaggcagcagagccagactttgaaggcagatctgtctgacttagaaaggctgaccttctccaagggattcatgtctccctgctgcttcccataagtgacttggtccttgccactttccaacaaatgtcccagatatcaacctcctccctcctattttcttgagtctccaaatatcctttgctcctgaactcccccttattggacccagctttgggtcttcctggtgccacctgctctractacaactgttctattgaataagcctcctctttccatgactgacttggtttggctctgtgtctgcacccaaatctcatgttcaattgtaatcct

SEQ ID NO: 279551 - DNA, 455 bp, Homo sapiens
gcagcccctcccatcacaggcccagatgcctaggagggaaaaagggtttcctgggctggctacaggcccccctgccaatgtgtgcagtcttaggacttggtgtcctgtgtcccagctgcatcagctgtggcagaagggcccaagggacagytcaggccacggcttcagagggtacaagccccaaaccttggcagcttccacatggtgttggtcctgcaggtgcacagaagagaagaattgaggtgtgggaacctctccctagatttcagaggatgtatggaaacacctggatttccaggcagaagtttgctgcaggggtggagccctcacggagaacctatgctagggcagaagggaaatacggggtcagagcccccacacagagtccccactggggcatcacctagtggagctgtgagaagaaggccactgtcctccagaactcagaatggtag

SEQ ID NO: 279552 - DNA, 542 bp, Homo sapiens
gttcatcgtcttgcgccaggaaaatttaggacatggacacacacgaagagtttaygagcagaggtttaataggcagaagagaagagaaagagaaacagctctctctctatagagagaggtctcccagcagaaaggactggtgggcagcagatgtgctggattttatagtcaggtttgaggaggcagtgtctgatttacaaagggctcacagattggttccatcaggtatgacatttacatagcatgtgggaaggctgaccaccccaccctaatcttaccatgcaaatgaaccctcctgttaaccggagtctgctccttactgtacatgtggctgataaagagaagggaagatggggccgccattttgaacacgattggcacaactgctggcatctatgactgtggctcgattttacaggctgctctttgttagaaaggaaaatgatttggggctgcttttcattaaaaagaaaaccttactgaggacttctgtaccctcattagccaacctaagtaatttcttcttacctcctgtatcatta

SEQ ID NO: 279553 - DNA, 542 bp, Homo sapiens
gttcatcgtcttgcgccaggaaaatttaggacatggacacacacgaagagtttatgagcagaggtttaataggcagaagagaagagaaagagaaacagctctctctctatagagagaggtctcccagcagaaaggactggtgggcagcagatgtgctggattttatagtcaggtttgaggaggcagtgtctgatttacaaagggctcacagattggttccatcaggtatgacatttacatagcatgtgggaaggctgaccaccccaccctaatcttaccatgcaaatgaaccctcctgttaaccggagtctgctccttactgtacatgtggctgataaagaraagggaagatggggccgccattttgaacacgattggcacaactgctggcatctatgactgtggctcgattttacaggctgctctttgttagaaaggaaaatgatttggggctgcttttcattaaaaagaaaaccttactgaggacttctgtaccctcattagccaacctaagtaatttcttcttacctcctgtatcatta

SEQ ID NO: 279554 - DNA, 542 bp, Homo sapiens
gttcatcgtcttgcgccaggaaaatttaggacatggacacacacgaagagtttatgagcagaggtttaataggcagaagagaagagaaagagaaacagctctctctctatagagagaggtctcccagcagaaaggactggtgggcagcagatgtgctggattttatagtcaggtttgaggaggcagtgtctgatttacaaagggctcacagattggttccatcaggtatgacatttacatagcatgtgggaaggctgaccaccccaccctaatcttaccatgcaaatgaaccctcctgttaaccggagtctgctccttactgtacatgtggctgataaagagaagggaagatggggccgccattttgaacacgaytggcacaactgctggcatctatgactgtggctcgattttacaggctgctctttgttagaaaggaaaatgatttggggctgcttttcattaaaaagaaaaccttactgaggacttctgtaccctcattagccaacctaagtaatttcttcttacctcctgtatcatta

SEQ ID NO: 279555 - DNA, 476 bp, Homo sapiens
ttgggcaagtgggtgagtggtagtcctataaacaagaatagggattgcaggaagaggtgcatattttggtgagaggatgcagggggaagaaaaaaatgttcattttgggagaatgaatcatgcatatggagatctacatttgaagcaaaattccaacaaggtctaggctgaaaatagagaatttagaatcatacccaaagatgtggtggtggtggaagctgtggggattgctgagaatgcccaggcaagtggagactgaggaagagaaacctgacaaaaagaaagggaaggcatccagtgatggagaaagaaaattaggagagtaaggtgtcattgaaacaaaggtaagagaaaattaaagaaaaagccatacaaaacagaagtggttagtcttgaagcttcagagaagtcatataaggtaagaaataataagcrtccatatgtatgtgtttgtgtgtgtgttgcaactatgaact

SEQ ID NO: 279556 - DNA, 588 bp, Homo sapiens
taaaacttccactatgtagtttaatctcttaaggactagaagtaatgaagagtagaggcctattaagtggtgattgatgtagcctagttgttaagagacatagagtcctagctttactacttcttagttctgtgacttagtcaaggcacttaacttcccttagctttagcatccccatcaaaatgggattactacttgtgcctacctcattttgagtattagataaaataatgcatgtaaactgatgaggaagctgattcygagctgggtggtttcacatatttagtcacaaagttcatcaatgcttgtgcccagttttaagccctagcttgtttaacttcattatgccactttgtttccaaggttccttcccatatataaagggggaaaaatataaatgggatggctgaggtgagtacatcgaaagggaaaggaattagtcccactctttaagtttggccacatagttaatgaaatggtcttatcaatggagttatcctgtttaaacaccaaaaggtgcaatttcttctccatcatccccaatccccacattctctgcctcctcccttcattgctctttagccacta

SEQ ID NO: 279557 - DNA, 588 bp, Homo sapiens
taaaacttccactatgtagtttaatctcttaaggactagaagtaatgaagagtagaggcctattaagtggtgattgatgtagcctagttgttaagagacatagagtcctagctttactacttcttagttctgtgacttagtcaaggcacttaacttcccttagctttagcatccccatcaaaatgggattactacttgtgcctacctcattttgagtattagataaaataatgcatgtaaactgatgaggaagctgattctgagctgggtggtttcacatatttagtcacaaagttcatcaatgcttgtgcccagttttaagccctagcttgtttaacttcattatgccactttgtttccaaggttccttcccatatataaagggggaaaaatataaatgggatggctgaggtgagtacatcgaaagggaaaggaattagtcccactctttaagtttggccacatagttaatgaaatggtcttatcaatkgagttatcctgtttaaacaccaaaaggtgcaatttcttctccatcatccccaatccccacattctctgcctcctcccttcattgctctttagccacta

SEQ ID NO: 279558 - DNA, 564 bp, Homo sapiens
ttgagggtgtggacgtagaaaggggtgtgggggagatgatgtgggctctacctacaagatggggaggcatttctttatattatttgcaaaaaagcagggttgaggaaataatattcagaactgagtattgcctctctgtcatacaattttctcacatgtgctgcggaagatgccttatttcgtgcatgcatgagcttcgaaggggcgcaggtatttatggaaaaacgtgcaggtcttatttatttagtatttatttttcaatgaatgaatgaaactgtgatttgatagattttttttttttttaagagaagctaagacaactggggctgggggagaaattggccatgcagaaggrgaaaatccccttcctaagatcagcagccgattgtgcaccagctggtcggaggagagggtggaccacgcccctaggagctccgatgggatgggaaagacagccgggtattacctgttggaaaccaggtcttttctcttatccccttcccttgcttctttcctgggattgtcagtgaccagagacaggctaacatcctggataataagtat

SEQ ID NO: 279559 - DNA, 569 bp, Homo sapiens
taacttgcagttagatttatttgtccatgttgtactgagggtagcccactttggttgtccagactcttactaacattccagtggggaaaggaataagcattgagttatattttgcatggacattgcatttcggtctttaaatcaattttraaaagtattattttatttgagagatgggaaggaataagagacttcataagggagaatgatattgtcttacttaaaaaacaccaattctttctttagtaaaatccaaactgggagtttgatctattcaaacgtcatttttttttcctgaaatgcaacatctgcaatatttccttaactctcaaggacttgtttatcctaataaaagagaaggaaattgttttctctatcacctgggaaagttactctggagaactcaggttggtattaaatattcatttgaaaaagtctttcacgataatcctcttcagtgtgcctcagggctttgattgcctttggttgaaagacacaaggtggtagctttttgataactcaaccagatttgtgcatccataatgttggacaattaactggagaactgt

SEQ ID NO: 279560 - DNA, 458 bp, Homo sapiens
caggccagtatctttgatgaacgtagacacaaaaatattcaaccaaatactagcaaactaatccacaacacatcaaaaaaatgataaaccgtgtccaaatgagatgtatcccaggaattcaaggataattgatatatgtgaatcaataaatgctatacatcacatcaatagaacgaaggacaaaaaccatgtgatcattttaatagaggcagaaaaagtattttataaaattcagtattacaaaatgtatgataaaaactctcaataggctgggcacagtggctcatgcctgtaatcccaacactttgggaggctgaggtgggtggatcatgaggtcgggagttggagaccagcctggccaacatggtaaaaccctgtctctactaaaaatacaaaaattagccgggygtggtgtcaggtgcctgtaatcccagctactcgggaggctgaggcaggag

SEQ ID NO: 279561 - DNA, 598 bp, Homo sapiens
tttcaatgaggttttactatgttgcccagactggtctcgagctcctgggctcaagcaatcctcctgccttggccttccaaagtgctgggattacaggtgagagctaccacacctggccctgaaatgttttttcctccattctaccaaaccacattctgccttcaaaaattctgttgaaaaatcaccttcttcataaaatcattttaaacatttcctcattccctatctggttccatatggcactcactatagtaacctccttagcaattccccttttctcatattgtctatgtgtgtgygtgcacgtgtatgtgtgtacatacacacataggagtttgtgtgtgtgtgtgtatacatacacacataggggtgtgcatatatatacacacagacactatatatatatatagagagagaaagagtgcatttatatgttttgtgcatatattatacatatatatattcacacacacacacacacacacacacacacacacggtgctttcctgtttccctagagactgctaaaaggctcattactgagatttcctctgttttcaatttcacaaggcactatgcaatgcttgcacatactggg

SEQ ID NO: 279562 - DNA, 598 bp, Homo sapiens
tttcaatgaggttttactatgttgcccagactggtctcgagctcctgggctcaagcaatcctcctgccttggccttccaaagtgctgggattacaggtgagagctaccacacctggccctgaaatgttttttcctccattctaccaaaccacattctgccttcaaaaattctgttgaaaaatcaccttcttcataaaatcattttaaacatttcctcattccctatctggttccatatggcactcactatagtaacctccttagcaattccccttttctcatattgtctatgtgtgtgcgtgcacgtgtatgtgtgtacatacacacataggagtttgtgtgtgtgtgtgtatacatacacacataggggtgtgcatatatatacacacagacactatatatatatatagagagagaaagagtgcatttatatgttttgtgcatatattatacatatatatattcacacacacacacacacacacacacacacacayggtgctttcctgtttccctagagactgctaaaaggctcattactgagatttcctctgttttcaatttcacaaggcactatgcaatgcttgcacatactggg

SEQ ID NO: 279563 - DNA, 582 bp, Homo sapiens
agccccacactgcaagtgcttatcaaacctcttcttccatcattttgctaaaatctcattggctaacaagagtcacatggatgatccctgagacaatgtgggaggggactacacaggcgtgtgactcytgggaagcatggatcattgggggccaccaatgtgacagaccaccacagtctgccttcaggccctcaattattcatgtctttcctacattcaaattatgcttaccttctttccaggacccacaaaatgtctttactttagcatccggttcaggcttggcatctagcctcttggcatataaattagtttcagttccaactttattgttacaaggtgacagttacaattttgcatagatgacagccctggggtgtggttcctcaggtacagagaaatgtgaagtaaaacaagaaatctgcccccactcatccaacgctcaatgataaaaaagagaaataatcactgcagtagacatttcctttccaaaaatgtaagtgaggaggagggccagaggtacacaactattgcccccatagcaattctgtcatccactgagcacatgtcacttgggaaaag

SEQ ID NO: 279564 - DNA, 582 bp, Homo sapiens
agccccacactgcaagtgcttatcaaacctcttcttccatcattttgctaaaatctcattggctaacaagagtcacatggatgatccctgagacaatgtgggaggggactacacaggcgtgtgactcctgggaagcatggatcattgggggccaccaatgtgacagaccaccacagtctgccttcaggccctcaattattcatgtctttcctacattcaaattatrcttaccttctttccaggacccacaaaatgtctttactttagcatccggttcaggcttggcatctagcctcttggcatataaattagtttcagttccaactttattgttacaaggtgacagttacaattttgcatagatgacagccctggggtgtggttcctcaggtacagagaaatgtgaagtaaaacaagaaatctgcccccactcatccaacgctcaatgataaaaaagagaaataatcactgcagtagacatttcctttccaaaaatgtaagtgaggaggagggccagaggtacacaactattgcccccatagcaattctgtcatccactgagcacatgtcacttgggaaaag

SEQ ID NO: 279565 - DNA, 582 bp, Homo sapiens
agccccacactgcaagtgcttatcaaacctcttcttccatcattttgctaaaatctcattggctaacaagagtcacatggatgatccctgagacaatgtgggaggggactacacaggcgtgtgactcctgggaagcatggatcattgggggccaccaatgtgacagaccaccacagtctgccttcaggccctcaattattcatgtctttcctacattcaaattatgcttaccttctttccaggacccacaaaatgtctttactttagcatccggttcaggcttggcatctagcctcttggcatataaattagtttcagttccaactttattgttacaaggtgacagttacaattttgcatagatgacagccctggggtgtggttcctcaggtacagagaaatgtgaagtaaaacaagaaatctgcccccactcatccaacgytcaatgataaaaaagagaaataatcactgcagtagacatttcctttccaaaaatgtaagtgaggaggagggccagaggtacacaactattgcccccatagcaattctgtcatccactgagcacatgtcacttgggaaaag

SEQ ID NO: 279566 - DNA, 613 bp, Homo sapiens
cctaatcagccggcctcactcattgagcaccatgaacaccataataaggacttttgcccatgctttaccytcacttcttttgcttcctgacagaccctggtgcttccccatgtggccctgcatagcatggcatgccatctcctcttgacaactgtgggtaatcaatcgtcttttcctgacatctctgttgtctttcatttggacttgaattacaaaacaaacaaacaaacaaaatatatcccaggtatattgaaagacaattcaatgccgtttcctttaggtttttgtagggaattgctatgttaatatttgttgctatgtaaaaattatccgaaacccaatggcttaaaacattaatgatttattatttctcacaattctgtgggttgactggttcagctgagcattcttgtgcttcatgtaggacagctgaggtcacttaagtggctgcattcaactgggagtcagctggggctggatgtccaaggtggtgcttcagggcccctctctacttgtcttctcattattcattgtcaaaatcaagcttctttaaaatgtgggagctggttttcaaaagcaaatgttccaaaagacaagctcaatctgcaaatat

SEQ ID NO: 279567 - DNA, 579 bp, Homo sapiens
taggatcttggggatgggcttggtctgagggaaaaaatgatgccagaaggtagttaccatggtgatactctacagtttccccttctctggtctccccaacctttgcagcctgcatttctatgctgaaatgcaagggtagaaagactgtttcctgttcactacgaagcttgtagtataggttgatctgctttgaatgctacagaaatcctgagcttgtacatcagggtctgctgtggaatgggtgacacgtgcagacagagaggctgtgcctgcttaccctgggctggcggggtgcatgaggtgacattgcgggggaagactatgcttcatcttgctccctctcctgagtccagccctgcctttgggcctcggtgacacacaaaagtttttgttcctcaaaggccaggaacattttccattttgagacccaaacatgmgtgtttgggcaatctcaaacagaatcagcctgggctctccttcctcctctaatccatatgtatctgagagtagtctgaatgtttgagtttttgtgttcacctgttctgtgaaaagaactgggatttatggtccccgaattat

SEQ ID NO: 279568 - DNA, 579 bp, Homo sapiens
taggatcttggggatgggcttggtctgagggaaaaaatgatgccagaaggtagttaccatggtgatactctacagtttccccttctctggtctccccaacctttgcagcctgcatttctatgctgaaatgcaagggtagaaagactgtttcctgttcactacgaagcttgtagtataggttgatctgctttgaatgctacagaaatcctgagcttgtacatcagggtctgctgtggaatgggtgacacgtgcagacagagaggctgtgcctgcttaccctgggctggcggggtgcatgaggtgacattgcgggggaagactatgcttcatcttgctccctctcctgagtccagccctgcctttgggcctcggtgacacacaaaagtttttgttcctcaaaggccaggaacattttccattttgagacccaaacatgagtgtttgggcaatctcaaacagaatcagcctgggctctccttcctcctctaatccatatgtatctgagagtagtctgaatgtttgagtttttgtgttcacctgttctgtraaaagaactgggatttatggtccccgaattat

SEQ ID NO: 279569 - DNA, 462 bp, Homo sapiens
aaagttttgctgtatataccagcattaatctttcaagatattagttaaaaatgtgcccctgagacatgtgctagacaaagcgaggaacaccctcaattaggggtagctgacaatcatctattacatgtgagggcagsgattgcaaagaggagacacactgccacgctccatcagggatccttactttgcagtactcaagtaacctcccaatcttttggaacacagagtcttaagcagccataataaatgaactgaaattgacatgtcagatcaaatctatttggcatctctgatgtggggaacacatttataaggaaaagcaactatatcaatggcatttctccctttatgtggacttggattccaaagcaatcactttgcaactttcaaataaattaggtaactttctctggactatgatcatgagtaattgagggcctgggttattgtatattctatagt

SEQ ID NO: 279570 - DNA, 601 bp, Homo sapiens
atataagttgctttttcaaaaggagaaacagtgtttcccatcattttttaaaattcaggaatagtggtcttttttaattcagattttgaaggtttggtaagtttattgctaatgttggaccacacgcaagagaaagttagacattattttgtgaccagcaytgttaagttgtcacattctgaacaaatcccttaaagacctggaactcatttacattttgcataaaatcctgatgggatttatggtttaaactttgactatactctttgtcttgaatttattaatttccttatcaggcttaaaacttgggggaaagtagacttttgcaaaatatttttttaaaccattaagttttatacaaagtccttctcaaaaaccctgtaaaccctctatctttcagagctctttaataaaaacctggggtgaatgtgatttattttttgcttttgtttctggtttgcttgcttttttgagacagggtctcaatctgttaccaaggctgaagtgcagtgacacaacaacagctcactgcagcctcgacctcgcaggctcaagtaagcctccttcctcagcctcctgagtagccaggaccactggtgca

SEQ ID NO: 279571 - DNA, 601 bp, Homo sapiens
atataagttgctttttcaaaaggagaaacagtgtttcccatcattttttaaaattcaggaatagtggtcttttttaattcagattttgaaggtttggtaagtttattgctaatgttggaccacacgcaagagaaagttagacattattttgtgaccagcattgttaagttgtcacattctgaacaaatcccttaaagacctggaactcatttacattttgcataaaatcctgatgggatttatggtttaaactttgactatactctttgtcttgaatttattaatttccttatcaggcttaaaacttgggggaaagtagacttttgcaaaatatttttttaaaccattaagttttatacaaagtccttctcaaaaaccctgtaaaccctctatctttcagagctctttrataaaaacctggggtgaatgtgatttattttttgcttttgtttctggtttgcttgcttttttgagacagggtctcaatctgttaccaaggctgaagtgcagtgacacaacaacagctcactgcagcctcgacctcgcaggctcaagtaagcctccttcctcagcctcctgagtagccaggaccactggtgca

SEQ ID NO: 279572 - DNA, 623 bp, Homo sapiens
ctatcatacttttggatagaaggaataaattccagtgtttgatagcatagcagggccagctatagttagcaataatttgttgtrtatttcaaaatagctagaagagaaaatttggaatattctcaacacaaaaaagtgataaatgaagtgatggatatctcaattactctgatttgatcattgcatattgtatgcttgtctcaaaacatcacacataccccataaatgtgtacaactattatgtatcaataaaaattattgttatctctgaaggggatagactggcaaaacaaataatcacatagcacaagtcaaattccctaataaaactaagtccaaataggtaatgtacacttgattatatttaatctttatgatagcttaaataatcagttatgaagttgcagtttttgagttttgctgcctgatccaatacttcttgtgattcatggagaacttttattgctatctgtggtcataacacataatatagaatttaattctatgcccttagtcttattagaagattctctgatcaacagcatccaacaaaattaaagtagactgttttatagcatagagatgtgggaagcaagtgaactaggaatacaaatattgggttg

SEQ ID NO: 279573 - DNA, 574 bp, Homo sapiens
tgttaacaacgtgcctgctgtggaaatkgtatgtgacatcacagaagtatttctacaggtattttttccctaaccattgcagtgttatttagggattagtatttgacatattcactcttttccagatgataatttttttttaagcaaatatatgcatcgcagcctaggtaacatagcagaactctgtctctacaaaatataaaaaattagccaggtgtggtggcacacacctatagtcctagctactcaggaggctgaggcaggaggattgtttgaacccgggagatcaagattagagtgagctatgatcatgccactgcactccagcctgggcaacagagcaagaccctgtctcaaaaataaattttttgaaaataaaaaatatgcataaaaataaaaataatctcttttaaatttaaaacattgtattttgaaataattttaggcaaagttataaaagtagtacagagtccttatataatttttgttcagctttccctaacatgtgaacatcttacgtaactgtattacaatgattaaacccaagaaagtaacatcagtacaatactgttaa

SEQ ID NO: 279574 - DNA, 574 bp, Homo sapiens
tgttaacaacgtgcctgctgtggaaatggtatgtgacatcacagaagtatttctacaggtattttttccctaaccattgcagtgttatttagggattagtatttgacatattcactcttttccagatgataatttttttttaagcaaatatatgcatcgcagcctaggtaacatagcagaactctgtctctacaaaatataaaaaattagccaggtgtggtggcacacacctatagtcctagctactcaggaggctgaggcaggaggattgtttgaaccygggagatcaagattagagtgagctatgatcatgccactgcactccagcctgggcaacagagcaagaccctgtctcaaaaataaattttttgaaaataaaaaatatgcataaaaataaaaataatctcttttaaatttaaaacattgtattttgaaataattttaggcaaagttataaaagtagtacagagtccttatataatttttgttcagctttccctaacatgtgaacatcttacgtaactgtattacaatgattaaacccaagaaagtaacatcagtacaatactgttaa

SEQ ID NO: 279575 - DNA, 574 bp, Homo sapiens
tgttaacaacgtgcctgctgtggaaatggtatgtgacatcacagaagtatttctacaggtattttttccctaaccattgcagtgttatttagggattagtatttgacatattcactcttttccagatgataatttttttttaagcaaatatatgcatcgcagcctaggtaacatagcagaactctgtctctacaaaatataaaaaattagccaggtgtggtggcacacacctatagtcctagctactcaggaggctgaggcaggaggattgtttgaacccgggagatcaagattagagtgagctatgatcatgccactgcactccagcctgggcaacagagcaagaccctgtctcaaaaataaattttttgaaaataaaaaatatgcataaaaataaaaataatctcttttaaatttaaaacattgtattttgaaataattttaggcaaagttataaaagtagtacagagtccttatataatttttgttcagctttccctaacatgtgaacatcttacrtaactgtattacaatgattaaacccaagaaagtaacatcagtacaatactgttaa

SEQ ID NO: 279576 - DNA, 574 bp, Homo sapiens
tgttaacaacgtgcctgctgtggaaatggtatgtgacatcacagaagtatttctacaggtattttttccctaaccattgcagtgttatttagggattagtatttgacatattcactcttttccagatgataatttttttttaagcaaatatatgcatcgcagcctaggtaacatagcagaactctgtctctacaaaatataaaaaattagccaggtgtggtggcacacacctatagtcctagctactcaggaggctgaggcaggaggattgtttgaacccgggagatcaagattagagtgagctatgatcatgccactgcactccagcctgggcaacagagcaagaccctgtctcaaaaataaattttttgaaaataaaaaatatgcataaaaataaaaataatctcttttaaatttaaaacattgtattttgaaataattttaggcaaagttataaaagtagtacagagtccttatataatttttgttcagctttccctaacatgtgaacatcttacgtaactgtaktacaatgattaaacccaagaaagtaacatcagtacaatactgttaa

SEQ ID NO: 279577 - DNA, 619 bp, Homo sapiens
aatttaatgaaaaagtcaatatgtgatattttgtttactagtgtgcttataattttatcaataatagaaaartaatcatatataatatggttaaattgttcatattgatgacctacccctcttgtacatactccaagaaaaccataaaatactgttctttaatgtggtaaacatgggctcaaaatgttaatactagacatctttattattattatttctttcttcagaataagaactctttgaaaaatacttgcaacttcaatcattaccttttaaaacaatcctgtggatgaaataagtcctggacatgaagttcagttcgcagtttatagtccctaaatcccgtgcctcattttggacatgacattctgtagttgtctcttttcctttggtggtccacatttgcaagtgtatgcggatgttttgagaatctagtatttttgcaaagttgacttgtggagtggattttaaaagatcatggagtatcagtgatccattaagaaaaaaacaaattttaccacccacataatgttggcccaaccttgttaatggaaaagaaataaatattctgagcaaattaattcagagcctctccaagattttttaatgtagttcaact

SEQ ID NO: 279578 - DNA, 582 bp, Homo sapiens
cctttgggtatatacccagtaatgggactactgggtcaaatgatatttctgcctctaggtctttgaggaattgccacactgttttccacaatggttgatttattttacactcccgccaacagtgtaaaagtgttccctttcctccayaaccttgccagcatctgttattttttgactttttaataatagcctttctgaagggcatgaaagaacacttaaagcataagagtttgattaggagaaatctgaaatgcaccatagaaaattcttattcttttggttaagccaacaataaaaggtaagaaaaaggtaaaatatgttattcttataaaataaaacaccacaatgtatgaagaatgggttttcttttgctacaacaacttctgtttatttaactatttctatgaaacttgccaattaaattaccagagactttacaaaatcaaccattctagggtttggaatttagaataatattcactcatgaagtattaatgagtgaatactagaataaatactcctatcttaactggtttcagactttaactaaactgttagtacatcagaatagtctgtttctta

SEQ ID NO: 279579 - DNA, 606 bp, Homo sapiens
tattttacactcccgccaacagtgtaaaagtgttccctttcctccataaccttgccagcatctgttattttttgactttttaataatagcctttctgaagggcatgaaaraacacttaaagcataagagtttgattaggagaaatctgaaatgcaccatagaaaattcttattcttttggttaagccaacaataaaaggtaagaaaaaggtaaaatatgttattcttataaaataaaacaccacaatgtatgaagaatgggttttcttttgctacaacaacttctgtttatttaactatttctatgaaacttgccaattaaattaccagagactttacaaaatcaaccattctagggtttggaatttagaataatattcactcatgaagtattaatgagtgaatactagaataaatactcctatcttaactggtttcagactttaactaaactgttagtacatcagaatagtctgtttcttaaaaaagctttgatggaatcagtggtagaagatactcctccctattgaaatgctgctgatcaacttgcgtttttataaaagcaacttaatgccatgttcgactgtctgaagtttaattaatcacc

SEQ ID NO: 279580 - DNA, 1224 bp, Homo sapiens
tattttacactcccgccaacagtgtaaaagtgttccctttcctccataaccttgccagcatctgttattttttgactttttaataatagcctttctgaagggcatgaaagaacacttaaagcataagagtttgattaggagaaatctgaaatgcaccatagaaaattcttattcttttggttaagccaacaataaaaggtaagaraaaggtaaaatatgttattcttataaaataaaacaccacaatgtatgaagaatgggttttcttttgctacaacaacttctgtttatttaactatttctatgaaacttgccaattaaattaccagagactttacaaaatcaaccattctagggtttggaatttagaataatattcactcatgaagtattaatgagtgaatactagaataaatactcctatcttaactggtttcagactttaactaaactgttagtacatcagaatagtctgtttcttaaaaaagctttgatggaatcagtggtagaagatactcctccctattgaaatgctgctgatcaacttgcgtttttataaaagcaacttaatgccatgttcgactgtctgaagtttaattaatcaccwcattttgttagctacaatggacaacatccctgagatacaagttcgtattgtcatcttaattttgtggttatctctgagctcaagtttagggcaatatgcatgctggtataagtgtctacaaattttctgtattctcatgctattacccaagcactctgttccatatttgacaacagcttcctctaaatcatacttacatgctgatttctgtatgtcttctaggtgtaaagttatagcacatatttattgtttcattaaacwtgtgtcccaagataatttcattcttaacattcagtgacaagaagagtccttgctcgtatgtctgattctactagagttttaatcttgtgccctttccacctatcctattttctttcttcccctgacatagaaattctctcttgttcataaatgaatttcatgttctcagacgcaaggaggagttttagaagaaagataaagaacctgagagacaggcaacatgggagagggctcagggcacaaaccctgcagttgtgtggcctaagtagtaacaggctctgccgttaatagatgcgtaccttaggaaagttacttacctttttgtgtctcagttcctccatctgtaaaatgggaat

SEQ ID NO: 279581 - DNA, 617 bp, Homo sapiens
cattttgttagctacaatggacaacatccctgagatacaagttcgtattgtcatcttaattttgtggttatctctgagctcaagtttagggcaatatgcatgctggtataagtgtctacaaattttctgtattctcatgctattacccaagcactctgttccatatttgacaacagcttcctctaaatcatacttacatgctgatttctgtatgtcttctaggtgtaaagttatagcacatatttattgtttcattaaacatgtgtcccaagataatttcattcttaacattcagtgacaagaagagtccttgctcgtatgyctgattctactagagttttaatcttgtgccctttccacctatcctattttctttcttcccctgacatagaaattctctcttgttcataaatgaatttcatgttctcagacgcaaggaggagttttagaagaaagataaagaacctgagagacaggcaacatgggagagggctcagggcacaaaccctgcagttgtgtggcctaagtagtaacaggctctgccgttaatagatgcgtaccttaggaaagttacttacctttttgtgtctcagttcctccatctgtaaaatgggaat

SEQ ID NO: 279582 - DNA, 630 bp, Homo sapiens
tcattctttttttatggctgaatagtactccactgtgtataagtaccacattttctttataggttcatctattgatgaacacataggtaacttccaaatcttggctattgtgaacagtgctgcagtaaacatgagagtgaagatatctctttgatatactggaaaagagcccaggacttttctttcttttgggtgtctatccagaagtgagattgctggatcatatggtagctctatgtttcgttatttgaggaaactccaaactgttctccatagtggctgtactaatttatatttccaccaatagtgtttcagggttcccttttctccacatcctttccagcactggttattgcctgtcttttgaatataagccattttaactggggtgagatgatgtctcattgtagttttgatgtgcatttctctgatggtcaatgatgytgaggacctttcatatgcctgtttgccatttgtatgtcttcttttgagaaatgtctattcaaatagtttgcccatttaaaaaatcagattcttagatttttttcccctatagagttgtttgagccccttatatattctggctttttattcctctttagattggtaggttgaaaatattttctccca

SEQ ID NO: 279583 - DNA, 576 bp, Homo sapiens
ctatatttacccatccctttatgttcagtctacatgtgtctttataggtraagtgtgtttcttgtaggcaacaaatcaatggaccttgttttttatccatacagccaccttatgtcttttgattggagaatttagtctgtttacattcaatgtgattactaataagtaaagacttacttttcctattttgctatttgttttctggttcttttgtgaccttctcttccttctttttttctttcctgtctttctttaaatgaagatggttttctctggtgatatgatttagtttctttctttttattttttgtgtatccattgcatgattttttggttagaaattatcatgattcttgaaaatactgtattataacccatcattttaagctgataacaacttaacactgtttgcataaataagcaaacgagcaaaaaaaaaaaaaaaaaaaactaataaaaattctacaccaagcttgtccaacctgtggcctgcaggttgcatgtggcccaggatggctttgaatgtggcccaacacaaatttgtaaactttcttaacatgatatgaggtttttttt

SEQ ID NO: 279584 - DNA, 562 bp, Homo sapiens
ttacattcaatgtgattactaataagtaaagacttacttttcctattttgctatttgttttctggttcttttgtgaccttctcttccttcyttttttctttcctgtctttctttaaatgaagatggttttctctggtgatatgatttagtttctttctttttattttttgtgtatccattgcatgattttttggttagaaattatcatgattcttgaaaatactgtattataacccatcattttaagctgataacaacttaacactgtttgcataaataagcaaacgagcaaaaaaaaaaaaaaaaaaaactaataaaaattctacaccaagcttgtccaacctgtggcctgcaggttgcatgtggcccaggatggctttgaatgtggcccaacacaaatttgtaaactttcttaacatgatatgaggttttttttgtgatttttttttttcttatcagctattgttagtgttaatgcatttttatgtatgacccaatacacaaatttcttcgaatgtggcccagggaactcaaaagatggattaccccaatctatgcctta

SEQ ID NO: 279585 - DNA, 585 bp, Homo sapiens
caagcttgtccaacctgtggcctgcaggttgcatgtggcccaggatggctttgaatgtggcccaacacaaatttgtaaactttcttaacatgatatgaggttttttttgtgatttttttttttcttatcagctattgttagtgttaatgcatttttatgtatgacccaatacacaaatttcttcgaatgtggcccagggaactcaaaagatggattaccccaatctatgccttaacttcacctccccrtttttttgaactttgtgttgtttatgtttatatatttatatcttattgtactctctgtgtcttgaaaagttgttgttgtattcccaggcaagatggccaaatagaaacacctccggtctgcagatcacagtgagaccaatgcagaaagcaggtgattctggatttccaactgaggtacccagctcatctcattgggactggttagacagtgggtgcagtcattgaagggtgagcagaatcagggtgggatgtcacctcacttgggatgtgcaaggggtcagggaactctctcccctagccaagggaagtcatgagagactgtggcatgagggacagt

SEQ ID NO: 279586 - DNA, 665 bp, Homo sapiens
tcatttgggcagacactgagctagctgcaggagttttttttataccccagtgacacctggaatgccagcaagaaagaaccattcactcctcctggaaagggggctgaagccagggagccaagtggtcttgctcagcagatcccacccctacagagcccagcaagctaagatccactggcttgaaattctcactgccagcacagcagtctgaagtcgacctgggacacttggtgcggggagggtcatccaccattactggggcttgagtaggcagttttcccctcacagtgtaaacaaagccaccaggaagctcagactgggcggagcccacaacagcaccgcaaagacactgtagctggactgcctctctagattcctcctctcttgcagggcatctctgaaagtaaggcagcagccccagtatggggcttacagataaaaytcccatctccctttgacagagcacctgggggagcaggtgcctgtgggcgcagcttcagcagacttaattgttcctgcctgccagctctgaataggacagcggatctcccagcacagcacttgagctctgcaaagggacagactgactcctcaagtgggtccctgacccccatgcctcctgactgggagacaactcccagctggggtgacagatacctcatgca

SEQ ID NO: 279587 - DNA, 665 bp, Homo sapiens
tcatttgggcagacactgagctagctgcaggagttttttttataccccagtgacacctggaatgccagcaagaaagaaccattcactcctcctggaaagggggctgaagccagggagccaagtggtcttgctcagcagatcccacccctacagagcccagcaagctaagatccactggcttgaaattctcactgccagcacagcagtctgaagtcgacctgggacacttggtgcggggagggtcatccaccattactggggcttgagtaggcagttttcccctcacagtgtaaacaaagccaccaggaagctcagactgggcggagcccacaacagcaccgcaaagacactgtagctggactgcctctctagattcctcctctcttgcagggcatctctgaaagtaaggcagcagccccagtatggggcttacagataaaactcccatctccctttgacagagcacctgggggagcaggtgsctgtgggcgcagcttcagcagacttaattgttcctgcctgccagctctgaataggacagcggatctcccagcacagcacttgagctctgcaaagggacagactgactcctcaagtgggtccctgacccccatgcctcctgactgggagacaactcccagctggggtgacagatacctcatgca

SEQ ID NO: 279588 - DNA, 561 bp, Homo sapiens
cctgtgggcgcagcttcagcagacttaattgttcctgcctgccagctctgaataggacagcggatctcccagcacagcacttgagctctgcaaagggacagactgactcctcaagtgggtccctgacccccatgcctcctgactgggagacaactcccagctggggtgacagatacctcatgcaagagagctctggctggcatctggcaagtgcccctctgggatgaagcttccagaggaaggagcaggcagcaatctttgttgttctgcagcctctgctggtgatacccaggcaaacagggtctgtagtggacccctagcaaactccagcagacctgcagaagaggggcctgttagaaggaaaagtaacaaacattaagcaatagcatcaacatcaataaaaatacgaccatgcaaaaactccatccaaaggtcaccaacagcaacagccaaaggtagataaatccaagaagatsaggaaataccagcgcaaaaaggcagaatattccaaaaaccagaatgcctcttctccaaaggatcacaaatcctcaccagcaaggg

SEQ ID NO: 279589 - DNA, 355 bp, Homo sapiens
aagacacatgcaaacatatgttcattgcagcacaattcacaataacraagaaatggaatcaacctaaatgtccatcaacagtagactggattaaaaaaatatggtacgtattcacaatggaatactgtgcagccataaaaaagaatgagaccatgtcttttgcagcaacatggatggagctggaggtcattatcttaagcaaacaaacatgggaacagaaaaccaaatactgtatgtcctcactttaagtggggagttaagctttggatacatatggacacaaagaagagtacaatagacaccagtgcctacttgagggtgaaggatagcaggatcaaaaatctacctattaggt

SEQ ID NO: 279590 - DNA, 501 bp, Homo sapiens
tgtgaaagcaaatatcttggtcataagcagcatttaaaaaatgaaatacaatataatagaatatacttgaatatagacaatgcagtaagggtagtcttattttgtgaatttttgtgttgactatgtttgtgagcgtcggtttgtggatataagtatctactgggttgcaatataaaatatattttgactctaaattgcaataatctatcttaataatttgaacagatctacctgcaaatggagtcaatgaggtatatatgaaactatttttctattartaagaacctttctataaaattaattggctttagtgtactgaatagaggttaagaaaacagattctggagttaaattacctgagtgtgaatcccaggtctgccactaactagtgttattaactatgaggaaattactcaatctctacctcaatttcttcaattgtaaaacagagaaaataataattgtcattttataggattattgtaaagattaaataagtta

SEQ ID NO: 279591 - DNA, 501 bp, Homo sapiens
tgtgaaagcaaatatcttggtcataagcagcatttaaaaaatgaaatacaatataatagaatatacttgaatatagacaatgcagtaagggtagtcttattttgtgaatttttgtgttgactatgtttgtgagcgtcggtttgtggatataagtatctactgggttgcaatataaaatatattttgactctaaattgcaataatctatcttaataatttgaacagatctacctgcaaatggagtcaatgaggtatatatgaaactatttttctattaataagaacctttctataaaattaattggctttartgtactgaatagaggttaagaaaacagattctggagttaaattacctgagtgtgaatcccaggtctgccactaactagtgttattaactatgaggaaattactcaatctctacctcaatttcttcaattgtaaaacagagaaaataataattgtcattttataggattattgtaaagattaaataagtta

SEQ ID NO: 279592 - DNA, 450 bp, Homo sapiens
taatttttgtatttttttggtagagacagggtttcaccttgttggacagactgggtcttgaactcctgatctcaagtgatctgcccgcctcagcttcccaaagagctgggattatgggcatgagccaccatgcctgtctggtcattcgtatgtcttctttgkagaaatgtctatttgagtcttttgcctatttcttaaccaggttatttgatcttctgttattgagttgtaggagttctttatatattttagatattaactccttatgagatacataatttggaaatatattcttgccttctgcagattgtcttttcactctgttgattgtgttctttgataaataaaagtttttaagttttaggtagttccatttatctatttttgcttttgttttctgtgcttttggtgtcatacccaagaaatattgtcaaatacaatgtcatggac

SEQ ID NO: 279593 - DNA, 434 bp, Homo sapiens
caatggggtgagagggagctgcactgatggagaggctgctgtaggagcttttgtatcaggtgaagcacccattctctgtgttgtttgaacacagacacacacaactccctcatgctccatggtttgcaatgtactgcagcagtttaccttttgcacaaatgtaaaatcaagcagtcattcattgtgtgtggtggtataaagatttgatggcttccaatccccaagtacaggcataactcattttattgtgctttgctttattgaatttggcagatattgacctttttacaaattgaggattcgtggcaaccctgcgttgagcaagtctrttggcaccatttttccaacagcttatgtcactttgtgtctgtgtcacattttggtaattcttgcactatttcaaactttttcattattatatatctgttatggct

SEQ ID NO: 279594 - DNA, 1135 bp, Homo sapiens
ttgagtggtctggatagatgatctaaccagccacagcattcccttaagtcaaaatctaatccagagtaaagaccgaattcttttcaattctaggaaggctgacagagatgaggaagctgcagaagaaaagttagaagctagcagaggttagttcatgaggttgaaggaaagaagccatctccataacataaaagtacaaggtgaaacagcaagagctgatgcagaagccactgcaagttatccagaaggtctagctaagataatggataaaggtggctacactaaacaaagaatatctatgtaaacaatatagycttctatcgaaataagatgccatccattagcttttatagctagagagaagtcaacatttagcttcaaagcttcaaaggataggctgactctcttgtcaggggttaatgtagctggtgactttcagttgaagccagtgttcatttaccattctgaaaatcccaaaacccatacatattaagctaaatctactctggttatgctctatgaaggaaaacaaagcctggggggacagcaaatctgttcatggcttggwttgagtggtctggatagatgatctaaccagccacagcattcccttaagtcaaaatctaatccagagtaaagaccgaattcttttcaattctaggaaggctgacagagatgaggaagctgcagaagaaaagttagaagctagcagaggttagttcatgaggttgaaggaaagaagccatctccataacataaaagtacaaggtgaaacagcaagagctgatgcagaagccactgcaagttatccagaaggtctagctaagataatggataaaggtggctacactaaacaaagaatatctatgtaaacaatatagtcttctatcgaaataagatgccatccattagcttttatagctagagagaagtcaacatttagcttcaaagcttcaaaggwtaggctgactctcttgtcaggggttaatgtagctggtgactttcagttgaagccagtgttcatttaccattctgaaaatcccaaaacccatacatattaagctaaatctactctggttatgctctatgaaggaaaacaaagcctggggggacagcaaatctgttcatggcttgg

SEQ ID NO: 279595 - DNA, 571 bp, Homo sapiens
gtggtgtctttgggtggaatctattcctggtgaagatgctgtagacattttggaaatgacaacaaaggatttagaacattacatcaacttagttgataaggcagtggcagaattcgagagggttgactccagttttcaaagaagtcctactgtgggtaaaatgctatcaaacagcgtcacatgctgcagagaaatcatttgttcaaggargagtcaatggatggcacagacttcattgtcttatttcaagaaactgccatagccagcaaccaccaccctgattggtcagctgccatcatcatcaaagcaagatcctccataagcaaaaacgttatgactcgctgaaggctcaatgatctttattattttttatcaaaactgtttttaaattatgtaccttttttgacataatattattttacacttaatagactacagtatagtataaacataacttttatgtgcaccaaccgagaaaccaaaaaaatcagtgtgactaatttttatcactttattgcaatatttgctttactgtgggggtctggaactgaatcttcaatatcttcaaagt

SEQ ID NO: 279596 - DNA, 642 bp, Homo sapiens
aaagagattattcaagatctacattcaagcttatatgtattctagaagaagggggacagacagtaaactaaagctataatataatttcagatagtaataaatgctatgagaaaaataaaacatagtcatttgataatagtgacctggggggaggttcacgttctggggcctggggatgacatctcctgattgagctgagatctgaattattagaaggagccttttgtggaagatttgggtggaagattakgctaggcagaaagaaaagcaatttcaaagactctgagttttgaaggagtttggtggacttgaagaagataaaaaagaccaggcagtgtggccaaaataggggtggcaggatatagtgaggttagagaactagcttgggatagatcatagaagcccatttaggaaagaagaagatgttcgcaattgattccaagtgcaaagagaagccattggtaagtttcaagaaggagcttaacattatcttatttacattgtagaaagttcactcagattgctgaatgaagaatagattttaggggctccaaaagaaaagcaaggagaatgttcagaagctattgccatactattagcaaaaagatgtcagtggcatagacaaggatggtagcagcaaag

SEQ ID NO: 279597 - DNA, 325 bp, Homo sapiens
gtcaagtcagatgaggacagacaagtgaccatttgtttcacactatggacattattgtgaccttgacaagtaccatttcagtggattgtaatgaaaggggagaaaaactttactggagtggattgaaaataaaagagatgataaaaggaactcactaaatataggcatcttttgataagttttgctttgaaggggttakaaaaatttagtaataactggagtataatatgaggtcaaaggagatttttaaaaaatggacagtttgtgtctttatgcttattgaaattatccagtagacagagggagtctaatgataccggggagt

SEQ ID NO: 279598 - DNA, 535 bp, Homo sapiens
tttagaaagaaagggggaggggttggcatttttaggcacacggaaaactttttttaattcattgtagtaaaaggaaggcagagaatgcgagtgtagatgcagataagttaataaagttggggtggaaagttgaaggagctcccatctgattgctactttattctcagggaagaatgaggtgagttcatgagctgtggaagggagtggtttttggagatatgaagagaaaggagatctgaaacttgaaccaaagaatggaaagtatagaaggattcctgggcactggtgagtgctcctctaagactagtggtcagaagtttagagaaaggtcagcctacatgattgttggttttctccaggagaattcagcttctgaagcagaggggaagactacaaggacaattgagtttaaccatggttgggctttayttaaatgggaataatgtagagtaagagagagagagagaaggacaaagaagttaaaatgaattgattataatgattatccatagactctagactgggagaggtaatt

SEQ ID NO: 279599 - DNA, 597 bp, Homo sapiens
ttatgaaactatcagatctcctgagacttatgcactatcatgagaacagcacaggaaaaatctgctcccatgatttaattacctcccactgggtccctcccatgacatgtgagaattatggaagctacaattcaagatgagatttgtgtggggacacagccaaaccrtatcaataacatttaaaaaataaaattcggcagcaaaagcaaggtttgaggtaagatagtggactaatagggaaagtgctatttttttaataaaagaaatgcttgagcatgtgttcatgagaaaggtgtgaaatacttcataagcagctaccatccttcctgattcctttttttatactatgtaaaatggaaggaaccagctttacatagagtgttggtgtgctagataaagaatataatatttagactgacatgcatttgaatcctactaactgtgacaccatgctgagcctgtgtcctcatctgtgcagatcataatactgacctcagagggttgcagtgaggattaaatgagacacaatgtctgaaatgttagcacagtacctggcatacagaatatgaatagttttcttcattcttccttttagga

SEQ ID NO: 279600 - DNA, 1179 bp, Homo sapiens
ttattttatttgtaaaggaaatatacttttaaaagatggaagaaaaaaccaaagagtaaaattacctggccagaaagaaaaaaatagccaacaattttatgtgacatcacgtctttttaaagaaaataaatcctttaccagcctttcataaaagcctgtatgtgggagcacatggaaatttgttagacgctagatgctacttttgaaaatgaagaaagtgaagactaacgttgattggctttcctgttgtgcccctagaggataaatatrtaaacactttgtatattttcccttggttttgagaggaacacaatacataggtcaataaagtcaacaacatttaaattgttaaaagattttcctgggtcttttgggaatggtaaagcaggatacagtcttttattcttatttcccttcatgaaatgtactctctgtttttttttttttttggaacacatgatagttgctatgcatatagatagctcctaacaatgctgctctgacatttaagcatttcaccttctatgcagtacagcctgtttgtccttttaaacttggctgctgggccaaatgcaaaggaaccactgwccacttagttttagaaaccaagatacttcaaagtaaatgacactttggagattaagaataagctgaagattctgtgggctggccctcatgtggtaagaggaaatgtaaattgagctgcacttcttacctgwtttggatcagaatgataactgtgttatttgtaaatgagttgaaacaagctttgacatttttgaatttcaatgaggcaccctagttctgtgtatcctgaagtatataggcaagtggtgaatgatacaggaagactggacacagactaggaatctatctactttattatctcaaatgccagtaaatagtaaaaatgaccagagtctttttagtaactcttgctttagagcactttgtttgaagggaaattatttgttatagtacatgtggtcaggaatgacaagatagatggagacaattgatattgtaaacatattagaaacttgagagagtaagtcaagcttggaaacaaaatttctgtttcatttaaaaatcatttctctcttcacaattggggtggaaagaatgaggttgactaattttctggtattagctaaatttcccttgtttctgttttgtaaa

SEQ ID NO: 279601 - DNA, 575 bp, Homo sapiens
ttggaagtagggtgagtcctcaccagatgctgaatctgccgtcaccttgatcttggacttcccagcctgcagaactgtgagaaacacatttctattatttataaattacccagtctcagatattttgtgatagcagcacaagtggacaaagacagatggccgcaagaatattactcattccgctgtccttctgaacaacctgacactcccctatcaagaggtggtatgtgtttctctaccttcttaaatatggcagtgttcacgactgctttgagcattagagtatgggagaaatgatgctatgccatttctggtatagcctttgagtggcctagcagtttctccctcttcaaaaaccatctaccatgtaaaaagtgactaccctgagactattgtgttgtggaagcccaaatcacatggagaggctctgcaggatgaaaacgtatgtgaagagagagagcatgttgctacaaggtacaaaaaaatgtaaataaatatgccatcttgtggcaacaataggcactagggactactagaggggaaagggagkgagagagaaagggttgaaaagtaat

SEQ ID NO: 279602 - DNA, 583 bp, Homo sapiens
ggatgtaaccaaaacaaatattgaccaaatataaatttaatagaagggctccaaactgtatgttttggttcttccctatgtgacagtgccaggcaatgtcctgagtgctggtgataaagaccgaaaagataaacgttatctggtccttgctacccagcaagcaasacacgtaaacaactatctatgataaacatgacaagtgcaataataaactaatatgagaccataaaaataataattaatttttcttccattagaaattaggcactacaaagacagaggtattttatctgtttggttcacaccaaatgccaagaacagtgcctgttatgtagcagatgattaatatttgttggatgaacaaatggctgaatgagtgagggagatgatgggcatgtgaactgtaatgtttggaaataactcctgaaataattgagaaaagaggtgatattttaacgagatttggaagaatgcctagattttctttaggagagatagaaggaggagagagtagataaaacatgagtggaaaatgggatagtctatcatctgccatttaatgccacttcatggtcagcaacta

SEQ ID NO: 279603 - DNA, 502 bp, Homo sapiens
agattcactagtcagtcagcctctaatttgaaaaaattgtggcatcccacccaaaactacatcaaatgattagtatgatcctgatgaatgttagggctttagatggatgaataccatgattgaagtaatcctctaacacatccaggatctcaggaatctctcagatccaaggataatagatccagaattaattatttgaagccattggctacatttcactgaagttttaaatccttgcgtttgttttatgatcaacatagtctctacattggcrgtaaatgggaatctcatcctgtttatcagctaccatttagatataaagtaaggtaacgcttacattttgttttatatttgagaaggccaaaaagaccattagttttgttttgttttgttttagattgggtcgcactatgttgcgcaggctggtcctgaattcctgggctcaagtggtcctgccccctcagcttcatgagtagctgggattataggtgtgtgctgccat

SEQ ID NO: 279604 - DNA, 514 bp, Homo sapiens
aaaactacatcaaatgattagtatgatcctgatgaatgttagggctttagatggatgaataccatgattgaagtaatcctctaacacatccaggatctcaggaatctctcagatccaaggataatagatccagaattaattatttgaagccattggctacatttcactgaagttttaaatccttgcgtttgttttatgatcaacatagtctctacattggcggtaaatgggaatctcatcctgtttatcagctaccatttagatataaagtaaggtaacgcttacattttgttttatatttgagaaggccaaaaagaccattagttttgttttgttttgttttagattgggtcgcactatgttgcscaggctggtcctgaattcctgggctcaagtggtcctgccccctcagcttcatgagtagctgggattataggtgtgtgctgccatgaccgttagtcttaatgactaaacatattagttttcaatgattgcctgtgatttttagaaggac

SEQ ID NO: 279605 - DNA, 514 bp, Homo sapiens
tggggacataccatattcaaaccatagtacaagcattatccctaagaaaatctttggttttkgaccacatcttaaaatatgtttttaagaaaaaaaaaacagactaacacaagaatatgttaaaggggaagtgcttcagttcaagcaaagaagttcagaaaatgcacagacagtaagctagaggggacttgctgattgtggatgaacaattcttaaaggtggtgggtgtagggttgagaaggacatattttctaaaactagcatcttttgagtcattttttaaaaggtagtttgtgtacatattgacatttatgaagtctatagcttctttttactttctccctcaccgacaagtggggaaggtcctcccattcttcaccaggcaccacttccaaagtcattcttccctttcctttatgtataacagagagaaatcttaccaccacccgcttctgttggtctttcaaatttattagtgtatggactaatgtattattgtagggccaggagtagg

SEQ ID NO: 279606 - DNA, 514 bp, Homo sapiens
tggggacataccatattcaaaccatagtacaagcattatccctaagaaaatctttggtttttgaccacatcttaaaatatgtttttaagaaaaaaaaaacagactaacacaagaatatgttaaaggggaagtgcttcagttcaagcaaagaagttcagaaaatgcacagacagtaagctagaggggacttgctgattgtggatgaacaattcttaaaggtggtgggtgtagggttgagaaggacatattttctaaaactagcatcttttgagtcattttttaaaaggtagtttgtgtacatattgacatttatgaagtctatagcytctttttactttctccctcaccgacaagtggggaaggtcctcccattcttcaccaggcaccacttccaaagtcattcttccctttcctttatgtataacagagagaaatcttaccaccacccgcttctgttggtctttcaaatttattagtgtatggactaatgtattattgtagggccaggagtagg

SEQ ID NO: 279607 - DNA, 402 bp, Homo sapiens
tagcaaatagtctagaaagatgtatgtatatttcactcttaaaatctttatggattttatgggtattttcaaaaatgtaatatttttgtaaatgtaatattaactacagatatgtttatttaactacctgccaaagtttccctgctttaatacacattaatttatcttaattttataatctcctatagtagaaaaytaaaactttccaagattttattaccagacgccaaatagcaatgttctttaaatcattgttttattaataaaatgtgcaaatctttattttgagagtactggaaacagaacagttggtgatcttctgtcctaagatcaatgccgcttctagtggaacattagacatgggaggtttccacgaccatttttgtacagttcagatgtcaa

SEQ ID NO: 279608 - DNA, 708 bp, Homo sapiens
tatcagttgatgggacaggagtttgatttatctttggccactttgtatttgaatccaggtttccgtttagctggttataatttctaatttctgctttcaaaatagtatatccattgcctccctaaggaccagctcacagagatgatgtatttgaaaaccctgtggcaggatggctgactctgttttctggtggagaaaaaatatataccagcmttttctagaccttccgcaaccacctgtgcaattttttttttaaatcaacctgattttagctttctaaaacttcagtcagcaatagggttgtgctgtggttctgtctactggaaaataactttgtgtgatttaattttttttaagaagtaagttttggaagtcttttctgtctgttttttggtgatttcaaaatgaaaactaaaattgacccatctataattcatccatttttagatgggaaagaagaaagtgtgtcaaaatcaccattttgaaaaaaaaggaagggaaaaactatctagtttgaagaaattaagacaatcccaggaagatgtgcagtattctatccttccacacttacagtctttgtacaattagcaccagtggtcagaaaagtgaaccagaggccctttcagaattcccacctgagcaaaaatagataacactcagcctgcctcatcaagtaaacagagtacagtgatatatttttgaaaataa

SEQ ID NO: 279609 - DNA, 456 bp, Homo sapiens
caatctcaaaaataaaatggaagaacaagttgcatatagcatcataccatttacataattttaagctatgcaacataatacaatatcttgtgcatagctacctgcctgtagtaaaagtacaataatatactgtttatgtaatatacamaatatataaaattcatttgattttatatataatttatggtcaccaaccttaataggttctatctagggaagcaaaaaagggagaaataatggaaagaatagctgtatttgtaaagttttacttcataaaatagctgtaaagaaaatattggaaaatagtcatttaactgcttgttggtgagtgacacatgcattcctttgcgcatttttgtgtacacactttttaataaaataaaaatttattgaacttaaaagtcctaacaagataatcaacctaatggttcatgaacaaaattaaatgatttttaa

SEQ ID NO: 279610 - DNA, 633 bp, Homo sapiens
tgtggttttaatttttgtttttctaacgactggtgatgttgagaaaattccctgttgctatttgtggtatcttctttggtgacatatctgttcaaatatttttgcccagttgttttttactgcgttgttggcctcttgctaaaatttgagggttttttgattcaaatataggccctttatcagacacatgcttcgcaaaaaattttctcctagtctgtatcttgtcttttcattcacttaacactatcttttgaaaaacagaagtttctaatttcgatgaagtccagttaatctgttcacgtataaattgtgtgttcggcatgatacctaagaaatatttgcctaacccagtgtcacgaagattttcttctattctggaagttttatagtttakgttttatgtttaaatctataatctatgttgatttttatatatggcactaggcatgggtctgtgcatgtttgtttattttggatattactattactctagaatcatttgttgaaaaagctattcttattcattgtattgcccttctgcctttgccaagaccagttgttcacacatttgtgggtttagttctggactctactcagttctaatgatctgtttttcttatactctgttgttcc

SEQ ID NO: 279611 - DNA, 1245 bp, Homo sapiens
tctggcttgtgaagttacccgggaagggagtaatgccccaactttgctccaccctgtcatttcttaggtagaagctgagaaatgagtgtcagtggagacagacaatcaggctgtattttcagaaatactcagtggagcctcagatttatcctctggtatggggctcaggttggtttcctgataatgctcctttcacaccatcatggcaaggttccaggaatgtgagtgacaaggcaaaacaaggcaccctgaaattacctataatgaaaatgactggtaatctccagcgattactgtgtttgtgagtgacagggctgcactttgtgcaaaatcttttgctacagcaaaaacaggtcccgtggcattttcatgttgaggtttttggggttttgtttttaaggaaaatagcttcagatcttttgcattacgcattcttttgccttcataatgagtctgattacagatatctaatgyactttttgaagagatatgtaagtctttaaaaatataaacccaagttaaaatgaaagcaatagtataattcttatactattaagaacagtataccttttatagtattgtttatatataataatatatacacacataatatacatacttatgcatagtacttatgtactwttcctggggctgttttggaggcatctggcctaagagattttggaaatttctggtgatcctaaaggctccaccatcttctggtgttttgtaaatagtattttcattttcctttaaaataaatggtttaattattaaaaaaaatagatgccaggccaatgactgtgcccacttaacatggtgctcttggtgattgtgctgtcacttaagcattattcaagtggcggcctccatggaaactgcccgattgtaattaatggcaaagcwcacgtgggcagtcatgctaaacaggaaatcatcctgcctctcagttcccttgtgacttttcctcagatacaggaagggaaggccttagaatctggcccattaactgactcagtgggcaagaaatgactaaaccaagaaactcagactatggagaaaggttaaaatgctgaaatgtagcccaacttccttttttgtcagtcttctcaagaaatgcatttttctcctagttggtcacaggaagtaggatttttgaagctagcaagggaggaaagatagagaaagccgttttctatctaagaggtgcaaaacttacttctgcgcaaggtagaatgtaacctc

SEQ ID NO: 279612 - DNA, 586 bp, Homo sapiens
ctgcttattatgagaaaagtagcatatttttctataagcttatactctcatttcaatgcagtattgatttttaacttcatttccactactagtcacataaatcattttttttgatgttactggtatattatacataaagaatttaacctttcccaaagagaggtctggctccttggagacgatctttgctggtctgggtgcctcctcctagccagatagtgaccakgcgatttagggtggtggttggtcatgcaaaaaataccacattgtgagttatggcagaggctttgggtcacatggtgtcagtcaaactaaagactgagttcaaccacataggcaattaatcagtcatgcaaacataatggagcaccagtaaacattcagaacactgaggcccagtgagcttccctgattagcaatactctgcatattgtcacacaaagatacaggaaagtaacatgtctatgactgcatgtggacaggactccacatttgacacttcgcttggaccctgtcccatgcacttcccttggtagattttaatctatatcctttccctgtagtaaattgtattgttagtataaca

SEQ ID NO: 279613 - DNA, 634 bp, Homo sapiens
catccaccagattaaaaaaaaaagtcttaatgtgaaatctttcaatgaaccctcataagaattttttagtaagaacatcgatgaggacccttgtctttcttaagaaagaacttacagtagcatgcatcggacttacttggggggrttgttaaaacacagattaatggatctaaaccccagagtttctgattcagcaggtctggagtggggtcccaaaatttgcattattaataagtttctagacattgccgatgcttctggtcctaagatcagagtggagaacattagagcaatgctacattgcagcaatgcttctcagttctagctgacattagattcacctggggagatatttaaacttatagctatatggaaacttaccctaaaccaattacatagaatcctgggtgacagatcccaggcacgggtgtatgttaaaaggtgtccaagtgattcagatgagcagtcagtactgagaaccatagagatagaatatccatattttagctagtgatcatcttgctactagatcctaatgttggattaattttttcattagtttttgttatgactatctcctctgtatttcagtgtattttttaaaatgtcatagtgacatttgaaaaaagtgttt

SEQ ID NO: 279614 - DNA, 518 bp, Homo sapiens
tctaggtaacaggagcctttggtatgggaagtattgtgcgctactcattccaagcacattttctcacagcctagtacttactagcctttgtacttaaaggcacaaagacgaaggaaactcagtctttctaccctcaggctgcttcctgcatttcattccckaaaacggtatgcttcaaagcccaatagcctcacgtaactgctttctagtaccagaacatgtcacattctcttgtactgcaggttctttgtgtatactttcccctaccttgagtgcctttccgtttatggctgcctggagccctttatcttttaagagcaactcaagcaaaacatcccgggtgatggtctccacctgtagcttggtgacacttggcacataccttgaggaagagcccttgtcacctttgagtctattacttacctttgagtcttccatcagatctgagctccctgaaggcattgtcccctcctgtcccccactcctagtcagttcatggatggcctagaggagaggtg

SEQ ID NO: 279615 - DNA, 1038 bp, Homo sapiens
gaacaaatgagttaatgccactgaatctgtatcagccttgccatgactccaggagggtggttaaccagacattatcttccttgctttactgatgagggaatcacggcccagagggcatgtctctcacctgggcttggggcactgcgagaggacccaagygccccaaagggggccatgcctttttcttgttggattctttggcaaccagcacggctctgagcacacagcagatgtggattcaaagtagatggaaatagcaactaaatgacctcagagatggagccaaaacaacttttctgtttgcttggcatcacatttccatcaaagcagactgtggagggaggccattctgtttgcattttgactctattctacctgttctgttctgagaacacagctcagtgctgaagggacacaacaaaatctgcgggtgtgggtgawcctgtgctggggccaacagggtttgaaagtagagtaagcataaattaggtactggaaagtttcttatttcctgtagtgtcaggtgttcatagtcaaaaagagaagaaaagaagaagcagtgtcacatggcaagtctcccaacaaacaccaaacgtatgtatttgcacacaattagtccctttcgctaactgcccaaagcgagtagcacaacaggaattgttctagacacatccacaaggacacaacccaggacttgggatatttctatttctactacaaagccccagagcctcctgagcctcacctcagggtgagacagacagtttcctgagcacccawggaaagcacaaaatgccaggtggaatagagctgatcctcagtgacccagaacatacccaaagacataaaggagccaaaacccccttttccactgtgacttccccaatagaaagtgaggaggctagaagccaaagctcaactctggtacgctgctctgtgcccttgagcaagtcactagcactctctgggtctctggttcctcataaaggtagagcctggattggaaagtcccattctttcttctgcctcagtgtacac

SEQ ID NO: 279616 - DNA, 533 bp, Homo sapiens
ttggtaatgtaggatgctatttctgtccatttttaaagatgattttactgtgggtactgtacctgagcatggatgaaaaagggcaaagaagtcagaatagtgatttccagaatgtcctctggtttggagtcgtgactaccatttatagtttttgttggcagatctattttctctttacaaaaggatagacaccagaatctgtaagtgaaatgccctggcttgaaaagggtgagatcttattatgaaaaattgatgttactgttgttttctgtgttctgccttttgcagatgatcccaattactctttggttgatgactacagtttgctctatcagtaaaatcaatggtaagaacctttatttttcacataattgagtcatgtgtagactggtaattgtgctattgaagcctttgaaccttmtttataacactaccacaaactagcaaggccttgcatgaggcaggtacactggccagcatgctgtcccttcaggacacctctgtggatcccacagctggaagcagactggaga

SEQ ID NO: 279617 - DNA, 497 bp, Homo sapiens
aagatttaaaattaccttcctttttggctggaagacttagaagccgcctgatcatactttctcattttasagatgaggaaataaagcctacaagtgtgaaattaatttccttacagttttcctagctgatgagggacagaaccagaactagagcctgagcccaacccacatcactattcttctaacccttcctgaagttgtgatgctcatgctgaaatttaagatgccaaatatttttgccagcactttttcagttgggagaatcaccagggtttaaatgtcagatttatttttatgtggatccctgtgtatgctgaactacagagcatgatgtttaatctaatttaaggagccactgattgtaaaacatgccattattttatgttgcactaagaaggtggggtcgaggagttgccaataaacttgggacagactattgatggccaagcccatctgaatttaagatgctaaagtatgaaaaaaatacatcttagaat

SEQ ID NO: 279618 - DNA, 588 bp, Homo sapiens
caacatatcgcaaatgctgaaagaaaagaactgttaacacataaccccatatccagtgaaaatatcttctaaaactgaaggggatgatagcatgatatggtgattatagtcaataatcacttaattatatatttttaaataacttaaagaatgtaattggattgtttgtaactcaaagaataaatgcttgaggggatggatgccccattctccatgatgtgcttattttgcattgcatgcctgcatcaaaacatctcatataccccataagtatataaacctactatgtacccayaaaaatttttttaaattaaaaaaaaataatgaaagggagacagaacatagaatggtggttgctaagggctggggaaagaagaagttgagatgttattgtttaacgggcatagaatttcagttttataagataaaaagagttacggagatggatggtggtgatggttatgtaactttataaatgtatctaataccactgaattgaacacttacagtggttacaatgggagaaaatatgcaaattattcatctgacaagagactaatatccaaaatacacaaggaactcaaacaa

SEQ ID NO: 279619 - DNA, 576 bp, Homo sapiens
gcccctgtgctcatagagtttgaagtttaggttaaaaacaacaacaacaacaacaatattaaataagcccaaaaacaaatgcaaaattaccatcatgatacgtgctatggtaacacacaacagggaagtttgactgataaggaaaaacaggaaagtttcccctgatgagtataattgagctgatatctgaaggaagaagagcagagcacaagggaagtgggggttaggtgtgttataggcagagggaacagtattgcaaatgctctgtggcgcgaaggagcctggcaaatgcaagggcctaaaaaaggaggtggatgtagagaggagtgtaagaggggcaaatagtgtgtgatgagtctggaaggtaaggaaagacaagtccatgtagagcctcrtaggtcttgtttagaagtttttgtttgtatcttaagactaaaggtaagccactgaagtgtttcagagagagatctgacatgattagcctttttttggaaatggttctggctcttatttgactaacgcatgagaggagcataagagtaaaaatgaggaaattagcaagacagctagtgtagt

SEQ ID NO: 279620 - DNA, 551 bp, Homo sapiens
atttgttgacaaagatgccaagaatacacactgaggaaaagatagtctattcaataaatggtgctgggaaaattggttatctatatcagaaggataaaattaggctgggcgtggtggctcatgcctgtaatcccagcactttgggaggctgaggcaggtggatcacttaaggtcaggagttcragaccagcctggccaacatggagaaacctcatctttactgaaaatataaaaactagccaggcatggtggcacatgcctgtagtcccagctactcaggaagctgagacaggagaataacttgaacctggaaggcagaggttgcagtgattctagatcgtaccactgcactccagcctgagtgacaaagcgagactgtctcaaaaaaaaaaaaaaaaaaaggagaagaagaatgaaattagacccttacccttacaccatgcacaaaaagaaactcaaaatggattaaaaacctaaacttaagacttgaaactataaactactagaagaaaacagacaaaaactccatgacattggtttgggcaaggatt

SEQ ID NO: 279621 - DNA, 551 bp, Homo sapiens
atttgttgacaaagatgccaagaatacacactgaggaaaagatagtctattcaataaatggtgctgggaaaattggttatctatatcagaaggataaaattaggctgggcgtggtggctcatgcctgtaatcccagcactttgggaggctgaggcaggtggatcacttaaggtcaggagttcgagaccagcctggccaacatggagaaacctcatctttactgaaaatataaaaactagccaggcatggtggcacatgcctgtagtcccagctactcaggaagctgagacaggagaataacttgaacctggaaggcagaggttgcagtgattctagatsgtaccactgcactccagcctgagtgacaaagcgagactgtctcaaaaaaaaaaaaaaaaaaaggagaagaagaatgaaattagacccttacccttacaccatgcacaaaaagaaactcaaaatggattaaaaacctaaacttaagacttgaaactataaactactagaagaaaacagacaaaaactccatgacattggtttgggcaaggatt

SEQ ID NO: 279622 - DNA, 649 bp, Homo sapiens
tctacgtacttgccgtccttttgactctttcatttcagtccagtgattgagttcttctccagagctgttgagacctaaataaatccagcctatcatctttcttctcatgctgcttttgttatacacagacagcatgagtgtcacatgagaaagctgaaatagggtcactttgaaaacaaaagtttccttgtatactggatttggccgccctctgcggatggatatcttgcatttggacatctcttgatccgtggatttccgtagagttaacttaacatatgtattgggtggtctgtttgctgcccaattttttaagtggctgccttttatcacttctgctgatagtctcccatttgtggcattataaagcaggctaatgagaatttctggaactgacccgtcttcgagagactgacatgcggatgtactttcactacaagacatttctgacacrctcatttgggagtcacagacacattttatcttgtgaattgttccttgtactgtattctgaaccaagatctggaagccctccaacattttcaaaacagaactgcttattaatatagagaaaaagaagcagcatcaggataataaacacccaaacagctgacaaaaacccaactgcctctggagatacttttctaaa

SEQ ID NO: 279623 - DNA, 547 bp, Homo sapiens
agatttttcataatcaagtcatatataaataaccctttactctgattttatttttggtccaaattgtgtaatttaatttaaaattaaatcagagagcattttatttcctgattttgctcaggaaaaagaaacagaaattaggaaattaggaaataataaataaagataaatgtccctgactgctttctttgggggctccagtataatctgaggcagcaacctccaattcccatcacarttggtgtttaccaacctatatggtttaggcatattcctaatggccagtcagaaatggtagctctatggagctaaatgcatcacagacccctgagggcccaatttcaaggccctgatctaacagactaggaatttagtcaatgcaggttgataaccttgtctccctgaggattctctcttgtgaatggcttggatggttgtggctcaggcagcaggcactagaggcatgaagttctttcacatacaaccagtccagagactccagccatacacaaactttcacttcattttatgtttcccttctgtgaca

SEQ ID NO: 279624 - DNA, 527 bp, Homo sapiens
aaaagacttacgtgtgagtctaaatgatggtttgtttatggtcaaagacaattgtttggtcttcaaactttgatataaagccttttcaatttttttcttgatttgttcagcactatcagtagatgggtatcgaaatatgagcactataagaatatycacaccttgttcatctggactgaagaacaaaaaagcagataaaaatggcatttatctaatcattaatgactttaacttattaggactcacattaaacttaaaaaacataatgcatgatacatgtgcataccagatttttaaattatctctggatacagagattaaaaatgagtgtataataaccaggaagtgttggaagcactgtagaagaaataaagacaacattctggaaatactggataaaatacctacctgaaaacagttgttcactgtccttacttagctcatagtttagaggggtttgcgggcggagatgttggtgaaatcatgctttatacatacttaaaaggcttgctttttaaggcattttg

SEQ ID NO: 279625 - DNA, 527 bp, Homo sapiens
aaaagacttacgtgtgagtctaaatgatggtttgtttatggtcaaagacaattgtttggtcttcaaactttgatataaagccttttcaatttttttcttgatttgttcagcactatcagtagatgggtatcgaaatatgagcactataagaatatccacaccttgttcatctggactgaagaacaaaaaagcagataaaaatggcatttatctaatcattaatgactttaacttattaggactcacattaaacttaaaaaacataatgcatgatacatgtgcataccagatttttaaattatctctrgatacagagattaaaaatgagtgtataataaccaggaagtgttggaagcactgtagaagaaataaagacaacattctggaaatactggataaaatacctacctgaaaacagttgttcactgtccttacttagctcatagtttagaggggtttgcgggcggagatgttggtgaaatcatgctttatacatacttaaaaggcttgctttttaaggcattttg

SEQ ID NO: 279626 - DNA, 527 bp, Homo sapiens
aaaagacttacgtgtgagtctaaatgatggtttgtttatggtcaaagacaattgtttggtcttcaaactttgatataaagccttttcaatttttttcttgatttgttcagcactatcagtagatgggtatcgaaatatgagcactataagaatatccacaccttgttcatctggactgaagaacaaaaaagcagataaaaatggcatttatctaatcattaatgactttaacttattaggactcacattaaacttaaaaaacataatgcatgatacatgtgcataccagatttttaaattatctctggatacagagattaaaaatgagtgtataataaccaggaagtrttggaagcactgtagaagaaataaagacaacattctggaaatactggataaaatacctacctgaaaacagttgttcactgtccttacttagctcatagtttagaggggtttgcgggcggagatgttggtgaaatcatgctttatacatacttaaaaggcttgctttttaaggcattttg

SEQ ID NO: 279627 - DNA, 528 bp, Homo sapiens
ataccagctgaactcagaattagtgctacttgaatacttaacagagctcaggttgatgattctgggatggagaaattgcrtctatgtactcctttgcccagacccaagaatatcaggggaagcctgactccttccagttcagtgatgcctgaagaggagagtcaactgatatcttcagttataacctgaggcctgctatccactttactactatcaggtaccaatctcaggaaaggtaattccctccttttcttttccatgtgtaattttaacagacaggacaagaactagcacccttctcagaaccatattcttgtccagtctccttatggattaaatctctttaaacaacccatgttggtgttatcttggcctgcctcaactctgtaactgttcagattttgtctttagactgtgggctctggcactgggatgaggagagagttttgccacgttttcctgcttgcacaagggattcccaaatgtcagtcatttgcataccacttttatgcttttgccatatttgca

SEQ ID NO: 279628 - DNA, 528 bp, Homo sapiens
ataccagctgaactcagaattagtgctacttgaatacttaacagagctcaggttgatgattctgggatggagaaattgcgtctatgtactcctttgcccagacccaagaatatcaggggaagcctgactccttccagttcagtgatgcctgaagaggagagtcaactgakatcttcagttataacctgaggcctgctatccactttactactatcaggtaccaatctcaggaaaggtaattccctccttttcttttccatgtgtaattttaacagacaggacaagaactagcacccttctcagaaccatattcttgtccagtctccttatggattaaatctctttaaacaacccatgttggtgttatcttggcctgcctcaactctgtaactgttcagattttgtctttagactgtgggctctggcactgggatgaggagagagttttgccacgttttcctgcttgcacaagggattcccaaatgtcagtcatttgcataccacttttatgcttttgccatatttgca

SEQ ID NO: 279629 - DNA, 584 bp, Homo sapiens
catttgcataccacttttatgcttttgccayatttgcatactggcactattattgccttgatattttcttaaaattgatttttaattcattcaaataaatttggctttatgataaacaatatcatctattgaaatcacaggtttgatgtcttatgaccctatgaaatagatatttatcacaacacagagttcctgggtctaaagtcctgagctaccactattgatttgcttgttcatcatattaatgatctcttcttgtttggctaattattttttccttataattctcttattttttttcaatcagccttattatagatgctcttcatatgcactatgagttgcatgaactgtaaacggtgtagtaggttttttaagtatagaggtgtaaaaggagcccaaacggcccaagtcctatttctggcttccctaatatccgactttgaggttttggtaatctctgaacctctgtgtcttaatgttagaatgagaagagtgacccagatactcttgttttcttaggttcattgtgatttgaaacacatgaatcaaatatatattattagttcatttacaaataaaaa

SEQ ID NO: 279630 - DNA, 614 bp, Homo sapiens
cttgaaaaaaaaaagtgtatcttgctgttgagtgaagtgttttataaatgtcarttggaccctattggttgatagtgttgtttagatctgtatccttgctgattttctgccaggtaattctatcaattattgaaatcagaggatgttgaacttgccaactacattgtacatttttctttatctccttttacttctctcagtttttgcttcatatattttgaagctctgttgtttggtgtatgaacatgtagaattgctaaatattattggtggattgatccttttagaagtacgtatgtgcctctttggccctagtaagtttctttgttttaaaatttacatgttctgataacaatacagctattcctttttaaaatagtttttatgatttatctttttccatccttttattttcaacttatctatgtagctatatttgaaatgagtttcttttttgtcgattaaaaaataaaataaaactttttttcttcaacttttaagttcaggggtagatgtgcaagatatgcaggtttgtttcataggtaaacatgtgcgatactggtttgctgcacagaacaaccaattgcctaggtattaagcccagaatccattag

SEQ ID NO: 279631 - DNA, 576 bp, Homo sapiens
tttttctttcatttcgaccttggtgaatctgatgattgtgtcttgggttgatcttctcatcgaatatcttactggggttctctggctttcctgaatttgaatgttggcctgtccttctaggttggggaagttctcctagatgatatcctgaagtatgtttgcccacttggttctgttctccctgtctctttcaggtaccccaattagttgtaggttcagtcctttgttttacataatcccttattttttgcagtttttgtttrtttcttttcattcttttttctctattcttgtctgcctgtcttatctcagaaagctagtcttcaagctctgagattctttcctcaactttgtcattctgccactgaaacttgtgattgcatagtgtagttcatgtattgtgtccatcaggttcattatgttcctttttaaagtggctatttttgttatcacctcctgtattattttattattattcttagcttctttgcattgggttagaacatgctcctttagctaagtgaagttggttattactcaccttctgaagactacttctgtcaatttagccatctt

SEQ ID NO: 279632 - DNA, 576 bp, Homo sapiens
tttttctttcatttcgaccttggtgaatctgatgattgtgtcttgggttgatcttctcatcgaatatcttactggggttctctggctttcctgaatttgaatgttggcctgtccttctaggttggggaagttctcctagatgatatcctgaagtatgtttgcccacttggttctgttctccctgtctctttcaggtaccccaattagttgtaggttcagtcctttgttttacataatcccttattttttgcagtttttgtttatttcttttcattcttttttctctattcttgtctgcctgtcttatctcagaaagctagtcttcaagctctgagattctttcctcaactttgtcattctgccactgaaacttgtgattgcatagtgtagttcatgtattgtgtccatcaggttcattatgttcctttttaaagtggctatttttgttatcacctcctgtattrttttattattattcttagcttctttgcattgggttagaacatgctcctttagctaagtgaagttggttattactcaccttctgaagactacttctgtcaatttagccatctt

SEQ ID NO: 279633 - DNA, 1171 bp, Homo sapiens
tgtggtgatcctgaaaatgtgtctcttagaatattattgacaggtggctcaactgctgtgctttgagcccaaagctgcactcacactgcagccacatttcccatgagctcctcccagcctgtgactaagcacaggagggtttttaaggtaagcccatttctgggagatgtggaattcctttgatgagtaactttgacgtaaggactccccaaaggcttggccaaatcttcttaaaactgcactgcaatgtggaactcttcctacccaactgtttttacrtccttctgtactacacaaggatcagagctgcatggcattctgaagtgtctttatgactcttccaacaagcatacttttttcttcacatatgttttccttaataattatcttgcacctcagattccatcttgaggtctgatagagtggtcttagaaaatctggaactgattagctcacctcagtgtgtgttgggcagaggatgccatgctgaatggctgcagggcacagataatcccaggcataaggtggcaggtgcattgttaaagatttcaccagcagtagcccgggaaaactttttggtgcttcwtgtggtgatcctgaaaatgtgtctcttagaatattattgacaggtggctcaactgctgtgctttgagcccaaagctgcactcacactgcagccacatttcccatgagctcctcccagcctgtgactaagcacaggagggtttttaaggtaagcccatttctgggagatgtggaattcctttgatgagtaactttgacgtaaggactccccaaaggcttggccaaatcttcttaaaactgcactgcaatgtggaactcttcctacccaactgtttttacgtccttctgtactacacaaggatcagagctgcatggcattctgaagtgtctttatgactcttccaacaagcatactwttttcttcacatatgttttccttaataattatcttgcacctcagattccatcttgaggtctgatagagtggtcttagaaaatctggaactgattagctcacctcagtgtgtgttgggcagaggatgccatgctgaatggctgcagggcacagataatcccaggcataaggtggcaggtgcattgttaaagatttcaccagcagtagcccgggaaaactttttggtgcttc

SEQ ID NO: 279634 - DNA, 573 bp, Homo sapiens
aagtgtcccagttgccttagaagacagcggagaaagaaataaagaggctgagggaagtgggcatgtcraaatggatatattatgtgaggccagaagacccaccagggcatgtgtttcatcaggaagcccagaggacatatcatttatgaaagtcactacaaatgagctggtgagaggagcttgagaataactaagaagttcaatgatggctctcgttgcagatggaggctgcaataagggaagcacctacagtcctgagattgtccatagggatgatggaatcctgaagtaatagatgcaaagtgtcagtgctaaactgccaaagccaggaacccacagtgagctttaacaaatggcaaggttggagggacagctatggaagtttttcccacaaagaattgtggagacagttcaaaaagtatggtgtttttaggggaaaataaacaggcagctagccagcatgctgattaacatctacaaccaaagaagaaaaaatgcaaaaatggaagatcaggaggctctaggtgatcaccccaatagaaagccatgatccctttcttagttcttagactt

SEQ ID NO: 279635 - DNA, 1139 bp, Homo sapiens
ctcacaatacaataagagaaaagaaaatgttattaaaatcttaaggaagaaacaatatatttactattcattatgtggaagtggatcatcataaaggtcttccttctcattgtcttcccattgagcaggctgaggaggaggaagaagagaagggattggtcttactgtctcaggggtgccagctgtggaaaaaaatccacatataagtagccctgatatggtttggctctgtccccacccaaatctcatcttgaattgtagttcctataatacccacgtgtcgtggatggacccagtgggaagtaattgaatcatgggggcagakcttttccatgctgttctcatggtagcgaataagtctcatgagacctgatggttttataaagggcagttcccctgcacaagctctctagcctgccaccatgtaacacgtgcctttgttcctccttgccttccaccatgattttgaggcccccagccatgtggaactgtgagtccattaaacctctttcctttataaattacccagtctggggtatgtctttattggagcatgagaacagactaatwctcacaatacaataagagaaaagaaaatgttattaaaatcttaaggaagaaacaatatatttactattcattatgtggaagtggatcatcataaaggtcttccttctcattgtcttcccattgagcaggctgaggaggaggaagaagagaagggattggtcttactgtctcaggggtgccagctgtggaaaaaaatccacatataagtagccctgatatggtttggctctgtccccacccaaatctcatcttgaattgtagttcctataatacccacgtgtcgtggatggacccagtgggaagtaattgaatcatgggggcagatcttttccatgctgttctcatggtagcgaataagtctcatgagacctgatggttttataaagggcagttcccctgcacaagctctctwgcctgccaccatgtaacacgtgcctttgttcctccttgccttccaccatgattttgaggcccccagccatgtggaactgtgagtccattaaacctctttcctttataaattacccagtctggggtatgtctttattggagcatgagaacagactaat

SEQ ID NO: 279636 - DNA, 624 bp, Homo sapiens
agaagttatttcatctttttctaaggtcagttgaaaatccagtttctgaccatttcagcctcaactatgagtctctggtggccccttttccactagtggactggcgccactagaggaakaagggtctaaaaataatgctatgcttggccaaacacaggcccaaaagagtatgctactttagacagcagctatcaaaaacactttatgtggttttgagaaaggagacttacatacgattgtatattcaacggctagaatactcagtatctgacacatagaggtttaagaaatgcttgttggatgaataagtaattaggtaagtcggcgccttgaatattttaggtcagtgatgtccaatacaacttttttttaatgatggaaatgttctatatctgtgctgcccaaaatagaagccactaagcccatgtgactattttgtgcttaaaatgtgattagtatgacagtaatgacaaaatgtgatccgtatgaggaaatacattttattttattttattttaatctaaatagcttcatctggctagtggctcgcacattggatagtgtagcttttagtgcttagtgatgttatgcaattctgtatgctccactgttaagtgttaatgg

SEQ ID NO: 279637 - DNA, 530 bp, Homo sapiens
attgttgcattagatgttagttttagatttaatccagtcccaataatgagtcacttcggtataaagtcctggcttgttttattttccacagtctattccccagcttactattccaacaaggtaccaggcatttctatcacgtgcaataaccagaggacctccagaatcaccctggaaaagaagaagaaaacartacggtcaatgtaataaataaagggatgtcagaaatgggttagttggcatctgaatgtctaataaactaacactttggattgaaatatgtaaaatcattctattttacttaccattagtgttaatatgataattgagcttattacttactccctgttaatgccttcaggtagaaggtaatgtgaataaagctaagatttcaggtttatccttgtaaaatttttagttttgctgtctaaaatttttagtgttagtttagacagagcaaaactaaattctgtgacactaggcatgagactaggaaagcttaactaagacacaggactatgttctatgtc

SEQ ID NO: 279638 - DNA, 530 bp, Homo sapiens
attgttgcattagatgttagttttagatttaatccagtcccaataatgagtcacttcggtataaagtcctggcttgttttattttccacagtctattccccagcttactattccaacaaggtaccaggcatttctatcacgtgcaataaccagaggacctccagaatcaccctggaaaagaagaagaaaacaatayggtcaatgtaataaataaagggatgtcagaaatgggttagttggcatctgaatgtctaataaactaacactttggattgaaatatgtaaaatcattctattttacttaccattagtgttaatatgataattgagcttattacttactccctgttaatgccttcaggtagaaggtaatgtgaataaagctaagatttcaggtttatccttgtaaaatttttagttttgctgtctaaaatttttagtgttagtttagacagagcaaaactaaattctgtgacactaggcatgagactaggaaagcttaactaagacacaggactatgttctatgtc

SEQ ID NO: 279639 - DNA, 616 bp, Homo sapiens
ggttagttggcatctgaatgtctaataaactaacactttggattgaaatatgtaaaatcattctattttacttaccattagtgttaatatgataattgagcttattacttactccctgttaatgccttcaggtagaakgtaatgtgaataaagctaagatttcaggtttatccttgtaaaatttttagttttgctgtctaaaatttttagtgttagtttagacagagcaaaactaaattctgtgacactaggcatgagactaggaaagcttaactaagacacaggactatgttctatgtcttacataaatgataacttcaagactcaacaaacaagtcatctcgtccataagcctctcccagattcatgcctagtgtctcttgcatcattgtttctgttagctagagggagtctctggctgtgaatttgaatctcatcttgttccactcacattaattgacaggaaagtgtcctggatatcatatcactatgtctcagtaggtttgagaggagcaacatatgcaaagggcacaccatgcaaatatgcgctatttattgctgaaaatattctgctcccaaactaaggtggaatccctagccctagtggactggtcta

SEQ ID NO: 279640 - DNA, 548 bp, Homo sapiens
tagtggactggtctaaagtcatgaggacttccctcttatctttaaaccttggtttagacaaatgattttaaattgatcttttaacaatgtacctattcattcaaaagaacactatgtggaagtcattatagagtctttaaacaagagaaaaaattctgtttgaagaagacatgggcttctagagtcttgtgccttgcctttagctcccttcccttccattttcttgacatacttcttgatctcctacagtgtcggtggacagagtgtgaaaaccttggtctaccaaaagaagtcctccttagttccttttccttaggcccrtatcctaatttaggtccttggtattttactatgctagcagcgaaaggaagcaagggtatatgaaccagtggaaagagagatctgcttttacatagatttatttgtgtttctcttttaaaccatgtgatctagttatatcttggaccacccacattacttctccttcccccatgaagggaagtgagtggagggagaccatgtattctagaacatgtagccaaaccctc

SEQ ID NO: 279641 - DNA, 611 bp, Homo sapiens
attcaggcacaaataacattaccacataccatttattaagtaccttctatggatgaccctgatatatgtcctattaggctgctcttgaaaatataccacagaaacacacagactagctcttcctctgaagacttcagtcgtattcgcagccactattcagcccagcattcactaatcaaagaaggcagatcactcttaccacattcagacatatttcttcagccatttcacaacccaaaccagaagcagatgaaatggtttgaagaatgctacggagtggagtgggtatgccttttcaaaaatacatcttaaggacattttctytgagggggaaaaaagcaggccagtgtaaagaatattttgttacaggaattaagatattgaattagagacagcccaaacttcgaagtcatagacatctagatgccacaaaggatatcccagtcttatcctttgtcattctaataactttcaaaaagttgcttgacccctaaaagtttacactacaaaatggggataatttcacccaactcccagtgttattttaaggatcactagatgtaatgaatacaaagcatgaaaggtaatatcctaataaatgttagcatctg

SEQ ID NO: 279642 - DNA, 596 bp, Homo sapiens
attagatatgattggctaaatcttgggaggtaggagaagagaaccttagtaggtccttgtctccatttcaaagtgcaggaaaataaaaaaatacaatcaaatatctattaatttactttgatgccttacaaacccayaatgttattgtgaaatgtattcaacttatgagagtagacagctcattgcacagtattctgcacactattgggctttgaatgattcatgatgaagtagcaaatcactcccaagctctgggagtaggaggtgttaagtttagttaagattatagaggtaagcgtaatggtgctactcaagtagtagatgttttccttttctacttttatcaggaagtggctttaagtcttaaaggatttaattcccctttatactcatcaccatttcctatagaacaatgcagatccctcagagatgaggaaaatttgattatataatctgagattataacgatagtgcatccacctagactcaacatcagaattttagagtgtatattggagggaagccgacttctataaaaattaactgattagactcatatgacttcataataagagcttgaaacaaaaattagaaat

SEQ ID NO: 279643 - DNA, 560 bp, Homo sapiens
aaacccacaatgttattgtgaaatgtattcaacttatgagagtagacagctcattgcacagtattctgcacactattgggctttgaatgattcatgatgaagtascaaatcactcccaagctctgggagtaggaggtgttaagtttagttaagattatagaggtaagcgtaatggtgctactcaagtagtagatgttttccttttctacttttatcaggaagtggctttaagtcttaaaggatttaattcccctttatactcatcaccatttcctatagaacaatgcagatccctcagagatgaggaaaatttgattatataatctgagattataacgatagtgcatccacctagactcaacatcagaattttagagtgtatattggagggaagccgacttctataaaaattaactgattagactcatatgacttcataataagagcttgaaacaaaaattagaaatttgagggcagattaaactctcatatgtaaaaagtcaaccaatagacataaaaatgggaaagtcatatcaggatctaaacatctatgtttgtag

SEQ ID NO: 279644 - DNA, 560 bp, Homo sapiens
aaacccacaatgttattgtgaaatgtattcaacttatgagagtagacagctcattgcacagtattctgcacactattgggctttgaatgattcatgatgaagtagcaaatcactcccaagctctgggagtaggaggtgttaagtttagttaagattatagaggtaagcgtaatggtgctactcaagtagtagatgttttccttttctacttttatcaggaagtggctttaagtcttaaaggatttaattcccctttatactcatcaccatttcctatagaacaatgcagatccctcagagatgaggaaaatttgattatataatctgagattataacgatagtgyatccacctagactcaacatcagaattttagagtgtatattggagggaagccgacttctataaaaattaactgattagactcatatgacttcataataagagcttgaaacaaaaattagaaatttgagggcagattaaactctcatatgtaaaaagtcaaccaatagacataaaaatgggaaagtcatatcaggatctaaacatctatgtttgtag

SEQ ID NO: 279645 - DNA, 605 bp, Homo sapiens
aagaataatcattcagtttattcatttaaggctctttctgtttagttgcatgatgcattgcaaaagcttatcattactagtgcttgcaaattatacactttatgaatcaagcagccatagcagaaactacacatatgaaagamagcatttgaaagaaaaaatgatgtaaaaatatgctttaataaatttggaaaataaagctctaaccagtttccaaaatagtccatataaagacaataaatataggtaccgtgtaatagtaatggtgctaaagtttttgaaattcaccacatctgtttcttatttgtttgtttttgccatatttataatgggacatctgatttcatctcttatttattttgattttgtattttatttcatatctctgttcaaatgaaggataggtttatattttttgctttgttgttttactgagatactcaccatctaatttaagtgctccccatccagtgacaaacactttactcttaggcaaggcttcaaaagtagcttctggaagacagactctgtgcacctcattggaaaatatgatgggggtgaagagcttcactacagcgatatcatcctcgtgtttatgggcagca

SEQ ID NO: 279646 - DNA, 580 bp, Homo sapiens
tgggggtgaagagcttcactacagcgatatcatcctcgtgtttatgggcagcatagttctcatgaataataattgactccccctttcttctcattagtgagggattcgggttattccaaaactagccatccagagtttgggtttttcttcactgatcacagagtaaaaggaatacagttggttcatttctaatttaaatttgcccaggactgtggatgggcagggracataaatgtgggagaagggcaaattttttaaggtaataattgattgggaccatcccaccttcttatctgaggcttctctcctaagactgctttgctttcatctacttgctaacaaaccgccattccaaggtagcttaaattactgtccttgagggaagcttgtatttttatattattccacattatcctatattattgccatttttgactataaaaataatacaaattaatttaagaaaacaaataattataaagtagacatatatacacgtagattcacatatacactcatatcaaggcacaatcatataaatgtatgtatagttataaagagaaagagaggtaaaattgga

SEQ ID NO: 279647 - DNA, 605 bp, Homo sapiens
aactatacttaaggattttatcagaataaatcccttagaattaaattttgccactaatggcttccgtggcttctagaataaaccaaactttctacctggacctacatgatatggtccttatttatgtctctgatggcaagttgccctgctactgctcttagcatgactcaatggccaccttggccttcctgtttcttaactgtgcaaaggtattcctgcctgcaatctgtgttctagctgtgccttttgccaggaatgcttatttcccttggcctttttatggttgktttccccttgtcactcagatctcagctttaaaataccctcctcagagaggacttccattacaaccaaatctaaggtagctttttactctctctgttctctgcatggagtttcaaattatctgatattaccttgtttattttttatctagttattattttccttgccacaattagaatattagttctatgaagcagagactttaatttttggcacaaatagtttctccataaatacttgctgagtgaataaataaatggtaatcataacaaataatttactaagccttgtatattaggttctatgacaaaatttatttg

SEQ ID NO: 279648 - DNA, 605 bp, Homo sapiens
aactatacttaaggattttatcagaataaatcccttagaattaaattttgccactaatggcttccgtggcttctagaataaaccaaactttctacctggacctacatgatatggtccttatttatgtctctgatggcaagttgccctgctactgctcttagcatgactcaatggccaccttggccttcctgtttcttaactgtgcaaaggtattcctgcctgcaatctgtgttctagctgtgccttttgccaggaatgcttatttcccttggcctttttatggttggtttccccttgtcactcagatctcagctttaaaataccctcctcagagaggacttccattacaaccaaatctaaggtagctttttactctctctgttctctgcatggagtttcaaattatctgatattaccttgtttattttttatctagttattattttccttgccacaattagaatattagttctatgaagcagagactttaatttttggcacaaatagtttctccataaatacttgctgagtgaataaataaatggtaatcataacaaataattyactaagccttgtatattaggttctatgacaaaatttatttg

SEQ ID NO: 279649 - DNA, 534 bp, Homo sapiens
attaggttctatgacaaaatttatttgcttattatatcctcacaataatattatgaggcaagtttattaagaacatgatttatttttatttttttagggacagggtctcactctgttgccctggatggagtgcagtgatacaatcatagctcattgcagcctcaaactcctggcctcaagcaattctctagccttggcyttccaaagttctgggaatataggagtgagctgccatgcccagccagggcatgatttaataattcttgaggcaaaagcttgtcccgcatacatttcactgtaacatcaattaagtttagcgccattctctgtaggttatggagcagtgggagggggtagagttacaattagttcacagctaagtttagcttaatcctaaactcatctccatttatgtaaaaactattgttgaacttccacgatggtgctatatatcatgtgtgagcattacgtaatacacgtgttccacctgcaggataaaagaggttgaatacctccagttctagaacaggattg

SEQ ID NO: 279650 - DNA, 534 bp, Homo sapiens
attaggttctatgacaaaatttatttgcttattatatcctcacaataatattatgaggcaagtttattaagaacatgatttatttttatttttttagggacagggtctcactctgttgccctggatggagtgcagtgatacaatcatagctcattgcagcctcaaactcctggcctcaagcaattctctagccttggccttccaaagttctgggaatataggagtgagctgccatgcccagccagggcatgatttaataattcttgaggcaaaagcttgtcccgcatacatttcactgtaacatcaattaagtttagcgccattctctgtaggttatggagcagtgggagggggtagagttacaattagttcacagctaagtttagcttaatcctaaactcatctccatttatgtaaaaactattgttgaacttccacgatggtgctatatatcatgtgtgagcattacgtaatacaygtgttccacctgcaggataaaagaggttgaatacctccagttctagaacaggattg

SEQ ID NO: 279651 - DNA, 494 bp, Homo sapiens
atgctggactgaggaccagaaagacctgcaatttgtaatcatcaacaggaatagacaaaacgatcccaatacaagtctgttctctctatccaaagtactgggaaagggaaagcacaacagacagctaatgggaaactcaaaccttctgcttcacagccaargcctggcagtccattctgccagcagcagtgacagccgaaagcccttgaccatcccaatccacacttcaaaaccaggaactacctggcagactgatacacccacaaagacagtggcagcagagacctgcatctactcagaaacataagaagactcaggcccagtgcacccctccacaaagggtggcccactgattcaaggcagccgagggaagcatgttctactcccacaaaaggcacgggaaacagtaattaagaggaagtgcagaatagtactggaaggatatgaaaactaaattgtcactgaaacaacaaaagtaagaatctgtactctaa

SEQ ID NO: 279652 - DNA, 494 bp, Homo sapiens
atgctggactgaggaccagaaagacctgcaatttgtaatcatcaacaggaatagacaaaacgatcccaatacaagtctgttctctctatccaaagtactgggaaagggaaagcacaacagacagctaatgggaaactcaaaccttctgcttcacagccaaggcctggcagtccattctgccagcagcagtgacagccgaaagcccttgaccatcccaatccacacttcaaaaccaggaactacctggcagactgatacacccacaaagacagtggcagcagagacctgcatctactcagaaacataagaagactcargcccagtgcacccctccacaaagggtggcccactgattcaaggcagccgagggaagcatgttctactcccacaaaaggcacgggaaacagtaattaagaggaagtgcagaatagtactggaaggatatgaaaactaaattgtcactgaaacaacaaaagtaagaatctgtactctaa

SEQ ID NO: 279653 - DNA, 499 bp, Homo sapiens
catagttaattagaagaaaaacatatagccatttgttttgagtaactattgatttattaattaacttgtgctcaccatgctattcaagatgatattacatggcatttcaccaaagaaaatttcataaatcaagtcagatgaatgaaaagcacttatttgacatacacccagtttcacaacttagcagctcttctcttgtggtttgtgaaactcactatgcagactcaggttcacttaaggttcaatatatagtcagtcttytttctgacaagtcagcttgatgagtctataaacaggcttataagaccacatattttgtaacaagctgtggttttattaagaaataatttgacctaggtatttataccacagataaattatcctatgtaggaagtctaaaatgacaccagtggcatttacagtcttatcttattctaagtaatcctttcatgcatttttattggtaagtatgatgattctagagaggtgttcaataata

SEQ ID NO: 279654 - DNA, 499 bp, Homo sapiens
catagttaattagaagaaaaacatatagccatttgttttgagtaactattgatttattaattaacttgtgctcaccatgctattcaagatgatattacatggcatttcaccaaagaaaatttcataaatcaagtcagatgaatgaaaagcacttatttgacatacacccagtttcacaacttagcagctcttctcttgtggtttgtgaaactcactatgcagactcaggttcacttaaggttcaatatatagtcagtcttttttctgacaagtcagcttgatgagtctataaacaggcttataagaccacatatkttgtaacaagctgtggttttattaagaaataatttgacctaggtatttataccacagataaattatcctatgtaggaagtctaaaatgacaccagtggcatttacagtcttatcttattctaagtaatcctttcatgcatttttattggtaagtatgatgattctagagaggtgttcaataata

SEQ ID NO: 279655 - DNA, 565 bp, Homo sapiens
ttggggggataaccgtaaataaacattgaagtaaatgttatttgtatcacagcaagctttatgtaagcatttttgtgatatattgaaatgtgtgaaattcatatttaacaaagctctaatttgttgtttttttcttttctcagatatttcagagatccaatttaaaccatcattacataaagtgtcaagttgtcaactttaggtaatcacagttaayaaatttgtatgattataaaaggcagctttgtattatatagttattcttcaattaattgctttgtaaacaggtctaaagatcttagctatatcaagagcaaaaatagtttaatattattacatttgtgattcctcctgtatagtttctgtagtgagagagtttcttgagtagtgatgaaatatattctactggttgtcattttaaagtcttttgcatttcatacagaagattcttacaattattaactactgctctcaattttactgactttagaaaataataaacagctattatgaatttttgaatcacaggaatatatattcacatatgtagtttatgatatatata

SEQ ID NO: 279656 - DNA, 565 bp, Homo sapiens
ttggggggataaccgtaaataaacattgaagtaaatgttatttgtatcacagcaagctttatgtaagcatttttgtgatatattgaaatgtgtgaaattcatatttaacaaagctctaatttgttgtttttttcttttctcagatatttcagagatccaatttaaaccatcattacataaagtgtcaagttgtcaactttaggtaatcacagttaataaatttgtatgattataaaaggcagctttgtattatatagttattcttcaattaattgctttgtaaacaggtctaaagatcttagctatatcaagagcaaaaatagtttaatattattacatttgtgattcctcctgtatagtttctgtagtgagagagtttcttgagtagtgatgaaatatattctactggttgtcattttaaagtcttttgcatttcatacagaagattcttacaattattaactactgctctcaattttactgactttagaaaataataaacagctattatgaatttttgaatcacaggaatatataktcacatatgtagtttatgatatatata

SEQ ID NO: 279657 - DNA, 238 bp, Homo sapiens
tatatatataaaaagttggtggacataacaagtgcttttgatttcttttttagaaaagataattctagaactgtcagatactctccccttcctaaatatgatgaagttttacaagcagggaataatttagctattaatacttgtrtgacacaagaggagagaatctatgacaataaaatgtgtaaaatatttatgtcgtattttcttgaagatataactaatatttaagtaataaagt

SEQ ID NO: 279658 - DNA, 587 bp, Homo sapiens
cattttaataatcttctcatctacaaagagagcttctttatttcaccataaagaaaactacttttcattttaagtctcttgtttacttgataatgaacacatcttttgattgtgataaggaagattatcttcttttggctagtatggaaataattataaaataagaattgtatggtaacccaagtataatagcatttcttcctttttaaaaaagatctcagtggaattgtttgtattaatgcagcatatatatgataaaaaccaacactctgctgttgatatacagtagtaatctatagtgtctgactctcttgaaatactctttccaatatgaatccagaatgtgaaagtggtatggatgcacaaaccacaatatgtagggcacaaccaaaatatggtaggaagaaggaaagagccctggcactgtaggatacactctcataccctctctgcagcacacaggataggattggcccaggacatggagtgggsagaaggacaagaaagacatcagacttggatagtatctgtctcagacataaagacaccatcttatttgcaacacagacacaaagaactgattgata

SEQ ID NO: 279659 - DNA, 588 bp, Homo sapiens
gttctgtcttaagttctttgagaaatctccaaactgctttccattgtggctgaactagtttacattcccacctacagtgtataaaaattcccttttctctgcagccttgccagcaactgctgttttttgactctttaatagtagccattctgatgggtgtgagatagtatttctctgacgattagtaaggttgagcattttttcatgtttgttgtccacctgtatgtcttcttttaagaagtgtctgttcatatcttttgcccacttttaatggggttatttgttttttgtttgttgatttaagtttttcatgcattctaggtattagacctttgtcagatgcatggtttgtgactattttctctgattctgtagattgtctgtttattygatagtttcttttgctgtgcagatactctttagtttaattaggtctcacttgtcaatttttgttttgttgcaattgcttttggaattcttcaccaaaaattcttcaccagggttgatgttaagaaggttatttcctaggctttctataatttgagtaaaatattcacaatactagtcactccatagtgttctgtctat

SEQ ID NO: 279660 - DNA, 610 bp, Homo sapiens
tttcggatgacatacgccggatttgtttgccagaagcctctgcatccttccaaccaaatttgactgtccacatcacaggatttggagcactttactatggtggtgggtatctcaggatagctaacagagcgctaagccctgtctaaggcaatgtgatttcatctccatcaatattatcctgacagccatttccacacagtctggttggattagttagkgttcttactttgtgtgacagaaattcaattcacattaaccagtgcagaataaaaaaaaaagaaacaaaaacttccacaaatttggctcatgtaatttggaagtcaaaaaagtgtagtaagtttcacttcagacacaggggtttatatgatgtcttctggctctgtgtctctgaatttgaattttttgccccttcttttctctatgttggcttcattcagagggatgctagcttcacctagtgtcagaggtggctaacaacacctcaacacatcatcctcaacaaagaaaaaatacatagaaaggaatatttatttcttttctttgccagaattcacattaatttctattgttccagctgtgtctaggaggactcagattgagtggctaactc

SEQ ID NO: 279661 - DNA, 1221 bp, Homo sapiens
tttcggatgacatacgccggatttgtttgccagaagcctctgcatccttccaaccaaatttgactgtccacatcacaggatttggagcactttactatggtggtgggtatctcaggatagctaacagagcgctaagccctgtctaaggcaatgtgatttcatctccatcaatattatcctgacagccatttccacacagtctggttggattagttagtgttcttactttgtgtgacagaaattcaattcacattaaccagtgcagaataaaaaamaaagaaacaaaaacttccacaaatttggctcatgtaatttggaagtcaaaaaagtgtagtaagtttcacttcagacacaggggtttatatgatgtcttctggctctgtgtctctgaatttgaattttttgccccttcttttctctatgttggcttcattcagagggatgctagcttcacctagtgtcagaggtggctaacaacacctcaacacatcatcctcaacaaagaaaaaatacatagaaaggaatatttatttcttttctttgccagaattcacattaatttctattgttccagctgtgtctaggaggactcagattgagtggctaactcwtttcggatgacatacgccggatttgtttgccagaagcctctgcatccttccaaccaaatttgactgtccacatcacaggatttggagcactttactatggtggtgggtatctcaggatagctaacagagcgctaagccctgtctaaggcaatgtgatttcatctccatcaatattatcctgacagccatttccacacagtctggttggattagttagtgttcttactttgtgtgacagaaattcaattcacattaaccagtgcagaataaaaaaaaaagaaacaaaaacttccacaaatttggctcatgtaatttggaagtcaaaaaagtgtagtaagtttcacttcagacacaggggtttatatgatgtcwtctggctctgtgtctctgaatttgaattttttgccccttcttttctctatgttggcttcattcagagggatgctagcttcacctagtgtcagaggtggctaacaacacctcaacacatcatcctcaacaaagaaaaaatacatagaaaggaatatttatttcttttctttgccagaattcacattaatttctattgttccagctgtgtctaggaggactcagattgagtggctaactc

SEQ ID NO: 279662 - DNA, 500 bp, Homo sapiens
cagtctggttggattagttagtgttcttactttgtgtgacagaaattcaattcacattaaccagtgcagaataaaaaaaaaagaaacaaaaacttccacaaatttggctcatgtaatttggaagtcaaaaaagtgtagtaagtttcacttcagacacaggggtttatatgatgtcttctggctctgtgtctctgaatttgaattttttgccccttcttttctctatrttggcttcattcagagggatgctagcttcacctagtgtcagaggtggctaacaacacctcaacacatcatcctcaacaaagaaaaaatacatagaaaggaatatttatttcttttctttgccagaattcacattaatttctattgttccagctgtgtctaggaggactcagattgagtggctaactcaaatattctttatgcctatgtagcaaaatttgcttcagtactgaagaagctaatttaagtgtgatggtgaataagaatagtgtaga

SEQ ID NO: 279663 - DNA, 500 bp, Homo sapiens
cagtctggttggattagttagtgttcttactttgtgtgacagaaattcaattcacattaaccagtgcagaataaaaaaaaaagaaacaaaaacttccacaaatttggctcatgtaatttggaagtcaaaaaagtgtagtaagtttcacttcagacacaggggtttatatgatgtcttctggctctgtgtctctgaatttgaattttttgccccttcttttctctatgttgkcttcattcagagggatgctagcttcacctagtgtcagaggtggctaacaacacctcaacacatcatcctcaacaaagaaaaaatacatagaaaggaatatttatttcttttctttgccagaattcacattaatttctattgttccagctgtgtctaggaggactcagattgagtggctaactcaaatattctttatgcctatgtagcaaaatttgcttcagtactgaagaagctaatttaagtgtgatggtgaataagaatagtgtaga

SEQ ID NO: 279664 - DNA, 594 bp, Homo sapiens
atcggttttagggtctctagattttttccagatgtcccatgtggttttgttttatcttatacagagtgagacatgcattgctttctttaaggttgtattaccaatcacagaaaatattacctatggtttattaattctagtagatctagtgctgctgtaagcctgacacctccctaggtctgcactctcttggatggattttctctgaagatagggcttgcattctctgcttcatagtggtgggaaagacatcacaaatcccctttggcttggtgggaaaaatcactttcaggagtttgagactggcacagaaacatacctgtcataatgcgctgtgagtggcaacagaatctgacacttatagagcactccaccctacttgaacacggcctctcttggtgagtgacccacaggtgcttttaatctattaaatagattaaattaacctatcattcttaatctgttaagtacattaatagattaaaagcagccattcrttactcaccaagagaggctatattcaagtctgtaaagcaaaccttaagaagttttttaaaattgaaattgtacaaagtatattctctgatcataatg

SEQ ID NO: 279665 - DNA, 609 bp, Homo sapiens
gattacttttagattttctttagctctgaagtcttgattagattttggttaaattcatttggcaagaatacttcaaaggtggtgctgtgtattttatattgcatcacaccaggrataaaaatttttccacaattttggaggaaaaaataactctttgctgttcttctggcacctatgatcagcaacagtgcttctcacattgaatcaagtattagtttgcatgtatgttcacttacagatagcttctcaatgggctgcattagccttgttcatctttttaccgctaagacccaataaggcacctggacagagtaggaatcatataaatctatgagagtcaggcaggaatgataccaacattacacaggaaataacacaggatgagagagaggatatctgtttaagggcccaggtcgactaactcccgtgcttgttctctaaaacttgctattatagtgaattttatttatccaatttatcagagtttatctctttatgtgtatatattgatagcctaaatttttttggaaacagaggatatttttcatattttcttcacaggattggttgatttatagaaagtttttcttttgactataaaacagtttt

SEQ ID NO: 279666 - DNA, 542 bp, Homo sapiens
gaatacgtaaaaacaaaaatgtatcaccaccgggcatggtggctcactcttgtaatcccagcactttaggaggctgaagtgggcaggtcacttgaagtcagaagttcaagaccctcctgaccaacatggtaaaaccttgtctctactaaaaatgcaaaaattaattgggtgtggtggtgtacacctgtaattccagctactcgggagactgaggcaccagaattgcttgaacccgggagatggaggttgcagtgagctgaaatggcgccactgcactccagcctgggcgactgggagactccatctcaaaaaaaagtatcatcaccttctcattctgcagaggccatattagtcatttgtgtaatattacttcatatttgaaaaagaaatacacttggtaaatccttttggratctaacctttttgaaattaaagatgcaccattttgctcctgcatttttttgtgctttgcttgtgctgataaaacaaacacaggtgtattaattttctattgttttgtaacaaattaccacaaatttagc

SEQ ID NO: 279667 - DNA, 624 bp, Homo sapiens
agccaccctgtggcaggtattttgtcactaaaatgtgaggatgagtaaaagaaaagtggagatgagaactatctggatagaaattccttcattacagtgttgtcacgaacctccacaataagcacgacttctatgtggtggctcaactgctttggtcagagcagctatcaactgcttacactttccaaaccatctagttttgttcagccagatcaatcactcacagccacttctttaatcaagtttaataagagctaacattgaatgagtacttccaatcttttctttctcataatgccactgtagatatcatctgtattttacagattaataaactcaggctccagtatgtgatgccaggccatataacttgtgagtgccgaggaattctgtctgaaacagtccagkctttttctaccatacatgcaacctctattcggagagttggtgaggctgctgtgaccaaactcttaaaaggtaaatgtgggagaaatattgtttattttccgttcagtaatgtgagatatgcagaactggctggaagaggtgaaatatcacgtaaaaatgcatttcttgttcccaaattctattgatgcataaaatagtatatcactgcattgtctt

SEQ ID NO: 279668 - DNA, 564 bp, Homo sapiens
caaactacttctatgaatttaccagccattacaatatttatgatttcttctttgtcctttcttttgtctgtctcaggatccatttaactgtccatgtatccatccatccatccactcatccacgaatttttgtttcccacaatgttttagtgggcctctactatatcttaggtgctgtgtttggcttagggaggaagggatgagtaagacatggtttctctaccctcatgcaattcatggtacaayctttagtacttttttctcaagctgtgctatgacattgaaactcatgaagcattgtaaacttattttctgtaaatatttaaaataatgcaaataacaaatttccattaagttaacaaaaatgagagtttaagattttaaaaaagaggtcttctataggcatcttggtattgcagatatggaactgccttttagggtcagtagactttggtgtcagtccttgcttatgactctaacatgtatcttgagaagtttataaaacctctctagttttcagttttcttccctgtaaattggtgataataaatactacctagagat

SEQ ID NO: 279669 - DNA, 1206 bp, Homo sapiens
agccaccctgtggcaggtattttgtcactaaaatgtgaggatgagtaaaagaaaagtggagatgagaactatctggatagaaattccttcattacagtgttgtcacgaacctccacaataagcacgacttctatgtggtggctcaactgctttggtcagagcagctatcaactgcttacactttccaaaccatctagttttgttcagccagatcaatcactcacagccacttctttaatcaagtttaataagagctaacattgaatgagtacttccaatcttttctttctcataatgccactgtagatatcatctgtattttacagattaataaactcaggctccagtatgtgatgccaggccatataacttgtgagtgccgaggaattctgtctgaaacagtccaggctttttctaccatacatgcaacctctattcggagagttggtgaggctgctgtgaccaaactcttaaaaggtaaatgtgggagaaatattgtttattttccgttcagtaatgtgagatatgcagaaytggctggaagaggtgaaatatcacgtaaaaatgcatttcttgttcccaaattctattgatgcataaaatagtatatcactgcattgtcttwattacattgccctcaccctcatttttaaattaaggggattcttaaaatttctctttctcttgacaaaaatggctgtttaagaatggaaaaccgctgccaacaatggcatcaatgtcatcaaaccctccactgagttctaagtgtctttttataaatctccaaaaatatggtgagcccattcccttatctctcccttgttagaggacacatgtctcagacctctaaccaggacatgtcaagaggtgggcacgcgggtacttccacagtgcttttctcctggccaccccttccccttgtgcctttcatagctctcaggcagggccgataagcctgttcwccccagtgctgaatctgaggaccaactctggggggagcccttattgtcaaactagttgctcacaactttcttgacttgtttctcttaaacaatatgacttaataaagctcccttcaaatatataaacagagcacacctactaaaacaggaagagctaaaactgtatacattggaaacctggtttgactgttctgatgaacttgactgctcaagtcagtcaaaaagtaattaccagttaagaaaa

SEQ ID NO: 279670 - DNA, 582 bp, Homo sapiens
tagttcttaaaacgaatagtaaatgatttcacagcgtaaattctggaagctggatgatatggaagagttcatgtgcctggacacacagttccctgtaatcctaccatctagggagataacctctgttaacattttgatgttgtgtttttgcttatttttctatgcatagttatgcatttatattctcaaaaatgaaatcataatgtacattgctttgyagtctgctctatatattgtcaacatgttcccatattaaatattttgctttttagacagctgtaggatattttatttcatgggtataccataactttaagatttatttcctattcagcaatttgattatgtattataatgtaatctgtaaatagtgatatgattaacatcttaatcacatccatagaaaatgacttatttccagaagataccgctctaaaaatgaaattgttaggtgaaagtgtttttgagaatttttatatatattactcactgcagagatcatgttcatttacattcccattagcaatatatccaatgctcagaattgaaagttactacttaaaatcgttgcaaattgaataa

SEQ ID NO: 279671 - DNA, 582 bp, Homo sapiens
tagttcttaaaacgaatagtaaatgatttcacagcgtaaattctggaagctggatgatatggaagagttcatgtgcctggacacacagttccctgtaatcctaccatctagggagataacctctgttaacattttgatgttgtgtttttgcttatttttctatgcatagttatgcatttatattctcaaaaatgaaatcataatgtacattgctttgcagtctgctctatatattgtcaayatgttcccatattaaatattttgctttttagacagctgtaggatattttatttcatgggtataccataactttaagatttatttcctattcagcaatttgattatgtattataatgtaatctgtaaatagtgatatgattaacatcttaatcacatccatagaaaatgacttatttccagaagataccgctctaaaaatgaaattgttaggtgaaagtgtttttgagaatttttatatatattactcactgcagagatcatgttcatttacattcccattagcaatatatccaatgctcagaattgaaagttactacttaaaatcgttgcaaattgaataa

SEQ ID NO: 279672 - DNA, 582 bp, Homo sapiens
tagttcttaaaacgaatagtaaatgatttcacagcgtaaattctggaagctggatgatatggaagagttcatgtgcctggacacacagttccctgtaatcctaccatctagggagataacctctgttaacattttgatgttgtgtttttgcttatttttctatgcatagttatgcatttatattctcaaaaatgaaatcataatgtacattgctttgcagtctgctctatatattgtcaacatgttcccatattaaatattttgctttttagacagctgtaggatattttatttcatgggtataccataactttaagatttatttcctattcagcaatttgattatgtattataatgtaatctgtaaatagtgatatgattaacatcttaatcacatccatagaaaatgacttatttccagaagataccgctctaaaaatgaaattgttaggtgaaagtgtttttgagaatttttatatatattactcactgcagagatcatgttcatttacattcccattagcaatatatccaatgctcagaattgaaarttactacttaaaatcgttgcaaattgaataa

SEQ ID NO: 279673 - DNA, 589 bp, Homo sapiens
tctggcctggcaattcatttgtgtctgttcttaaggaggagctgcctttaaggtagaaaaattaaaatatattttgaaccaactaccttttcaaagggcttcatcagctgatcatcatctgtctatatgcttacagtttattaggttggtgcaaacaacctaatagctacactatcatygcattctttgacttacctgaatttgttgttgttgttgttctcagtctaggctttttcacccccactgagactttgccccttgttcctataatgttttttccctcctttttattacagttttcaattcaaaatgcctctcactacaaggttcaagtcatttagttagaacctgtctacacagggtccatggactctgaaagcctgcgctcaaaggttaattcctgcaggattatttccattaatttccccagcttccatactatctgtacaacccattacccacactttcccctcaagtaggcttctagttttagttttgcttattttcagatttagatacccatttctcctgttagatatgaatgatttgaggttcaaaactctgatgtcttcatatgcacttaccagca

SEQ ID NO: 279674 - DNA, 589 bp, Homo sapiens
tctggcctggcaattcatttgtgtctgttcttaaggaggagctgcctttaaggtagaaaaattaaaatatattttgaaccaactaccttttcaaagggcttcatcagctgatcatcatctgtctatatgcttacagtttattaggttggtgcaaacaacctaatagctacactatcattgcattctttgacttacctgaatttgttgttgttgttgttctcagtctaggctttttcacccccactgagactttgccccttgttcctataatgttttttccytcctttttattacagttttcaattcaaaatgcctctcactacaaggttcaagtcatttagttagaacctgtctacacagggtccatggactctgaaagcctgcgctcaaaggttaattcctgcaggattatttccattaatttccccagcttccatactatctgtacaacccattacccacactttcccctcaagtaggcttctagttttagttttgcttattttcagatttagatacccatttctcctgttagatatgaatgatttgaggttcaaaactctgatgtcttcatatgcacttaccagca

SEQ ID NO: 279675 - DNA, 589 bp, Homo sapiens
tctggcctggcaattcatttgtgtctgttcttaaggaggagctgcctttaaggtagaaaaattaaaatatattttgaaccaactaccttttcaaagggcttcatcagctgatcatcatctgtctatatgcttacagtttattaggttggtgcaaacaacctaatagctacactatcattgcattctttgacttacctgaatttgttgttgttgttgttctcagtctaggctttttcacccccactgagactttgccccttgttcctataatgttttttccctcctttktattacagttttcaattcaaaatgcctctcactacaaggttcaagtcatttagttagaacctgtctacacagggtccatggactctgaaagcctgcgctcaaaggttaattcctgcaggattatttccattaatttccccagcttccatactatctgtacaacccattacccacactttcccctcaagtaggcttctagttttagttttgcttattttcagatttagatacccatttctcctgttagatatgaatgatttgaggttcaaaactctgatgtcttcatatgcacttaccagca

SEQ ID NO: 279676 - DNA, 589 bp, Homo sapiens
tctggcctggcaattcatttgtgtctgttcttaaggaggagctgcctttaaggtagaaaaattaaaatatattttgaaccaactaccttttcaaagggcttcatcagctgatcatcatctgtctatatgcttacagtttattaggttggtgcaaacaacctaatagctacactatcattgcattctttgacttacctgaatttgttgttgttgttgttctcagtctaggctttttcacccccactgagactttgccccttgttcctataatgttttttccctcctttttattacagttttcaattcaaaatgcctctcactacaaggttcaagtcatttagttagaacctgtctacacagggtccatggactctgaaagcctgcgctcaaaggttaattcctgcaggattatttccattaatttccccagcttccatactatctgtacaacccattacccacactttcccctcaagtaggcttctagttttagttttgcttattttcagatttakatacccatttctcctgttagatatgaatgatttgaggttcaaaactctgatgtcttcatatgcacttaccagca

SEQ ID NO: 279677 - DNA, 597 bp, Homo sapiens
atgttaattacaattaataaatgaacacatagaaaaatgttccaatgattaataagtacataattctaaacttrtatcaattttctttactatttaacaaattaccataaacttaaccacttaaaaacaactgcctcttattttccatttctattctgtagatcagaagttcaggcaaactcaactttgttctctgttcagggtcacaaatgataaaagtaagatacgtgtctggctaggctttaatctggaggctatggtgaagaattatacttcctagctcattcaggctgttgacagatttcaattccttgcaaaatggactaaagtcacttttttcttggtcactgtgagtcaggactgccctcagcttctggagactggccacactctttaacaaatggctccttccatcttcaagtcagcaatagtgcatattttgaaactcgcaatctctgacttttctgctactaggaagagaaaattatctacttctaatggttttcatgctaatgtactagattaggctcacctgggtaatattctttttgattaactcaaggtcaactgattaataactgctatagtctgattttt

SEQ ID NO: 279678 - DNA, 515 bp, Homo sapiens
tgtgcagcaaaaattgttagaagactacacaagtcttctaacaatttgaaagcttgtagttgggtgttggaagaattctgacttagtattaaagccagggagaataaacaatcacttgagatggctaaaacaaagtgatgttttagatagtgacatccagactttagtaagatgacgtggaagcattccgtggagaggctgaaggtataggagcattttaatgaaagggagcaaggaggactcagtgaaaccagctgggaaagagggtgctaaagagatgttaaaccagtggaggagagagtggtatggggtaaagggggagaaatcacactcattattggtaaggaacaaaataggggaaatgacaagtggtcacagrgtgttcattggtgcatagagtggggaagggcaggatgccatacttatggttcctggtcctgatattaaatttaattgacaacagactagcctaatgtcctgggctaggtctctgtgccttaactatttgatgtatc

SEQ ID NO: 279679 - DNA, 615 bp, Homo sapiens
tttcagcatcatccgaaatgatatcagtttacaatgacatactttgcatttttgagtaagttttgaacattcatagaattttcaactttattattcatctcaaaagtctcacaacaatgccataaggtagacagcttaaggtcccatttggaagayggaaaacatgaggtaaaaaacattacatgattcctacaaaaccaatcaataagtcagacacctaaatagaaataggacatataaattctgtttaaaaaatccacttttccattattggattttcttataaccttgtgtatttatttctctcatttgtgcttaaatatcattgaattcaattgaattaagcacagaaatatttaaatcagtatacacagtttcacagatacttattcacaaaaaggtatcacagtcttattaaatataaataaaattacacaaaacacatattcacggttatagaaattacatagaggaaagtaattttttggtagtcagatctgctttcctctatctactaaaggaagtgtttagttttaatataaaatatgttcatcatcaatcaagcccatctttaatatgctaaacattctcaaaaactttaaatgtttctgtgct

SEQ ID NO: 279680 - DNA, 615 bp, Homo sapiens
tttcagcatcatccgaaatgatatcagtttacaatgacatactttgcatttttgagtaagttttgaacattcatagaattttcaactttattattcatctcaaaagtctcacaacaatgccataaggtagacagcttaaggtcccatttggaagatggaaaacatgaggtaaaaaacattacatgattcctacaaaaccaatcaataagtcagacacctaamtagaaataggacatataaattctgtttaaaaaatccacttttccattattggattttcttataaccttgtgtatttatttctctcatttgtgcttaaatatcattgaattcaattgaattaagcacagaaatatttaaatcagtatacacagtttcacagatacttattcacaaaaaggtatcacagtcttattaaatataaataaaattacacaaaacacatattcacggttatagaaattacatagaggaaagtaattttttggtagtcagatctgctttcctctatctactaaaggaagtgtttagttttaatataaaatatgttcatcatcaatcaagcccatctttaatatgctaaacattctcaaaaactttaaatgtttctgtgct

SEQ ID NO: 279681 - DNA, 573 bp, Homo sapiens
atataaattctgtttaaaaaatccacttttccattattggattttcttataaccttgtgtatttatttctctcatttgtgcttaaatatcattgaattcaattgaattaagcacagaaatatttaaatcagtatacacagtttcacagatacttattcacaaaaaggtatcacagtcttattaaatataaataaaattacacaaaacacatattcacggttatagaaattacatagaggaaagtaattttttggtagtcagatctgctttcctstatctactaaaggaagtgtttagttttaatataaaatatgttcatcatcaatcaagcccatctttaatatgctaaacattctcaaaaactttaaatgtttctgtgctatatgcaaactgtaggagtttaagtgaaggacatgtaagaatttaagtttttactctgttttctctggtggtagttactcctagtcattgactcagaaattcgatgacatttcatttttaaagaggaaatgtgtatgataagctttttgtgtttatatcttactgagatgtgaataataactgggagatatt

SEQ ID NO: 279682 - DNA, 1728 bp, Homo sapiens
atataaattctgtttaaaaaatccacttttccattattggattttcttataaccttgtgtatttatttctctcatttgtgcttaaatatcattgaattcaattgaattaagcacagaaatatttaaatcagtatacacagtttcacagatacttattcacaaaaaggtatcacagtcttattaaatataaataaaattacacaaaacacatattcacggttatagaaattacatagaggaaagtaattttttggtagtcagatctgctttcctctatctactaaaggaagtgtttagttttaatataaaatatgttcatcatcaatcaagcccatctttaatatgctaaacattctcaaaaactttaaatgtttctgtgctatatgcaaactgtaggagtttaagtgaaggacrtgtaagaatttaagtttttactctgttttctctggtggtagttactcctagtcattgactcagaaattcgatgacatttcatttttaaagaggaaatgtgtatgataagctttttgtgtttatatcttactgagatgtgaataataactgggagatattwatataaattctgtttaaaaaatccacttttccattattggattttcttataaccttgtgtatttatttctctcatttgtgcttaaatatcattgaattcaattgaattaagcacagaaatatttaaatcagtatacacagtttcacagatacttattcacaaaaaggtatcacagtcttattaaatataaataaaattacacaaaacacatattcacggttatagaaattacatagaggaaagtaattttttggtagtcagatctgctttcctctatctactaaaggaagtgtttagttttaatataaaatatgttcatcatcaatcaagcccatctttaatatgctaaacattctcaaaaactttaaatgtttctgtgctatatgcaaactgtaggagtttaagtgaaggacatgtaagaatttaagtttttactctgttttctctggtggtagttactcctagwcattgactcagaaattcgatgacatttcatttttaaagaggaaatgtgtatgataagctttttgtgtttatatcttactgagatgtgaataataactgggagatattwcgtgcttgtcctgttactaattatttgaaaccaattctcctagccttcatctgcttctttttatcctcctgtgctcatggaaaaacgttccaaagagtcttaatttttttttttgtcctttctgggccaactgctactaacatatagatggcaagatgctgttaaagaataaatcagaaaagcttcttaacaacacaacatgcttcctgaagctagtgcttgagttataacactgtgttaacagcaagttcagatacatttaaaaacttttaaaatgtcaactgttgaggttagwgatagtgctctgtattattagatataagcccagttcaagtcataatgcaaatcccatgcttctccattcttgcacactgaaggtccacttatcagttctagaatgttgaagccctgagtcttcagggaagactgttctttttcactagaagaatctcacatgctccaggtattatatgaggtaagattttggcattactggcagctcttcatatcctgtggaaaatgatgttcctgtcttcaattgagggaaaccacttatttatcttattaggaagtatcacaa

SEQ ID NO: 279683 - DNA, 576 bp, Homo sapiens
gcccctgtgctcatagagtttgaagtttaggttaaaaacaacaacaacaacaacaatattaaataagcccaaaaacaaatgcaaaattaccatcatgatrcgtgctatggtaacacacaacagggaagtttgactgataaggaaaaacaggaaagtttcccctgatgagtataattgagctgatatctgaaggaagaagagcagagcacaagggaagtgggggttaggtgtgttataggcagagggaacagtattgcaaatgctctgtggcgcgaaggagcctggcaaatgcaagggcctaaaaaaggaggtggatgtagagaggagtgtaagaggggcaaatagtgtgtgatgagtctggaaggtaaggaaagacaagtccatgtagagcctcataggtcttgtttagaagtttttgtttgtatcttaagactaaaggtaagccactgaagtgtttcagagagagatctgacatgattagcctttttttggaaatggttctggctcttatttgactaacgcatgagaggagcataagagtaaaaatgaggaaattagcaagacagctagtgtagt

SEQ ID NO: 279684 - DNA, 576 bp, Homo sapiens
gcccctgtgctcatagagtttgaagtttaggttaaaaacaacaacaacaacaacaatattaaataagcccaaaaacaaatgcaaaattaccatcatgatacgtgctatggtaacacacaacagggaagtttgactgataaggaaaaacaggaaagtttcccctgatgagtataattgagctgatatctgaaggaagargagcagagcacaagggaagtgggggttaggtgtgttataggcagagggaacagtattgcaaatgctctgtggcgcgaaggagcctggcaaatgcaagggcctaaaaaaggaggtggatgtagagaggagtgtaagaggggcaaatagtgtgtgatgagtctggaaggtaaggaaagacaagtccatgtagagcctcataggtcttgtttagaagtttttgtttgtatcttaagactaaaggtaagccactgaagtgtttcagagagagatctgacatgattagcctttttttggaaatggttctggctcttatttgactaacgcatgagaggagcataagagtaaaaatgaggaaattagcaagacagctagtgtagt

SEQ ID NO: 279685 - DNA, 576 bp, Homo sapiens
gcccctgtgctcatagagtttgaagtttaggttaaaaacaacaacaacaacaacaatattaaataagcccaaaaacaaatgcaaaattaccatcatgatacgtgctatggtaacacacaacagggaagtttgactgataaggaaaaacaggaaagtttcccctgatgagtataattgagctgatatctgaaggaagaagagcagagcacaagggaagtgggggttaggtgtgttataggcagagggaacagtattgcaaatgctctgtggcgcgaaggagcctggcaaatgcaarggcctaaaaaaggaggtggatgtagagaggagtgtaagaggggcaaatagtgtgtgatgagtctggaaggtaaggaaagacaagtccatgtagagcctcataggtcttgtttagaagtttttgtttgtatcttaagactaaaggtaagccactgaagtgtttcagagagagatctgacatgattagcctttttttggaaatggttctggctcttatttgactaacgcatgagaggagcataagagtaaaaatgaggaaattagcaagacagctagtgtagt

SEQ ID NO: 279686 - DNA, 603 bp, Homo sapiens
ctcatgccagtccaaatggttattattaaaaagtcaaaaaattacagaggctgtagagaaaagggacaattacacagtgtttgtgagaatgaaaactagttcagccactgtggaaagcagtttgaagattcctcaaagaacttaaaatagaattaccaattcacccagcattcccactactggrtatatactaaaggaaaataattcattctatcataaagacacttgcacttatatgttcatggcagcagtattcacagcagcaaggacatggaatcaacatatatacccatcaacagtgaactggataaagaaaacatggtacctatacaccatggaatactacacagtcataaaaaagaactaaatataccctttgcagcaacatgaaggaattggaggcctttatcctaagcaatctaacacaagaacagaaaaccaaataccacatgttctcactgaccagtgggaactaaacatcagatacacacaactgtgaaggtgggaacaccagcgggggtcactagaggggaagggagggtgggaggcatgggctgaaaaaccaactgttgggtactacacttacagcctgggtgacaggat

SEQ ID NO: 279687 - DNA, 1161 bp, Homo sapiens
agtcctccccgatactgcagcaccataagtgggaatgtcgacccgcagcctgacctgctgccaagcccttcctgccaggcccacacagtctgcagctgcattgtcagtgaggtttgtaagatgcagccattcatttctcacccagagagaagactccagcctaccctggtacaggactcctaaaaagcttcagcgaagtgacaggactctgaacctttgcaggatttatctcccaccccctgggcatttgtttctcaccaagatcccactgtggtggcctcctctcgtccatcctgtcccatctggacgaagccatccaggtgatggaccgccatgctgttcctcatcagagaaaggtccctgsgtgactgcacagccatgcccaggccaggtgcccatcagagaggtctctgtgtgacccgacagccatgcccaggccaggtgcccatcagaagggaggttcctgtgtgactagacagccatgcccaggccaggtgcccatcagagaggtctctatgtgacccaataggcacacccagaccaggtgccagcctgttctttgtccctgttctggacactgwagtcctccccgatactgcagcaccataagtgggaatgtcgacccgcagcctgacctgctgccaagcccttcctgccaggcccacacagtctgcagctgcattgtcagtgaggtttgtaagatgcagccattcatttctcacccagagagaagactccagcctaccctggtacaggactcctaaaaagcttcagcgaagtgacaggactctgaacctttgcaggatttatctcccaccccctgggcatttgtttctcaccaagatcccactgtggtggcctcctctcgtccatcctgtcccatctggacgaagccatccaggtgatggaccgccatgctgttcctcatcagagaaaggtccctgggtgactgcacagccatgcccaggccaggtgcccatcagagaggtctctgtgtgacccgacagccatgcccaggccaggtgcccatcagaagggaggttcctgtgtgactagacagccatgcccaggccaggtgcccatcagagaggtctctatgtgacccwataggcacacccagaccaggtgccagcctgttctttgtccctgttctggacactg

SEQ ID NO: 279688 - DNA, 598 bp, Homo sapiens
gcctgggggctgaggagagagaggagactggacgacgtgtttggagtattcatggtcagctttgggggctgcttacccttccctcttttgagaacagtgctggcctctggtctcagaaaggagctggcctgtggtctggctggaggctggggcacccgtgctgrgaaggttatgctatttctgtgaacggtgtccctttgctgggacgtgcccacaactccagctgtgaaaccagaagagaacagactcgtttgtcaagacgtcaaatgacctgagcgacccttcagcctcagggatgtctgttgtaatcttcaaaatgtgtgtttggctttcccccctctgagctaaacaaactttggtttcccttccctcttgtcaatatatcatgctttatagcacattacatgattaaaaagagagagaaacatctagtgcaagaaccctctgtgtggcctcataaaatattaatggattcagagaggaaatgtgaaatcaacatccccttgcatgcactggcttgtgctgggtctggtttcggcggcggtgaggccaggcctgctcctgggaagaacctgcaggaaaggccggagtcactgcc

SEQ ID NO: 279689 - DNA, 598 bp, Homo sapiens
gcctgggggctgaggagagagaggagactggacgacgtgtttggagtattcatggtcagctttgggggctgcttacccttccctcttttgagaacagtgctggcctctggtctcagaaaggagctggcctgtggtctggctggaggctggggcacccgtgctgggaaggttatgctatttctgtgaacggtgtccctttgctgggacgtgcccacaactccagctgtgaaaccagaagagaacagactcgtttgtcaagacgtcaaatgacctgagygacccttcagcctcagggatgtctgttgtaatcttcaaaatgtgtgtttggctttcccccctctgagctaaacaaactttggtttcccttccctcttgtcaatatatcatgctttatagcacattacatgattaaaaagagagagaaacatctagtgcaagaaccctctgtgtggcctcataaaatattaatggattcagagaggaaatgtgaaatcaacatccccttgcatgcactggcttgtgctgggtctggtttcggcggcggtgaggccaggcctgctcctgggaagaacctgcaggaaaggccggagtcactgcc

SEQ ID NO: 279690 - DNA, 523 bp, Homo sapiens
caggtacttttaatttgctggaaaatatttctaagaagtcaaaaagctccagctgaattgcatgccctcttattggctcaccagaccagttgagggacctgattggtccttgatcctgaggaccgataagaacggctataaaatccctgggtgcagctcttgggcccccagtttgcaaaagccagaggtgcaagaagcagcgactgcagcagcagcagcagcagcggcggyggcagcagcagcagcagcggcggcagcagcagcagcagcggaggcaccggtggcagcagcagcatcaccagcaacaacaacaaaaaaaaatcctcatcaaatcctcacctaagctttcagtgtatccagatccacatcttcactcaagccaggagagggaaagaggaaaggggggcaggaaaaaaaaaaaacccaacaacttagcggaaacttctcagagaatgctccaaaactcagcagtgcttctggtgctggtgatcagtgcttctgcaacccatgaggcggagcagaa

SEQ ID NO: 279691 - DNA, 523 bp, Homo sapiens
caggtacttttaatttgctggaaaatatttctaagaagtcaaaaagctccagctgaattgcatgccctcttattggctcaccagaccagttgagggacctgattggtccttgatcctgaggaccgataagaacggctataaaatccctgggtgcagctcttgggcccccagtttgcaaaagccagaggtgcaagaagcagcgactgcagcagcagcagcagcagcggcggtggcagcagcagcagcagcggcggcagcagcagcagcagcggaggcaccggtggcagcagcagcatcaccagcaacaacaacaamaaaaaatcctcatcaaatcctcacctaagctttcagtgtatccagatccacatcttcactcaagccaggagagggaaagaggaaaggggggcaggaaaaaaaaaaaacccaacaacttagcggaaacttctcagagaatgctccaaaactcagcagtgcttctggtgctggtgatcagtgcttctgcaacccatgaggcggagcagaa

SEQ ID NO: 279692 - DNA, 608 bp, Homo sapiens
aagtaattacaataattcgcaattacccattaaatcaccctttttccagtagcagtactgtcctctctgttccacatgttcctaatgtaacttgagaataatgtttttttttccaaggtcttgcatcaatcggggccctactttaacccatctaatttcttactttcctccagcataccttcccattcacctgagctaaaatttcttcctttctaaccccacccctctcccaccctcagtctcatctctctgtctcataaacacacatgcacacatacacaggtacacgtgtgtacctttgtacaaacatgcatacacacacatgcacacatacacaggtacacatatgtacctttataccttgctgacaattgcattcccagctcagaggcttccaactctttgtctatgcaaactctactcatcttccaagccttgcaaagttaccttgtttccaaaaacrttccctaatttgcaagatactctgctaggcacagttaaagaataaagattaattctacatagcctctatcctcaaggagctggtaatgctcactggttccttctcaaagatactaggacgtttcatctcaccacaagcacttgat

SEQ ID NO: 279693 - DNA, 589 bp, Homo sapiens
gtaccattgcactccagcctgggagacgagagagactctgtttcaaaaaaagaaaacaaacaaacaaacaaacaaaaaaacaygaaaaagaaatgcgattctgatacatgctgcaaggatgaaccttgaagacattctgttaagtgaagtaagccagtcacaaaaagacaaatagctgcatgattccacttacgtgaagtagctagagtagtcaaattcatagatagaacaagtagaatagtagttccaggcactatggggagggaagaatggagtcttgtttaatgggtttcagttttgcaagatgaaagagttctggagatggatggtggtgatggttgcacaatatgaatatacttaataccactgaactataaacttaaaaacgattaagatatactttttatgttatatagatttaatcacaattagaataacttataaaaatttaaaacttgaataattttaccattttcaaagacattatcagtgataacaatagcaaatgaatagtccttgccatgagctgggcatcattttaaatgttttaggtaagttagctcatttaaagtaggtgatcttattcttc

SEQ ID NO: 279694 - DNA, 1138 bp, Homo sapiens
tcttcttgtttactgatgaggaaattaagtcacagatcacataacttgctaaaaggcatgcttgtaggaggctaagctggaatgtaaatgcagacagttgagctttaggtctatgctcttaatcagtatactatccttgtcctyaattggtagttaaaaaatctttccttcaagaaagcagtggtccttattgactgcactaagttcttctaaatattcaaggaataagtaattccaattccacagaaactattccagagcatacaaagacagtcaacactgaatcttgtatttacccaagaaatgtagggttggtttaactttataatatcaatgaatgtcatttgtcacgttcatgagccatttcaatatattcagaaataatattaattataattctctctttttttttttttgagatggagttttttacttgtcgcccaggctggagtgcaatggctctatctcggctcactgcaacatccacctcatgggttcaagcgattctcttgcctcagcctcccgagtagctgggattacaggcacccaccaccacgcccagctattttttttgtattttgagatggggtttcaccgtgttggtcwattccaatgagaaaataggacttttctctgtgtatcacccttttctctctacccagtcacctccccagtatgggctctccccatgactgagctggctggaaacaggtgaagaatgcccagttagaagatgccacacaatggatctatcctaaatctctgtcctaaatctatcctaaactccatattggacccagagcaagctcaggaaataagtcaaggctgcatctacagcctttgcataaattaggggagaacataccatggaaacwgaaattcttttcctttcccttgcagactttagataaccctttccacggggtagtctgtctgggaaagtttgcatgaaggccaagtctaggctaaactaggagctcttcatgtcccagggctatcggtcctgccctttttcttgagcagtaaataactctcagctttgaaaagcatgccctggtgacgtgttcatcatggccatgggaggagcagagtctggctgtctgggtgcagaactcagagctccaagcctcgtctgaca

SEQ ID NO: 279695 - DNA, 615 bp, Homo sapiens
ggttagaaagcattttcacgtacaaaaatctcatttcatcctcgcagcaagccaggaagggcaaggctggggacctagggctacgatttgaactcaaggcttccgacgccaagtcccccacaaggtgtcttttcttctacgacttaggtagagcgcgactgtctgccacgaaaattccaccaactgataaggcgctggaaggtttctggcgttaggtttctaccccgggtggccctacttcccccctccagcacttggaaggcgagracccagcgagtcgtcagtatcccctggaaggacgaggcggaactcctaccgcggaaatattctaagttcagggtctcttgtgggtgcccggtgatgattgtaaacacccgtagaccaggcactcgcctgcacctccgggaacaaaatacgataatactgtttttctaggaagccctggaatggcatgtcttatgagcattaaaatatttgactgattgatgtttcttctacatatgtatcctgagaaaataacagaaaatattgacaaggatgaaaattgaaggcacaaaataaagtcttatttacagtgataaaaaaagatattatctaaaaatacaaacacagtct

SEQ ID NO: 279696 - DNA, 537 bp, Homo sapiens
atagaaaatttagtaggaaaacatggcttttttttctccccttggattgcatttttagataatgaaaattctaattattcatcccgcaggactactgacttcttgaacgttaaattctcatatttgataaattcycatatttaattcaaatgtactacccctgaattttctcatttctaatatggcctggttgttttactaaagtgagaagcagactgcttaagggtatgtaaactatacctgactgttgatagctttcatcccttagagtgtatacgtttcagcttaaaaaaaaaagtagtggttaatttttttactatcattttcttacattttctctcctttggatttttgccacttctctcttttatttcttttttgttgttgtttatttatttatttatttattgggctggggtatttatttatttattgagcctgctgtattgcccaggctggagtgtaatggcatggtccaatcctagctcactgtagcttacacctcccaagcttgaaccatcttcccacctcagcctt

SEQ ID NO: 279697 - DNA, 391 bp, Homo sapiens
catgtcctgacctcccagtaaatcccattatggtcatcaaacttcggcaactgaatcactagcttcttcctcaccttaagcactgctggcatcctgtggacaaygcttccagcaccctggtttcattgtcccaaggtcaactgctccactagcaaaatattagcctcttggaccctggagcccacctccagtgaaaacatcccatccttgcagcttcctccctcttttttcctaccctactctccagcttcatggagcacccaggcccttgaagcctttcctccaaagctcttcaccctcctctgcttcatctccacccttgtccaggccagaccctaagtggaagaatgtcaaccacttctccccatcactctcaactcccttgtcctgc

SEQ ID NO: 279698 - DNA, 530 bp, Homo sapiens
cttgggtcctcactcctggatctgttctgcttacagtgaccacttcactgactgagctccagccccaggataccgctccaacctcggctagaagcaacatggggctcaattcagccttggatgggacaaaaggaacaaaaactaagggaatgaacaaataaggcatcctgggttttagacattaaagagttttctataagcttgaggatgacctcacgtaaagttatataggtgatattggccccatgaatgctcacgtcttggtcttttgacctcccttatggtctttctaggaagatcaattctttccctctccccactatactatgtactttctggctgggaggagagatggaggctgcagatggcttggaggarccccagtggtctcaggtgtagctattgaggctggagagggaggattccagctctaccctgagtggctgactcaactcagctccactcttagggctcagagcaatggatcattttcttctgtgcttctgggttttaggcagtgtcttgagaac

SEQ ID NO: 279699 - DNA, 530 bp, Homo sapiens
cttgggtcctcactcctggatctgttctgcttacagtgaccacttcactgactgagctccagccccaggataccgctccaacctcggctagaagcaacatggggctcaattcagccttggatgggacaaaaggaacaaaaactaagggaatgaacaaataaggcatcctgggttttagacattaaagagttttctataagcttgaggatgacctcacgtaaagttatataggtgatattggccccatgaatgctcacgtcttggtcttttgacctcccttatggtctttctaggaagatcaattctttccctctccccactatactatgtactttctggctgggaggagagatggaggctgcagatggcttggaggagccccagtggtctcagrtgtagctattgaggctggagagggaggattccagctctaccctgagtggctgactcaactcagctccactcttagggctcagagcaatggatcattttcttctgtgcttctgggttttaggcagtgtcttgagaac

SEQ ID NO: 279700 - DNA, 520 bp, Homo sapiens
tatatactcttctactgaaaaccttcccgtgttctcagtttgcctcaaaaktaaaagccaaagatcttcactagcctatcaaggcccccttacctctctgacctcatctcctctaccccctcttccctcttcccctcattcactccactccatctatcctcagcacattgattctcaaacataccaagagtgagcccacctctgggcctttgcacactccctccagacacccacatggctcctttccccacctcccttgggtcccttgctcaaagggcaccctctcaaagaggcctattcctgaattttcttcttaaaattgcaattgctcacctttgtgcaacacacatgcatggcacacgcacatccctcctcccccttaccccttatcttatattaccttctaacatgctatgcaatttacccatatgttatatttcttgtttatttcctgttcctccctccccagtgtaagctcctaaaggcagaaatcaagctgacctaagcaaagacctgaagg

SEQ ID NO: 279701 - DNA, 557 bp, Homo sapiens
cacccgcctcggcctcccaaagtgctgggattacaggtgttagccaccgtgcccagcctatatttgtctttccaaagaaaagttgaaccagggagagaaaggaaggagragaagatagggacgtgacctcacctcttgacacctcattcctccctgccccccatctcagtcatatcgatgtaacatcagccaccaactgcagtgacccactgtgtatacagaatgactgtcctgtgacaacaagagccatgtgccatccacataaatacggcatacatctcattcctactgtaaaccattgtgaaacatccagaggaggggactgtttccagcagaaatcacttctgacgtcactccccgagtctgacaactgaaactttccagtgagacaacagcagctaacttgggccttttgaagctgctgagatgccagcagcttcaaaagaaaggggtaaaaagaaagaaacactcacacttgacaaggagcaccatctaggggatttataaggcaaaatttttcttcaagcaaatcctagagctgggagcgttcaatagtg

SEQ ID NO: 279702 - DNA, 517 bp, Homo sapiens
ccaaagccacctttttcctattttcatgccttgcaccaagaagaggcaaatcccttccttccttccttctcaattctcaaacctatgctaccatcctcagtttgaaaagaacatttgattctcaatcaacacaagtttgaaagcccacagtatccatgatgctgcattcgtgcaacactgcttagtgcaatgtgatcaaaggggtaatgtgtaagccacccttccccttcccacagatacacatcaatccacttgcactcagacatgtacacacagttgcatgcatctgctctgggcacaagtcattccttcatacgaaagcatgtaaagtggagttgacatgtaaaaacacattcaaaaagacactgcaataagtcagactttgcatcaggaagtaatttcatgagaaggtaaatgtgaaagataacayatttcccccaccgcttcccatctttccacatatgtgtgattctagccacacagatgctctggttatcatcttgtattaaacaattag

SEQ ID NO: 279703 - DNA, 517 bp, Homo sapiens
ccaaagccacctttttcctattttcatgccttgcaccaagaagaggcaaatcccttccttccttccttctcaattctcaaacctatgctaccatcctcagtttgaaaagaacatttgattctcaatcaacacaagtttgaaagcccacagtatccatgatgctgcattcgtgcaacactgcttagtgcaatgtgatcaaaggggtaatgtgtaagccacccttccccttcccacagatacacatcaatccacttgcactcagacatgtacacacagttgcatgcatctgctctgggcacaagtcattccttcatacgaaagcatgtaaagtggagttgacatgtaaaaacacattcaaaaagacactgcaataagtcagactttgcatcaggaagtaatttcatgagaaggtaaatgtgaaagataacatatttcccccaccrcttcccatctttccacatatgtgtgattctagccacacagatgctctggttatcatcttgtattaaacaattag

SEQ ID NO: 279704 - DNA, 1107 bp, Homo sapiens
aataacatgtgtgcagtcattaaggcttcctcatacctagtgtggggttagagcctcaactattgagctcccatagcaacttttatcatggctcttactacattcaattaaaactgccatttttgcctgtccatgtgactgactatctcagagatcacaaactaatgacctaagggctaaaagaaataccagatggtttttgtttgcttgcagtatatcttctaaaattctgtattaaatgtcagtatttaacaaatgatgttcaacttctatccaacatakagtaacaaggatcagatttaccctcctgcctgaaacaagcaaaccaaagtaaacaaaacaacaaaaaaaagacaaaacatatgtaacaaaaattttcaagaaactgcacatcaggtaataaagggcaatgatccctgaaagatgataaacaaatgagatgaaccctgtcattgcccccagtatattgccttgagaaggtttccaagacagggaataggaggaagagtaacttataaggagcttaaagcagtccctgaattgaggaaatggaactgaaagactaagatagttagaattcacwatataaatccctcattctgtaagcttagtgctgcctcctctgtctgtggtggagcatccagcaggttaataaacttcctcgcctaaccttgtctctctctcatcctttctcttggctaaccttacagtttttggtaaggataacatgactattcagtgaggaagatgatcttttcaacaaatgatgctggaaaacaggatatcaatatgcawaagaataaaattgagctcttaccttatactgtataaaaattaactcagaatgaatcaaagatttaaacataagagctaaaactataaaactcttaaaacactggagaaaatctttatgacattggatttggcaacaagtccagaaatattacaccaaaagcacagggaacaacagtaattcaagcttcatgtatgtaaatgtttaaattactatatcatatttctgtattgaattttttattaatatataatatccttctttgtcctctgaacttttttgaagttaggcctattttgtctaatattagtgta

SEQ ID NO: 279705 - DNA, 594 bp, Homo sapiens
ggcttagtgcaagaaaactgaattagcaatagtgctttgctacagggcttctgccagctgggtgacgcccatgcccccagttctgcttcccctcgcctttcctttaacaactctgctctgccagaacactctcttggccttgagctcaatggctatggcaagagtgtgtatgatcctcattccaacttctcttgaaccctccaactcttctcggcaagtcctgctgagctccaaaggaagccaattccaattatgtgcctggtcaactctctttcctaacttactacccrcttcccgcattctcctggaagagcaacgagttatataacttcacaagatgtccgaaccacgacagcctcagtatactcagatagtggaaataatctccccgtaaaataatttcatggagccacttaacagagtagctgcaggagcctggctgagagccagtgtctcctgctgccaaaagccagtttccttttatctttcctttcgtgccactttcttttcacttaaggttaatgttcctgggccttttgaaacaggtgactctagccatgttaataaagcaaggtatgatagcatcttctatga

SEQ ID NO: 279706 - DNA, 613 bp, Homo sapiens
tcagctttgcagagtcagaaattcaattttgtaaatgctcggtctcccaggagagtcttgtgtgactaaactcacagaggctgtgagctcactgtacgcagaagcccagtttgatcttctgtgatgagaaatagattccaaataggcagaaatactcgtgttggctggtgtgccaattttctccctggaagaaagtgtcacgagacacaatatttctcttgggggaacgtcaaaaaagagataatttgagcagtgtttttcaaactgcagatcacaaccattaatcgatccaactaaacagaattgatttagtaggttaacaactacctttgctagtggaatctaataggatagaatgagacgtaktgtaaaaaatatggtctcatcaaacatgcatcaaagtgttttcagccagttacagtggctcatgcctataattccagcactttgagaggccaaggcaggaggatcacttgaggccaggagtttgagatcagctggggcaacatggtgagaccccatctctaaatttttaaaaatcatgaagtgttttgtatgttcccatgtgtgtctgtgtgtgcatgtgcattgaaagcaagtcccaatgtcaaat

SEQ ID NO: 279707 - DNA, 517 bp, Homo sapiens
aatgctgtcttttaggtcactgatactttcttctaaaatttctgatctgctgtaattctcatctaatatgtttttcaactcagtttttgaagttttcatctctagaagtttgatttggatcttmtatgtcactacgtagcatttttaatcttttctctatcttcttaaacatatgaaatttgatcagaataactgttttaaaagtccttgcctattctatcatctgtgtcattttggagctggttttgattcactgatttttcttctcattatgggctgtgttttcttgcttctaggaatgtctggcaatttttctttgaatggtagatattgatgatttatttcattggttgttgactattttggtactcctataaatatttctgggctctgttctgagatgtcgttaaggtactttgaaagagtttgatcatttctcggcttgcttttaaaatttgtccattagaagcagatctgaatttattctaggattcatttttctccactacagtggcaa

SEQ ID NO: 279708 - DNA, 552 bp, Homo sapiens
tgagcctctactgactgtttcacactttctgctccacccacatggaggattctaaggccccctcacgggccatacttaactgtgtccacctccatgttctctgttatcctcctgagatgaacctcttgcccctttccaatgtgtgccatccsatctcacccttccgtaaggagccagccccagcaccaaatccaggaagccttttcaagatttccctccacctcaactcaactctccctcttggaaattccactgaattttgtttaaacttgattttaactttgttttagagtcttttgtttatatttcttacactgctagatcagtgattctcaaagtttagtgcgcatcaaaatcacccaaggagcttgtaaagactttgctgagccctactcccagagtctctgggaccaaagaatttctagcatgctctcagctgatgcagatcctgctggtccaaggagaacacttttcagaaccctgtggtctagaccccttgaaagtagtatccatgtctcatgcatcttaattccacaaagtatccaacaaagt

SEQ ID NO: 279709 - DNA, 398 bp, Homo sapiens
cctcaacctgattaaaaaaaaaaattcctgcaaaacataacagtgaaagaccgaatgctctcctcrtgaaatcaggagcaaacacagcaaaggtccccaccctcactactactattcaacttagtcctggaagctctaacccgtgcaaaaagcaacagaaggaaataaaagacacagttacagcctattctcatttaaatttaggggtagttatgttccataaagtcattgcaaacatcaacttagcaaaagctaaaccacagggttaggttccttccaggctccagacataacattttcaccaaccaaaacaccatttactctatatagctttgtttgctaacgtccttgtaaaacaagtaagtctcatcagcgttgaaaatttgctctcccaaata

SEQ ID NO: 279710 - DNA, 398 bp, Homo sapiens
cctcaacctgattaaaaaaaaaaattcctgcaaaacataacagtgaaagaccgaatgctctcctcgtgaaatcaggagcaaacacagcaaaggtccccaccctcactactactattcaacttagtcctggaagctctaacccgtgcaaaaagcaacagaaggaaataaaagacacagttacagcctattctcatttaaatttaggggtagttatgttccataaagtcattgcaaacatcaacttagcaaaagctaaaccacagggttaggttccttccaggctccagacataacattttcaccaaccaaaacaccatttactctatatagctktgtttgctaacgtccttgtaaaacaagtaagtctcatcagcgttgaaaatttgctctcccaaata

SEQ ID NO: 279711 - DNA, 552 bp, Homo sapiens
attgcccaggaggctgcagagcagcattcagggtcagtgggccaccatgcctttctgacaccctgtatgtggagctgctggagcgacagctttggacccaagtgatggacgctctgaagagaaaacaaaacattcctgggtggggaaggagaatcaaaatataagcccaagaactccctacttttagagcagaccccaagcccgggtccaagccccctggataaggagaggagtgggaaatcaaactcagaaggcaacccctgctcccatgccagaggaccacacagtcttccactcccaggttcaccagtgtagggtttcttccatgacaattggcatcggaccaccaggastttccccttgggctgaggaaacccaatgtttaatacagaccctcaactacacacaggaacagaaaacctggaatcaatcatttgaggaaacagaagtagccccaaagaaaacaaaactagtaaggcaaagaggaaaggattttcatcataagtataatgaatatcctgagaatcgtttaagtagatactgcatttttta

SEQ ID NO: 279712 - DNA, 501 bp, Homo sapiens
tggctttgcagggactgtgttcagtgtgttcaaataactaattatgatagtgtgagtgtgaagagcatttgctattcctgtaaacctagaataaatttatatataggcactgatcatgtcatttgttgctatgactaacaagtaacatgacccagaaacctctggctatttgcaattgatcctcccaaaatttaactagacccttagtcctcacagcatgttgaattggtgggatttggccagatgcatgcrctctcctgattgctaccatctggccaagattagctgggcatgtttttgcatgcctgtagtcctagctactcaggagactgaggcaggagtatcacttgagcccaagagtttgaagatgcagtcagccataattgcaccactgcactgcacagagaccctgtgtctaaaataataataataataaaatattgatatggtttggctccatgtccctacccaaatctcatgttgaattgtaattctcagtgt

SEQ ID NO: 279713 - DNA, 501 bp, Homo sapiens
tggctttgcagggactgtgttcagtgtgttcaaataactaattatgatagtgtgagtgtgaagagcatttgctattcctgtaaacctagaataaatttatatataggcactgatcatgtcatttgttgctatgactaacaagtaacatgacccagaaacctctggctatttgcaattgatcctcccaaaatttaactagacccttagtcctcacagcatgttgaattggtgggatttggccagatgcatgcactctcctgattgctaccatckggccaagattagctgggcatgtttttgcatgcctgtagtcctagctactcaggagactgaggcaggagtatcacttgagcccaagagtttgaagatgcagtcagccataattgcaccactgcactgcacagagaccctgtgtctaaaataataataataataaaatattgatatggtttggctccatgtccctacccaaatctcatgttgaattgtaattctcagtgt

SEQ ID NO: 279714 - DNA, 598 bp, Homo sapiens
ttcagctgcagcaatggtctttccacagagaaagtttgcagttttcaacagccctaagtgctgcattctcctaactgaggtaaatactctgcattgttttcttcccaggtgattcaagctgcaagatagatgactaggactcaaataccggaaaagagaggtaagtaaactgtgttatttgtctaagttttagacaaagtgtgttcatcagaagcagagttaaartaagagtttgaacaatagttttaaaaagtattcagttttcccagctagcactgttcagcatgtgatttcattatcctctttgccccattcagtttgaaacatttttatacttcagatcatttgtaacagatcatcactcagatctaatacataagacacaggaatttatattgaaaataatgtgtgcaacaatacttagttcctaaagaggacctaaggaagcagtcacagtttgtcatatacatcagtgacctttcaaggccgggacctcagtttgctagatgggctattattggacagagagagccaagacagaaatgataatatatatgaccagttctaggcaattcttagttaaaaatataagaggatg

SEQ ID NO: 279715 - DNA, 598 bp, Homo sapiens
ttcagctgcagcaatggtctttccacagagaaagtttgcagttttcaacagccctaagtgctgcattctcctaactgaggtaaatactctgcattgttttcttcccaggtgattcaagctgcaagatagatgactaggactcaaataccggaaaagagaggtaagtaaactgtgttatttgtctaagttttagacaaagtgtgttcatcagaagcagagttaaagtaagagtttgaacaatagttttaaaaagtattcagttttcccagctagcactgttcagcatgtgatttcattatcctctttgccccattcagtttgaaacatttttatacttcagatcatttgtaacagatcatcactcagatctaatacataagacacaggaatttatattgaaaataatgtgtgcaacaatacttagttcctaaagaggacctaaggaagcagtcacagtttgtcatatacatcagtgacctttcaaggccrggacctcagtttgctagatgggctattattggacagagagagccaagacagaaatgataatatatatgaccagttctaggcaattcttagttaaaaatataagaggatg

SEQ ID NO: 279716 - DNA, 572 bp, Homo sapiens
ctggaaagtttgactgtgacagatcaggccaggccttttagattaaacattaaaaaaataaagtttttttttttttttttaatattcaaagcacaacaggaagtcatttgtggaaagacatgatccaattgatattttaagataattttcgttggaaggtagagaatagattgaaagggcaggagctcaagaagaaagactagttaggagaccatcagaataatccaggagaaaggtaacagcttggagtgggggtggcagtaataatgataacatgtagatggattcgggatgcttctgggcaggtgagagagaaggaggaactcaggacatcccagggtattggtttctcggtttggatttctggtttatggtgttactgcctgatcttcctaccattagaattactatcctgaattatgatattttctgtcaaaaacctgtgttaaaattacctatattaaatgaaattacaatggattttttcattagagcagtttattaaatgactgtagcataaarggctttaatgaatatgaatatgggcagttgtaaatggaacacaggtggcc

SEQ ID NO: 279717 - DNA, 575 bp, Homo sapiens
catttcctcttccctggctgttttcttctttctacttatgtctaataaacgagccccttctctacattctcaacaaacaaacaaactagtgcatatatatgttttataaataggacttatattttcattatccatagtgatcactgtcactgtattctctgaacactaatcatttggggaaagcaagtaatagccctttgtttggcttaccagccaattttaaaggtattactaatatgtgatatatttgaaaattatggctggatgcgatggcttacgcctgtaatcccagcactttgggaggctgaggtgggcggatcatcaggtcaggagatcgagaccatcctggctaacacgatgaaaccctgtctccattaaaaatacaaaaaaattagccgggcatggtggtgggcacctgtaatcccagcttctcgggaggctgagaatggcatgaacccggaggcrgagcttgcagtgagcagagactgtgacactgtactccagcctgggcgacagagcaagactcagtctcaaaaaaaaaaaaagaaaattatgggttagtacagaagaggacc

SEQ ID NO: 279718 - DNA, 538 bp, Homo sapiens
acccttttctcacttctccctccctaatttatttaagacatcgtgtttaacaataggctaatttatttaagacatagggtttaaaaatagtatactgaattatgttaagtcaatgtcttttcatagactattaattgtgattttttcttcatttataagataccaactactaagttggcactttccaaaagtttaaaaatcttaccaaaaagaagcttgatactgcttaatcccactttaagttctttgtttatttttggtgacagtttcaacaactccaacttaaggcttttggtcctcctgaaactcataaaggaatgcaccactacagagatagaagcagatccctgagtttccaatayatacaggttcatgctatgtacttgacaaaggattattgttcccaaatgatgaagggagaattcttacaaaaccataccttgttgcttcttaagaaactaataagcatacagaatacacattatgtctggttgttttaggcagtgagtttggtgtttccttcttatctagtaagaca

SEQ ID NO: 279719 - DNA, 538 bp, Homo sapiens
acccttttctcacttctccctccctaatttatttaagacatcgtgtttaacaataggctaatttatttaagacatagggtttaaaaatagtatactgaattatgttaagtcaatgtcttttcatagactattaattgtgattttttcttcatttataagataccaactactaagttggcactttccaaaagtttaaaaatcttaccaaaaagaagcttgatactgcttaatcccactttaagttctttgtttatttttggtgacagtttcaacaactccaacttaaggcttttggtcctcctgaaactcataaaggaatgcaccactacagagatagaagcagatccctgagtttccaatacatacaggttcatgctatgtayttgacaaaggattattgttcccaaatgatgaagggagaattcttacaaaaccataccttgttgcttcttaagaaactaataagcatacagaatacacattatgtctggttgttttaggcagtgagtttggtgtttccttcttatctagtaagaca

SEQ ID NO: 279720 - DNA, 564 bp, Homo sapiens
ttttatttttttccttgagaaggttttgattacacatttaatatctttactaattacaggtttattcagattttctatttcttcatgacttattcttagtagattgcatgtttctacaaatttgtccatttcattaagattatccaatttgttggcatacaattgctggtagtactttcttataatccttttcattgatgtaaaataagtagtaatattccctcttttatttctaattttagttatttgaatcttcttttcttcccttagtttgtttagctaacggttgtcaacattcttgctcttttcaaagaaccagttattggttttgttgaatttctctattgtttttctackatctattttgtttatttctgttgtaatatttattattttcttacttctagatttgggttttgtttgttcttctttttctagttccttgagatgtaaatttagatggttgatttgagatatttcttccttcttataaatatttatagctacaaacttccctttaacactgcttttactgcctcccacaagttgttatctaatgcattt

SEQ ID NO: 279721 - DNA, 448 bp, Homo sapiens
aacctaaaattcaaaaaatttaaattaaaggaaattaatgcctggacgtatagtacaaatgcatgacactaaagccaatgaaaaaatattaaatattgcaggaggaaagattaccttcttcaaagacagcaatagcttgacagctgacttatatactttkttttccttttttatctttttttttttctttgagacaaaatctcactcaggctggagtgcaatgacacaatcatagctaaatgcagccttgaactcctgggatcaagtcatcttcccaactcagcctgtcgagtaactgggactataggtgcatgcaaccacagccagcaatttttttgtattttttgtagatacaaggttttgccatgttgcccaggctgatcttaaactcctgggctcaagcaatccacctgcctcagcctgccaaactgctgggattacaggcatg

SEQ ID NO: 279722 - DNA, 653 bp, Homo sapiens
gttgtattaagcatgtaagtttgggggttaatcaaagcagatattaatcagaaataaatggattctacaactttataagcactatttccttcctgttgctcttttgttgtgaaagtactcagaaatgttaacctggatataattctgtaaacatattgaaacatgaagtggccatgaatatttctattgcatttaaaatgtccccattttgaaaaatttgagacatggaaatcttcaaaaatgatagatttaaarttacatttttaaaaagccaatgggatagagtttcttaaggataaaacagaaaaactcaagagacacgcacaggttaggaaacagatgagctgattttccttctttcaatttgtggtgctgtgaaaaccttgtactatggacccacagtattcatgagaacaagagaacaggggtggcaggaggtatttttaacaaagtcatcaaggtactcatgaggatggcatattttccatgaacaagcagcataacttagtactttgctcaaacgccacacacagcataatggaaatggcactttcagaatactgattctcccacagggaactcaacagtgaactaggaaaagatcacaggctctgacagttgattggtgaattaattagatgttgaacttcttt

SEQ ID NO: 279723 - DNA, 557 bp, Homo sapiens
gtttgggggttaatcaaagcagatattaatcagaaataaatggattctacaactttataagcactatttccttcctgttgctcttttgttgtgaaagtactcagaaatgttaacctggatataattctgtaaacatattgaaacatgaagtggccatgaatatttctattgcatttaaaatgtccccattttgaaaaatttgagacatggaaatcttcaaaaatgatagatttaaagttacatttttaaaaagccaatgggatagagtttcttaaggataaaacagaaaaactcaagagacacgcacaggttargaaacagatgagctgattttccttctttcaatttgtggtgctgtgaaaaccttgtactatggacccacagtattcatgagaacaagagaacaggggtggcaggaggtatttttaacaaagtcatcaaggtactcatgaggatggcatattttccatgaacaagcagcataacttagtactttgctcaaacgccacacacagcataatggaaatggcactttcagaatactgattctcccacag

SEQ ID NO: 279724 - DNA, 547 bp, Homo sapiens
caataaaataataggcaaataattcagtacccgaggtggagtggtagtaggggaaggttaaaatctccttttcttattttaaatgaaatcttatctgtaggcaaaagaaaaggaaccagtgctgtggggtgaagaggatgaaagtggaagtgaaaatgaacttcataattagaacaagaacytagaggatattgacctatcatttcactctccctatgttacttgccttaaacttcggttaaaataaagttctcagtgcagaaaaatttgcatatggatttgattttttttaaatcccataaaagtgaaacaaaatattaatttttaaataacttctaataatttcttagattaataatgtgtttcactttcagctgataaaaaaaaaacctcctaactatacgctctgaaagtacatctaaaaacaactagtgtccattgggttcacaatcagagatatattgtagaatgtcacataaattcaagcaggaaaaaaaggttttaatttaccaggattacttaagctgactaaagaaactgtgaaaga

SEQ ID NO: 279725 - DNA, 591 bp, Homo sapiens
attatttagttttcagtgaacaaacattgcacaacatttgttagacttgtccctaaatatttcatatatgtgatgctactctaaacaataattattttaaattcactactatactagtgttttgtttattttattgtatactcatttgtttatctattttattgtatactagtttattactagtrtacaaaacaagttatggattccctaactcaggttccttattttctagcaaagattttatcgtatgtattggctccacctggctatcacatcactgtgcacaatttggggactggggaatccatacacccatgacgatattcttgctactgttttgccatgaataataatgtcctttgcctctgactcaagagtctcatttcctttgttaccatccatggaatgtaatagctttcgtccacaccttcaaacatttaaatagagtaaaaaccatattataatttatattcaagaaagaatagtccaattaatgcacgttggagtatttagtaaagtggccagatatacttaataaaatcccataataagtcttaagacatgtattgttcaatacatttttaaaataat

SEQ ID NO: 279726 - DNA, 591 bp, Homo sapiens
attatttagttttcagtgaacaaacattgcacaacatttgttagacttgtccctaaatatttcatatatgtgatgctactctaaacaataattattttaaattcactactatactagtgttttgtttattttattgtatactcatttgtttatctattttattgtatactagtttattactagtgtacaaaacaagttatggattccctaactcaggttccttattttctagcaaagattttatcgtatgtattggctccacctggcyatcacatcactgtgcacaatttggggactggggaatccatacacccatgacgatattcttgctactgttttgccatgaataataatgtcctttgcctctgactcaagagtctcatttcctttgttaccatccatggaatgtaatagctttcgtccacaccttcaaacatttaaatagagtaaaaaccatattataatttatattcaagaaagaatagtccaattaatgcacgttggagtatttagtaaagtggccagatatacttaataaaatcccataataagtcttaagacatgtattgttcaatacatttttaaaataat

SEQ ID NO: 279727 - DNA, 591 bp, Homo sapiens
attatttagttttcagtgaacaaacattgcacaacatttgttagacttgtccctaaatatttcatatatgtgatgctactctaaacaataattattttaaattcactactatactagtgttttgtttattttattgtatactcatttgtttatctattttattgtatactagtttattactagtgtacaaaacaagttatggattccctaactcaggttccttattttctagcaaagattttatcgtatgtattggctccacctggctatcacatcactgtgcacaatttggggactggggaatccatacacccatgacgatattcttgctactgttttgccatgaataataatgtcctttgcctctgactcaagagtctcatttcctttgttaccatccatggaatgtaatagctytcgtccacaccttcaaacatttaaatagagtaaaaaccatattataatttatattcaagaaagaatagtccaattaatgcacgttggagtatttagtaaagtggccagatatacttaataaaatcccataataagtcttaagacatgtattgttcaatacatttttaaaataat

SEQ ID NO: 279728 - DNA, 621 bp, Homo sapiens
gtatcctaaatcagagcagttaataccttccacggcaattaagcctgagctgcttacaactctaagaagaagccataatatatctgaggatagaggggtcatgaggggaagcttttaatttctggctctttgtatttaattaaccckaaacaagaaagtaaatatggtgtcaagaatgggaaaggagagagcatttggaaaagtaactaagggatactggagggagattatcttaaagtttagaaatgcttgttgttatataagagagagctgtgtcactgaacttggcaagtaactcagcctctctatgccctggcatatacagagccaagtgaggaaaagaatactccatggaggtgtcatctgggttaaaagaaaacgtatgtaaagcacctagcacttaataaatatccagtaaatggaaaattagtattacttgagaggaatgttttgcattacaataatttctaacttttgcatgaattttgatttttttccactttaatttttattaaattattaaatgagaatacacacacacaaacacacacacacacacacacacacacacacacacacacacaatgttaataaaatgtcctcaattaaagctaggtatct

SEQ ID NO: 279729 - DNA, 556 bp, Homo sapiens
tgtcatctgggttaaaagaaaacgtatgtaaagcacctagcacttaataaatatccagtaaatggaaaattagtattacttgagaggaatgttttgcattacaataatttctaacttttgcatgaattttgatttttttccactttaatttttattaaattattaaatgagaatacacacacacaaacacacacacacacacacacacacacacacacacacacacaatgttaataaaatgycctcaattaaagctaggtatctacatttccttcagcatatttcccaagtatactaacagactatccgtaagaaagtggaacaactatttactatgtactgtgtactattttattaaacattactatatacaagattcttcttccatttaattctcaccttcttccagggggatattattgacattttacaaataaagaagttgatgttcatctggataaatatcttgccaaaagtcactcatgtggtgttagagatcaagattgtaacgcatatgtgtctgatgctaaaattctagcttttctgaggacagaaa

SEQ ID NO: 279730 - DNA, 1082 bp, Homo sapiens
ttagttccttcagggaaggaggttaatttagagaagatgtagggagtgttcaacatgttcgttgtggaagagaaagagctaagagagaggagcttaaagacacaaacgggtagamtcaaggagtgtgctctcaaatgagaggaacaggagtgacattaaccttgaaatgctcggagactctactccttcatgacagtaggaggataattaacaatagatacaaatgcaggtaagttgaaaagtgggaaggatgagagtttgggagtttccatccgatggtttcaagttgtttgctgtgaagaaggcaggtttgctaaaggtgggagttgcagagtctgagtagaagcactgagaagagtgatgatggcttgtaacagctgtttcagagaaagtaaatggatactgaacagtgttacagacctagaagaagggggcagatcatagatttataatacaaattaacagactactatttaattttttcaggatgaccagaaagttcaggaggggaagtacagaaaaaaccaagtgtttgggctcatttgttcacacattgtcagwgctttccaaaatctcatgtttattgtaattttccatccctatctccacttacctcacccctaccaaatttcagctattgattgtaagcctgtccctagaccttaataacatttattttttaaaaatccccccttcatctttttttttttttttttagattagggtctctttaatcaagttgtggccatgggaaataaatcttgtaactttcccctagtttgagctcagttaagtgccatggcctctttawgcagctgatgggcacactcctccaatatgaatgactcctttgacactggacaatagggttaaagcagccattagtctgcagttttctgagagcctctgcctagaatgtaatttcttggatacctctgtgaacttgacagagccttcacctacttgggggtcatatattaacaaatcaggaaaaaaaaattgctgtctcatagttaccctttggttgtttttacagcttatattaaattttcaatattattgtctataattgtatagcagat

SEQ ID NO: 279731 - DNA, 521 bp, Homo sapiens
gctttccaaaatctcatgtttattgtaattttccatccctatctccacttacctcacccctaccaaatttcagctattgattgtaagcctgtccctagaccttaataacatttattttttaaaaatccccccttcatctttttttttttttttttagattagggtctctttaatcaagttgtggccatgggaaataaatcttgtaactttcccctagtttgagctcagttaagtgccatggcctctttaagcagctgatgggcacactcctccaatatgaatgactcctttgacactggacaatagggttaaagcagccattagtctgcagttttctgagagcctctgcctagaatgtaatttcttggatacctctgtgaactkgacagagccttcacctacttgggggtcatatattaacaaatcaggaaaaaaaaattgctgtctcatagttaccctttggttgtttttacagcttatattaaattttcaatattattgtctataattgtatagcagat

SEQ ID NO: 279732 - DNA, 490 bp, Homo sapiens
ctgcatttatttaccatgaccattgtctctccccatcccaaccctgaattcatcatgcakttccatggtatcccataattttctgaagctattaatatagaaggaacaaatgtgtatttgaagtgtagaaattgaaatgattctttttaatactcccagcttagatgttaaaggaaaatatataatttcactagatttctcagtatctatacatctccaaggtcatcaaaaatgtgtaagaatagaaagtgcaccaagcctcatagggcatacaaacatatacacttgaaaatagatatttatcactcagggcctccctactactctttctctttctccttctcggctcttctctcttctcttcttccttttctttttttgtctttaaacaactgcaaacattgcagttagaaaagatataaataaggataatgtggggactttccagtagtgatggaaaccaatttgcagatacttcccatccaatatc

SEQ ID NO: 279733 - DNA, 1059 bp, Homo sapiens
ctgcatttatttaccatgaccattgtctctccccatcccaaccctgaattcatcatgcatttccatggtatcccataattttctgaagctattaatatagaaggaacaaatgtgtatttgaagtgtagaaattgaaatgattctttttaatactcccagcttagatgttaaaggaaaatatataatttcactagatttctcagtatctatacatctccaaggtcatcaaaaatgtgtaagaatagaaagtgcaccaagcctcatagggcatacaaacatatacacttgaaaatagatatttatcactcagggcctccctactactctttctctttctccttctcggctcttctctcttctcttcttccttttctttttttgtctttaaacaactgcaaacattgyagttagaaaagatataaataaggataatgtggggactttccagtagtgatggaaaccaatttgcagatacttcccatccaatatcwgtcttttttttttttttccagaaccgtatcttatttcccctatgacctttgctgttgctcggtcctaataaaattgaggcccaggtggatgatgctaacattcttagaatcaagccawgttagagcttcaaggaaccttttagcattgaattcagtggttcttgaattcccctttgagaacctgttgacagctagtagccctttcccccaggaagatgcatattgtaggcagaatgatagccctccaaagatgtctataccctcatgccccaaatctgtgaatatattacattacatgacaaaggacagttcagattgcagatggaattgaggtttcttatcagctgaccttaaaacagggagatcatcttggatcatctacacagattcagtgtaatcacaagggtccttaaatgtgcaagagggaagcagaagagtcagagcgatatgaggtgaaaaagacttgatgggccattgctggctttgaagatgaaaggggcccatgagccaaggaatgtgagcagcctctagaagctggaaaacacaaggaaacagactcccccctagg

SEQ ID NO: 279734 - DNA, 568 bp, Homo sapiens
gtcttttttttttttttccagaaccgtatcttatttcccctatgacctttgctgttgctcggtcctaataaaattgaggcccaggtggatgatgctaacattcttagaatcaagccaagttagagcttcaaggaaccttttagcattgaattcagtggttcttgaattcccctttgagaacctgttgacagctagtagccctttcccccaggaagatgcatattgtaggcagaatgatagccctccaaagatgtctataccctmatgccccaaatctgtgaatatattacattacatgacaaaggacagttcagattgcagatggaattgaggtttcttatcagctgaccttaaaacagggagatcatcttggatcatctacacagattcagtgtaatcacaagggtccttaaatgtgcaagagggaagcagaagagtcagagcgatatgaggtgaaaaagacttgatgggccattgctggctttgaagatgaaaggggcccatgagccaaggaatgtgagcagcctctagaagctggaaaacacaaggaaacagactcccccctagg

SEQ ID NO: 279735 - DNA, 568 bp, Homo sapiens
gtcttttttttttttttccagaaccgtatcttatttcccctatgacctttgctgttgctcggtcctaataaaattgaggcccaggtggatgatgctaacattcttagaatcaagccaagttagagcttcaaggaaccttttagcattgaattcagtggttcttgaattcccctttgagaacctgttgacagctagtagccctttcccccaggaagatgcatattgtaggcagaatgatagccctccaaagatgtctataccctcatgccccaaatctgtgaatatattacattacatgacaaaggacagttcagattgcagatggaattgaggtttcttatcagctgaccttaaaacagggagaycatcttggatcatctacacagattcagtgtaatcacaagggtccttaaatgtgcaagagggaagcagaagagtcagagcgatatgaggtgaaaaagacttgatgggccattgctggctttgaagatgaaaggggcccatgagccaaggaatgtgagcagcctctagaagctggaaaacacaaggaaacagactcccccctagg

SEQ ID NO: 279736 - DNA, 568 bp, Homo sapiens
gtcttttttttttttttccagaaccgtatcttatttcccctatgacctttgctgttgctcggtcctaataaaattgaggcccaggtggatgatgctaacattcttagaatcaagccaagttagagcttcaaggaaccttttagcattgaattcagtggttcttgaattcccctttgagaacctgttgacagctagtagccctttcccccaggaagatgcatattgtaggcagaatgatagccctccaaagatgtctataccctcatgccccaaatctgtgaatatattacattacatgacaaaggacagttcagattgcagatggaattgaggtttcttatcagctgaccttaaaacagggagatcatcttggatcatctacacagattcagkgtaatcacaagggtccttaaatgtgcaagagggaagcagaagagtcagagcgatatgaggtgaaaaagacttgatgggccattgctggctttgaagatgaaaggggcccatgagccaaggaatgtgagcagcctctagaagctggaaaacacaaggaaacagactcccccctagg

SEQ ID NO: 279737 - DNA, 1227 bp, Homo sapiens
aactgaagttttaaggaaggagatagattccaaaatagaccagtttttcctgaaaacaggagattccagtccatctgagtcagcctaataaggaagtcccctttgctttaaccctcccataaaagtaacctgaaggtaaccaatcagtttttaaacttttttttcttttgttattatcgtgacagggtctcactctgtcacccaggctggggtgcaggggcacaatcatagctcactatagcctccaactctggggctcaagtaatcctcctgcctcagcctcctgagtagctgggactacaggtgcatgccaccaagcctgcctaatttttaaacttttttagagatgatggtctcactatgttgcccargctggtcttgaactcctggcctcaagagatcctcctaccttgacttcccaaagtgctgagattacaggcatgagctaccatgctcagcaggtgttcttaaattttttttttcccaattatctgtttccttattgccaccttacaaaactcactgttctgtcattgcccagtggagctctcattccattttatagaatggaggctgcccggtttcatgaattgcaaataaaagccaattagwcattcttcattgtacaagtctgtccttcaatggaaggacatttaactwctgtgaccccatccactaatcctgatggtgatccccaatcattgagggatgcttccactccattgagaaccatcagagatgatcattataaaagctttacagcttaaatatactattaacagtagaagatgcacctcactgttttctcaagaggatacaattttcaaattcctgtagatgaatggttccccaatggtgggaatgttccaaaatggcagctcatttatgctattgttgagaagagaggaggtggtaatgaggcaagtccttatccctgttcccaagcaatggaacagggagcagggaggtagcaatgatcaagatctactctctccctaccaggaatccagataatgtactagcagagaccatcatgttcagaaatgaaatactaaggcagtagagtttagttataaatgggatcttcaaaagggtcttggcaggatgaggcagaaaaggattccttgaacaagaaagatacaaaaaaaggattttgtactcccttgccacccttttgctagcgtgttttttcatgcagtcagaagctgctgaaagaaacacttgaac

SEQ ID NO: 279738 - DNA, 408 bp, Homo sapiens
cttgggaactccaggatgtgctgatagaagcaagaaaagtaaaccaccagaggcagtcaacagttgatgctgggtgctttcattctcagcatccagcacctggacttggctctttgaaataccctcagcctactgagtctaaactgcctgagagcatggaggggagggggaacgtgagcccaggaggcagttcktaactggcgactataaacactctatccctctgcctctgataggacaacttaaggtgtggtcttaaaaagtatctggagcttccctgtgcactgagccaaagtcaccctcctggggctttgcctgatactgcatctatgtttgccctccttttcttccaggtcccactccccatccctctatttatctttcctgagaactctccctattaagtca

SEQ ID NO: 279739 - DNA, 309 bp, Homo sapiens
ttaatggaggaggacacggtcagtgccaggtaaagcctcagctggacccacctctatggcgtttgctgggtggaytcatctgccacttctgcttttgaggtagcaagattgagatgaatggatcataatatactgccagatggaaagactactggggaaaaaatatccctttgtattcccaactacagctatattatatattaaccaggtacctgttataggttggcctgaagttttgccaccatttttaacattatagaagagtatattcagggttccaatttctggctaacaaataattggaaaaca

SEQ ID NO: 279740 - DNA, 627 bp, Homo sapiens
ctctaggtattttaataggatgccagaatcttactgctttctggaaattcctctgtaaagccgacagcttttgagtattttgtagaagactgcacttgatttgacctgagggactayttagttaatatatggcgatgtctgcctctaagtacctactttttcctccatctctcttgttggattttggtggtaaaaggtcagttgtctactgcaaagttttagacaagaggaatgcttctgaatccatcagtttatcttaagctatccacaatatatttttgtgatgtatctcaatttgatttttaataacagtaaaagaaagagtgatagctattttattgaatttatatatccaatctcaaaaaaatatataaaagaataattaagtctcttgacagctataagagcataaaaaccaacttaaacaaaaaagcaggagaaaaacaacctttggactgtgtggacagataaacacagtagaaaaagacgcaggggccagaaatccaccctgacattctatgactcaccagttatatggcagctgaaggtgaggtagaggtccattgacaagaggagactattttagaactctttttttttgtcccaaactaagaggacaagcagagt

SEQ ID NO: 279741 - DNA, 1196 bp, Homo sapiens
tatttcatgtgaattttgttatttccaattacagtatagttaaaatgatacattagactaggcttaatttcaagccatccacagagtactctaggtattttaataggatgccagaatcttactgctttctggaaattcctctgtaaagccgacagcttttgagtattttgtagaagactgcacttgatttgacctgagggactatttagttaatatatggcgatgtctgcctctaagtacctactttttcctccatctctcttgttggattttggtggtaaaaggtcagttgtctactgcaaagttttagacaagaggaatgcttctgaatccatcagtttatcttaagctatccacaatatatttttgtgatgtatctcaatttgatttttaataacagtaaaagaargagtgatagctattttattgaatttatatatccaatctcaaaaaaatatataaaagaataattaagtctcttgacagctataagagcataaaaaccaacttaaacaaaaaagcaggagaaaaacaacctttggactgtgtggacagataaacacagtagaaaaagacgcaggggccagaaatccaccctgwgatgaagcagagtggagtggtcagggggtgagatgggttgggacctacggccccccagagcaggacccttccgacattcttaactgcctcctacaagaagacatacatgaccaggcatggtggctcgcacctgtaatccctacactttcggcawtcaagattggtggatcacttgagcctcaggagttggagaccagcctgggcaacatggtgaaaccacatctttacaaaaagtacaaaaagtagctgggtatggtggcatgtgcctgtagttccagctactctggaggctgaggtgggacgatcacctgagccctgggaggttgaggctgcagtgagttattgatcgtgccactgtactccagcctaggcaacagagtgaaaccctatctcaaaaaaaacaaagatatgaattttcctttctgatccagtgtgcatatatacatctatatttgttaagagtgaaacaaaagttttccaaaagaatacttatacacaatgtactgtattttctattttaatctaggtggtattttaaagctggttgtgacttattgaattgacttcataagtcaataataggtcatggctacagt

SEQ ID NO: 279742 - DNA, 596 bp, Homo sapiens
gatgaagcagagtggagtggtcagggggtgagatgggttgggacctacggccccccagagcaggacccttccgacattcttaactgcctcctacaagaagacatacatgaccaggcatggtggctcgcacctgtaatccctacactttcggcaatcaagattggtggatcacttgagcctcaggagttggagaccagcctgggcaacatggtgaaaccacatctttacaaaaagtacaaaaagtagctgggtatggtggcatgtgcctgtagttccagctactctggaggctgaggtgggacgatcacctgagccctgggaggttgaggctgcagtgagttattgatcgtgccactgtactccagcctaggcaacagagtgaraccctatctcaaaaaaaacaaagatatgaattttcctttctgatccagtgtgcatatatacatctatatttgttaagagtgaaacaaaagttttccaaaagaatacttatacacaatgtactgtattttctattttaatctaggtggtattttaaagctggttgtgacttattgaattgacttcataagtcaataataggtcatggctacagt

SEQ ID NO: 279743 - DNA, 596 bp, Homo sapiens
gatgaagcagagtggagtggtcagggggtgagatgggttgggacctacggccccccagagcaggacccttccgacattcttaactgcctcctacaagaagacatacatgaccaggcatggtggctcgcacctgtaatccctacactttcggcaatcaagattggtggatcacttgagcctcaggagttggagaccagcctgggcaacatggtgaaaccacatctttacaaaaagtacaaaaagtagctgggtatggtggcatgtgcctgtagttccagctactctggaggctgaggtgggacgatcacctgagccctgggaggttgaggctgcagtgagttattgatcgtgccactgtactccagcctaggcaacagagtgaaaccctatctcaaaaaaaacaaagatatraattttcctttctgatccagtgtgcatatatacatctatatttgttaagagtgaaacaaaagttttccaaaagaatacttatacacaatgtactgtattttctattttaatctaggtggtattttaaagctggttgtgacttattgaattgacttcataagtcaataataggtcatggctacagt

SEQ ID NO: 279744 - DNA, 582 bp, Homo sapiens
cacttaacaggttggcttttctgggttttagttttatgtgtaaaatggaaataataacaactagctcacagtgatgttatgcagataaatgagatacataaagctctaaagtacaatgcttgactcatttagaatagtctcatcaaatggtacattgtgttgtaagcagtaatggtcatactaataagagtagcacgcagcatttctaaggatataactgcttaggatactcacaggcctgcctcagcacgcaacaggcgcctgcattattatttccctttcaaagatgaagaaactgagacacagaaagggtgtataactagcctaatagggacagcaatctactgagccctgagactttctactccaaactccatattacttacactgtgccacaaataagtgtgataacaacttatcagctttcttatgtatctggtaatattttggacaggtagccaggaataagctgcatcctttgagacttggtgttgaggaatgcattatcttcatttcagatatgggaaaaccaaagctaaagctctatgcattcgstcattcatcggtgacattgcatgatac

SEQ ID NO: 279745 - DNA, 1157 bp, Homo sapiens
gtagtccccctttattcatagcaagggttatgttgcaagacccctagtggatgcctggaaccgaggatactactgaaccctatggattctgttttttcaatttaataactgagaaggccactaagcgacttaggggcagggagtgtatacagggtggatctgctggacaaaaggatagttctccagagcasggtagagcagaaacattgtgagatatcatcacgctactcagaatggcaagtaattaaaaatttaggaattgtctattttctggaatttcccacttaatattttcagaacttggttaatctcaggtaactgaaacctcagaaagcgaaacagtgcataaaaggggattaccataaataaaaataaatgttatttttgttttaaatgtctctaagtgatctgcatcgaaacctaaactttgaggtaagattctctacccaatctttaagcctgaatggaatttattaaactactgagctcttttctcccacaatgaataatttactcttcagccaggcttgcctgtgaaatacttaagtgaaagctacacaaatgatcacaacaataaaattcttattaactcacatataaaacatattatggtatttgcagctaggwgtacaaaagattgatttaataatactcctcaattcatagaacataatcatacttgatcctcataaggctttctgatacacgtactcatatatacatttatgtacatctatgtgtacttactttctcttttagagtgtatataagwatatagcaaatatattcatatatatgcatccatattaatatattcccttttatattgtaaatatatacgaatacataaaatatgcatatgtatatatatatcatacatatgcatttatgtgaatacatatgcatattttatttttctgtctcctggagaaacactgtttcatatatattctattatttttatgtgtccttgataaatatgtatagttttctgagcatgttgtcttagtttatcatgtaaacatatttacatatataatgtttcttttttcattcaatactatagttttagaaataacttttgactttgaaaaactgcaaacataaaccaagtatgcaatgagagaagagtacactgaactcccatatgcccatca

SEQ ID NO: 279746 - DNA, 553 bp, Homo sapiens
aattttctttccatatatttgttgaaaatctatttggtttgttctgtaggtttttatctctggattttatctcatacccatggtgttatttagcatggtcctctcatcctgtattttctgggaattggtggttatatagagagatttaattagtcttctgttaatttttctttctgaggggagaatatttcattggtggtattgagtacttccatttggaagcatagggggtgtctgtgtgtgtaatgttagcagccattgatgctcagtgcttaaacattaagttaccaggtgatgggaaatagtgatatgctaattctaycattccattttcacttagtaactgaaaaactccccctcatcaactctttgttacattgactacagtttgtatgaaaggtagaataaatggttgagtctttccctttattcagtagttttcaaaataatgagttggttccctagcatcccccaaaggtggccaatgatgttttcctacgttattgtgaatttgctttctggtataacaagatattccaggatcatttgtgca

SEQ ID NO: 279747 - DNA, 588 bp, Homo sapiens
gatcaaccaatctttaacatggaaaatcttatagtagaggcagattcaaaacccaaatgagagcacagaaaagagagatgccttttttcatgaaggatcccctgaccagaatgccatttcacagtttaaaacaaacttaatgtgttctagtctattcaggaggctgggaagttcaagatcacaacaccagcaaattcagtgtcagctgaaggcccatttcctggttcagagatgacaccttatagatgtgtactcatatggttggggggtgggggtggggagcacaccagttctcagagatttcttttataagaaccctaatcctatgagagttgagcccttttgacctagtcatctcccaaaggccccacatcttaatatatcaccttggaatttaggatttcaacatgaattttaggggcacacaaacactcaggccatagaacttcttctgttggacctactttgacactcttgtttccttaactacatttttaaaagaggtgacaktagaggtggttcttaagaaatcaagtaagtagaaacagctttccaagtgtaaaacatcaaagtgaaagatgtagggat

SEQ ID NO: 279748 - DNA, 607 bp, Homo sapiens
cgttattataatgctatattttacatgtaaattatattaggaagcctgtgtctttcctttagtgattaagatttcatggaggggaagaagaatggaaaggaaaggaaaaggaaaaggaaaggaaaggaagatagtttatttgttttyaataagttagcctcctctggggaagataaactttctgacaccgaacataattgagtaagccagaataaattgttgcattctctacataggcctcctttcactcacaaggatattctttgtgccatttctaactgtactattacttttggaaacatttttaatagaatagactgtgttcatacctgtaagtacttttcttgataccaccttagaaagcattcaaatgcattctctactagcgtagagaaattggtgggtttttttggttttgcgtgtggtttttttgttgttgttgttttaatagtacctcagggtagcaaattcatgtgttctctcactgcagggaagcagcacattaaaaaaaaaaaaaaccaccagaggaaattgccactgctgacttttgtgcaaagaagaggaacaaaatgcttgccatgtcttttagtagtcaatgggccacaga

SEQ ID NO: 279749 - DNA, 591 bp, Homo sapiens
atttataaattaaactttatcatgggtataggaaaaacattgtatatatagggtttcagtactatctgtggtttcaggcatcaactgggggatgttggtatgttgcagataaggggagactactgtacagagaatgaagggtacatcttctttggctttctcctttatgggatttctctctttattttccagcaggactggttgccccaaactctggccccttgttcttcaggccagaaaaactataggttttctattagagttttagccactggacatggggccaactgtgacatgccttagactaaaagccacaaaaactggtaaacttacctcttgtcattcctttcttccaagtgtcaactcccctcttgaatctaactgcttttgttcatttttcaatgccttgtggtmtttaaatattttttattttgtccagagtttatagttgttttatgcaagatcagtctggtaggaacttctttggccatactggaagtggaaattcatttttatttttaaacaaatctgtaatctgaacttttaacctattccaatagctttccttctaatggagtaaagttttatttt

SEQ ID NO: 279750 - DNA, 561 bp, Homo sapiens
tttaacctattccaatagctttccttctaatggagtaaagttttattttccaaagacattttatcccttagttttaatgtcttctttccttcaatctcatcattttctggagctgtgacaagaaagtcttttcggttttcttttgtttattgtcaatacctttggactgtaaaaaagcattcatgaagcaaactggattcaactttctgtccaggaagaattcagaaaaggtactaactcaataatcagcttctgatgaatcaagaaattgatttttgtctaaaaaaaatctatgggtttaaaaaaataaaatatgaaaagyattactactttacaatggagctagaaagctaaacatctgctagcaagctgaacagagcatgcccagtccggtccctgactcacgatccctgcacgtgggctccactgggggaccacaaggatttagagacaaggtcagaaaccgattgtcccggaagctgaaatgactcaaaacaatacataatggatctactgaagtaactctccttagtagatggctttgaaatgtgtccctgaaga

SEQ ID NO: 279751 - DNA, 551 bp, Homo sapiens
  misc_feature (1)...(551): n = A,T,C or G
gcattgctccaacaaggatgaaaattgttttttggggggcaaaaattttattctttctatatgtaaagcacagatayacatacagtatataaacttatatgcagcatatttgcgatattaaaatgttagcgagtgcaattaatagaaaatacttaaaaaggcttcttttgctggtggtatagataataaaaaagggttcgaaaacagtaacataaacacacaaacacactatacagtatgtatatatatatctcagaatacaagttaggtgtagacatttataattatacaatagacacggattttctatctatatctacatttacatccatttggggtttcgtgtgagtctgtcagttcaatatcatgatcacctcaaaaaactgtgccccaacttagatctgataatgacccactgtagacagtggataaaaaaaacataaaactagtcaccaagcacatcctagaaagatctcactgcaatctgatcttactggcaacaccagcgggtgagcagtcctactctctgctgccactnnnnnnnnnnnnnn

SEQ ID NO: 279752 - DNA, 551 bp, Homo sapiens
  misc_feature (1)...(551): n = A,T,C or G
gcattgctccaacaaggatgaaaattgttttttggggggcaaaaattttattctttctatatgtaaagcacagatacacatacagtatataaacttatatgcagcatatttgcgatattaaaatgttagcgagtgcaattaatagaaaatacttaaaaaggcttcttttgctggtggtatagataataaaaaagggttcgaaaacagtaacataaacacacaaacacactatacagtatgtatatatatatctcagaatacaagttaggtgtaracatttataattatacaatagacacggattttctatctatatctacatttacatccatttggggtttcgtgtgagtctgtcagttcaatatcatgatcacctcaaaaaactgtgccccaacttagatctgataatgacccactgtagacagtggataaaaaaaacataaaactagtcaccaagcacatcctagaaagatctcactgcaatctgatcttactggcaacaccagcgggtgagcagtcctactctctgctgccactnnnnnnnnnnnnnn

SEQ ID NO: 279753 - DNA, 977 bp, Homo sapiens
  misc_feature (1)...(977): n = A,T,C or G
gcattgctccaacaaggatgaaaattgttttttggggggcaaaaattttattctttctatatgtaaagcacagatacacatacagtatataaacttatatgcagcatatttgcgatattaaaatgttagcgagtgcaattaatagaaaatacttaaaaaggcttcttttgctggtggtatagataataaaaaagggttcgaaaacagtaacataaacacacaaacacactatacagtatgtatatatatatctcagaatacaagttaggtgtagacatttataattatacaatagacacggattttctatctatatctacatttacatccatttggggtttcgtgtgagtctgtcagttcaatatcatgatcacctcaaaaaactgtgccccaacttagatctgataatgacccactgtagacagtggataaaaaaaacayaaaactagtcaccaagcacatcctagaaagatctcactgcaatctgatcttactggcaacaccagcgggtgagcagtcctactctctgctgccactnnnnnnnnnnnnnnwtcattttgccaaagaagatacacaaacggcgaacaggcatgtgaaaaggtgctcaaaatcactagttgctagggaaatgcaaaaccaaaccacagagaacacattaaactcactagaaaggaacaatttcagaaaataaaggaaaataacaagtattgagagtacggtgaaaatgatggctgaatgtaaaatggttcaactactctagaaaacagtcaaaaagtcaaacatagacttaatgtgagactcagtgattccactcctagatctacacccaaaagaattgaaaacggatwttcagatcaatacttttaaacaaatgttcacagcaacactattcataatcaccaaaatgtggacgcaatgtacatgagcatcaatggatgggtgaataagcaccaagtaggctatccaagcgacggaac

SEQ ID NO: 279754 - DNA, 1140 bp, Homo sapiens
gatctttgtaatataactattatataatagatttatacattatatattttaaatgtagtacatgcatatatttgtaaatgcatacttttataatatatatttgtgatacaaattattataacatataaatttatcaattcataataggatatgaaaacttaatagtaatttttagtaattacagcatatatgaacatttacgtgtgagtgttttaataaggttctattttctcattaactgcagtaaaattaaaacgatttacctcaatttttaacttacttggagcttaccctacctaccaccttcacttgtccccgttcttatcccagttctctgttaarcagttagtaacacataaataaccccttagatgctttctttggcctaagagacattcaatatgtgcatgccaaagttgggtaaattcaaagaattctgaaatttatcaaaaaagtaaagttttcatgaagcaactcagaaattaccatctcaaaacaaatacatttgattattattaaattacctttggtgtcaggtacatttctccccaaaacataattwgtacctattgttttaaaatcgtaaaagcatttgtgatgttcctgttacatgaaaatgttcttctggttgtacatattcttactttacagaagctgggtagcacaaaaatatttaaaagattaatgctaatggtgattaaattttcttttaaatttatatcaagtgaaaaaatgcagttttttaaagcagaatttaaaaaatgtagttccttgacattatatacctctagtggcagcactctgatataacacccctccaaaatacggcaaaaactaccaacgtttcttgaataaaatccaaaataaactgcatcacacataaaaatacaatatccagtgctgcawatgtgatgtatcattaagtctaaagaccaatttagcaggagtttaacaacatcttttagaaaagctcacaagataatattggaattaaattaatcaaatggtgtattctaacataacacccgtttgaatatgctaatgagatcaatccttggaataaaatgcacgctattccctgatttaaatgcatctgcatagttagctgacaatgaatcttgcccaaaccagcccgcctag

SEQ ID NO: 279755 - DNA, 578 bp, Homo sapiens
gtacctattgttttaaaatcgtaaaagcatttgtgatgttcctgttacatgaaaatgttcttctggttgtacatattcttactttacagaagctgggtagcacaaaaatatttaaaagattaatgctaatggtgattaaattttcttttaaatttatatcaagtgaaaaaatgcagttttttaaagcagaatttaaaaaatgtagttccttgacattatatacctctagtggcagcactctgatataacacccctccaaaatacggcaaaaactaccaacgtttcttgaataaaatccaaaataaactgcatcacacataaaaatacaatatccagtgctgcaaatgtgatgtatcattaagtctaaagaccaatttagcaggagtttaacaacatcttttagaaaagctcacaagataatattggaattaaattaatcaaatggtgtattctaacataacacccgtttgaatatgctaatgagrtcaatccttggaataaaatgcacgctattccctgatttaaatgcatctgcatagttagctgacaatgaatcttgcccaaaccagcccgcctag

SEQ ID NO: 279756 - DNA, 500 bp, Homo sapiens
cgcatccctggtgtctgggtttgatgctgctcttcaggagaagcccctgctgcctccattctcatgaccagggagttttaaggctcaggcagggaagggcacaacccctgccactgcccgccacagaccataaccccagagtccagacctccgcgctrctccctgatctgcgtggttgaagcacagcctccagttctccagccagagctgggacctccccacagtggagccaaggcctggagcctgagggccactggggccagaaagaggagagtggggccaggctcagctaaggcccacctctctcccttcacctggcctgggaggatggaaatcaggctaggatgagacagcaccaccagcaacaccaggggcccgggggtgtctgtgctcagcacagaggcggaggtctgcgattgggcgggcctgggcacagcactcagctcagctacttcctagccacaaagttgggggagcatcacctaccttctctgagattc

SEQ ID NO: 279757 - DNA, 588 bp, Homo sapiens
tgtgtcaaacataagtcctacatgtgaaaaacatgctacaatatgcgtgcaaaatgcatactgcatgcatataacatgggcataacacccatacctcatgcttagaacatgcatgatacatgcacagaacgtgtgtacatttgctacatgcacagaacacatgtacaacatgctacatgtgaacaacacgtgcacagcctgcataccacacacgtacatgcttacaacataacagtatgcccactgcatgcgtaaagcatatatgcccatgtgtgcaacatgaaaactacatgatacaatatgcacacaacatccctgctggtgcaaaacgtgcgtacaacacactacatgcatagaactggcatgctacatgtgcacaacatgcaagccacatgcatacaagcaagccacatgtgcaaaacatgcgaacatgtgtacagcatacaagcctgatgcatagaacatgcatacgtgtgtacagcaygtgttaaacattcatgctacatgcatacatcatgcgagcagcatgtgcgcattttcacagcacacatagaacatgctgcaacacgcgtgaagcatgcatgcagc

SEQ ID NO: 279758 - DNA, 597 bp, Homo sapiens
taagataaaatattgtgatggtgatgatgaagatttttctctcttttttcccttagcaattttctcactactgccatttctcgccattgtagtaacatggaataactactactaagcgactattaaatatctgcttttcaattcctgactactgattgatttattgatttactttgaaggagaatgtggttatcagcctaacctgcatttactctggacaaccacagtttattttactcacrattgcctcattgcagttgcaggattgagactataaaccttctcaattcctggtgccagagaatgcgtaaggaattctggccaatgagtcacacagctgctctgttgtttctaatttggctgccaggatcaagttgcttctcaaagaaactttaataacttttctttccaaaacgttaatcttcatcatctcatggcttaagtgtttaatgattacttcataaacaattttcatacttccccacggttactcgcaaagttatccagctattttatgtttatcccctttttcaatctgcttaacatttaaaaaaaaattgtgaagctgagcgtatggtgaaaacgaactagcaaaaa

SEQ ID NO: 279759 - DNA, 615 bp, Homo sapiens
tgaactctgcatgaccttttgtgtattcattaggtgaatacaccttttgtgtattcaacagrcaaatatttatgaagagattgacagcattagatttgtcttttggaaataccaccctggccacagtgtgaaaattgtcttggattgggtgtggcaagagacccagtggggttgtctgtagagcttgttagctctaacaggagaaaatgattacttgaaacagggttctggtagtggagatgagtgaaacaaatgattttgcaacctgttgaaggggtctatcccccattcctacctgaacaggacttcccaggctttcagtaattgtctcctaaaatttggacctctaaggtccctggagaaaacgtctctaagatatactatcttagagatatatgaccaactactctagctgtgtaacttggggaaaggacttaaaccctccatgcctcagtgtctttatatgtaaagtaagccttctaatatgacttgctacataggatttttttaaggtttaagtgagagatgctttaaagtgttaagcacagtgcttggcccacagtcagagcacaataaatgttaggcactgaactactgctaccaccattcctacaa

SEQ ID NO: 279760 - DNA, 615 bp, Homo sapiens
tgaactctgcatgaccttttgtgtattcattaggtgaatacaccttttgtgtattcaacaggcaaatatttatgaagagattgacagcattagatttgtcttttggaaataccaccctggcyacagtgtgaaaattgtcttggattgggtgtggcaagagacccagtggggttgtctgtagagcttgttagctctaacaggagaaaatgattacttgaaacagggttctggtagtggagatgagtgaaacaaatgattttgcaacctgttgaaggggtctatcccccattcctacctgaacaggacttcccaggctttcagtaattgtctcctaaaatttggacctctaaggtccctggagaaaacgtctctaagatatactatcttagagatatatgaccaactactctagctgtgtaacttggggaaaggacttaaaccctccatgcctcagtgtctttatatgtaaagtaagccttctaatatgacttgctacataggatttttttaaggtttaagtgagagatgctttaaagtgttaagcacagtgcttggcccacagtcagagcacaataaatgttaggcactgaactactgctaccaccattcctacaa

SEQ ID NO: 279761 - DNA, 571 bp, Homo sapiens
gaaggaagctttgcacctaaacgcacactggtaatgcagaaaggaaatctggtgctttaggttacaaattagattaaatggatttatgggctaaacattttcaattcttgcttgccatataatgagagaaattaaagcccattaaatgattaatactttatctaatgactaycctcccaggagttcaaagtctttttgaaataatgctctaacattcagtattcaactattccttgagcacttctgaaagcagcagtaatatagttagggtacctctgagtgtactgatatgagtacttccaaatgggttcttcctgcttactgtgactccacgagagaatcaggttcatttgattcctttgttcttacagtccccctgtgaaacctgcgtcatcacaatacagaggcctgcatcttactgcacaagtggagaggccatcttctaacatgtttaacactgcaggttccctcaacccgtcagtgtcatctcagaaggatcccagtggaattttgttacttctgggactctttcttttttcattttacataatgtgttctcttctgtgccatt

SEQ ID NO: 279762 - DNA, 632 bp, Homo sapiens
aacgcacactggtaatgcagaaaggaaatctggtgctttaggttacaaattagattaaatggatttatgggctaaacattttcaattcttgcttgccatataatgagagaaattaaagcccattaaatgattaatactttatctaatgactaccctcccaggagttcaaagtctttttgaaataatgctctaacattcagtattcaactattccttgagcacttctgaaagcagcagtaatatagttagggtacctctgagtgtactgatatgagtacttccaaatgggttcttcctgcttactgtgactccacgagagaatcaggttcatttgattcctttgttcttacagtccccctgtgaaacctgcgtcatcacaatacagaggcctgcatcttactgcacaagtggagaggccatcttctaacatgtttaacactgcaggttccctcaacccrtcagtgtcatctcagaaggatcccagtggaattttgttacttctgggactctttcttttttcattttacataatgtgttctcttctgtgccattgtccttgttacataaaactaagcatccctccatatatgaaggaaacaaaaccagtatctcaaagacatatctgcactccc

SEQ ID NO: 279763 - DNA, 512 bp, Homo sapiens
atgtttactttcccactgatcccaatcaggcaggtgaacttcactgactcagttgcttaggacccagcaacttcggggtcatggtttttgagactctcrgtaaggaaataaatatatttacagtatctgcttgggacacttgtagatcacagtccactgccttatttttaacaatattatccatatatctgtttttataccactgacccatctatctttcttattctcatgaactgaattttaaatttttttctcacctatttttaataatttcccctgataaaactttgcggttaaaaaaaaattcctgcaatatcccccaaattagaatagcaatgaaaacaagaaagtaaaattactatcatcttattcttataatatctaagttgtggaataccctattttcttagaatcataaaattttagaatgggaaatgtccttagagaatttgacagttacaatacagtgcggagtaactagaatgctttatgaatggctcattctaattcag

SEQ ID NO: 279764 - DNA, 639 bp, Homo sapiens
aaggaatttgtaatatttcagagtttttatgataggcaccaatttatagctatgtaactatctcggagacgtggtagcaaaatgactaagcagatgggtttagaamcagagtgctcagtaaaaatcccagctctcccctttatcagctgtgagctatatagccagttatttaaaccctttctgtttcagtttcttcatctttaccataagtttgatgtgagaatcaaatgaataaatatatgtaaagcacttggaacaattgcacagtgttttactgtgttttgtattgtcattctcaaaagaatcacagatgagtttaacttctgaatgctcaatcttgccatggggagagagaaaacctctcaagaatggggaaattttttgcctgtccagacctgggtgaacaagtctgtctaacttgaggtttcattgagtagccagtcccttgaggttctcaccctgagctagattccaacttgtcctctgtgagagttctgcattgtcaccttggctagtctgaactaaaatttcaataattctcctttttgtatatttgcagttaggatgggtcaaaaggagactcttgcaaagtttttggaaggcaggcaggaggcagcagacgttttgtagttgacacat

SEQ ID NO: 279765 - DNA, 639 bp, Homo sapiens
aaggaatttgtaatatttcagagtttttatgataggcaccaatttatagctatgtaactatctcggagacgtggtagcaaaatgactaagcagatgggtttagaaccagagtgctcagtaaaaatcccagctctcccctttatcagctgtgagctatatagccagttatttaaaccctttctgtttcagtttcttcatctttaccataagtttgatgtgagaatcaaatgaataaatatatgtaaagcacttggaacaattgcacagtgttttactgtgttttgtattgtcattctcaaaagaatcacagatgagtttaacttctgartgctcaatcttgccatggggagagagaaaacctctcaagaatggggaaattttttgcctgtccagacctgggtgaacaagtctgtctaacttgaggtttcattgagtagccagtcccttgaggttctcaccctgagctagattccaacttgtcctctgtgagagttctgcattgtcaccttggctagtctgaactaaaatttcaataattctcctttttgtatatttgcagttaggatgggtcaaaaggagactcttgcaaagtttttggaaggcaggcaggaggcagcagacgttttgtagttgacacat

SEQ ID NO: 279766 - DNA, 454 bp, Homo sapiens
gattgcttcgaatgacaagcccaccataaacatttctgtacgtaggtatttgcatacttttctgattatcctcttaggataaattccagaagagaaattgtttagtcaagtgatatgctcaattaagttttttatttgtttgatcagaataggtgttccgatttcctcccctaccagctgtgtatgaaatgactcgattcttcagaacttccttgatattttaaatcaaggcacccacaatgaattgcagtggtttgttctgtgaattaaactggacttactattgcttttagaggtctctaaatgctgtctattaagccaattggctgctttccccttcaggtgacatctccatagccagcttttaaactcttagggtcagtgactgaagccagagcctttccagttctagttccrctgcacacctccaagaacctccatcagggccatcctc

SEQ ID NO: 279767 - DNA, 597 bp, Homo sapiens
ggattataggtatccaccatcaagccyggctaattttagtatttttgtagagatggggtttcactgtgttggccagactggtcttgaactcctgaccttaggtgatctgcccgccttggtctcccaaagtcctgggattacaggcatgaaccaccgtgtctggcccaaggacaccaatttaacaactatctattaatacatttaaaaagcacatttatatgaaccaaaaataggataaacactcacagttgttgattttaacttcatatcactgaaagaggcactgaagaagccaggaaagacagtcattaatcagtaacaccactcctccccttttcctcagtagtggctacatggcacagagaaagagtctgtgtgcttgagggagggaggacacagcaattgtgagacattgcattgaactcagtgctgctctgtcatggcagaaacaaaactgggctgaactctgctgatgcctgtccacgaagggagtatgtaaacccgacctagccagaggggtatcacacatcccagtagtcagaacttgatttccagtgagcctcaccaccatggcctaaagtgctctgaggccctaaa

SEQ ID NO: 279768 - DNA, 597 bp, Homo sapiens
ggattataggtatccaccatcaagcccggctaattttagtatttttgtagagatggggtttcactgtgttggccagactggtcttgaactcctgaccttaggtgatctgcccgccttggtctcccaaagtcctgggattacaggcatgaaccaccgtgtctggcccaaggacaccaatttaacaactatctattaatacatttaaaaagcacatttatatgaaccaaaaataggataaacactcacagttgttgattttaacttcrtatcactgaaagaggcactgaagaagccaggaaagacagtcattaatcagtaacaccactcctccccttttcctcagtagtggctacatggcacagagaaagagtctgtgtgcttgagggagggaggacacagcaattgtgagacattgcattgaactcagtgctgctctgtcatggcagaaacaaaactgggctgaactctgctgatgcctgtccacgaagggagtatgtaaacccgacctagccagaggggtatcacacatcccagtagtcagaacttgatttccagtgagcctcaccaccatggcctaaagtgctctgaggccctaaa

SEQ ID NO: 279769 - DNA, 597 bp, Homo sapiens
ggattataggtatccaccatcaagcccggctaattttagtatttttgtagagatggggtttcactgtgttggccagactggtcttgaactcctgaccttaggtgatctgcccgccttggtctcccaaagtcctgggattacaggcatgaaccaccgtgtctggcccaaggacaccaatttaacaactatctattaatacatttaaaaagcacatttatatgaaccaaaaataggataaacactcacagttgttgattttaacttcatatcactgaaagaggcactgaagaagccaggaaagacagtcattaatcagtaacaccactcctccccttttcctcagtagtggctacatggcacagagaaagagtctgtgtgcttgagrgagggaggacacagcaattgtgagacattgcattgaactcagtgctgctctgtcatggcagaaacaaaactgggctgaactctgctgatgcctgtccacgaagggagtatgtaaacccgacctagccagaggggtatcacacatcccagtagtcagaacttgatttccagtgagcctcaccaccatggcctaaagtgctctgaggccctaaa

SEQ ID NO: 279770 - DNA, 597 bp, Homo sapiens
ggattataggtatccaccatcaagcccggctaattttagtatttttgtagagatggggtttcactgtgttggccagactggtcttgaactcctgaccttaggtgatctgcccgccttggtctcccaaagtcctgggattacaggcatgaaccaccgtgtctggcccaaggacaccaatttaacaactatctattaatacatttaaaaagcacatttatatgaaccaaaaataggataaacactcacagttgttgattttaacttcatatcactgaaagaggcactgaagaagccaggaaagacagtcattaatcagtaacaccactcctccccttttcctcagtagtggctacatggcacagagaaagagtctgtgtgcttgagggagggaggacacagcaattgtgagacattgcattgaactcagtgctgctctgtcatggcagaaacaaaactgggctgaactctgctgatgcctgtccacgaagggagtatgtaaacccgacctagccagaggggtatcacacatcccagtagtcagaacttgakttccagtgagcctcaccaccatggcctaaagtgctctgaggccctaaa

SEQ ID NO: 279771 - DNA, 536 bp, Homo sapiens
gaaagtaagggaagagaacaaagtctctgcctggtaatccaaagattcttctggatcttttycaaaataatcaatgtggtacctctaaaagactccaaaaagtacaacattgttgggcttggggtggcccctaatgcagatacagcttttattaaaacacccaagtccttttgaatacttggaaagccttcccaaaaaaggaagaatatgaagaaggccagactgagaagactgcaataaatacctaactcttcaatgcctggacacagacaaacatccacaaacatcaagaccatccagaaaaacatgacctcaccaaatgaactaaataagtcactagagaccaatcttggagaaacaatgatatgtgacctttcagacagggaattcagaatacctgttttgagaaaactcagtgaaatccaagataacatagagaaggaattcagaatattgttcagataaattcaacaaagagattgaaataatttaaaataatcaagcaggaattctggagttaaaaatgcaaacgacat

SEQ ID NO: 279772 - DNA, 536 bp, Homo sapiens
gaaagtaagggaagagaacaaagtctctgcctggtaatccaaagattcttctggatcttttccaaaataatcaatgtggtacctctaaaagactccaaaaagtacaacattgttgggcttggggtggcccctaatgcagatacagcttttattaaaacacccaagtccttttgaatacttggaaagccttcccaaaaaaggaagaataygaagaaggccagactgagaagactgcaataaatacctaactcttcaatgcctggacacagacaaacatccacaaacatcaagaccatccagaaaaacatgacctcaccaaatgaactaaataagtcactagagaccaatcttggagaaacaatgatatgtgacctttcagacagggaattcagaatacctgttttgagaaaactcagtgaaatccaagataacatagagaaggaattcagaatattgttcagataaattcaacaaagagattgaaataatttaaaataatcaagcaggaattctggagttaaaaatgcaaacgacat

SEQ ID NO: 279773 - DNA, 1201 bp, Homo sapiens
gaaagtaagggaagagaacaaagtctctgcctggtaatccaaagattcttctggatcttttccaaaataatcaatgtggtacctctaaaagactccaaaaagtacaacattgttgggcttggggtggcccctaatgcagatacagcttttattaaaacacccaagtccttttgaatacttggaaagccttcccaaaaaaggaagaatatgaagaaggccagactgagaagactgcaataaatacctaactcttcaatgcctggacacagacaaacatccacaaacatcaagaycatccagaaaaacatgacctcaccaaatgaactaaataagtcactagagaccaatcttggagaaacaatgatatgtgacctttcagacagggaattcagaatacctgttttgagaaaactcagtgaaatccaagataacatagagaaggaattcagaatattgttcagataaattcaacaaagagattgaaataatttaaaataatcaagcaggaattctggagttaaaaatgcaaacgacatwgaaagtaagggaagagaacaaagtctctgcctggtaatccaaagattcttctggatcttttccaaaataatcaatgtggtacctctaaaagactccaaaaagtacaacattgttgggcttggggtggcccctaatgcagatacagcttttattaaaacacccaagtccttttgaatacttggaaagccttcccaaaaaaggaagaatatgaagaaggccagactgagaagactgcaataaatacctaactcttcaatgcctggacacagacaaacatccacaaacatcaagaccatccagaaaaacatgacctcaccaaatgaactaaataagtcactagagaccaatcttggagaaacaatgatatgtgaccwttcagacagggaattcagaatacctgttttgagaaaactcagtgaaatccaagataacatagagaaggaattcagaatattgttcagataaattcaacaaagagattgaaataatttaaaataatcaagcaggaattctggagttaaaaatgcaaacgacatactgaagaatgcatcagagtcttttaatagcagaattgatcaagcagaagaaagaattaatgagcttgaaggcaggctatttgaaaaaacatagaggagacaaaagaaaaaagaatagaaaacaatga

SEQ ID NO: 279774 - DNA, 536 bp, Homo sapiens
gaaagtaagggaagagaacaaagtctctgcctggtaatccaaagattcttctggatcttttccaaaataatcaatgtggtacctctaaaagactccaaaaagtacaacattgttgggcttggggtggcccctaatgcagatacagcttttattaaaacacccaagtccttttgaatacttggaaagccttcccaaaaaaggaagaatatgaagaaggccagactgagaagactgcaataaatacctaactcttcaatgcctggacacagacaaacatccacaaacatcaagaccatccagaaaaacatgacctcaccaaatgaactaaataagtcactagagaccaatcttggagaaacaatgatatgtgacctttcagacagggaattcagaatamctgttttgagaaaactcagtgaaatccaagataacatagagaaggaattcagaatattgttcagataaattcaacaaagagattgaaataatttaaaataatcaagcaggaattctggagttaaaaatgcaaacgacat

SEQ ID NO: 279775 - DNA, 1182 bp, Homo sapiens
aaactgttaatcggcagtaataaatcacctgaagatagaaaactctctggtaacggtaagtacacagaaaatcaaagaatattataayactgtagttgtggtttgttaactactcttcagtagaaagactgaaagtagaaagatgcaccaatcaaaaacaataaatgcaatgactttttaagacttagacaataaaataagatataaatagaaacaacaaaaaggtaaaaagcagggggatgaagttatggcatagagtttgtattagttttctttttgcttgttgtttgtttatgcaaacagtgttaacttgttatcaacttaaaataatgggttatatgattgtatttgcaagcctcatggtaacctcaaatcacaacagatacacaaaagataaaacgcaagaaattaatcacaccaccagagaaaaaacacctccactaaaaggaagacaggaagggaggaaagaagaaaagagcagatcacaaaacaaccagaaaacaaataacaagatggcaaaactaattggactaaagtctccaatttgattggagagtttgattggactaaactctccaatcaaaagatatagagtggwatgaccttgcctggatctgataagtttcagacttagaagtgaacagtaaagacatttgcatccttacacatgccccctgacaaataaaacaatctataaaagcacagacagtgctactcaatagtacacaggcactggaagtaaaatagattgcaggtattatagatgtaagattaattttaaaatgttttgaaaatgagctttaattaaaattgcactgaaatggagacagawtcactgattgaatgcttcctattggcaatatttttctccttccattggaaaatgtcctaagccaagtttcctctcttgtgacataaagaaaataatgtgatctgtcctctttccagagaagttgtgattgtcacatactgcaagatatgtgaaaacattttgaaaaatgaagtgttgtaagttgagttattattcttagtattaaaaagaagagaggagtaatagggtggaaaatgggaagagaaagatctttagaatcaaccaatgtgaaggctgaatattaatggcatttctctccttgtgcaatggtgagaaattcccttcactcctctaagcaaaaatgtcagtct

SEQ ID NO: 279776 - DNA, 1130 bp, Homo sapiens
aataatttacatatgagttttacccaccccattttctgcgggaaggaacaaatagatatctatttgatttatttttatcttatccttttaaatattgattttgtacaaatattatatttgtacaacataatacaatttataaatagataaatacacatacatcaggattgcatgctaaaaaccataatagcatacaggagaggtcaggaatatagttttgtttcctatgaatgagctacttatttctgcaaagagggcattctrttccaaagtcccaggccatgctcacttgtccattcagtatcatctaatatatggcaccaagtcagcaattaaaagtgccttagtaactatactacaaggctacagtaatcaaaacagcatggtactggtaccaaaacagatatatagaccaatggaatagaacagaggcctcagaaataacgccacacatctacaaccatctgatctttgccaaacctgacaaaaacaagaaatggggaaggggattccctatttaataaatggtgttgggaaaactggctagccatatgcagaaaattgaaactggaccccwagcattaggagaaatacctaatgtagatgatgggtcgatgggtgcagcaaaccaccatgtcacgtgtatacctatgtaacaaacctgcacattctgcacatgtatcccagaacttaaaatataatttttttaaaaagtgccttattagaatacatacatccttctacttaaacgatgagtccacactgttggcatcagatctggaagacagagattacacaccctgaataaatgggtctgttgaggtcatttgacttagttggtaagctcctgaaaggtggtgatgtagtttatagtgtacttgttctctcacattctatctagcataaacctgtacaaatgatcctctggagttccaaaagtataggggtgactaatgttctcaaagatactgaaggattatacaagaatacaatgcctcccaatcaacctwgaagactatcaatcatgctcagttttgtgaattcttggaacagtgcagtactccattagaaaagatacttcattaatttcagtatttcctccagccaggtttgacaacaaattattacag

SEQ ID NO: 279777 - DNA, 536 bp, Homo sapiens
gtcttccttttctttatctgtaagatgaaggaattgaagtctaataccccttcaaaatttctctaacagagttagaggtctacatcaagcaatgcatgctaggcatcctaacttgctttccaatgatggattgttagctaaaccaccccaaccctcagcccgtaaaattgaaagccctcttcctctgaactcatgttcttctctctacaaatcttttttctaatttttaatttttgtggggatgtagtaggyatatatttatggttacatgagagattttgttataggcatgcaatgcataatattcacatcagggtaaatggggtatcaatcaccacaagcatttataatttatgtaacaaacaatccaattatattcttttgtttatttatttatttgtttattttagacaatctcactctgttgcctgggctggactgcagtggtgcaatcttggctcactgcaaccttcatgtcccatgttccagtgattctcctgcctcagcctcccaagtagctgggattacaggtgcat

SEQ ID NO: 279778 - DNA, 582 bp, Homo sapiens
gctccactaagcactgtcccagtggggactctgtgtggggcctccaaacccacatttaccctttgcactgccctagtagaagttctccatgatggttccacccctgcagtaggcctctgcctgaacatccaggcttttccatacattctctaaagtctaggaggaggctaccgagcctcagctaatgcactctgtgcacctacaggcttaacaccacgtggaagctgccaaggcttatggcttgcaccctctgaagcagtggcccaagctgtacctgggcctckttgagccaaggctggagctgaagtgacagggatgctgagagcaatgtcctgaggctgtgcagggtggcagggccttgggcgtggcccatgaaatcattcttccctcttagccctccaggcctgtgatgggaggggctgctgtgtaggtctctgaagtgccttcaaggcctttttcccattgtcttggctatcggttcttctttacttatgcaaatttctgcagcctgattgaattcctcaccacatggtcaggctgcaagttttccaaacttttatgctttgcttaccttctaaatat

SEQ ID NO: 279779 - DNA, 543 bp, Homo sapiens
cccaaaggcagagcatgccaaatggtgggacatgcagggagaaggactggtatccgggaagggtcaggagttcatccatattaggagttcttgtgtctcctagaacccacttgaaaaaatcagagcataccagttattcttcaggttagtaaatgcgtgtgacctttattagagacaggcaaactcagcagggtatttcaggagaaataaattatccctgtgaataatttgtactttcctggaaattaagagacatgtggaaatgtaagaagacaaaaggcagtattgaattaggaaaaagrgaatcatagtttaagtagataccttttgtctgctcagtgggaaagcagtgtgccaacatctattttaggacacattctgtacctgggcaaagtaaaagagaatggggagtattgcattatgaaaaggcacaaagacctaagcagtaatatcagaagcaagacattttccccagtaaagtcttggatgtaggtcttcaaagaaaaacagataaacaacttcaagtgcattaatatgttgtgg

SEQ ID NO: 279780 - DNA, 1640 bp, Homo sapiens
tgtttaaggtgggacagaagctaggctgccatgtgactatgaacttggttagggcaggttcatgccagggtgtctcatagatgtgttgccagctcctgtcacagtgtctggccgataacagctgcttaaatatttgtgacatggatcagttgatgagtggatgataagraagtgttggaaattaagcatagatggaacattttcaataaatttgccaatgaagaaatggggaaaaggttgttagtgggaggaatgttcatttttcttttcagacgtgtgtgtgtgtgtgtgtatccttagataacctgtagagaggagagatgaatgatgctggagcagaaagggtaggatgaaatatgaattcctctggtatgctgctaattgtttaataactggctctccaaagaacgggactcctgatttgtagtgtttgctaatgtaaatactcccactgtggctgattgcaagctacgagtgtgacttcactgaccatggagttgtgagagctgtcatagtccgccatgatgccatgtttctaccagacggatgcaatagacataaataacctcaaaagcatagataatagcaaagtgaagcaaaatgccaactcaagagwtatgataacacttaattcttaactgatgaatgccatccttgttatgtctcaaaaggcatatttagagttattcttagtttctgagactaacagctgaccttttttaaattaaaaatttttgatgtattttgaatatcatcactttaataaacaaataattaggttgaaaagcaaataataaagacttaatttactagctttttagatagatgaccttatagtcatatggtaggatgtgtttcattttgtagatttgtgaatttttgatactatttatattattcaaaccatgatgtttataactttatatataagcttggaaatgcatattgactttgacgtcaccctaagctacagtcttcatgagcgacctgtcattaaagatttgcccttagtgatttaacctatataagtcttggtaaagtgtttaaaataaacataagtatagwcttttaagagctgaaggcaattaatatatataatttggaaaaataaataaataatacaatcaaacccaaacagccagccagagttggatggaaggaataatgtttgtgtcttttgttaagagctagacatgcwcatggcttctgacccaaacttaaacaagcaagcaatacagtattgaaagtataaattacaaaagggcaccaaatggaaacacagcagctgatcacaaatgataaaggcaaaggacatgaaagttaatgccaaaataagaggtggtatgacatcaaaagagaccccaaaataacaaagggaggaaaattagtctttgcatttgaaggatgcatttgatccacgtgaagacacagtagaaaaaatgcttaactcctatacattcatttcatgatttctacatacatcacctttcccctggcccccccgtccttttcccttccctgagatcatcagttatcttacaggtgccactttccattccacaaaaattatcaaccaggacagccagtcttcactggttcwcctcctactcatcaccagcaagcagagctgtgacaaatgt

SEQ ID NO: 279781 - DNA, 442 bp, Homo sapiens
catggcttctgacccaaacttaaacaagcaagcaatacagtattgaaagtataaattacaaaagggcaccaaatggaaacacagcagctgatcacaaatgataaaggcaaaggacatgaaagttaatgccaaaataagaggtggtatgacatcaaaagagaccccaaaataacaaagggaggaaaattagtctttgcatttgaaggatgcatttgatccacgtgaagacacagtagaaaaaatgcttaactcctatacattcatttcatgatttctacatacatcacctttcccctggcccccccgtccttttcccttccctgagatcatcagttatcttacaggtgccactttccattccacaaaaattatcaaccaggacagccagtcttcactggttctmctcctactcatcaccagcaagcagagctgtgacaaatgt

SEQ ID NO: 279782 - DNA, 1248 bp, Homo sapiens
gcattttaaaatctaaatacttgtgtagacagccaaactctgtgatagcattaatactatgctgctaaacataaggcttctcaagggcaggataggagcagaattgttttcactaagctcatatctacaatgctgaatggaatctaaaaaggcatttgctttccttctcattcctttaytcatctaacaaatatttattgaattctattatataatgagctaagcactattctgggtgttggaatacatgaataaaagaacaaagttccctgctctccttgtgagtgatccctgagacagacttagcagttcctagacttacacatttctgaactttagagttgagaggttctgagaagattccaagtttactccaacaataggttctaagtctttgcaagtatagctacaaaaaagtatgcctatttaaatacttcactctctctggtcatcatgttaaaaaaaaaaacaacagtcaagtgttcattaactctcctgccttttaactaagccctggtttttatcaatggatctctaacttcaaagtaaagatacagtgcaagcattcctgaactcccctgggaaaaaatccttwgcagcttttattacctactatttaccagctgctcacttcttttgtagcgaaatgaaagagcaccatttctctaagatagatagtctatgtaagaatgattttatctctctctaaagatgctttgcacagcactcacactcttgcatgcttatttaatggacttgcctcaggcatggccattccaaatcccatgaaatggtatctttttagggaatggtaacaacagcattaaawggggacattaaaatagaaagggattggaagggagaataaacataactgaatgatggctagtgagggcaaactttggaggaaggatttatatggattttgaagagaactagacttactaagagcatagaatcctgacaattacattgttagatagccacaggaatttattgagtatcttcaaggagtagtatctcagaaattaaggaggacatggaaaaggagtgagaactttcctaagcacattgtatacattaatggaatatatacaatgggaaaaatttatgtgtagctaatactgcatttctatgatgtatatttgggagagaaatagatcagaggaagagactagcagccacgtaacattgtactgttccctgcatttatcttttcctgtggaaatgtaggttgctctctgggcc

SEQ ID NO: 279783 - DNA, 475 bp, Homo sapiens
ttgcagtgagccgagattgcgccattgcactccagccccggctgacaacagtgagactctgtctaaaaatcaaacaaacaaacaaacaaacaaacaaaccataccaaaacaaaaaaaccttgtttttaaagtaatatagtaaagtaaaaatgtgttctctgtcaaatttgtaaaatactaacttttaaaaagcctttctaggcatttaacaaataaagtaacatgaatttaaacactatgggtgcgttttatgtgaatttgaattatttcaatttaaaattgtacagtayacaataaacttttctttaatgcacaaaattttagatcatgagaatccccaaattaaacattaatcacaaatcacataatttaaaaactggcaggcccagtgggtcattgatactctttcatggcatgtgatggcttcattttagctgataaacaaaaatacgttttctgtcccgtcaggactagt

SEQ ID NO: 279784 - DNA, 1179 bp, Homo sapiens
gggcctttgctggtgaccagagagctctctttatgcacaacargggagggcgcctttcatgacaaagctgcctccaacaccataaactaccttattggggaaatgatgcggctagcccgaaagggggaagagatttttcaaattataattttcagagtttgcctcaggaaaaaggcgccaaacaattagtttcagggagagaggtggcgtgatgaggtgtggcacggggaagggaaaggggtttagaactgtgtccaagctatttaggagagaaaggggagagtcccggggctgtgaaaggggcgaggaggagagagcagctgggccagggcgagcgtttgaccacacccactagccactccctcccagctgcccgcagagccacatcgaatcgaaacagcagtggcagcggctaagattccgaaggcaggagtcgccatggcaacgggattcatcttgcaggcaactccgcttcgattcactgggtcctgctcgaatctcaagaaactaccagcaaaacggtcacggtggcatttgctcttgatgctctccagaaagtggagatgaaggagaggggaatggagttcaggcatcacwcgttccactagcaaaatctctagaagactgtgcatcttgtgaaaaaaaggttcacaattaagatttcagacaactccctactgaagtgttggtggaactcttcttatcatttattttctcctttcattctgcaacactaagttgggttcaagtgaaaaaatatttatgaaattagttgaggatctcaggggagaggaaatgctttgttttgctcagagagatgtttagcgatgaattctgatgttcttttaacaagcctgttctttatagacaagacccacttttctcccccgaaagaagatagctttgaatgttgctcttctgtcctcagcwacttcttccatttcaaatattatctaaaatgaactctgacaatataaattttcccctggccatcagatcaaggatataatcactgatattctaactaatgggtagacttaatgtaacgcagttcatggtggaaaaatattcagagagaaacttgacctgggatgattctaaaggctcttctaattttataactgtgtaaagcttttagactgaaacataatcagtgagcctgaaatttattgagtcaat

SEQ ID NO: 279785 - DNA, 582 bp, Homo sapiens
cgttccactagcaaaatctctagaagactgtgcatcttgtgaaaaaaaggttcacaattaagatttcagacaactccctactgaagtgttggtggaactcttcttatcatttattttctcctttcattctgcaacactaagttgggttcaagtgaaaaaatatttatgaaattagttgaggatctcaggggagaggaaatgctttgttttgctcagagagatgtttagcgatgaattctgatgttcttttaacaagcctgttctttatagacaagacccacttttctcccccgaaagaagatagctttgaatgttgctcttctgtcctcagctacttcttccrtttcaaatattatctaaaatgaactctgacaatataaattttcccctggccatcagatcaaggatataatcactgatattctaactaatgggtagacttaatgtaacgcagttcatggtggaaaaatattcagagagaaacttgacctgggatgattctaaaggctcttctaattttataactgtgtaaagcttttagactgaaacataatcagtgagcctgaaatttattgagtcaat

SEQ ID NO: 279786 - DNA, 550 bp, Homo sapiens
gctggtctccatctcctgacctcacgatctgccgcctcagcctcccaaagtgctgggattacaggcgtaagctaccgcgcctggcccattatttttaataatagtttcttctatggtataaaataatttaattaacattctattttggaacttttaagttgttttaaattttcttttgttttcttttttttatagagacagggtctcactgtgttgcccagactggtctcgaacccctgggctcaagcaaaagtgctgggattataggcatgagccactgcatctggcctccttttctttttattaacaaggctgtggtaaagattcttcatatgcatctctgggtgatgagcttggatttttaataaacaaaaatgtagaagcagaaactaacaacactcattttccactgcccagaattaatgactgccaatgtttcaacacatcatttcccagtcttttcatacatamaaatatacaaatattcttcttttaaaacatataaaaatatacaaatattttttcttttttcttttttttaaaaaaaagg

SEQ ID NO: 279787 - DNA, 631 bp, Homo sapiens
gatttctgcaaactgctgatctggtgctaggtacatactgaagacatctaaggaaagtggctggaagttcagctagtacttttcatttattccttaatttggtttgtataccctgattggatcaattcctgactcttccccacaaaaagaaattcgtccaccacacgtacaaaaagattaaagttgtattgtgtgtggccaytgggatgcagttctttcagttcctggagagctgaagccctcctgtgtttccagtgctggagaggcagtagcttgatcaaaacacagatttacacagatttaaagaaacacgtgttaaagtagtggaattaaagtcaaaagaaaccatccattttctacacaaagtagctggaaaaggaggagacgagatgagacatcggtcttctagttcttcccaatatctttgtgagaaaaggggtaaactgggaagggaagcagtggctgggcactgggcctgaagatgtgagagggaagagaagttagatgtcttctttcttttactgtggttgattaaatatacagtaaagtgagcattggatttccagggacccactttgctaggtgttaagatttgggagagggaaccagtaaaagtaaaaaaactagactt

SEQ ID NO: 279788 - DNA, 479 bp, Homo sapiens
gcaatgtcctattgatgttcctaatccattgaataggaaacaaatgaaacggttatgctaacccactgtgttttgggatactgtgctgtacaggaataggtaatcaaaatattctgatgaagtgctgataacagtaactcatacaattcttatgattataaaggtcaaactaagtaagagaactgatgaataaaatttctcatgtcaagaaatttgtaaggctgctgtaataaagagggacctctttttcaatttttttttgtaattcttcagttatagttccatctgaaatgatttggcatgtagccatatagtattttctacttttaaaagataagcctctatttaaataaaaaagtataaacccrctggtttttacttcagtctttctaagatgtacactattggccttctgaataaactaagctgggttactcttttaggcctagccttagaaataacttttcttctgtagattc

SEQ ID NO: 279789 - DNA, 590 bp, Homo sapiens
aaatatccatcattagatggcatgctacatatgattgtagatttttatcagaaaatatgtgtaattatcttagaaataatggttatagtagttaaacatttatttttttaattgttaactttattcagacttactcagggactgaaactgagctctaccaatgtaaacaccaaaaagtgtggaacagggggaatgcaggaatctaaaatagggagaagggaaatayaggtgttagagacaaaagagacaggcatgtttggatacttattcaaaggggtctcaggcttgttctaaatgtgatctcaatgaaaaagaaaaatttttctgcttcttttgagcaccaaatctatgattaagaatttgctcctttggattctagcctaaacctgtaatatttttcagctgtttgagggcacaactggaacaggggttaaaacacaaagttaaaaataccatccgattttggtgttctgaattctaaatttactaatgcctccctagactgtagctaggttgatcatagttgacgttccatcaaaatatatatggtgcatttcatatttgctctttcacatatataaatatatcat

SEQ ID NO: 279790 - DNA, 517 bp, Homo sapiens
tccaataagctattaaatttgaattgaaaagataaaatattgttacaaatattttatactgtgtgacatatgacatttttattrtcatagaatcaaagcacaggtcaacttttaaaaattttttgatataagcaaagaaacacctgcttttgccattttgttatttggacttgaaatcaaattaaagtgtatccatataaatatgcagacattgatacagacagaaatgcacataggaaatagatattgtaagagattcattgcatgaatagtctatttttcattccacctagtatctataccccttgacactatctacccacactcattctgggcttcattattgaattattttggccagtcggaagcttgagaaagcacttttgcttttacattttttttctttttgggttcctcacaacactatgagtacctactgagagcagactaatggagcaatgtgagcaacaagtggagtcatcccagctaggtcatcctagagcaaccagcctacacc

SEQ ID NO: 279791 - DNA, 517 bp, Homo sapiens
tccaataagctattaaatttgaattgaaaagataaaatattgttacaaatattttatactgtgtgacatatgacatttttattatcatagaatcaaagcacaggtcaacttttaaaaattttttgatataagcaaagaaacacctgcttttgccattttgttatttggacttgaaatcaaattaaagtgtatccatataaatatgcagacattgatacagacagaaatgcacataggaaatagatattgtaagagattcattgcatgaatagtctatttttcattccacctmgtatctataccccttgacactatctacccacactcattctgggcttcattattgaattattttggccagtcggaagcttgagaaagcacttttgcttttacattttttttctttttgggttcctcacaacactatgagtacctactgagagcagactaatggagcaatgtgagcaacaagtggagtcatcccagctaggtcatcctagagcaaccagcctacacc

SEQ ID NO: 279792 - DNA, 592 bp, Homo sapiens
tttgtaagtacatatttaaggtcatttggaaaaaatgccagaaatgggtactgtattttttacaacgatctcaattaaccacagaagaaaacatatggtaatgatggaggttgttagttattaatgctaaatataacccatcatttaccatgtatttaatagtcccataaaattggctcaaaacttcatcctgagcatgtgaggaaatccagtgcctctctctttatcattcaatttcttggcaagygggaaacattacttggctatttctcacttcattttcttggtttctctaaatccaatccagttataccatgataactgaaactttactcttaataacagtattctgatacaaatgttcaatagaatgtatgatctcaatttttcttaaaaagaactcaaaagagttacaactcaacaaagcagaggaacagaacccctgaccgtacctgtaggagttttactgatactcatttttatcacttggctgtgcccttccaaccttttgctcttcccttttctttaaattggaattaacttttgatctgtattttcttagcattcactgaaattctttaagatgaccatt

SEQ ID NO: 279793 - DNA, 592 bp, Homo sapiens
tttgtaagtacatatttaaggtcatttggaaaaaatgccagaaatgggtactgtattttttacaacgatctcaattaaccacagaagaaaacatatggtaatgatggaggttgttagttattaatgctaaatataacccatcatttaccatgtatttaatagtcccataaaattggctcaaaacttcatcctgagcatgtgaggaaatccagtgcctctctctttatcattcaatttcttggcaagcgggaaacattacttggctatttctcacttcattttcttggtttctctaaatccaatccagttataccatgataactgaaactttactcttaatmacagtattctgatacaaatgttcaatagaatgtatgatctcaatttttcttaaaaagaactcaaaagagttacaactcaacaaagcagaggaacagaacccctgaccgtacctgtaggagttttactgatactcatttttatcacttggctgtgcccttccaaccttttgctcttcccttttctttaaattggaattaacttttgatctgtattttcttagcattcactgaaattctttaagatgaccatt

SEQ ID NO: 279794 - DNA, 1139 bp, Homo sapiens
ttacaaacctatctctgatgttagtcaatgttttgacaaaaataataagagtaacagagagggaaagaaagagagaaataacgaaagaacaaaaataaacagtaggaggatgaagagttttccttaactctaattggaaaaccaagttaaaaaaaatgtaacttaagacatattcccaatttactttctgagaatcattkgcatacttgcaaaagaggactaattatttaattttaggcagatagataagtagatggaatatggtactgttcaaatataaaatcactaattgttgtagaacattctgaagatgttttacacagtataagttgattatcatgaattaggatgtgtgctcatcaagcaaggataagagctaaaatattatttgatctatcaaaagttttagggaaagctttgaagacttattacattaattatcattttatcatatgctaatcacactaagtatgattctatattttcttttacaatgtatgttttttaattatatcaagtgaattcaacagatttaacagaaaggtcaactcggtagattttgagttttcwttacaaacctatctctgatgttagtcaatgttttgacaaaaataataagagtaacagagagggaaagaaagagagaaataacgaaagaacaaaaataaacagtaggaggatgaagagttttccttaactctaattggaaaaccaagttaaaaaaaatgtaacttaagacatattcccaatttactttctgagaatcatttgcatacttgcaaaagaggactaattatttaattttaggcagatagataagtagatggaatatggtactgttcaaatataaaatcactaattgttgtagaacattctgaagatgttttacacagtataagttgattatcatgaattaggatgtgtgctcatcaagcaaggataagagctaaaatattatttgatctatcaaaagttttagggaaagctttgaagacttattacattaattatcattttatcatatgctaatcacactaagtwtgattctatattttcttttacaatgtatgttttttaattatatcaagtgaattcaacagatttaacagaaaggtcaactcggtagattttgagttttc

SEQ ID NO: 279795 - DNA, 512 bp, Homo sapiens
acagacaatttgcaatgaaaattgacataagggtctaaaatatagagtatgcaatttctagatcaatcatcctaatttaaaacctccattacctatgcaatcaaaccttacctctctctctgctcccagtacctggaggcttagaggcttccatgcctattttcactcctcctcttccttcactcttcttcctgtatctactctagagttaagagtggggaatgaaaaaattggagaatgtattaatttcctaaagttgctttaacaaagcaacttggttaagcagtgtaccacaagcagtgtagcttaaaacaactgaaatttgatacgggagcatggcagggaagtgctgggtagagaagagyggggtacctggcgggggctccaccctcgggcttgtgcccaagaaactaagtgaggagaagcactcctcttttcatgcccaaatgttgcactttcaaagatcactctggcccaccacgccccccatcctgtgcccataaaaactctga

SEQ ID NO: 279796 - DNA, 512 bp, Homo sapiens
acagacaatttgcaatgaaaattgacataagggtctaaaatatagagtatgcaatttctagatcaatcatcctaatttaaaacctccattacctatgcaatcaaaccttacctctctctctgctcccagtacctggaggcttagaggcttccatgcctattttcactcctcctcttccttcactcttcttcctgtatctactctagagttaagagtggggaatgaaaaaattggagaatgtattaatttcctaaagttgctttaacaaagcaacttggttaagcagtgtaccacaagcagtgtagcttaaaacaactgaaatttgatacgggagcatggcagggaagtgctgggtagagaagagtggggtacctggcgggrgctccaccctcgggcttgtgcccaagaaactaagtgaggagaagcactcctcttttcatgcccaaatgttgcactttcaaagatcactctggcccaccacgccccccatcctgtgcccataaaaactctga

SEQ ID NO: 279797 - DNA, 634 bp, Homo sapiens
ggtgatgaacataataaaacactgacaagaatttaccatgaacagcataattacatgcatattgtctcattagtcatgacaagcaaaatgtatctgtaagtggttgtaaagtccttaaaaatgcaaatgtaaaacttagatttttaggaaaaaagacaatgtaactattaccagattaaaatatgcattatctactattactgtaccctggccacaataattatggaattgttgaacttaaaaaattatttttaagcaacacatttagtatttaaattgatagtgtagaaatgtaattgtaatttccattaatatgttagaatataagactttatgtctgtgcattctttcaacatcaatgcaaataaaacacacatacccacaaatgtcaggacctcagctaaacatccactcagaaaagaatatatctacttttatttacatagagaataatctgtattgttataggcataagttttatcctgtcaagcatgrttttgaatggtgttcttcattgtgaaaaatgacaggaaacacaaagttcaatacgtgtgtcttatgtgagaaaaaagcagagaaagaattagagaaaaaattttgcactacagccaaaaacatactaataaccccaaat

SEQ ID NO: 279798 - DNA, 545 bp, Homo sapiens
tattgtgaatagtgctgtgataaamatatgcgtgcaaataccgtttttatatagcagtttcttttcctttgagtagatacccagtagtgtgatggctagatcaaatgctaattctatttttagtcctttgagaaatcttcatgctgtttaccgtaaagattatactaatttacattctcaccaacagtgtatgagagttctcttttctccacaattttaatttgttgttgtcattgctcagattgttctattgttaaccattgggtgagttttcaattggttcctgtgtctttgtgacataaccttattaatatgggtattttatttatcattttcttacattctggtactacaaggtgctctagtttcatcttatatatttccagtgctgtcttataatcagccatttctctaaggagccctatttccttttattagaaaatggtattagaaaccaagaactgggtgctattgtgttcattgtttttggagtattcttatatcttctcagtcgaaagaaaaaggaactgtttgtgggtatatga

SEQ ID NO: 279799 - DNA, 358 bp, Homo sapiens
tagttttgctttcttaaaagtttccctgtgcttctcaaccttctcttttctgcttcattcctggttaccactgatatttttaccattgccacagcctgcctattctagaatgttayatcattggaatggtacaattaacatcccttttaaactggagtctttcatttagcaatgtgcatttaaggttcatccatgtctttttgtggcttgagactcattatttttttttactgcagaataacattttattttatggctgtgccacagtttgtccattaacatattgaaggctatctttgttacttccagtttttggataccattaataaagcatctatacacatttgcatgcaggttt

SEQ ID NO: 279800 - DNA, 593 bp, Homo sapiens
atcaaagatatatcttttcaaatctaatcaggcaataatgaattcctaaaggaggtttctaatttgtgggaaacaaaacatactcaacatttgggagcttaatgtaaagaaatcagagttcagatctattgtttgagagtatcctcaacactgcaatccaagttcttgaggggactaatctgtttctgagtgatggcaaagattttattattggatctcactgaaaccaccaaaattgttgactgcctgttctctcatatattaccagtgcaacctaccaatcaacaaaaggaaactaattaaatctattacaatatggaagaacactatcttgaccggcatggatatatagataatctatatgtgaagttaaaaaatatactgatatataatatagataaaacatgacacagatatagatgtcagtgtaggtatagacatagatatagatagaaagatatgtatagagatgccaaaaacacatgttgaaaataaattaactgaaagyttttgttttaaatttatttgagtagtaagatcttgttctataatgccttctttataattgtatatttcctaattaactagcttta

SEQ ID NO: 279801 - DNA, 576 bp, Homo sapiens
cacatactaaatgaaattaaccttaccttttrcagatcatgtacctacatttaaatctgattaaaaatgtattaattgtttaattaatataaagatttttatattctctgtgactttataagcaaacaatatatcagtagaggcctgcaaatactttcaatcattcataccttatttatacaacagtagattgtgatttaattgacttgttatctagaattaactaggtcagtggttttaaacacaaatattcactctttttttaccagtaataattattttactaccattagatagtccaagctttggaacataaaaatgagtatttatgcttgcaataattcttacaattataaattatgtctgatctatatatgaatcttgaattttaatggttataaatttagtaattttttgttaagttgaaaaattttggtaaatgtaaatgcacagaggcctggggtatgttttttacctaattatatggttatcttacatttaaatgcaaaagatttttcacaaaactataaactgtcagaagtagcttttatgattttatatttctggcacctagca

SEQ ID NO: 279802 - DNA, 576 bp, Homo sapiens
cacatactaaatgaaattaaccttaccttttgcagatcatgtacctacatttaaatctgattaaaaatgtattaattgtttaattaatataaagatttttatattctctgtgactttataagcaaacaatatatcagtagaggcctgcaaatactttcaatcattcataccttatttatacaacagtagattgtgatttaattgacttgttatctagaattaactaggtcagtggttttaaacacaaatattcactctttttttaccagtaataattattttactaccattagatagtccaagctttggaacataaaaatgagtatttatgcttgcaataattcttacaattataaattatgtctgatctatatatgaatcttgaattttaatgsttataaatttagtaattttttgttaagttgaaaaattttggtaaatgtaaatgcacagaggcctggggtatgttttttacctaattatatggttatcttacatttaaatgcaaaagatttttcacaaaactataaactgtcagaagtagcttttatgattttatatttctggcacctagca

SEQ ID NO: 279803 - DNA, 641 bp, Homo sapiens
catataaatacagatctaatttggctttcagatttgaacatttaattttataaaatatttattgtgatataattaatgtatcataaaatacactcttttagagcatacaattcagtggtttttaagatagtcacagaggtgtacaactctggcaactctaaaattttagaatattttatcttccagaatagaaatcctgtacccattacaggcagtttctgttctcttcaaatttcaaacccctggcaaccagtagtcaactgttggtctgtatgaatatgcttattttaaaaatttcatagaaatgtgatcatacaatatgtggtcttgtgtcttttttcaattartatactttcaaggtttatctgtgttgtttcttgtataccacttcattcttttcattgattaatgataatatatagatatataatattttgttaattcattaatcatttcatgaaagttttcattgtttccaccttttggctattacaaaaaatactactaaaatcattagcatacaagctgcacacaaggacattatgagtttctcttgggtatacgcctaagagtgggatagctgaatcacagaaaagtcaatccattgcagtgagtatgttaaccaactctaactatcatgt

SEQ ID NO: 279804 - DNA, 641 bp, Homo sapiens
catataaatacagatctaatttggctttcagatttgaacatttaattttataaaatatttattgtgatataattaatgtatcataaaatacactcttttagagcatacaattcagtggtttttaagatagtcacagaggtgtacaactctggcaactctaaaattttagaatattttatcttccagaatagaaatcctgtacccattacaggcagtttctgttctcttcaaatttcaaacccctggcaaccagtagtcaactgttggtctgtatgaatatgcttattttaaaaatttcatagaaatgtgatcatacaatatgtggtcttgtgtcttttttcaattagtatactttcaaggtttatctgtgttgtttcttgtataccacttcattcttttcattgattaatgataatatatagatatataatattttgttaattcattaatcatttcrtgaaagttttcattgtttccaccttttggctattacaaaaaatactactaaaatcattagcatacaagctgcacacaaggacattatgagtttctcttgggtatacgcctaagagtgggatagctgaatcacagaaaagtcaatccattgcagtgagtatgttaaccaactctaactatcatgt

SEQ ID NO: 279805 - DNA, 604 bp, Homo sapiens
tgtctaggaaatgggctctcaccagacaataaatctatcttgatcttgtacttcccagcctccagaactgtgagaaataaatttctgttgtttataagccacccagtttatgatgtttttgttatagcatctcaaacaaagaaagacaagaagcaaactaaatgtaaattaatagtgaatggagaggacaccccagaagctgggaaatgayggctgactagagacatcagaggtcagttcttctaagaaagacccaacttccaagtgaacaatcatggtccaagtagactactgagggaagaattccagaacctatcagagaatctgcgggaagaagctggggcacaaaatacaaggaagcaagagttttgcagagattgaatcccagggagcttgaagccttgtgaaaggggggtgggagtgatttttgctccccttgcccctgtggcagactaccgactgcagaactgttggagaggccctcttcccttgtaagctaaagcacttttgtgggaggtgatgtgggaaattctggaggacaaagcaccatgtgtccagtttacacaggttcactcacaaaatacccaggcccgagccaaggcca

SEQ ID NO: 279806 - DNA, 604 bp, Homo sapiens
tgtctaggaaatgggctctcaccagacaataaatctatcttgatcttgtacttcccagcctccagaactgtgagaaataaatttctgttgtttataagccacccagtttatgatgtttttgttatagcatctcaaacaaagaaagacaagaagcaaactaaatgtaaattaatagtgaatggagaggacaccccagaagctgggaaatgacggctgactagagacatcagaggtcagttcttctaagaaagacccaacttccaagtgaacaatcatggtccaagtagactactgagggaagaattccagaacctatcagagaatctgcgggaagaagctggggcacaaaatacaaggaagcaagagttttgcagagattgaatcccagggagcttgaagccttgtgaaaggggggtgggagtgatttttgctcccctygcccctgtggcagactaccgactgcagaactgttggagaggccctcttcccttgtaagctaaagcacttttgtgggaggtgatgtgggaaattctggaggacaaagcaccatgtgtccagtttacacaggttcactcacaaaatacccaggcccgagccaaggcca

SEQ ID NO: 279807 - DNA, 604 bp, Homo sapiens
tgtctaggaaatgggctctcaccagacaataaatctatcttgatcttgtacttcccagcctccagaactgtgagaaataaatttctgttgtttataagccacccagtttatgatgtttttgttatagcatctcaaacaaagaaagacaagaagcaaactaaatgtaaattaatagtgaatggagaggacaccccagaagctgggaaatgacggctgactagagacatcagaggtcagttcttctaagaaagacccaacttccaagtgaacaatcatggtccaagtagactactgagggaagaattccagaacctatcagagaatctgcgggaagaagctggggcacaaaatacaaggaagcaagagttttgcagagattgaatcccagggagcttgaagccttgtgaaaggggggtgggagtgatttttgctccccttgcccctgtggcagactrccgactgcagaactgttggagaggccctcttcccttgtaagctaaagcacttttgtgggaggtgatgtgggaaattctggaggacaaagcaccatgtgtccagtttacacaggttcactcacaaaatacccaggcccgagccaaggcca

SEQ ID NO: 279808 - DNA, 604 bp, Homo sapiens
tgtctaggaaatgggctctcaccagacaataaatctatcttgatcttgtacttcccagcctccagaactgtgagaaataaatttctgttgtttataagccacccagtttatgatgtttttgttatagcatctcaaacaaagaaagacaagaagcaaactaaatgtaaattaatagtgaatggagaggacaccccagaagctgggaaatgacggctgactagagacatcagaggtcagttcttctaagaaagacccaacttccaagtgaacaatcatggtccaagtagactactgagggaagaattccagaacctatcagagaatctgcgggaagaagctggggcacaaaatacaaggaagcaagagttttgcagagattgaatcccagggagcttgaagccttgtgaaaggggggtgggagtgatttttgctccccttgcccctgtggcagactaccgactgcagaactgttggagaggccctcttcccttgtaagctaaagcacttttgtgggaggtgatgtgggaaattctggaggacaaagcmccatgtgtccagtttacacaggttcactcacaaaatacccaggcccgagccaaggcca

SEQ ID NO: 279809 - DNA, 603 bp, Homo sapiens
tgggagcatatctggagagaggagtacatatctacaacagtggaggcagctacccctgttcctgctggagcttggaactggtgtgcctagagacaacctttccaggactattgggagcagctgcacctccactgacagtgggcccactggcctgggcttgcatgaagggtggggccaataactctccctgcatggagaagcagcattcctgagtagaatacaggcaaaccacagagctgtctgttttgagctgaggaaagrggtcctgcctcaaggccagtttggtggtagccacagggcaggtgttttccatggccctcaatgcattgcagcctaaagataaaagacagtttctatctaaactgaataagtcatgaggcctgggacaggggtgcgataataaagcaaatcatgttcccgcctgcccagaacatgcagctggtacagccccatgcactgagaagggttatttttacaagttcataggcttgtttgggacctaggcatgtctctttccaaagagctggtccagaaatgctgtgacctatctccctaattggacctcctcccaagggagtcccacggcatgaaacacctagcaac

SEQ ID NO: 279810 - DNA, 621 bp, Homo sapiens
tggattcttttcagatcttgcccatttttaattgaatcacgttattattgagatttaaatatttctgtgaatttggatacaatcacttatcagatagatgttaagcaaatattttctttagtctgtggcttctcttttgattcgcttcactatgtctttacagaaccaaagaacttacttttaatacagttcagttcatcaatttttaatagattgttcttttgatgttgtattaatatctaaaaacacaccacaaacacagagtcacataaattttcttctatgttttcctctgctagttttatagtgctgttttatatttggktatatgaactattttgagttactttttgtgaaaggtgtaaggtttgtgcctacattcattttttttaatatgaacatccaatctttttagtaccatttgttgtaaagactatactttatcctaaagactatactttatcctaaagactatactttatccattgaactgcctttgctcttttttcaatgattagttaactatatttttgtagatctatttctgggttctctattcttttccactcatttatataaccttttgataaatatatcaataacatggtgtacagattataa

SEQ ID NO: 279811 - DNA, 621 bp, Homo sapiens
tggattcttttcagatcttgcccatttttaattgaatcacgttattattgagatttaaatatttctgtgaatttggatacaatcacttatcagatagatgttaagcaaatattttctttagtctgtggcttctcttttgattcgcttcactatgtctttacagaaccaaagaacttacttttaatacagttcagttcatcaatttttaatagattgttcttttgatgttgtattaatatctaaaaacacaccacaaacacagagtcacataaattttcttctatgttttcctctgctagttttatagtgctgttttatatttgggtrtatgaactattttgagttactttttgtgaaaggtgtaaggtttgtgcctacattcattttttttaatatgaacatccaatctttttagtaccatttgttgtaaagactatactttatcctaaagactatactttatcctaaagactatactttatccattgaactgcctttgctcttttttcaatgattagttaactatatttttgtagatctatttctgggttctctattcttttccactcatttatataaccttttgataaatatatcaataacatggtgtacagattataa

SEQ ID NO: 279812 - DNA, 512 bp, Homo sapiens
atgttttcctctgctagttttatagtgctgttttatatttgggtatatgaactattttgagttactttttgtgaaaggtgtaaggtttgtgcctacattcatttkttttaatatgaacatccaatctttttagtaccatttgttgtaaagactatactttatcctaaagactatactttatcctaaagactatactttatccattgaactgcctttgctcttttttcaatgattagttaactatatttttgtagatctatttctgggttctctattcttttccactcatttatataaccttttgataaatatatcaataacatggtgtacagattataatagcttaattataaccaaaccatgcatttggttatatcagtcctcttacttttctcttcttcagtattgtgcagaaaattttagggtgttcttttgtttccatataaaccttccagttaatttgttgatacaaaaaagcttgttggaactgctgctatgattgttttgaatat

SEQ ID NO: 279813 - DNA, 635 bp, Homo sapiens
tattatcctttttattaaaatatttaataacatgattataacaacaactgggtcatagagtaaaagtattaatgaaataattcataatgaataattatagtgaataataaatatatattacttcacaggcttcaatattagaacattagaggaataaaagcttaagttctgtaatatttgaggaattatatttatatatgtatttattccataaaaacacaattaatgtgtaaacctcaaaattccatgagaaagatcaaaagcaaaaaataaatgttgctatgaaactgcacacataaaaattacagatggaaaatatataatgaaaattgaggtagataggaacacaacmatgaatattctacaagtacagaagcatctcttttcttgcatttcacacttttagaaaagtttctttcctcaaaataatctgtctcctaaaatgccaagatagcaggaaaatataaattgcagcatatatagatgatatatcaagaatcaacgaccaactagcactactacttttgaccttcataaagtgaaaaatctccctgaagttcagtttgctcatttgtaaaacagattaatttctgctttccttctgttaaaacatgttttagagatcaaataagatc

SEQ ID NO: 279814 - DNA, 598 bp, Homo sapiens
aattagaaaaatgagtgcaaaaaatgaggatattataatacacatatagagggtataaccctgagaatagatgaatcgttgagacagaggagataacaagatcacgggtggagataaattcatgaaaattagagtttgtggtgtgtgaggatttctatagttctatagaaattgtcaataattaagactaaataagaataataagagtaatatgaagacagaagcaaaaataaaggccccttgctgttagtacatgatacagaaacaatgaggtgtaaagtgtgatacaacatgatgacagacttcaacacgggaagtttgaaaggaaagtaaaaaaaaatatgaagttgcaatgaggtactaagaagtcacccaccctcttacagccaccctgacctggaggctgtaggaaagagaaaaataactcttcttaagaaggggcaggattatcagtatcctatgacaaaagccaagagataatgtgaagaaggcttttagagccaaagttgaggatacgaagtgtttccatattrgtggaatgttgaaggccttccagattcatggaaaggcaagagaagggatggaaaggagatgaact

SEQ ID NO: 279815 - DNA, 647 bp, Homo sapiens
tttcttttcttctgcaaattaaagacgtgtgcaattgcataatagttcattattaatttaataaacatgttttaaggtaaactgctattatctaagtctgaaaatggctctacaatgatcacttagccttctttgttacttttccttttccactgttttttcttgcttgctttttgtgtttttaaaaatatttcaaattttactgtagatttgaagagtacattgcagatttctaacatcggtattttgcatgatgacgcagtttggagtatgcatgatcccatcactcaggtagtgagaacagcacccaataggtagcttttcagcccttgctctcctccctctctacccactccaatagtccctggtgtctattgttcccatctgtatgttcatatgtagccagtgtttagcttctacttacaagtgacaatatgcagtatttggttttctgaccctgcattaatttgcttagaataatggcctccagttgcgtccatgttgctgcaaaaacatgatttcattctttgttgtggctgcatagtattccatgatgtatatataccacatttttttaaatccaatccacccttgatgacaycaaagttcatcctatgtctttgctattgtgaatagttccgtgatga

SEQ ID NO: 279816 - DNA, 606 bp, Homo sapiens
tgtggtttttcagcattgtcatggatcttgtagagcttctttgaaatccctgctttgaattctttctctgtcacttctgactttccagtttggtaggaactgttggtggagagagttagtgtgatcctttggtgatgtcactacattcatatttttcacagtgctagaagtcttgcattggctcctcatctgaagacactggcacttccaatttttgcaattattttcatgtggatagcaaattgtgtccttgcctttttctctatgatattactgtatttcatttcagttcctccccttccttcagggagtgactgtagagaatgctgagtagggtcttttggctttgcttctatggccctatgcacttctgtcaccagttttttactgggttgcgtagtttgacytacaagccagtagattgtgcttataagtaagagccaactatggataatggggctgggtatatacctgatccttgtttaccaggagaagctctctgttgcctcagacaatgggttaagccatgaagtgcaaagtgacctgagctgtgtgctcagacactgagtggggagaagatggatgaggaaggaccatgcaagccca

SEQ ID NO: 279817 - DNA, 541 bp, Homo sapiens
gtggctcatgcctgtaatcccagcattttgggtggccaaggtgggcagatcacctgaggtcaggagtgcgagaccaacctgactaacatggtgaaaccccgtttctactaaaaatacaaaaaattagccaggcatggtggcacatgcctgtaataccatctacttgggaggctgaggtacgagaatcgcttgaacctgggaggcggaggttgcagtgagctgagatcacgccattgcactccagcttgggcaacaagagtgaaactctatctcaaaataaatacataaataaatgaataaattttacaaatacatttaaaaygtaaataaattaacaaaagtttactgcatgatattaaaaatattccaaaataaatgtgcagatataccattgctagtaaataggagcctctatgaattaatatataaatgtatctccaaatattttatacttttaatatattctcttaaaaatccccaagttttatgaagatttatagcctatttcaaaatatctatgaacaaacaaatatcatgaaca

SEQ ID NO: 279818 - DNA, 373 bp, Homo sapiens
tgttatatacatgcaatggaatagtacttattctttaaaaagaatggactcgtaccatttgtracaacatggatgaacccagaagactccatgttaaaggaaataagccagtcacagaaggacaaatactgcatgatctctcttatgtaagatatctaaaataatctagctcgtaaaagcaaaaaggtggttgccagggtttggaggagggggccaataaatagttgtcactcagtgggtataaagtttcagttatgtaagatgaataagttcaagagatttactgaaaaacatcttgcctatatagttcacagtatggtatcatgcatttaaagatttgtaaagagaatatatctcttgtgaagtgttatta

SEQ ID NO: 279819 - DNA, 584 bp, Homo sapiens
atgcaaattaaaatttcaattacctacaactaatgggatggccaaattttcaaataagaaaatctgattatatgtgttggtaagaatatggagggtgggacttatacattattggtaggaatataaatatttcatcacctttgtaaaataatctggtggtgttcatgctgctaaaagtagtaagggtaggggtttctaagggtgaaatagcaactggacagttttattcatttatttattttttaccattcagtgatggttatataggtatcttttgtttatgaatgttcatctagctggatagtcatagtttgtgtagtttgttgtacattctacttyagtaaaaaaagaaaaatatggcaggtacaattttgaaaaaatgctccttatccatattgtcaaactgctttataaaaaggaataaagacatactagttctaatagcaatatataattatattatgtcactgcatatattagcacaagttttaacatttttaaaagttaccaattaaaaaattaaaaagtaacatgttagattgcatttatgattattaaagaaataaaaaatgattatatatgtt

SEQ ID NO: 279820 - DNA, 584 bp, Homo sapiens
atgcaaattaaaatttcaattacctacaactaatgggatggccaaattttcaaataagaaaatctgattatatgtgttggtaagaatatggagggtgggacttatacattattggtaggaatataaatatttcatcacctttgtaaaataatctggtggtgttcatgctgctaaaagtagtaagggtaggggtttctaagggtgaaatagcaactggacagttttattcatttatttattttttaccattcagtgatggttatataggtatcttttgtttatgaatgttcatctagctggatagtcatagtttgtgtagtttgttgtacattctacttcagtaaaaaaaraaaaatatggcaggtacaattttgaaaaaatgctccttatccatattgtcaaactgctttataaaaaggaataaagacatactagttctaatagcaatatataattatattatgtcactgcatatattagcacaagttttaacatttttaaaagttaccaattaaaaaattaaaaagtaacatgttagattgcatttatgattattaaagaaataaaaaatgattatatatgtt

SEQ ID NO: 279821 - DNA, 554 bp, Homo sapiens
atgatgttagagtcattgttctgctattcaaggtaatacataggatatccaggtmttgtgcgtaattgcagttacctgtagccacatttgatgtaacttacgttcagtgttttgtttcagtggcttgatgtccagagccgccttcatccacccagtgttaaagtaatataatccctaaaggggattcattattgatgtggactggttgtttcccattctgtgacaactttaaaataataatacactatgtatgtaaggtattttatagaagtagtgcaagttctaaaaagaaaataattttttttctaaaatttttgtcgagagatgtcaccttgtaaactacatatgttttcatcatggcttttgttctatctttatagttcaatgtacacttgtgacgtttatttagacaattttattctgattgtatataccttttcctcctacaaaaaacgtgtcagcctgtaatatttataattttctacctcactttacttgtattatagctgactgtaactgaatattttattgataaaattattgtaatgctatag

SEQ ID NO: 279822 - DNA, 507 bp, Homo sapiens
gtttgagaagccattagaactgttatctctgttactatctctattgtgatggcaagttgatttagagctctaattctagggagatgtttcaattgaaacatcaaagttcatgtacttggatatgccacttcttaaatcaccagagtatttttgttcagtcttcatgttacagatacagacactgtccttttcgtcacaaacatacagatgtgtgccacagagtaattatcacaatgcctacatcttagaactgtaaaatgactcactaatgctgactgccaatttcctttgtctgtcatatgaactagccagacactagaggatatgtttatgtatgtcttaaatgatttttatcccacagtattaggttatgtaccatcttggtattggaaccatcctacagtatagctcacacagtatcaaaatyatttttggaaaaattatgctaaacatctatatttacaactggcttactctacttttttatgtctacatttgatcatactg

SEQ ID NO: 279823 - DNA, 530 bp, Homo sapiens
tgttaacaacaacaacaacaacaacaacttatgttttcatcagtttactggcaatttctagagcattaggtgattcctcttgggggcaatatttcatatacttagggagcccatttctaatttcaaaaataaaaatatctagtttttttatttttttatttatttttccataggttattggggtacaggtggtgtttggttacatgagtaagttctttagtagtgatttgtgatattttgttgcacccatcacctaagcagtatacactgcaccctatttgtagtctttcattcctcacccctcccccctcccacacttaaccacaagtccccaaagtccattgcatcattgttatgcctttgcatcctcatagcttaattcccacatatcartgagaacatatgatgtgtgattttccattcctgaattacttcacttagaataataattttccaatctcatccatgttgctgtgaatgctgttaattcatttcctttttatggctgagtagtattccatcatatatat

SEQ ID NO: 279824 - DNA, 545 bp, Homo sapiens
tttttctgttttttatctgtttggtagatttttctccattcatttattttgagcctatgtatgccattgcaggtgagattggtttcttaaatacagcataccaatgggtcttggttctttaaccagcttacccctctgtattttttgattaggtcatttagcccayatacatttaaggttaatattgatatgtgtggatttgatcctgccatcatgatgttagctggttattttgtagacttgtgtatgtggttgatttatagtgtcactagcatgtgtacttcagtgtgcttttgtaatggttggaaatgttttcttttttttccttctacatttagtgcttccttaagaagcttttgtaaggcaggtgtggtggtaacagattccttcagccttagcttgcctaaaaaatatcttatttttcctttacttataaagcttagtttggccagatattgaataatggcccccaatctcttctgacttatagggtttcagctgagaggtacactgttagttttatgggcttccctttgtaggtgacc

SEQ ID NO: 279825 - DNA, 603 bp, Homo sapiens
attacaaaattcaatagcattctttaacccagatacaagtataaaatgtaacaaaataagatgtttagaattgcaacacaaactatcatcgaagagttatcttaaagatactcaataaccacaagctatttataatagctgttttagagtacttgtctactaattctatcatgtatgtcatgactgtgaacttgtctgtttaataatatgctatttgttgctctcagtcatatatttatgctttgttaactacttcataacttttttttctgattttaccttgttggatactgggctatttttttttaattctgttaaatatttggacgctttgatctggtagagagatmtttgtaatttcatccattagaagcttgcgtttaagtttattagatcacattctaacattttatttcggagtaaattttattccaccaaagaggccatacacatctaaagactctatttggatgatgtttggagacctttaaccatggcaaaaaaaaaactatatacatatgtatgatttttatatacgtatgtatacatgaagtaactattattggaccacctactatttctagttgttttatgacctgtttc

SEQ ID NO: 279826 - DNA, 577 bp, Homo sapiens
ttctgtgccctctttcttttcaagttacctccacagatttatgtcaaaatattatgttcattatacttttgcyagtggcttgctttgatgcaaccataaatgaatatcattacactttacaaagataatttattttctaggctttgctgtcatgctatatgtagcttgtatagttaaaacatatagaaactaaaatattttggggcctaaagaaagtttattattttgtttttggcttttcaaattgacattctccattgtatctctataatttaaggcaaccaggtatgacatgcgcaatttatttgctaagacaaaccagatatgctggataaagctctttggggcagtcttgcaactctctccttgtccccaaattcagcccatttttattagcttctatctggctcctgattctttgctgcatctgtcattctcaacttgactttgttctttctcttaaggataaggataagtcttaaggataagactctccttatcactgtttacattgaaggatacttagtcattaggatgtctctgtaagactttatacccttaagggaagactttaatg

SEQ ID NO: 279827 - DNA, 599 bp, Homo sapiens
aatttttctacttataaaattgtgataataagaataattgcttcagagcattgttgtgagaaaattatatataaaatcacaccataaataatacatataatatacttagctcagtttatggatcacagtaatagttcagcaattgcatattattattattgataatagtaaccgttattatgcaattgctccgtattgctcctcatcctgtgttcccattcttgataaatgttaccaccattcgaccaatttttagaccaatgtcctgaattatcattgacacatcttcactcatcttatttctatgcattgccgtattcttaagttcaagccaccatcatttcttccttgaattactgataacttcttccttgaattactgataaatgttaataaattagatataattcattttcataattccttgaattactgcaatagctaactcatctccctacatttcccttgcatactgtgcaattcatactcataatagagctggagagaattttggaatatttaagtctgatcatgttacctcttrcttaaaatgtctcagtagcctctcataacttctaatatgaagtctaaaatccttg

SEQ ID NO: 279828 - DNA, 566 bp, Homo sapiens
tgtccttttgctgattgatttgagggatgtgattatgtagtacattgatgctgactcaycctgagtaaaaaattcgttacattctcatttcctcctactaatatatggctgtggtctttcttacaaaggcctttaaattcaccaagtataagctctaatgaaaatcttgtgtatttttaaaatgtctcttacttgatatgtaaaggaaaacagaacaaaggcattgaagaggtaactcttttggttttaggaatattaaaatgcaatcttcaccagctgtccatttttaaattagatttcagtttttcacatggggtactgtgtgtgttggttagcattggagtaagaatttaaattcttaaaagctttgaagttaattctgtattaagaaacaactgagaggttgagtatggcactatttcttcctgaatctgagatcaagcagatgtgcctctttcaatcagtttttactaccatgagatttaaagcaaagaaaaaaaaaacagttaatgacagttcaaattcacttagtagagtaacgtgttctaaaatggaggattgtaatg

SEQ ID NO: 279829 - DNA, 1133 bp, Homo sapiens
tgtccttttgctgattgatttgagggatgtgattatgtagtacattgatgctgactcaccctgagtaaaaaattcgttacattctcatttcctcctactaatatatggctgtggtctttcttacaaaggcctttaaattcaccaagtataagctctaatgaaaatcttgtgtatttttaaaatgtctcttacttgatatgtaaaggaaaacagaacaaaggcattgaagaggtaactcttttggttttaggaatattaaaatgcaatcttcaccagctgtccatttttaaattagatttcagtttttcacrtggggtactgtgtgtgttggttagcattggagtaagaatttaaattcttaaaagctttgaagttaattctgtattaagaaacaactgagaggttgagtatggcactatttcttcctgaatctgagatcaagcagatgtgcctctttcaatcagtttttactaccatgagatttaaagcaaagaaaaaaaaaacagttaatgacagttcaaattcacttagtagagtaacgtgttctaaaatggaggattgtaatgwtgtccttttgctgattgatttgagggatgtgattatgtagtacattgatgctgactcaccctgagtaaaaaattcgttacattctcatttcctcctactaatatatggctgtggtctttcttacaaaggcctttaaattcaccaagtataagctctaatgaaaatcttgtgtatttttaaaatgtctcttacttgatatgtaaaggaaaacagaacaaaggcattgaagaggtaactcttttggttttaggaatattaaaatgcaatcttcaccagctgtccatttttaaattagatttcagtttttcacatggggtactgtgtgtgttggttagcattggagtaagaatttaaattcttaaaagctttgaagttaattctgtattaagaaacaactgagaggttgagtatggcactatttcttcctgaatctgagatcaagcagwtgtgcctctttcaatcagtttttactaccatgagatttaaagcaaagaaaaaaaaaacagttaatgacagttcaaattcacttagtagagtaacgtgttctaaaatggaggattgtaatg

SEQ ID NO: 279830 - DNA, 566 bp, Homo sapiens
tgtccttttgctgattgatttgagggatgtgattatgtagtacattgatgctgactcaccctgagtaaaaaattcgttacattctcatttcctcctactaatatatggctgtggtctttcttacaaaggcctttaaattcaccaagtataagctctaatgaaaatcttgtgtatttttaaaatgtctcttacttgatatgtaaaggaaaacagaacaaaggcattgaagaggtaactcttttggttttaggaatattaaaatgcaatcttcaccagctgtccatttttaaattagatttcagtttttcacatggggtactgtgtgtgttggttagcattggagtaagaatttaaattcttaaaagctttgaagttaattctgtattaagaaacaactgagaggttgagtatggcactatttcttcctgaatctgagatcaagcagatktgcctctttcaatcagtttttactaccatgagatttaaagcaaagaaaaaaaaaacagttaatgacagttcaaattcacttagtagagtaacgtgttctaaaatggaggattgtaatg

SEQ ID NO: 279831 - DNA, 548 bp, Homo sapiens
cagtcattatttgaatggtttgtgcaattgacatatgcctcagtttttgtttttgttttttaaccaataagcatggaaaaaaaaaacctcctatgttrgtttcttatttttcatatatagaaagtcatatggaatactcctgctatatggtaagtactccacaaattacagttactaggctacagataaagaaatggtctaattttgaaataagcttatgatcttttggaaagtaagtaccttatattatgggaattgggtatgtgaataatcggggctcaatatgaaattttgaagttctaccattctgaattggaaaattgaagcaagtgttgatctgaaatctaaaatgtcatgtgcactgagatcaggatacacgtattcagagagcagaatgaattcaatctcaaggcagagggagttaacttctgtggcctatttatatttctgaaggagtcttccaggctgaaggtcagggcaaaaagtatagtcatttcttggagtgcaaaatccctgtgatgcagacactgttctatttgttgttgtca

SEQ ID NO: 279832 - DNA, 506 bp, Homo sapiens
cgaagctggggacgatattagtacacaaagtacatgttgtgaactgctgcccatatgctggaagaaggcacacatgactagcaagcccccaaaacagggagatgtcaaatgggctgcagttgtttgtgttcaaaggtgcagaagaatcagaaccatttctsacactgagcaaaacttcccagggtctccacagcttcccacatgttctctgttttacctggaatgtccttccaccactctccacctggctaactctttttgaaaacactgttcaaaaatccctcatccgtatcctgaatgtttagttacctttctcctccatagtgttgaaagctcctcaatggagctttccaatggagctcctcctaataaacatgctcattataaatctaaaaaactagtttcttagagctatttttatagcttttcctactgtacacacacttcaggggaaaaaaaaaaaaccagctttatagttgaactaacacagtgcaacttaacacctg

SEQ ID NO: 279833 - DNA, 563 bp, Homo sapiens
tattcccttcccatactaaaccctcattaatttataattcaccgcattgctttaaaagtgctgcacagatttcctgtttctctcacatgcagtgcttctaatagagaaagtcaactcaggatataggttgaaatgctgcttgtcttgagggctgcatgccagacttgatggtgccaaaacatttcaccaattgtctcttagatcattgtaaaggtttcaaagtgctatttcataggctttaagaaagtgaatttacactctaaaacaactctttcactattgactgtaaattgactctggtgtttggaatctggagtcaaagtcaaatggtttcctggtgggattctcttaatttcaaggacaagaactcacagagagaagggtacactttcttcaagtgaagattctgagggcagaggcaaaagaaacacagagaaggaaatgaataccccttctcccatcataactcttytctctgccagtaaatttgacagaacttgggaaatatttgggtacagagatgtagaaaaataagtgaaaatggcttttcaatttttaattac

SEQ ID NO: 279834 - DNA, 632 bp, Homo sapiens
ttccctttgcctttccccttcctttcccttccctcctttcttttttattttttctttcctagctccctctgttccaatctccctgtgaacctaaagtttgctgttagyttagtttttagtggtaatctttctttaaacaaatgtccttgatggataactgtagctcatacatgtttaagtagtactccaaattcatactaaccctacatttttatcctattggccagttccacttgatgtcttatagcattgcatcagaataagctagattaaaactaacattatcaacataattgtcactatgatactcttcatttttgtcattgtcatctgcctacaatcagattctcagctcttgaaaattcttctattctgtttcaatatacatcctatttatttatattcatagttgacacttaataattgtgcatgtttatggggtacaatgtgatgttttgatacatgtataaattgtgtaatgatcagttcaggacaattagcataatccatcaccttagacatcatttctttgtgataagagcattaaaaaacctctcttctagctattttaaaacacacaatgcatcattattatctccagtcatcctcctatgcaatagaccacaagaatt

SEQ ID NO: 279835 - DNA, 632 bp, Homo sapiens
ttccctttgcctttccccttcctttcccttccctcctttcttttttattttttctttcctagctccctctgttccaatctccctgtgaacctaaagtttgctgttagcttagtttttagtggtaatctttctttaaacaaatgtccttgatggataactgtagctcatacatgtttaagtagtactccaaattcatactaaccctacatttttatcctattggccagttccacttgatgtcttatagcattgcatcagaataagctagattaaaactaacattatcaacataattgtcactatgatactcttcatttttgtcattgtcatctgcctacaatcagattctcagctcttgaaaattcttctattctgtttcaatatacatcctatttatttatattcatagttgacacttaataattgtgcatgtttatggggtacaatgtgatgttttgatacatgtataaattgtgtaaygatcagttcaggacaattagcataatccatcaccttagacatcatttctttgtgataagagcattaaaaaacctctcttctagctattttaaaacacacaatgcatcattattatctccagtcatcctcctatgcaatagaccacaagaatt

SEQ ID NO: 279836 - DNA, 532 bp, Homo sapiens
ccattggattgatcctttgaaatgtatctcagatctcactgctttcaactttgtctgactcttatcatcttatgatagtaccaacggttatggtttcctaatcattcttcctgtcattagtttcttcctttttccatccaccttatatatattataaaatccttcacatgaaaaatttatgtaacgcctaatatgtaaaacactgaattaatcatgttattcccaattattayatattccaataatttctctttgaattcaaactcttcaatggggcatttaagatggtgtgccatctgattgagatttctttctatagtttggccatgcatttgcttgagtcaaattctcttcttgttttaaagttcaataataaaattatattttaattttatttttaaaattttttctttaataattctagccatcatgtctcctgtttctcttaattctgacaatttgtgctacacatttaatatctctctcctattccatatattatctattctaaaatactgatttaacatttacc

SEQ ID NO: 279837 - DNA, 1198 bp, Homo sapiens
ttttaaaataatccattgtattaagtgtggttcaacaatcttgagtgtcaaaaaattattgatacaaaatttaaattcctcttatggtatgttttcttctcatacttgctcgccataacatgtataaatttatttctactgaagaatatttgcacttctgttaactgtatgtttgggtgattttttttttagtagatatcctctargcttacattgttacatttgcaaatcacttcaaaacatcaatcaagaagcaaactatgcaacttcatcttaaatgtgatttaacttaaacatagactaatataagaatggcaataaaaatgaaagatcattttaatttcaatatgtttgtaggtttattgtaacaaataagaaaaaaattcgcaagcctaacggggaaaagaaacaagcaacacataaaaatgagcacaactgttatcctaaagtttcataggaactataaccaaaattcctaatttctcaattcataataaataaattactatgtgagaagatgtatcttgtctacaattttggtagtaatactgttgttacaataattttgcactacaatcaaactagaactcaagatcaagaaactcwggcctcatttttaaatttgaaatggaaatgattttattacattctatagaaaattgtataatatcacacattagacctcctaatttattactaaaattatatcagtaaatgaaatcgtccaattctctggtatatttaagaattgtcaacacagaaacagatttaaaaatctcwtattgaaattagattatctgtcacgacggccatactgggaaaggagctttgtgataaaggcctgtgggttcttcatcacagttttaacaaatcacaatttaaaataccttttaaagtaagtgcccattttattgtgcttactttccattatagatcagagtttgagaatatggtgtctgtagccaaattgtttagttttgaaacctgtgtctcctttctccagtttcccagttgggtggcattggggaagttgcttaaaccctcttctgtcctaatctatgcaatgggaataatagcacctatcttgtaggatagctgtgaaagttaaatgaattaatacacataaagttcattaaacagtgtggttgtcagtagtaagctcttaagaggtgttagtattattcaagtatttaaataa

SEQ ID NO: 279838 - DNA, 592 bp, Homo sapiens
ggcctcatttttaaatttgaaatggaaatgattttattacattctatagaaaattgtataatatcacacattagacctcctaatttattactaaaattatatcagtaaatgaaatcgtccaattctctggtatatttaagaattgtcaacacagaaacagatttaaaaatctcatattgaaattagattatctgtcacgacggccatactgggaaaggagctttgtgataaaggcctgtgggttcttcatcacagttttaacaaatcacaatttaaaataccttttaaagtaagtgcccattttattgtgcttactttccattatagatcagagtttgagaatatggtgtctgtagccaaattgtttagttttgaaacctgtgtctcctttctccagtttcccagttgggtggcattggggaagttgcttaaaccctcttctgtcctaatctatgcaatgggaataatagcacytatcttgtaggatagctgtgaaagttaaatgaattaatacacataaagttcattaaacagtgtggttgtcagtagtaagctcttaagaggtgttagtattattcaagtatttaaataa

SEQ ID NO: 279839 - DNA, 572 bp, Homo sapiens
actaaaactactttttctcccacaggataattgtagacrtacattcaaaatagaagtaaattaatggtaatattagttcttctatttttaattaatagattaaacctttggatcacggcatttctcataatctagcagaaataatatagaaaagacttcataagcagattgatcagtcacgcaggcagtatttaacatatttgtaccactgaaaatacatctgtactgtggaccatgtcttggatgcttttgagagtaaaatattagagaaaatttggagaaaatctggttttatttttacaaaactattgactattgaaagagaactttaaaattcagtcactaacttaacaaaattatataaatttgaatgatgtttcatttttactgaaaaataaaccttgtgctcttgaaaccaacatatcattttgagaaataagtctttactgataaaaacagtgcagaattggatttatcacagatctcattattcaatggtacttaatagctgagaacttaatagttttaagtctggtgtcacttctctggacaaaataatcttaaattcttat

SEQ ID NO: 279840 - DNA, 596 bp, Homo sapiens
ttgaaaaaatgtcacccatttctaagacaaatactgtctagttcctggattcttggcatgtaatctaggcttcacgttcttgatgttgtcacccaacaaaataatctttccacaaacatataaaaatatatggagttctcaattttccatggaaatagaatctagggttaatgtggtgaaataattttcattattaacaagccttattttagtatatgtaaataggattagattgaaaagccaagttttatagtaaaagatgtgatttctgtaaaagagagtattctgtaaaagctggaggacaagtgaagcttaaaggagcagcttgtactgatgagaaaggggagaggaatgagtggacctctcttcagagmggaaagaaagataagatgaaaagccagcatgaaaaggaacttgctatttaaaattacaacaaactgtttatgtggaccagtagcatcatgatgtaaaataaattttctttactgctttgccatgacgcttaattgataatacattctagtaagcccaaatttgaatctcttctcgataactaacattcagttaatttcttatttcgaagtgggaagagcaat

SEQ ID NO: 279841 - DNA, 528 bp, Homo sapiens
cagtccgccaacttatttgtcttttattgcattgtgttaaatagaaatccatgagtggcagtgaattggactcctaattcaatcatttattagttgtgtaatctagtatgtataagttacctatcactctaagcctccatttgttcatgtgaaaatgagatcaataatcttgcttacagttctttgtggtgggaattaaatgaggtcatgttggtagrtacaatattaatgaaatctataaggaagatggagaactgaagacaaaatattaccattgttcatcccttgagtgcatgatatttacattgaagtttttcatatttgtggtagctggcctccaagatgattctcaaaattatatatatatttctttcttcttttgagatggagtctcactctgttgcccaggctggagtatagtgacatgattcacagtttactgcagcctagacctcctgggtagctgggactacacgcatacatagtcccacctcagcttccctagtagttgggattaccggcacatgt

SEQ ID NO: 279842 - DNA, 542 bp, Homo sapiens
attctaatattagacctgttggccacaaaaatgtggatgtgtgtctctaatgagtcattgaatatgaatgcagtcttcaaaatgtaaaagagtatatacatgtagcttcatcttatcacaaaaaataatttatattttcgatcccctcttcttctctgggtctctgaatatatatgtgtgtgtgtgtgtgtgtgtgtgtgcatgtgtgtgtgtgtgtatacacacacatatatttatayatatatacatatatagtcacagatgtgtgtgtatatatatatatatatacacacatatgtaaaaatacaaatacagacaaaaagaaagaaggaagaagagagggaagaaattttctattgaaagaaagaaagatacacacatatgttggtccagtccatcttataagtcatacaatgtatctagtacaaacattctgacaaggaataagcatatctgtggtggaaacccaatagtagggttcttcgagtctctaaacagactaggggcaacagaattcttctgtatttgggtctccctggatt

SEQ ID NO: 279843 - DNA, 533 bp, Homo sapiens
ttttaactagaaacagttgtatttaattttggtaggttcatattattgatttaagtgcaatcatcgtttctaaacaacactatcaagaatacagtgccatttataatatacgtttattggggtggaaggtaccaggaatatccccagaaaaatatatgggaaaaccttggacttcatcttgccagtgataatggcaagagaccggcctgtatttgctaattttgtttaacatatttgtgacactcatctacctaagtcagtctgtccacttccctgaaatgagtcagcggcttatgatttattaacaaggcagggctttggcctttcacttggaggaacagaatcccaggacgatctgcgggaaccacaacctsaccaagatctcctctacacaaggcaggagccatagtttacccgggggccggtgtcgcctcagcctcctccgggaaagctccgagacagcgcatccagagctagagcgccgcccacccagcggtcctgggtcagctccgcgggatgcaggacaagggtcc

SEQ ID NO: 279844 - DNA, 556 bp, Homo sapiens
ctaatcctttcatttaacttggcatgatatttatataattctaacctccaccttcaccccgatgaaaaagagtgctcagcttaattaaaataaatattctgaactttgagtatattcaaaaggcctttatgtttttcttttcataaatcttgtttkcctggaaaagattttttcccagttgactgaattacttttctgtcttgccactcttggtgtatgaaaaaccctaaaatgacttctagtggcctcagactccttgggaatagagaaaaggcaccacaaatcccgttttgggaaaaatgtctgttttccttatggaaccaatggaattagaggtgaataagtacctctcagaatctgtctttgtcttccagctctacttgtttattaggacctggaatctgttttcccagccctgttcttaaagggcctcacccaaaggctaataatccaactgggaaattagcaaaaaagaaaaaaatataactactggatcttctggttttctgtgggactgcatatgtgttatgcgtgcaatgtctattaaaaaactcta

SEQ ID NO: 279845 - DNA, 556 bp, Homo sapiens
ctaatcctttcatttaacttggcatgatatttatataattctaacctccaccttcaccccgatgaaaaagagtgctcagcttaattaaaataaatattctgaactttgagtatattcaaaaggcctttatgtttttcttttcataaatcttgtttgcctggaaaagattttttcccagttgactgaattacttttctgtcttgccactcttggtgtatgaaaaaccctaaaatgacttctagtggcctcagactccttgggaatagagaaaaggcaccacaaatcccgttttgggaaaaatgtctgttttccttatggaaccaatggaattagaggtgaataagtacctctcaraatctgtctttgtcttccagctctacttgtttattaggacctggaatctgttttcccagccctgttcttaaagggcctcacccaaaggctaataatccaactgggaaattagcaaaaaagaaaaaaatataactactggatcttctggttttctgtgggactgcatatgtgttatgcgtgcaatgtctattaaaaaactcta

SEQ ID NO: 279846 - DNA, 535 bp, Homo sapiens
tggctatgaaaaccatttgccacaacaggaacaagagaaaataacagaaaagtcaaaagaaaatacagcatgcrgctcattattcactaaagcgaattttgtatgtgtttacaccaaaatgaaatgcaaatctccaaaatcttacataagattcttgctctgatttcattgtaacagctctcagaacaatttaaaataaagtcttaattaatgtaaaagcatttacatattttaactagcgtgtctaagtaatgcggatattattgttcttctcaaaaacaattctgggaaatatatgtgaccttaaagatagtcaaatgtcaaacacagagcacacacatacacccacaagctgactgaagctggctgtgattacctcactctgttattttcttccacagaaacagtcattatcttgccctgttctttttggtattaacaggtgatcaccctgccatgtggaaaatctacatattaactgggttaagttcaattcatcccaattttaaatttgaagtaacttcactatattgtg

SEQ ID NO: 279847 - DNA, 499 bp, Homo sapiens
tgggaggatcccttgagcccaggaggtcaaggctgcagtgagtggagattgcgccactgcacttcagcctgattgacagagtgagactgtctcaaaaaaaaaaaaaaaaagaaaaaagtaaaaggaaaacatgtactcctgacatcattcatggtagagacagacatatatgccccaactatttttcaaattctagtgtagtttktacattagaataatggaaaacagtgtactatgaggccagaaagaaggaagaaattaataccaacaaggataacttataaagacttcaggaagtaaggggaaaattatctgaactgcaaagataggtgtaagtttattgagcagagatgtagggagagagggtgaataggcactagctaggaagaagtacaccacagagacagagccataaccatacacaaggagtagagagactagtaagaaattcaggatgactggagggtttcgtatgtatattgcacatatgaaatgtacg

SEQ ID NO: 279848 - DNA, 1245 bp, Homo sapiens
acagttcaagtctatcccggttatatataaattggaaaagtttccttaaatatcaggcatattattttcattgatatttttaatcttccaaagaaraataaaaaaattatctggaataaatgccaaaaaattatttttaaatgtattgctccagagatattcaatgaagtattaatttcaagtttttgcacataagactagaatagaaatattgaataatactaacaagtatgttaagacaaataatgaaatctattttaactatttttaaaagattctctattatatagaaagaaaggtcatggaactcagtacccaaaataaattattgaaattttctttaaactaacaatgtatatttagaatatgttttctgtattttaaacattgtactctagatcattatctttccatactaaaaagctaactcctgtcacaaatattatacattttatgcctaaaaatatctaaatatatgttttagttttacattttatgtgggagtcaaaaatgtcctaaagaaaggcatcttttaaaatttcttaagcatttccatttttctacaaagtccatgttacacttaggttaaaaagaagaatgaaaacccctcaagccagattttwacagttcaagtctatcccggttatatataaattggaaaagtttccttaaatatcaggcatattattttcattgatatttttaatcttccaaagaaaawtaaaaaaattatctggaataaatgccaaaaaattatttttaaatgtattgctccagagatattcaatgaagtattaatttcaagtttttgcacataagactagaatagaaatattgaataatactaacaagtatgttaagacaaataatgaaatctattttaactatttttaaaagattctctattatatagaaagaaaggtcatggaactcagtacccaaaataaattattgaaattttctttaaactaacaatgtatatttagaatatgttttctgtattttaaacattgtactctagatcattatctttccatactaaaaagctaactcctgtcacaaatattatacattttatgcctaaaaatatctaaatatatgttttagttttacattttatgtgggagtcaaaaatgtcctaaagaaaggcatcttttaaaatttcttaagcatttccatttttctacaaagtccatgttacacttaggttaaaaagaagaatgaaaacccctcaagccagatttt

SEQ ID NO: 279849 - DNA, 1040 bp, Homo sapiens
acagttcaagtctatcccggttatatataaattggaaaagtttccttaaatatcaggcatattattttcattgatatttttaatcttccaaagaaaaataaaaaaattatctggaataaatgccaaaaaattatttttaaatgtattgctccagagatattcaatgaagtattaatttcaagtttttgcacataagactakaatagaaatattgaataatactaacaagtatgttaagacaaataatgaaatctattttaactatttttaaaagattctctattatatagaaagaaaggtcatggaactcagtacccaaaataaattattgaaattttctttaaactaacaatgtatatttagaatatgttttctgtattttaaacattgtactctagatcattatctttccatactaaaaagctaactcctgtcacaaatattatacattttatgcctaaaaatatctaaatatatgttttagttttacattttatgtgggagtcaaaaatgtcctaaagaaaggcatcttttaaaatttcttaagcatttccatttttctacaaagtccatgttacacttaggttaaaaagaagaatgaaaacccctcaagccagattttwttgcaaggattggggaagaaaattaattataaggtactggccacactatcagtwaagtttttcttgaggaaactattgctttgtcaaaggacaaatgaacctcattagggagattagtttcagctggtagttttgcattagtacaaactaataatacacacttcaaaagataccctgagtaagattatgaaaattgaaatccatttgttacttcttaatttactaactgttagaaaatgaccactctattacttatcatgaaaccagaaggaaatcaaacactgctcacctttcaactaagtgcctgaaagagaactgttgcagtgtgggctttgtgagtgctgcgatgatgaacttacgcatacaggggttataacttggccacggcattttactcttaggttgaagcatgtcatg

SEQ ID NO: 279850 - DNA, 371 bp, Homo sapiens
ctaaatccatgaacattacagaacacaattgctgtcaaacagaactcatttctatttatgtctttcacctaaaaatttaatgtctttttcatcataactaaacacttgaccatgcactgtggccataacttttgcagtttgaggtgtgacagtaacrctaggatgaattcttttttccttcttcataatttcacaaatttgttcttttcacttaacaacctatgattatttgaatataagccaggtactaattatctaagagatattcactaagtgattatttttcatcgcttaacaatctatgatcttttttcctttagtcaagaacttttatcttttcacttaaagaaagcactttaagccttctcttt

SEQ ID NO: 279851 - DNA, 576 bp, Homo sapiens
gcagccacacccaggacagcaaatgcatacagggaaaaataacagctgccaattgtcatattccctctgaacagttctctgttctctgttctctggaggttctgttagtcctcattacttccacggctcttgtatgctttttaaaatgcaattttcgcaactcatcctgtttctctagcagttgtcagaggaagcattgtcctgacattaccaactacacctaactcaaaagcaagatttttgttttgttttaatcttcaatttctccctcttggccactagttttcttctctgtaagttgaaagttctatccaatcctacttaatacaactttcaacacttatgaaaaaaatactgtctttctggcaaggctcaccttgagtttgtttgtcctaaacatggaatcagttgttccactgmgaatcctgattcctgttagtgaagaatagcattagagaattaggggctgaaatcttggcattaagattgtatttcagattgtttcttgtgacagctaagtaaatgcaacctgaaatgagttataaaaggttatccgtgaaaaaaaatgatgagttc

SEQ ID NO: 279852 - DNA, 367 bp, Homo sapiens
tgtgctgaataggaagaaaatgaaggatttggaccaatttcttgttttgcaggtctttatagtctcattggtctttaatactctcctcattcctctctgaggccttacctgcccacggggagtggggaacccaatccagtcattgcgaggtgactccagctggagtgtctttctactatgtcactatctctagtgatctaccgagagctagagcttgaggaagcaagtgaaaacagtatgtgtttactagatatacacacacagccacttcactgatcttctggaaggagcaaaagcgtacagaaaattcaacagaagaagaaaaaggaaaaasaatggcaagttgtttcacattgagcaggtacac

SEQ ID NO: 279853 - DNA, 1123 bp, Homo sapiens
tatgacagagcatgtttataattgctgaaaacaagatcaggtatctactgaaatttcaggaatttacattgatacatcttatagctggtatctaagaagatcataaaattaacaattttctagaaacatctttaaaaataaataaacttcttataaactgatatttcccctttttcaaaggcaagtttcaacattgagttggaagttttgatctgyatctatgtcatctgctaatatcagacaaatatcatcattcttataggtgtggccacacatttttttggattcaaaagttgtgcatatcaattattaaaatgttttaattttttaagttgtaaagagaagaagtttccaatattgtttctgggtatgctaatgagattacattatttatgacatgaaacaaattattaagcagcttcacaaaagacataagtcttagaccttcccttaaagtttgaacttttctcatttacaaaattacactaatccgggggactaawaacatctttaaaaataaataaacttcttataaactgatatttcccctttttcaaaggcaagtttcaacattgagttggaagttttgatctgcatctatgtcatctgctaatatcagacaaatatcatcattcttataggtgtggccacacatttttttggattcaaaagttgtgcatatcaattattaaaatgttttaattttttaagttgtaaagagaagaagtttccaatattgtttctgggtwtgctaatgagattacattatttatgacatgaaacaaattattaagcagcttcacaaaagacataagtcttagaccttcccttaaagtttgaacttttctcatttacaaaattacactaatccgggggactaaagtttcccaggatatgcaaatttctgaattcactacaccactatgtcatttatttctatgtttctatgtgtgcaataggctttcctataatagtttaggccacaacacccacagaacacagatgtgtgcctttctcaaagtgaatgagcttaacctgaaatggcttatgattcattctgttaatatctgtgcaattagaggaagcaaagctacttttggttttccagacttagcagtaaaac

SEQ ID NO: 279854 - DNA, 620 bp, Homo sapiens
aacatctttaaaaataaataaacttcttataaactgatatttcccctttttcaaaggcaagtttcaacattgagttggaagttttgatctgcatctatgtcatctgctaatatcagacaaatatcatcattcttataggtgtggccacacatttttttggattcaaaagttgtgcatatcaattattaaaatgttttaattttttaagttgtaaagagaagaagtttccaatattgtttctgggtatgctaatgagattacattatttatgacatgaaacaaattattaagcagcttcacaaaagacataagtcttagaccttcccttaaagtttgaacttttctcatttacaaaattacactaatccgggggactaaagtttcccaggatatgcaaatttctgaattcactacaccaytatgtcatttatttctatgtttctatgtgtgcaataggctttcctataatagtttaggccacaacacccacagaacacagatgtgtgcctttctcaaagtgaatgagcttaacctgaaatggcttatgattcattctgttaatatctgtgcaattagaggaagcaaagctacttttggttttccagacttagcagtaaaac

SEQ ID NO: 279855 - DNA, 618 bp, Homo sapiens
tagttcctatataccccatctctcaccacacagtttctcctattaacattttgcattagtgtgatatgtttgttacagttgttgaaacaatattgatacagttattattaatataagtccatagtttacattagggttcatgctttgttgtacagttctgtgggttttggcaaatccatgtcatgtatccaccattaaagtattaggcagaatacttttcaagttcttcatgttttttgttggcttgatagatctttttatatatatatatatatatatataatgtacacatatatatatataaaacaaaacaatatccagtttcatggatgcaccacagtttgtttacccactcacctactgaaaaactgctcacttccaattttagcaattaaaaagaaagctcctaaaaacattcctgtgcaggtttttgtgtgagtctaagctttggattccttggggaaatacccacgagtaccattggtgaatcatatggtaarcctctgtttacctttataagaaactgcaaactgccgtgcaaagtggctgtactattttgactcccaaccagcaatcattgagagttcctgttgctccgtatcctcaccagcattgtca

SEQ ID NO: 279856 - DNA, 582 bp, Homo sapiens
tgggtaatttataaagaaaaaggtttaatggtctcacgattccacatggctgggaaggcctcacaatcacagctgaaggcaaaggaggagaaagctcaccttacatggcggcaggcaaaagagtgtgtgcaggggaactcccctttataaaaaccatcagmtcttgtaagacttattcaccatcacaagaacagcatgggatagacctgcccccatgattcaattacctcccacagggttcctcccatgaagcgtgggaattatgaaagctacaattcaagatgacatttaggtggagatacagtcaaaccatatcagagtctttgcagatgtaattagttaatgtgagatgatacttgattagggtgggtcacaaatcctatgacttttgtccttataagaaaaggaaaagacacatagacgtatgtgtcacatgaaggccatgtgacaatgaaggcagagattggagtgatgcttctacaagctgaagaatgccaaggattgcaggcaattatcaatcacaagtgaggaatggaagagggtctctcagagcctccagaaggagccagccctgcctgtacc

SEQ ID NO: 279857 - DNA, 565 bp, Homo sapiens
tttggtcaaaatcattcaacaagtctctaagaagttccaaacttctccacatcttcctgacttctgagccctccaaactgtttaaactgctgccgttacccagttctaaagttgctttcacattttcaggtatctttatagcaatgccgcactcccagtaccaattttctgtattagtttgctttcacactgctataaagaacgacctgagactgagtaatttatgaagaaaagaggtttgattggctcacagttccataggcttaacaggaaccatgamtgagaggcctcaggaaacttccaatcatggcacaaggtgaagggacagcaaggaccttcttcacacagtggcaggagagagagagagagagagacagagagagagagagagaaagggaaagtgccacttatttccaaacaaccagatcttgtgagaattcattcactatcataagaacagcaaggggcaaatccactgtatgatccaatcacctcctactgggtccctcccccaacactggggatgacatttcaccatgagatttgggtggggacacaaagccaa

SEQ ID NO: 279858 - DNA, 571 bp, Homo sapiens
ccaaactatattactgggtaaaacatttatgggaagaacaatcagcatctgcaaatatgtaggggcatttatgacttgttaaatataagacttcgattctactagtgataatragaaatccttaagttctcatacatatagttttctctctgtttgaaagaacaagttggtttttattcagttgttgatcttttaaatatttgcccaatattaatttggagatcagtgagtgaaaggacaaaatatttttaaaatcatagggtccaggctaaggggaaacttctagcatgtgttacatataaaagtaaaaataataacttctggttaaacctcaggatatctgagcatacctgtgcactctgctgccacacacaatgctcagtatttataaaagtctctattattctgatagctctgtcctattccatcttatttctggtctgatgatatgtgggaatgctgtactattaatttaagcctcttttttttcttgttatctggataaggctagggcaattcaataagtttcaactaattttaaactcttttcatcaaaagtggctcaataatt

SEQ ID NO: 279859 - DNA, 634 bp, Homo sapiens
cacacacaatgctcagtatttataaaagtctctattattctgatagctctgtcctattccatcttatttctggtctgatgatatgtgggaatgctgtactattaatttaagcctcttttttttcttgttatctggataaggctagggcaattcaataagtttcaactaattttaaactcttttcatcaaaagtggctcaataattttggattgaggagcatcttagcttgatgggaaagaaggctttgatcaactagcggcacctggcacagtggaaggttggggttgcagtgttatttgagttcaatttgtgttcaatatttagcatagaatatttagaaagaaatcatcatttcactttgttatcctgtttaaatgcctctagtcgcttctccccatgtcaggtttccattccaattctacatccaatgttatgagttgagtgtcaaataattataaaaatctcaagattttaaaactccaagataccaccacccagagagtgttttgtccttaaaatcaagtcctataattttagaagtaactttatatgttgtytgaaaaatgggattttaaaatatctccattgttttttggagtagtgaccttttcatatgctctgcaatcaatagat

SEQ ID NO: 279860 - DNA, 499 bp, Homo sapiens
  misc_feature (1)...(499): n = A,T,C or G
nnnnnnnnnnnnnnnnnnnnnngaattcatcctatctttaattttagacagtctaagcagaatgtgctttgggggagacatttttgcattacatcctcctagagatcactgagcttcctgtgtttgaatgttaatttctctttttttgctagacttcgacttttttttttttacttttttgctaaacttttcatctatttcattaaatagaatttctaatgctttccttgcctctttgcgctccaggatgctgacaattttaaatattcaatctttttgttttctcacaaatgtcattaagactttgctcactcttttctgttctttttccctttattctattctgcctggattatttcaaaagaccagtcttgaagttctcagattttttcttctgtcagatctagtctattgttgatggtttcaaatatattctctatttcttkccatgaattcttcattttcagagtttctgtctggttccttttttaaaaaaatc

SEQ ID NO: 279861 - DNA, 1008 bp, Homo sapiens
  misc_feature (1)...(1008): n = A,T,C or G
nnnnnnnnnnnnnnnnnnnnnngaattcatcctatctttaattttagacagtctaagcagaatgtgctttgggggagacatttttgcattacatcctcctagagatcactgagcttcctgtgtttgaatgttaatttctctttttttgctagacttcgacttttttttttttacttttttgctaaacttttcatctatttcattaaatagaatttctaatgctttccttgcctctttgcgctccaggatgctgacaattttaaatattcaatctttttgttttctcacaaatgtcattaagactttgctcactcttttctgttctttttccctttattctattctgcctggattatttcaaaagaccagtcttgaagttctcagattttttcttctgtcagatctagtctattgttgatggtttcaaatatattctctatttcttgcmatgaattcttcattttcagagtttctgtctggttccttttttaaaaaaatcwtaaaatgtttaatgtatttatattttatgttactattaagatgggtttgaatcaaccatcttaccatttgtcatttgttttctgtgttcttgttctatctttccggcagtattccacattaatcaaacatttttaatatttcattttattttataatatttttgcataaatacttgctttatttatttaatgcttactctagggattgttgtatgtatttttatattcagtgtattttgaaataatattatacaacttcagttttaaagaaccctacaaaagtatgtacctacttawatccttccattcctaagagctattattgtcatatattttacttttacatatatgatgaatcacaaattatgttattattactatcaaataggccacttttttaaatagagaaaagctcatatttttgcgtgtttttatcaggataaatatgctggtgttttaaaaacaaaacagtaagaaatgggtgaatgtggcaattacaggtattaat

SEQ ID NO: 279862 - DNA, 596 bp, Homo sapiens
aaaacttaataatttaattgttaaatttaatttagtaaaaaatcactaaattaaaatataatttattgatatatatgtagcatagtttactatgctatatatggtaaatatatatattttactatatatatgacatgtgtacctacatatacatctcaataaactatattttaataaaatcataataatttmcctaaggaatgtacccagagatacacataaatatatattatcttacaaaatcaaatacttatggaagaataatgaaaataattagaagcacctgttgatggttattttcatgatgatccagtctttttttatttgttttgcaaatatgtgctgagcactctgaagttattattttatttattctacaatgacctaatgaggcaagttgtgcaatactatgcacatgtagaaactgaggataataaattaaatcgtttccccatattttataataaacgagagaaacaaagtttgaatgctgcctataatgcaaccaaatgcaattaaatgtaaaaaaataataaatcaggataaagggatgcattgtgatagaagttgatggtgaatagttgaggcaggaatga

SEQ ID NO: 279863 - DNA, 596 bp, Homo sapiens
aaaacttaataatttaattgttaaatttaatttagtaaaaaatcactaaattaaaatataatttattgatatatatgtagcatagtttactatgctatatatggtaaatatatatattttactatatatatgacatgtgtacctacatatacatctcaataaactatattttaataaaatcataataatttccctamggaatgtacccagagatacacataaatatatattatcttacaaaatcaaatacttatggaagaataatgaaaataattagaagcacctgttgatggttattttcatgatgatccagtctttttttatttgttttgcaaatatgtgctgagcactctgaagttattattttatttattctacaatgacctaatgaggcaagttgtgcaatactatgcacatgtagaaactgaggataataaattaaatcgtttccccatattttataataaacgagagaaacaaagtttgaatgctgcctataatgcaaccaaatgcaattaaatgtaaaaaaataataaatcaggataaagggatgcattgtgatagaagttgatggtgaatagttgaggcaggaatga

SEQ ID NO: 279864 - DNA, 591 bp, Homo sapiens
aggaatgatatgatggctaaatttatgaatcaacttgactgatcatggagtgttccagtattttgttaaatagtatttctcagtatgaatgtgcgatgtttgtggatgagatcagcatttgaatcaatagagtgagtaaagcagattgtccttgccaatgcaagtgggtgtcatccaacccaccaagaatttagaatcaaactaaaaggttgaggatgaaagaatttgctctctctgactgcttaagctgggatgtttgtctcctcccacccttggactgagacttatgctatcatcattcatggttcgcaggagtaaagactcagtctggaactacactaaaagctcccctgggtgttcagtttgcagacagcaaaccatggtacctctaggcctctataattgtgcaaactaattccttaaaatctctctcactccccccactctctacatatgtatatatctatatagagagatatatacatacaagtatatatctacatatgcatatatagatatatacatatatattacacacacacacacacacagmcacacgcatacttacacacatgtcttctattggttctg

SEQ ID NO: 279865 - DNA, 1236 bp, Homo sapiens
gctatacatatttaagtgctctgatgctttggacatatattggcaattgtcttattctcttgatcaattgagtcctttatcaaaatagaattatctaatttactttatagttttgacttaaagtttactttacatattatacatatatttgcccctgctctttttggtctacatttgcatggaatagcattcgtatccttttattttcaatctccatgtatccttatagataatgagtctctagcagttagcatatacttggatctttttaaaaatccatttatctactctgtctttgattggagaatttatccatttatagtcaagataattattgatagataagaacttactactgcatttgttattttcttcctggttattttgtatgtcctttattcctctcttgctgtcttcctttgagattaatttttgtctagtagagttctatgatttttactttttatcttttgtgcatatactataggtttttgctttgtggttaccatgaggcttacataaaacatgctrtactaaaaacagggggctttacaccaataacaacttaactttgattgcataaaataatcaacacttttactccwgcattacaactaatatattgattgatttttctcacccccaacataattttctttaggggaatatgccattattagtttaaagatgaggtgagacttatctaataaatattaaaatggaaataaataaaaaagagactagaaaaataatagaaatatcaatgtgactgagtgttggaaaaataataaaatttataaatctgctttttagaattaccaagaaaaatggaaagaggactcagataaataaaattataaatgaaagagagacattattattaataccacagaaattttttaacatcatgagagatgactataaacaattatataccaagaaattggataatttagaagacaagaataaatgtctagaaacatataacctaccaagaatgaattatgaagtaatagaaaaaccttcagaccaatatgagtaaggatatttaacagtaatctaaaactccccaaaaatgagaagcaaaggaccacatcacttcatgggtaaattgwataaagcattaaaagaaaaattgaagctaatctttctcaatatcttccaaataattggaaaggggggggcactgccaaacattactcttaaaccaaactcagataagaagactacaagaaa

SEQ ID NO: 279866 - DNA, 631 bp, Homo sapiens
gcattacaactaatatattgattgatttttctcacccccaacataattttctttaggggaatatgccattattagtttaaagatgaggtgagacttatctaataaatattaaaatggaaataaataaaaaagagactagaaaaataatagaaatatcaatgtgactgagtgttggaaaaataataaaatttataaatctgctttttagaattaccaagaaaaatggaaagaggactcagataaataaaattataaatgaaagagagacattattattaataccacagaaattttttaacatcatgagagatgactataaacaattatataccaagaaattggataatttagaagacaagaataaatgtctagaaacatataacctaccaagaatgaattatgaagtaatagaaaaaccttcagaccaatatgagtaaggatatttaacagtaatctaaaactccccaaaaatgagaagcaaaggaccacatcacttcatgggtaaattgaatmaagcattaaaagaaaaattgaagctaatctttctcaatatcttccaaataattggaaaggggggggcactgccaaacattactcttaaaccaaactcagataagaagactacaagaaa

SEQ ID NO: 279867 - DNA, 474 bp, Homo sapiens
aaaccaaactcagataagaagactacaagaaaagataacacagggcaatatccctcatgaacacagaggcaaaaatcctcaataaaatactatcaaacctagttcaacagcatattgtgaggatcagatgctacaatctagtgagagttattcctggtatgcaaggtaggtttaacatacacagatcaataaaatgtgatatactacactgaaagaatacatgatagaaatcacgtgattatctcaatagatgtagcaaaaggatttgacataattcaayaatatttcatgattaaaaactcctaacaaattagatgtagaattaatgtatatcaacgcaatgaaagccatatatgacaagcccacagccaatgtcattctccatggtgaaatgctgaaagctttctcctaaaattaggaacagggcaagagtgctcagtctcaccacttttgttccacaaagtggtgaaagtc

SEQ ID NO: 279868 - DNA, 573 bp, Homo sapiens
tgggagagggacatggtagaagatgattagatcatggaggcagatttgccccttgctgttttcataaatgtgagtgagttttcatgacatctggttgtttgaaaatgagtggcacttccctctttgctctctctctttccttccaccatgtgaagaaggtccttgcttccctttcaccttctgccrtgattgtaagtttcctgaggtcccctcatcatgctttctgttaagcctgtggaactgtgaatcaattaaacctcttctgttcataagttacccaggctcaggtagttctttgtagcagtgtgaaaacagcctaatacacccagcctctatcttctccaggtttctgactccttcaggattcagctaaatgtaacttccccccacaaaacatttctatttatccaagtaacatcaggtgccaattttctgggatcctttggtatacaagtggcatttcaatagcatttttcacatatgttgtgattgttaagttacttggttcccatactgaatcgtgaggtcattaattatataacatattctacaggacacctttaattataatta

SEQ ID NO: 279869 - DNA, 570 bp, Homo sapiens
ctttcagttgtcacgtaaaactagtgtggatactaccgacaataaagtgtacttaaatcctgcatataagtaaaatggaatggatttaatgagctacagagaagtccagttccttttctgactttattaaaagtttataattgtaagccttagcaaatagcagaaataaagcatacgtctaattgtaagtaaattacgatggaacattaggggccccttattgcagattctgaccccctggtgtaarctgagtattagtagctagctgtcttatttattggatctaccaattgctgtatgtatttaaaattttggtcttatcatctttcacaatccataaactgaaagggagtactgagtgataagaagcaaaaagaagaaaggatggtataatagatagtccagagatactctccaaaccttcttatacattatggtcattcaaaatgctatttatgtaaaattttcattatcttagggtacgtgtagacttagatgtagtacttatcagcaccataattaataatcaatgaatattttcatatggtataaaacatcaacatcttcttt

SEQ ID NO: 279870 - DNA, 1141 bp, Homo sapiens
ctttcagttgtcacgtaaaactagtgtggatactaccgacaataaagtgtacttaaatcctgcatataagtaaaatggaatggatttaatgagctacagagaagtccagttccttttctgactttattaaaagtttataattgtaagccttagcaaatagcagaaataaagcatacgtctaattgtaagtaaattacgatggaacattaggggccccttattgcagattctgaccccctggtgtaaactgagtattagtagctagctgtcttatttattggatctaccaattgctgtatgtatttaaaattttggtcttatcatctttcacaatccakaaactgaaagggagtactgagtgataagaagcaaaaagaagaaaggatggtataatagatagtccagagatactctccaaaccttcttatacattatggtcattcaaaatgctatttatgtaaaattttcattatcttagggtacgtgtagacttagatgtagtacttatcagcaccataattaataatcaatgaatattttcatatggtataaaacatcaacatcttctttwctttcagttgtcacgtaaaactagtgtggatactaccgacaataaagtgtacttaaatcctgcatataagtaaaatggaatggatttaatgagctacagagaagtccagttccttttctgactttattaaaagtttataattgtaagccttagcaaatagcagaaataaagcatacgtctaattgtaagtaaattacgatggaacattaggggccccttattgcagattctgaccccctggtgtaaactgagtattagtagctagctgtcttatttattggatctaccaattgctgtatgtatttaaaattttggtcttatcatctttcacaatccatwaactgaaagggagtactgagtgataagaagcaaaaagaagaaaggatggtataatagatagtccagagatactctccaaaccttcttatacattatggtcattcaaaatgctatttatgtaaaattttcattatcttagggtacgtgtagacttagatgtagtacttatcagcaccataattaataatcaatgaatattttcatatggtataaaacatcaacatcttcttt

SEQ ID NO: 279871 - DNA, 577 bp, Homo sapiens
ggaaaactctcaacatacactttggggatataacaaataagatttaaataaattaaatatgaggttagagattataataatataattatatataattacatataataccatatgataygctatatcattataattaagaaataatatctataatgtagaatatgtaataatgcaatatattaaaagttttgaaggtaatccatgctaatattaacaaatagaaattctacaaagtatttacttgtgagcagtgggtatgaaaagggactacaatgtaagacatttattctttattttattcacttttgtgcaattgaacatttgctttcttgaacatgaaccatatttataatagatttacaggcaaaaagagaatacaattatcttcatttatttaaatgcaaggaatacattaaacatttggttggaggataagttaaataatttttagatgggtaagttaaataattttactatgtaatttaaaatattattttattttggaatgaacagatatatatctatgggatagaacataaaatctgcattagattttacatttttattgatataaaca

SEQ ID NO: 279872 - DNA, 577 bp, Homo sapiens
ggaaaactctcaacatacactttggggatataacaaataagatttaaataaattaaatatgaggttagagattataataatataattatatataattacatataataccatatgatacgctatatcattataattaagaaataatatctataatgtagaatatgtaataatgcaatatattaaaagttttgaaggtaatccatgctaatattaacaaatagaaattctacaaagtatttacttgtgagcagtgggtatgaaaagggactacaatgtaagacatttattctttattttattcacttttgtgcaattgaacatttgctttcttgaacatgaaccatatttataatagatttacaggmaaaaagagaatacaattatcttcatttatttaaatgcaaggaatacattaaacatttggttggaggataagttaaataatttttagatgggtaagttaaataattttactatgtaatttaaaatattattttattttggaatgaacagatatatatctatgggatagaacataaaatctgcattagattttacatttttattgatataaaca

SEQ ID NO: 279873 - DNA, 594 bp, Homo sapiens
aaaacacatccattagtgacacaatgccatcagagctctctctgtcatggtcacgttactgatactgtcatggagccatctacacaggctggcacactgttaggacatgcctcagcctgacgactctgtcccaggagatgagaatatcatgatgtgctggagtgacacctatggagtaatttcctgtcaccccaccaattctctttaagagtaatgattctgtaaagagaatagaatgatgtattacatagcaattcctttgaaccaaacaagttcatgagttgaaatgataggtgaagtttgattttattttacaaaattattttctcttagatacattaaaaataaggtgacttagatatgctttttcaagaaatttttcagaagaaaaattaatgcaatctaaaaattactctcatgaatcttattctttatcatagrgttctactgtgtggcaataagtagaccaataatgatctcattactaaagcatttgactaagtctttccctgactctatgctcttggataacaaagtaaacaagtgaaagactgtcaagctagtttaaaaaaaaaattcacatactgatgttaa

SEQ ID NO: 279874 - DNA, 624 bp, Homo sapiens
ctggatatttccattaatgtttaatataaacttgattctttttccataaatgtaaaacttttgtggtaagatgattgtaactttttgaaaagagccataaatattggtgggagttggttgttttccatgaatagaatcgaatattttacttcctcatatttgaatcacaatgaaagcactttcagttgttcaaagagaattaatatagaaacaactgttgattttctgtctttctgtctccatacacatgtctgcatgcacaggcgcacacactgcttagttttcctttggttaggcagctgaagagttactatgtagatcctggcagccttctacccatcagacaagcaagggcacaatcaattcctgttttcttgaaacgtataccaaataatcagaaactctgattattctgctggaaggcaacagcttgatggaaagatgtaccaattgaaaacaattctgatcatatttttgtcaggagaatgagatgcctccagctgcctgtcactaatcatattagaggtggaaagcaggaatgttttaccctgcaaaagattactctaatcatgtgttggaaygctacttgtactggctgcttatcccagaacggtgacattagac

SEQ ID NO: 279875 - DNA, 540 bp, Homo sapiens
gaaaaaaaagagttgtgaatgctagagtgcaggaaatttctggattaaatattagttttgttaccaatttggctgctgagataaagacaacactggcttagaaacacaaaagtctgtttctccctcatgtcacagtctaggcatacaggctgatgagggagctgcacagtcttctggcaggttgtcctgtcatccttacattgtggcttccatttcaarttcttgtcacacttcagctggcaagaaggggacaaaagaaagtgggaagcacaccctttccttttaaaggtacaactcagaagttttgcatattacttccattcacattccattggccaggacttacctatgtgaagatacttaattgcaagggaggatggaaattatgacctttagatgggcgattgtgcacccaggtagaaggaagtaatggattttggggacaacagtttgctttgcctgtggctttgtagcgccagcctagcagcatgttttgacccggagttcagctaggggactagtaagcaaagtaaaaaaata

SEQ ID NO: 279876 - DNA, 503 bp, Homo sapiens
ctattaatccaataatgggataatgatatttttactagaaaaaaattgcaattgtaatttgtatttatggaatgtgaatgtattagtcagggttctctagaggaacagaactaaaaggatagatatatatatataaaggggagttcattaaggagtattgactcacacaatcacttggtaaagtcccacaataggccatctgcaagctaaggagtaagaaacccagtcccagtcccaaagctgaagaacttgggagtccagtgttcaagggcaggaagcgtccagcatgggagaaagatgtaggtragactaaaccagtctagcctatttacaatcttctgcctgcttttattctggccacactggaagctgattagatggtgcccacccagattaagggtgggtctgcctttcccagtccactgtctcaaatgttaatctcctttggcaacgccctcacagacacacccaagaataatactttgcatccttcaatccaatca

SEQ ID NO: 279877 - DNA, 501 bp, Homo sapiens
acctgcatgttctgcacatgtatcccagaagttaaagtatatatatataaagtagatttttttaatactctttttttaaaaaaatttcgtacacatatttttctgctctttttttccccaagtctctgtttcttagtatatctatcaacaagtggatagaacaaagaactcaattaatttaataaatactgtttacaggtcttgtaaagggtttggtagagattaaactaatgtcttctccctttatctctcatgggatttgtaggtaacagacctatttagtyattaagtagaaatgctttattcagagttagaattatacagagtgaagcaggagaggttctaaatactccatggcattaagaatttctttttgcagaggaaaaatttgaaaggaaaaccatagtcattataaactggcataaaatgtactttaaactatgtaaaagaaaactttaaaatttctgtacgctgatccatccattcactgaccaacaaata

SEQ ID NO: 279878 - DNA, 501 bp, Homo sapiens
acctgcatgttctgcacatgtatcccagaagttaaagtatatatatataaagtagatttttttaatactctttttttaaaaaaatttcgtacacatatttttctgctctttttttccccaagtctctgtttcttagtatatctatcaacaagtggatagaacaaagaactcaattaatttaataaatactgtttacaggtcttgtaaagggtttggtagagattaaactaatgtcttctccctttatctctcatgggatttgtaggtaacagacctatttagtcattaagtagaaatgctttattcagagttagaattatacagagtgaagcaggagaggttctaaatactccatggcattaagaatttctttttgcagaggaaaaatttgaaaggaaaaccatagtcattatamactggcataaaatgtactttaaactatgtaaaagaaaactttaaaatttctgtacgctgatccatccattcactgaccaacaaata

SEQ ID NO: 279879 - DNA, 501 bp, Homo sapiens
acctgcatgttctgcacatgtatcccagaagttaaagtatatatatataaagtagatttttttaatactctttttttaaaaaaatttcgtacacatatttttctgctctttttttccccaagtctctgtttcttagtatatctatcaacaagtggatagaacaaagaactcaattaatttaataaatactgtttacaggtcttgtaaagggtttggtagagattaaactaatgtcttctccctttatctctcatgggatttgtaggtaacagacctatttagtcattaagtagaaatgctttattcagagttagaattatacagagtgaagcaggagaggttctaaatactccatggcattaagaatttctttttgcagaggaaaaatttgaaaggaaaaccatagtcattataaactggcataaaatgtactttaaactatgtaaaagaaaactttaaaatttctgtaygctgatccatccattcactgaccaacaaata

SEQ ID NO: 279880 - DNA, 1046 bp, Homo sapiens
  misc_feature (1)...(1046): n = A,T,C or G
gcggcggagggagtgggggggtgagggaagtggagagggaggtgtggactggggaaccctgaggggagggaactgggagcgcgggcgggcgggcgagcgggaggcggggagggggagagggagagagagaaattggccattcaaagccttctctgagctacaggccggttctaaactccaatgaattcaattaacttgattgctaamgtgtgcagagaaatgcaagacacatagggggccaccacctgattccttactttcctctggcggcggaggtgggagccctcgcctcttggatttccctgaactcccgcgttacaagttccctccaagcgataaactccctgtggcgctgaagtaatttgttttaaagccaaatggtgcccttcagctaagtaaccgacccaaggaggaacagttgggaggggtgtgtgcacgtgtgtgtgtgtgtgtgtaagtwagttgggaggggtgtgtgcacgtgtgtgtgtgtgtgtgtaagtgtgtgcgtgtgtgtgtgtacctggagccttcgacagccggctgggactctaaaaagatcgcgctggtccaccacttgttaaccctttcttcccgccaactcaaaagtttctgagctgacgtcaagtgtcaaagcctttctcataaagaggtttctgccgtgggtgggcggaaaacatagaaaagtaattatatgtatatttttgctcaatctggtcccctaacgtaaacatactcaaacagcgcgcattaaaaataaaataataaaaattgttttctggaggacttatatttagccatcttgaaggaaatggcttaactggcttttgctttttgcaagccttctgcaaagttgacgaggacaaatatgtcttgcttggagatggcctttcctcgtcgttttcacaatgccccaaggctgggtagagttcgttttttggttactcctccccccaccactccgcctcctttctttctcttggwccttgccaacaagcctgctgatgactgaaaatggacagtaggtggcactgttnnnnnnnnnn

SEQ ID NO: 279881 - DNA, 595 bp, Homo sapiens
gctacacctgtgtagaatacttgccatgaaaaaagtttgcaggcctagaagttgctctgggtgagtcagtgagtgagtgatgagtgaatgtgaaggcctaggacattactatacacttttacacaacttgcagaacagtaggtttattttcaatagcatcaccaaaaatgtgaataatgcattgtgctgtgacattatgccagctacagcatcactagcaaatacaatttttttagctccattataatcttacgggaccatcatcacatatgtggtctgttgttkaccaaaatatcattataagagcatgagtgtacagtaatatatttaataaatatataatatacaaatataaatatactatagaatactataattattttgtactaaattatatttatattacataatagtatattattataaacatatttttgtacatagccagcatatagctggctaaacataagtctctgttaacaactgccagaatgaacaaaagtttaccaagtatatattagatctaaacaaaaacaacataattgtttaatattgtaaatataatgtaaggatgaagctagaagataagtagtaa

SEQ ID NO: 279882 - DNA, 609 bp, Homo sapiens
aagtgaaaatataggagacatttaaagcattaaaatcgtgctattaactctcataatttaatacctgaaagatgccattacgtggtgtgtacaaaggcagcttaaaggtggttttgttcttccattgtttccacgttatagacagaaattcctgttgcctttgttacaattcattttttgttttttgattttgccgttatattttttagagacaaggtcttgctatgttgcccagactggtctcgaactcctggcctccaacaatcctgctcgacctcccacagtggtaggattagaggygtgagccacccatgcccagcaacaatcaattttttgaataaatattgagtgaaacagagcaaacacctatagtgttcctctctatgttacaaggtatcatttatacattttctcatttttatatatttatgaattttttaaaaaaattatagatgttcactgtattattcctactttaggggctgagacaaagggaaatttgtttttttataaaaaatccttgtctctctatttttatgctataattacaataattaaaaacaatgatcattttattagattggttaattcatattaaaaagaataatc

SEQ ID NO: 279883 - DNA, 1145 bp, Homo sapiens
gacatttcaggccaaaacaagcaactacttttgcaccaacctagtagattgtctctacataatggttttcatattaatggtctaaatttcatttttcattattacaacataaaatcaaaattataattttaaggcttttacatttgtggaaatatatatttttctataagttattttatttgtgtttatattaaaacatctaataggtagagataactctttttattttccttgggtaagaattttgccttatgagaatctgtgaatcagttgttctaatttccccttcctcatattttgacagagttagccgaatacctaccatttacatgaagyttgctgtgaataatcaacatcctttgaatgagacccattagtctctcttctctattcgttttagaatagtttttttccaataatcaacatttttattgttatttcattgacactcaacagatacagagacaaaataaacagaagatctgtaaacactttttccaacccttggaaagtagatgcagtatttttcatgtataggttgtaaattcaaattggaggttgcactggaaggtaagawtttctccaccatcttaatctggttattcttattaggaatttttaacaaccacaaacatacaattttctatatactagattgaaaaaaaaaacacacgatgagtgaatattttcatgtgctgggaggtagtgtaatacaatgaaaagagcwtagattttagttctaatacaacaaatgttggattttggcttcatatctttcttgttgttggctttgagcaagtcactgacctctgagtgggtggcacataattgtactcagttgtagcactataagagagtggttaatggcaagagtttaaaggtcaaacagaattcttattattttctcacttcctgttacatattctagcatgcaacattgaaaaaatttaatttatctgaacctcacctttcagatatataaaaatatttatcttacagtgttattgtaaggattataaaagataatatacaaagaacttgaaaccttacttaacacaaaactactcaatatagactagaattatttttgttattcattatttaaagtacttcctctttgaaagaaaaataaatttttacatcaa

SEQ ID NO: 279884 - DNA, 529 bp, Homo sapiens
aatgataatcaagactgcttggagaagagtctacaactttcaccctacatgcccaaattcagccagttgacaaggtcaagtattaactataatggtaagtacagtaaaactaacaagagccagtgttcttgttcattcaatttctgcatgttagtctccatatgctgactgttactgatgacagagcagaatgtgttaattacgacacctctttttattcaaccagaaggtagtcaagggcaatgcagttgtccaggatcactttcatctgggcatttagtgagtcctgttgctgtattgaattagctgtggctttagccatagttatgtcatgggtagagacaggtttgacatcatgatctctaaggcacagacactatccctggtatgaggatgtatataaaaaatggaaccagctttctgattggcccccaagggagatggacatttgggacatctgattggtaagtgggatggtctcatccatccakagatgtcattgtgcagtaacacctggcacctcaaaact

SEQ ID NO: 279885 - DNA, 524 bp, Homo sapiens
gatggttttaggtctgcaaatattgtcatctgtggttattaattagaaaacttcattggtatgtttgtacctatgtgttttcacacataaaatttatacgattgtaataatcagatcctcatttaggatctaggctctatgcttcataagacagaaaattatttgttgctaagacaaacaccttatacagaaagtagaactaggaaaatactaatttttaaaatattaccaaggatagcactaaaagccactatgatgtatgggtatcatattatgtaatagcttattggagtctttcaagtgaaatttctaattaagaatagataagagcttatagaacaaacttctctcccctagaggatggggaacatttctgtaaagtgtttgytccaggtatacgaaaggccaacagaaagtagaagtttcctaaaacagaatgtgttgtcatggggtcgtaattaaagaacagctaaataggcacgaaaatttattctaatttccacaaattaaaagagcccagtggc

SEQ ID NO: 279886 - DNA, 519 bp, Homo sapiens
aattggaaatctctatataaatataagaaaatgattatttttacaattctggagagaggataattggcaataaaaaatggttggagccaagattttcttttttcactcgatacatggaaacaacgaagctaatggttgctgagtaaaacactagargaagagttgatagtgaagtattttcctatgcttttctgtaagaaaaattattttattgttgacaaaaatagatctctggaagatgtttttggtaaaacaaacaaatcacttttgcaattgttggctaaacagtaaatgaataccttctttgttggttccagtattagcagtttatcatactatttaaaaatcagataattttgttgtaaaagaaaaatgactgaatttactcttcagccttggtggatacaggtcttcttttattatttgccttttccctacctttgaagaagtaatctttgactttgatgaacacctaactttggtgaacacctactatatcctaggcattgttctaagtgc

SEQ ID NO: 279887 - DNA, 622 bp, Homo sapiens
tctctttcttttctaaattaccgagtctcaggtatatctttattagcagcatgagaactgactaatacagtaaattggtaccacaaagagtgggttgctgttttaaaaatatctgaaaatgtggaagaaatttggaactggttaacaggtagaggttggaacagtttagaggactcagtagaggacaggcaagggtggaaaagtttggaacttcctacaaagttgttgagctatgtggtcaagcagcaaggcattcaagaggaagcatagcacaaaagtttggaaattttgcagctcgatgatgtgctgggaaataaaaaacattttctggggataaattcaagctggctgcagaaatttgcataagtaacaaggagctgaaagttaatcaccaagacaatgagaaaaatatctccagggcatgtcagagaccttcacagcaactgttcccatcataatccaggaggcctaaaagggacaaatattttcatgtgcyaggtccagcccccaccctgctatgtgtagtctcaggacttggggccctgcatcccagatgctccagctatggcaattgtttcagaagatgcaagtccgagccttggtagcttccatgtagtgttag

SEQ ID NO: 279888 - DNA, 605 bp, Homo sapiens
gattttgttcctgactcatctcttgcaaacagcacctgttgtttgttcacaccaaatttatcaggcttctaattaagcaaattgtttgttttgaaaagccaggtggcttcaagaatcagaggtgaaaaggaatgtaaagctgtacttctcaaagtggtccgagagcggcctccattgcaatgatttggctgctgttaaaaatataaattttgtgtccaaaccccagacctaactcatcagaatttacagtagtggttctgggaatatrtctactttgaaaaaacttccccaggtcattcttatacaaactcggaagtttgggaacttctactttggagggtgttgtagatgaaaacacaagtttcctaagctttttacacatacctctttaaagttatatttgtgtccttaactctaattggataacaaaacagtaacaatgcctatttttgcagaataagattgtaaattccaattttttttctctttaatgacagtatgtttgtcttgaacaccctgaggcttatgtaatcaataggttatctgctggcacattaatccagtgatttctgttacaggtgagacaatatcaagtataaaattga

SEQ ID NO: 279889 - DNA, 550 bp, Homo sapiens
aaacccctctttatgtcacaagaataaaaaaggaaagactataaatgtgatctctagaaaggcattcctcttcacacaattcttaatasatttccttagatgatatctggaaactgaaattctttcttgtattcttcttttattccagaggcaactttgttaaatcctcacctttctatctctgtgcctcactgatctattcattcaaagagaccactctttccagcacttagtgctgaaagtttattattgtgaaaaaaaaaaaaaaagctctgaaccaattttgttcaggtgaagactaaaattttcagttatacgtgtccattctttagcatagccatagtctgaaaacataagtggatataaataataaatgattaatcactattacattataatatatgatgtgaccaatgacactacatatttcatatgttgtcccttattaacaatgcataatacaacacactgtgcaaaattgcaataaactcagtgcattatcctgacatttcttttatttcctgtcttcttagatgcttcatgtctctca

SEQ ID NO: 279890 - DNA, 469 bp, Homo sapiens
ctatattcaccaaataaaaaattctcttcaaattcaaagtaagattaacatttatatatatatttttgttaacctcattatagaagtaggtacttagaatttcttgatttcatactgtaatagcaacctggaattctccctccagccttttctttaccacaacttttctttttctttactattattatattggaaagccaatgcttatggggtaagatgaaggcttttttgttacattttcaaacttttccatacrttctccaaatctaaattcttaaattattctctttctccttgcttctgtgaatattctgctgtcactagttgatcaaagtatctctcttttgaacctatttcttcttcatatctttgtttatgctgttgttttttctctacctgtaccctggcattaaattactcctttattttgacagtaagaaaactcgtctaatcttcaaaattcaattca

SEQ ID NO: 279891 - DNA, 624 bp, Homo sapiens
cttctgaaaccccttgccctattagttgttttccatgggacatatcaactgtcattatttaatgtacatatttattatatgagagtctgattcccttgactaaaataccagactycacaaaagaaaatgtttccatctcttttattgactgctatatttgatgaatgaacgagtagcctcacattggatgactaaagcagaggactttcaggatttcttgatgctgtaggacacatcttctgtctaccacagtctgttacactcctgacacgtgcagccagctcaccacgtggcaagcattatcttcaagaacaacctccttcttagggattttcccagaataatactccctagaccttactacttagcttctctttgatctttaactatatgcctcaggaccgaacctcagtttctggtcccttcacgttgatgattgctttggactaccattgaactgcttgcccttccatctaagtctctatattgcatccttgctcaccattcatccagaatcacctccgccatccttcccaatggaggaggagcagcctgcagtgtgcttcacatacatttacatctttaaaatatgcagccctcagggtatcgatttgccacctacaa

SEQ ID NO: 279892 - DNA, 547 bp, Homo sapiens
tcccattaacctcccagggctgaatttggtgcttaagcaagaaatcttttgcttcattcccagcgtggcagtggacagtgaggcaggagccgaattcattttaatatcacagcccattagggagaattaggccatgatgcatttatgctaggcacttgagatgtttactattttcattaaaattttttcttcttaaatatttaatgctaagggattttcatataaatgtatcatataaagtgcagtggctgacatggcaggacttgttcattgcattatattagatgttggyactactttaacattttatcctatcaatccagagagttttatcctataaatccagagatttatcctataaatccaggacacaagagttacaaccccagttttgacatcgtcctctgcagccttgggcaagtgcctctaatctcttgtctttgtttcaatatctataaaacaagcatcataatttactgagccccaccagaatgcgatgaactataactaattagtatttacagtctgatctgatgaaaggcattaa

SEQ ID NO: 279893 - DNA, 523 bp, Homo sapiens
acagaatttccctttcagttgcttgcctgagtgaagcaagaaggtattgatgtgacaatgcttccactcaaattcacataatccctaaaaataaaaacagaggtcgggcatggtggtttactcctgtaatcccagcactttaggaggccgagccaggcggatcacgaggtcaggagttcaagaccagcctggccaatatggtgaaaacccctctctattaaaaatacaaaaattagccaggtgtggtggcacatacctgtggtcccagctactcaggaggtggaggtagaagaattgactgaactcgggaggcagaggttgcagtgagacgagatcgtgccattgcactctagcctgggcaacacagcgagactctgtctcaaaaaaaacaaacaaaaaacaaaaacaaaaaaacccagaaatctgtgtttcagagattattacccgttttttaaacayggctttataatagaaaaaataatatataatttggctttttccttgaaacccaagatacacataa

SEQ ID NO: 279894 - DNA, 519 bp, Homo sapiens
ctaaggccccccaactgtctgaatgaacctctcctcttggccaagggcattccaaagttaacctaaaaaactggttcagccatgatgggaaggggcagtcagacatgcctcatcataccctcctcccttttgaaattcaggaaaagccaactggcattaacatcaacacaggccttaagaaacatttacaaactaatctctctgaagcctgctacctgaaggcttaatctacatgataaaaccttggtctccacaaccccttatcttaacccagacatttctttctattgataataactatttcaaccaattgccaatcagaacrtttttaaatctacctatgacctgaaatctcctgctttgagctgtcccacccttccagattgaaccaatgtaagtcttacatgtattgactgatgtctccctaaaagcaagccatgccccaaccaccttgggcacatgttgtcaggacttcttgaggctgtgtcacaggcatgtccttaacctcagcaaaataag

SEQ ID NO: 279895 - DNA, 628 bp, Homo sapiens
gtcttataccatagtaatagaataaaggacaaaaatctcaattgacacagaaaaatcagttggcaaaattcaacaccctttcatgataaaaccactaaataacttcctcaacccaataaagacatttatgaaaaccccacaactaacatcatacttaattgtgaaagactagccatttcccctaaagtcagtaacacaagaagaatgtctgttctcatcacttccattcatcatggaagtgtacctggaggttctggtaagggcaattaggcaagaaattgaaataaaggcataaatatgagaaaggaagaagtaaaactatcctcaggtgacataaatttttaatatataaaatactaagaaatccaccaaaaatgataaaaacaaacaagttctgcaaggttgcatgatacaagatcaatactaaaaatcaattgtatacactaataatgaacaatacaataataaaattaagtaaacatttccatttataattgcagcaaaaaatctaggaataaagttaacaaaggaaatgcaakatttgtaaactgaaaactacaaattatgttgaagaaaattaaagacctaaagaattggaaaggcatactatgttcatggattggaagac

SEQ ID NO: 279896 - DNA, 619 bp, Homo sapiens
aggatgcctgggctcaagagtgttctggtcagcattttaacatcagaagaagggcttcttcaggacacactcccttctcttaacatgaggtgaagaaacccatcccgtgctgagtaaccgggccccataataccttggtcttttgatacacagcagcactacacaccactgcaccccccccagccagcttcactctgtctgctaagcacccactctgcaaatagatctcagagtgaacaaatccagaggaggtgggaggagacaccgtggtgggatttgagggacaggagttggctggaggagcagatgggtcccatgtcaggcccttcctaggcatcrtgaagattgctattgctcagaagtgccttttccccaggtttgaaggctggcatcccaaggtaggggcagctggcacagcggaaggcatcacccaggtagcagtttccacaagccgacttgggctgggagctcatctgttcccttgacttctctttttccagttctttggcaaggccacaggtgcagttcttacaggccttcctctttttcccttccccacaagaagcagcctgcagggaagccggatctggcttcttcaaatcttctggatccagcagct

SEQ ID NO: 279897 - DNA, 575 bp, Homo sapiens
acagccagcaagtggcagagccaacttttaaacccagatctctgcttctaaaacttgcccccgtttccccattagattagctgcttccagggacataagaaaggtagaaaatggaaggttacagagcaaaggggattataatgcttaagttttcagagctggagcacttcccactgaagacaaagtcaaggatgtggtcatgggggtgggttgctgaactggatggaagtcaagatctttggagtagagaagggcaagaacatatagggctcatgttggatgggccatcagcatcgactgtgatggtttactaggckgggctgaatagaggtgagtatgcatgcaaggtagaaacccctgaacagatgctgtggggagaactagagattggaggacatggaatgatgggcacagaccccacagcttggtgatggtagccatggaactattgtaaatgaacaatcccaaagcgactgcagaattctgagtttttcctctttttcctgattttctcagcaaagcatatgttgccatttcactgtcatcttcttacacttcactgcagaagaactaca

SEQ ID NO: 279898 - DNA, 597 bp, Homo sapiens
cctcagtgtgctgagtccgaaaaaccaaaaatacactgtttagctcagatacgtattgcactcctgtcatgcacaggggactagttcaggcattgtggttggcacaaaggtctctggtctcaaagtttataatcccattggcaaactgaaacatagtccccagaatatgaaacagtgacactggacactgtacaattaaaaatcaaatgagtgaggacttctgcttccagccaacaaacaataataacaaggaccacatttacccttccacctaaaacaacagaaaccaaaccaacactggtttttaagacaatggatgtcaagcaacgaaaaaatgagaggtggaaaacacatgtgctgagccctatgcttgctcctgctcactgcccgaagagtttccaggatacagcacaaggaagatgtkttaagtttgccagagctgctgtaacaaagtaccacacactgaatggcttaaatgtcagaaatttattgaccacagttctgcaggccagaagtctgaaatcaaaatatcagcagcattggttccttccaaagtctgtgagggagagtctgttccatgcctctttcctagcttct

SEQ ID NO: 279899 - DNA, 613 bp, Homo sapiens
tttcatttctctcatcaatacagccctaataggtataggtataattgtyccctattttatatgtaaggaacttgagattcagaaagattaattcatgcagctagtaaggggtaaagcccagattggaacacaggtctgactctctgcaggccttttctgtgcacttcctcacatgtagcctcaggaaaactttatagtaagagaaggcaaggggcaagaatttctcctacatgtcagatcataggggcatggacctcgcacaacatcttcatatttcattcctcattgtgtgtcaagaattcctacgtggtcaaaatgatgcatcctttttccccaggcatccacagagatttgaaccatctgtcagcccttcctaatggcagctgatggagacatctgtggccaaaagccaccactgccagcaaggagcaggttaagaacctgttctctgtcttgattaaaattctttcccacaggctctgcacacactgtgaagcaaaagtcatctgcaaggcccaaacctctgtcctcagggagtccccatctgtagtgggcactatcgatgccccaaccagtgcccctcagatcccctttaccccttctgtgatccgtc

SEQ ID NO: 279900 - DNA, 613 bp, Homo sapiens
tttcatttctctcatcaatacagccctaataggtataggtataattgtcccctattttatatgtaaggaacttgagattcagaaagattaattcatgcagctagtaaggggtaaagcccagattggaacasaggtctgactctctgcaggccttttctgtgcacttcctcacatgtagcctcaggaaaactttatagtaagagaaggcaaggggcaagaatttctcctacatgtcagatcataggggcatggacctcgcacaacatcttcatatttcattcctcattgtgtgtcaagaattcctacgtggtcaaaatgatgcatcctttttccccaggcatccacagagatttgaaccatctgtcagcccttcctaatggcagctgatggagacatctgtggccaaaagccaccactgccagcaaggagcaggttaagaacctgttctctgtcttgattaaaattctttcccacaggctctgcacacactgtgaagcaaaagtcatctgcaaggcccaaacctctgtcctcagggagtccccatctgtagtgggcactatcgatgccccaaccagtgcccctcagatcccctttaccccttctgtgatccgtc

SEQ ID NO: 279901 - DNA, 547 bp, Homo sapiens
aattgtcctggtgagcctgatgtaattgcagaagttcttataagaggagggtgggaaaggcagagtgagagaaacagatttaacagcagatatagaggttggcatgatgtgaggaagcggccctgaactgagaaattcaggtggcctttagaagctggaaaagtgaattttcccctccagaatctgaccttttctgtaatcctaaaacttctctaaaaaataaagtctatgaatagtaataagaaagagagaaamacatgcagacccctttggtttaaatctgggtcaggcacttgtaagttgggaactcttaggaaggttatttaatctctcagcctcagcttactcggctgtaatatatgtctctttctacccacccgatggagctgttgtgaaaaacaagttaatgcctagtgtagttcctggcatcgtgtagcaagcactcataagtattaggcttagggatgggggggaagtggagatgttgtttgttttctgtaaacactcaagaagacattgaaattttacttgctgggaagctgttgct

SEQ ID NO: 279902 - DNA, 564 bp, Homo sapiens
ggaggtcctagctagaacaatcagacaagagaaagaaacaaaagatattcaaattgaaaaggaataagtcaatccatgtttccagatgatatgatcttatatttggaaaaacctaaagactccaccaaaatactatttgaactgataaacaaattcagtaaagttkcaggatacaaaatcaacatacaaaaatcagtagcatgtctacatgccaacagtgaataatatgaaaaagaaattaagaaggtaatcccgtttacaatagctacaaataaaattaaatacctaggaaataactaagaagtgaaagatctccaaaaaaaggtataaagcattgatgcaagaaattaaaaaggacacaaaaaatggaaagatattctgtgtttgtggattggaagaatcaatactgtgaaaatattcattctacccaaagcaatctatagatttaatgcaatccctatcaaaataccagtgccattcttcacaggaatagaaaaaaaaatcctaaaattaagaaaaaaattctaaaagttatatggaaccacaaaagacccataatagcaa

SEQ ID NO: 279903 - DNA, 568 bp, Homo sapiens
aaccagatctctatctctcaccatatgcaagaatcaagtaaaaatgcattaaagacttaaatctaagacctcaaactgaaactactccaggaaaacattttagaaactctcctgtaaattggattgggcaaagatttcttgggtaatactctataagcacaggcaaccaaagcaaaaatggacaaatgggattacatcgagttgaaaagcttctgcacagcaaaggaaacaatcaacaaagtcaagagacagcccacaggatgggataaaatatttacaaactacccatctgacaagggattaataatcagaatatataaggagctcaaacaactctacaggaaaaaaactaagaatctgattttsaaatggatgaatgatctgaataggcatttatcaaaagaagacatataaattgtaaacagacatatgaaaaaatgctcaacatcagtgatcatcagagaaatacaaatcaaaactactatgagatatcatcttaccccagttaaaatggattttatccaaatataggaaataatgaatgctggcaaggatgtggagaaaaggg

SEQ ID NO: 279904 - DNA, 568 bp, Homo sapiens
aaccagatctctatctctcaccatatgcaagaatcaagtaaaaatgcattaaagacttaaatctaagacctcaaactgaaactactccaggaaaacattttagaaactctcctgtaaattggattgggcaaagatttcttgggtaatactctataagcacaggcaaccaaagcaaaaatggacaaatgggattacatcgagttgaaaagcttctgcacagcaaaggaaacaatcaacaaagtcaagagacagcccacaggatgggataaaatatttacaaactacccatctgacaagggattaataatcagaatatataaggagctcaaacaactctacaggaaaaaaactaagaatctgattttgaaatggatgaatgatctgaataggcatttatcaaaagaagacatataaattgtaaacagacatatgaaaaaatgctcaacatcagtgatcatcagagaaatacaaatcaaaactactatgagatatcatcttaccccagttaaaatggattttatccaaatataggmaataatgaatgctggcaaggatgtggagaaaaggg

SEQ ID NO: 279905 - DNA, 590 bp, Homo sapiens
ggtactggttttgtagagatacagtgcaaaaattaaacaagagattccaaacatctcttatgtaaatcacacttcagtaaagaaaaataagcaaaaggagtgaaatgagggcaatgcttctgccatatgacctgcagtgagatcttgcmtctcgacaactgtcagaacatccttaatgcatagacagatgcccaactggaaagtcagaagcctcaagctgaggaagcagtatgtttgaagtaacagaggtctccaagaccatcccaggtttggtcagaagatttagtactcaaagtcatgatatattatgctgaaaatatacaaatcaaaatcagcaaaggaaaaaggcacatgggcaaagtccagaagaaaccaggaacatgcttccaagagtcctctcccagtggagccacatctcctctatgcttaattcctccagtatcaaattgtgataatatatgtcaaaggctctctactagggaagctcactagagactcatcacccagggttcttattaggagctgctcatgtaggtaccctctacttggcacagaccaaaattccaggctcccagagggaaagcaagtgt

SEQ ID NO: 279906 - DNA, 496 bp, Homo sapiens
tctcttctcttctctgctgtgctgctctgcartggagtttggggtttatataggcacaggatagggtcatggtgggccacagtggtcttggaaaagacaacatttgggcacataaacaggaatgcctgttcccatttagggccaggggtttccagtcttgagagtggggcctttgccagggaactcctctcttctacccagcatttccttgcctcctgtctatatcagttgggccaagaactggactttttttctgccactttctcctgcaggtctcactgcaggaacttggagatgtattgtccctagttcagaagtctgtggagggtgagagtgggagcacttacttcaatgatcacacaaggaaggcaatagaatttaccaactctcttaagaatttgggtactcagccagaacacatggacagagatcataaggtcatcactgagtaccgcaatatatccagaagtcctatttacaacagtgatcagcagaa

SEQ ID NO: 279907 - DNA, 512 bp, Homo sapiens
gtaaatttgccttgctgagaaatcctttgtttgagtgctcctttttcttgtgactctgagctcttgtttccaacaaggcaaaaaaaaaaagtatcttcaggccatccagttacactttctggaacctctttgtcttaaactcttcaagcaccagktatcaatttggcagctgtatgagatgctatgctagaagccaagggtacagaggtgagcaaaggagagtctccagttcaagaaggccttggcctgtgggtaggcaaaaaatacccactataatgtaaaatgctgaggactctcagagctgaagcaggaatgtcttgggcattattctttacttagtgcctagcaaaacttcagtaacatagcacatgctcaatatagatttgtaaaatgaataaacttatggaaatgtaggaggaaaagcagttagttttgactggtttgtgggtgggggagaaagcaattgaaactgtaccatttgttcatagggagactctgataagctgtgaaat

SEQ ID NO: 279908 - DNA, 528 bp, Homo sapiens
ggcacccttctgcagaagtaaatttgccttgctgagaaatcctttgtttgagtgctcctttttcttgtgactctgagctcttgtttccaacaaggcaaaaaaaaaaagtatcttcaggccatccagttacactttctggaacctctttgtcttaaactcttcaagcaccagttatcaatttggcagctgtatgagatgctatgctagaagccaagggtacagaggtgagcaaagsagagtctccagttcaagaaggccttggcctgtgggtaggcaaaaaatacccactataatgtaaaatgctgaggactctcagagctgaagcaggaatgtcttgggcattattctttacttagtgcctagcaaaacttcagtaacatagcacatgctcaatatagatttgtaaaatgaataaacttatggaaatgtaggaggaaaagcagttagttttgactggtttgtgggtgggggagaaagcaattgaaactgtaccatttgttcatagggagactctgataagctgtgaaa

SEQ ID NO: 279909 - DNA, 1205 bp, Homo sapiens
aaggtgggttactgaggcaccacttactttaacttcatctaaaccaaaaatatatgtgaaagcaaaggttygttagttctttagctttcttctaacatatattttgaagtgcaacactgatcatgtaactcctctctttaaaaccatttaatttgttcttagaatgaagataaattcctagcctcagcttatgagggggctctgcaattggctctggccctctctgcaatatcgggagccatgctggtcttcttttgtctgctcaaatgcaccagcaccttggctcttagcttttatagactttgtacatgcttttacatctgcttggaacattcttcccctgagcatctccttcacaggaatcagctaaaagactgcttctttgcagaggctttttgcaagcccctgggtaggcctttgagactcttctaacacttgtacttacttgatcatgacatgtcttccccagaagattctggcctccagaagggcagggactacatttattactctgggtttagttgtcagcaaccagcctggcatgtgctaggtgccctattaatagttgttggttaaataaacgagaggawaaagataaaagagagaagtccagggaatcccccagggcactccagtataggaaggaaataggtagagagtcaggagtgagtgatgctccaggaacccaagtgaaaaagtgttttaagaatgaaggagttgtcaatagtcacgagctgctgaccggccaagtaagatgagtactgagaactgaccactggaattagcagcctggaggtcacagaagaccacaacatcatgggagggtttgggagaggggcaagggcctctttgtagaatgggaggagaagatttggggacagagagaataaaaattcttttgcaaaatttcwctgtaaagggagggtattggagaacagaatcaagaaaggtttttttgtgtgttttaatatgagagaattagcatgtttatatttttgttggaagagatcctccagcacaggaaaaaatgagtagatactttaatagaaacaaacatttattaagcacatttttatattgctgacactgtttaatgctgcacatgaattatttttcctcacatttctttctcactacaatcctatgaggaggttttattattattatttttaacttttaatttttgtgggtacataataagtgta

SEQ ID NO: 279910 - DNA, 615 bp, Homo sapiens
aaagataaaagagagaagtccagggaatcccccagggcactccagtataggaaggaaataggtagagagtcaggagtgagtgatgctccaggaacccaagtgaaaaagtgttttaagaatgaaggagttgtcaatagtcacgagctgctgaccggccaagtaagatgagtactgagaactgaccactggaattagcagcctggaggtcacagaagaccacaacatcatgggagggtttgggagaggggcaagggcctctttgtagaatgggaggagaagatttggggacagagagaataaaaattcttttgcaaaatttctctgtaaagggagggtrttggagaacagaatcaagaaaggtttttttgtgtgttttaatatgagagaattagcatgtttatatttttgttggaagagatcctccagcacaggaaaaaatgagtagatactttaatagaaacaaacatttattaagcacatttttatattgctgacactgtttaatgctgcacatgaattatttttcctcacatttctttctcactacaatcctatgaggaggttttattattattatttttaacttttaatttttgtgggtacataataagtgta

SEQ ID NO: 279911 - DNA, 615 bp, Homo sapiens
aaagataaaagagagaagtccagggaatcccccagggcactccagtataggaaggaaataggtagagagtcaggagtgagtgatgctccaggaacccaagtgaaaaagtgttttaagaatgaaggagttgtcaatagtcacgagctgctgaccggccaagtaagatgagtactgagaactgaccactggaattagcagcctggaggtcacagaagaccacaacatcatgggagggtttgggagaggggcaagggcctctttgtagaatgggaggagaagatttggggacagagagaataaaaattcttttgcaaaatttctctgtaaagggagggtattggagaacagaatcaagaaaggtttttttgtgtgttttaatatgagagaattagcatgtttatatttttgttggaagagatcctccagcacaggaaaaaatgagtagatactttaatagaaacaaacatttattaagcacatttttatattsctgacactgtttaatgctgcacatgaattatttttcctcacatttctttctcactacaatcctatgaggaggttttattattattatttttaacttttaatttttgtgggtacataataagtgta

SEQ ID NO: 279912 - DNA, 414 bp, Homo sapiens
ttgatgatttgtttaaaacatgtttatgtaagtctggggggagaaaatatatttgatagttaagttttagatgttaattgaaaaaatgttttaactaccaaactcttacttctctagttttaaattcttttgacattaccatcaaggaaatgattttaattctttaattacacagttttaatcaagtagtcagggaaactattttgatcattgtaataatttttaaaaatataagtttgtgatttagtaaayggcagagtggtgcagtagaaaagactttgtaaaccaggagccccgtgttgccctggatcttccttgatttgttgtgtgactctgacaaacttcgttattttcatgtgcaacataagagatttaactagacgatatctgaggtcccttttgtgtgggaaattg

SEQ ID NO: 279913 - DNA, 564 bp, Homo sapiens
attatccaatccatgtgacaatgctgtgaggtgagtatatcatctccactttttcagacagagacacagagtctcaaggtcagtatctcgctcaaggttgcataccttcaaagtaacagggccagatgtagagcctctgcctgcaaagcaccaccccatgggcctttctgtaaatccttcacagtgaccgtctcagtcaagaactctgtcctgacatctaacctaattcctgcatgttgcagcttcacactctttcttcctgttctcttcttrgaggaactggtccccaggcttggaagcaatagttcttttgccagaattgttaaaacactctttggccatctttcaggatgaatcattctagatcttcctaggcctcatattttgagcgattaattgtttccattctcctctcctgaacactcttctcattctctgcagccctctgacatgcactctccattttgaaaggtccttaagaatttccagagttgttttgggctttttattttttttccaagggacttgggagaggcatgatggtcagggataggaaacctttcc

SEQ ID NO: 279914 - DNA, 557 bp, Homo sapiens
atttagagtccattcagacaatccargataagctgcttctcttgggatccttaacttaatcacaacttttgcaaaataaggtaacattcacaggttccagtgagttggcatggatatcttggtgaggggctggtattttcagtagaccacaggagggtcaaggccatgggtagcttagccaggtagggctcattccaccaccagacaaacccaccaccacagcccctagtatgaggcctgccacacagtgggctcttaatgtttgtgaaatgaagactttgttggataagggccaatatgatgagaactagagctatcagctgggcttacccttgagaggacttcacccagtagaacccaaatttttagattctctttgactagatgaacttacacacaaacacaaagcagagagtgggggtgggatatgcatattcaggtatccacataaaacttccagctttttcaattgccaagtgaggagagtaaaagaaaatgtcatttattttaatagtcatttcataaaagaaagagcattttagcaccaaaaggaagat

SEQ ID NO: 279915 - DNA, 498 bp, Homo sapiens
ctttatcctatgaccctttctctgcccataacacagccactgcagccttctgccaggacccactgagagtgaacacaagggagcctcttgagagatgcccgctgtggcatgagacttgctgataataaacaacatgaacccctccctcttgtctctgccttcccgacttctctccctctgaccaactcaatctctgcccacttctgcctcttgcaagacctttcctcctttggcactgatacaaagtccgagaggcctttgccacttcagtgcctgtcactccccatccgccagcttcaccagatggcctgtggtgtgtgtggtcctgtgcatatgcccacattcttcaagaccctctcrcccaaccagaaagctaccccagggctgtgcaagcagcatcacttcctaagacctaaagtgtctctgtgcctcatctgtagggccaggtaaggtgatctccacgtttactcccctattgctggggaagccagccaagga

SEQ ID NO: 279916 - DNA, 610 bp, Homo sapiens
ggtggggagggaatacaagcacaatttttaggaaattaattttcaaaaagtcactggagtagaggaagtcatttacaatgtgtcactccacgtgaaagccccttgcatccccttctckctgttctcattttttgtccctgctctcattcacgtcttctcttccctcctgtcttggggagttcaggatcctcatgttctaggctagtcccactcacctctgcagttgatattatttcctcctacatcccttcgacagttatttgacaaatctcttggtgagaccttctacaaaaattgagtgagctgggtggtataatggactaaattgtgttcccccaaaattcctatggtgaagccctaacccctaatataactatatttggagataaggtctttatggaggtaaataaggttaaatgaggtcctaagagtgggtccctaacctgctaggactggtggccttataagaataggaagagagaaaaagagtagggtactctctccaccacccctgtatgcacagagaagaggccatgtcaggacacagcaagaaggcagccgtctacaagccaggaagtgagccctcaccagaaaccaacgatggcacctt

SEQ ID NO: 279917 - DNA, 610 bp, Homo sapiens
ggtggggagggaatacaagcacaatttttaggaaattaattttcaaaaagtcactggagtagaggaagtcatttacaatgtgtcactccacgtgaaagccccttgcatccccttctctctgttctcattttttgtccctgctctcattcacgtcttctcttccctcctgtcttggggagttcaggatcctcatgttctaggctagtcccactcacctctgcagttgatattatttcctcctacatcccttcgacagttatttgacaaatctcttggtgagaccttctacaaaaattgagtgagctgggtggtataatggactaaattgtgttcccccaaaattcctatggtgaagccctaacccctaatataactatatttggagataaggtctttatggaggtaaataaggttaaatgaggtcctaagagtgsgtccctaacctgctaggactggtggccttataagaataggaagagagaaaaagagtagggtactctctccaccacccctgtatgcacagagaagaggccatgtcaggacacagcaagaaggcagccgtctacaagccaggaagtgagccctcaccagaaaccaacgatggcacctt

SEQ ID NO: 279918 - DNA, 456 bp, Homo sapiens
atgtatactcgggcctccacactggtcaggagttgctgaccaacacagggtctcactgcctgggaccccagactcaccacccagctgcacccaccaggagtgatggggccttggcacctcctaaagctctatggccacatttccagataagaagacagacagacagacagagagagagagagagagagattgatttactttaaggaattggcttacaaagttttgacagctggcaagtctgaaatccttagggcaggccagcaggctaaaaattcaggtaaaakccttgaatctgaaatctgcagaggagacccagcaggcagggattttatcttgtaatcttgaagcagaattgcttcttcttcggaaaacctccatttttgttctcaaggtcttcatctgattgaatgaggcccacccacattacaaagggtcatcttctttactcaaagtcta

SEQ ID NO: 279919 - DNA, 557 bp, Homo sapiens
gcaggcagggattttatcttgtaatcttgaagcagaattgcttcttcttcggaaaacctccatttttgttctcaaggtcttcatctgattgaatgaggcccacccacattacaaagggtcatcttctttactcaaagtctactgattgraattgaatcacctctaaagaaaatctgcatagcaatatctagactagtacttgagcaaacaactaggcaccatggcctggccaagttggttcaaaattaaccatagtccctgtgctaagaggacagagaaaaatgaggttgcaagtgtttttctacttaagatggctccctctgacagtcgcaagcatgactgggaagccatctagtctgcaggtgccaggtggagcttggagtccaggctggctcagactctgtgctggctccgtccggctgtcctgactcaaggatccagctgaggacaccctctagttgcaggctttcaacttggggactttttctttcaatttgtttggttttgtttccagatatttgaggatgtatttattctgctttaaatacactcaaacc

SEQ ID NO: 279920 - DNA, 487 bp, Homo sapiens
catgcttgtcctaacccataagcaagtgtagccatggggtacccccatgggcccaatggtcagtgagagaggggagggcttggccctagcaagaggattgagagtgcaccttcccacaggttttagagccaggcagcactgcctggttgaccccttcagatttgattaatgtcatcaaaaatagcaaaagcagcaacaaggatgcctcccgcttagagaatgtagcaggatgagccgcagacaaaaccccacagacaccgaggtagtaaaggaagtggctttaatcagctggaagcattggcagactaacgtctcaaaattcgagcttgttgagtgcacaatttctgtcccttttaagggctcacaatgctaaaggtttcrcataagagggtcgtgattgattgagcaacctaggggggtacgtgacaggggctacatgtaccagtaatcagagtgaaacagaacagaatggaaagtttcacaatgt

SEQ ID NO: 279921 - DNA, 478 bp, Homo sapiens
tatattctatatgataaaggattcgttagaaaaaatggggcctaggacaaattacgttaagaaaatgacttgtaagttgtaacaaaaaaacaaataggttcatatattattttccaagataaatttccaataggttcaagaattcaatctagaatttgctatagaagtgaccattttctggtgggtgaagggcatgctaaacacaaaataataaaattaaccacaattggaacaaaatgatagattggatgtcgtgagaattttaaacatcttttaattgcaaataaaataccaaaaatttttcaaaaaaacatttgctactcaggtcacaaaaaagcgctaattatgtagagaaatctcaaacaaaatgtattacaycttaatatctaaaagaaacacacacacatgtgcacacacacagattaaacataaacagacagtcatcagaggagaaattataaagggtaataaaaatatg

SEQ ID NO: 279922 - DNA, 478 bp, Homo sapiens
tatattctatatgataaaggattcgttagaaaaaatggggcctaggacaaattacgttaagaaaatgacttgtaagttgtaacaaaaaaacaaataggttcatatattattttccaagataaatttccaataggttcaagaattcaatctagaatttgctatagaagtgaccattttctggtgggtgaagggcatgctaaacacaaaataataaaattaaccacaattggaacaaaatgatagattggatgtcgtgagaattttaaacatcttttaattgcaaataaaataccaaaaatttttcaaaaaaacatttgctactcaggtcacaaaaaagcgctaattatgtagagaaatctcaaacaaaatgtattacaccttaatakctaaaagaaacacacacacatgtgcacacacacagattaaacataaacagacagtcatcagaggagaaattataaagggtaataaaaatatg

SEQ ID NO: 279923 - DNA, 623 bp, Homo sapiens
agggtgtttcagcattcttccttacaaattcgccagccaccaagcaccacctccattctctgcttctcttgtgctaggactttaggatgaaattcactgtagktcccccacaccctgtaatagaatccataaatgagccctcctgatatgtccagagctgctgctgggctgcctcctgccactgctgccctgtcctgctgggccttcccacctcctagggcatctccatgggacacgggaatccactaaagctcatgcttgtgccaagatggtgctgtgggaccccaccccatgccctgatccctgcagaagggagaggaaatgccctccttctccacaccaggttacacatgggtgcacggtcccctgtgtcttgcaaagtgtttgtgaacacacattctcagtttctcctcatgaccctcccattcccaggatcctgccagatgtcctcaggacctgagctgggggatcgattctagagaggacaccatactctgatcagaattgccctggctccacaccagtccagtcctccagcttcctctttccttgcgggggagggtcccccactgctgtttctcctacggggagatggagggagctggaaaagagatgaacagatg

SEQ ID NO: 279924 - DNA, 623 bp, Homo sapiens
agggtgtttcagcattcttccttacaaattcgccagccaccaagcaccacctccattctctgcttctcttgtgctaggactttaggatgaaattcactgtagttcccccacaccctgtaatagaatccataaatgagccctcctgatatgtccagagctgctgctgggctgcctcctgccactgctgccctgtcctgctgggccttcccacctcctagggcatctccatgggacacgggaatccactaaagctcatgcttgtgccaagatggtgctgtgggaccccaccccatgccctgatccctgcagaagggagaggaaatgccctccttctccacaccaggttacacatgggtgcacrgtcccctgtgtcttgcaaagtgtttgtgaacacacattctcagtttctcctcatgaccctcccattcccaggatcctgccagatgtcctcaggacctgagctgggggatcgattctagagaggacaccatactctgatcagaattgccctggctccacaccagtccagtcctccagcttcctctttccttgcgggggagggtcccccactgctgtttctcctacggggagatggagggagctggaaaagagatgaacagatg

SEQ ID NO: 279925 - DNA, 623 bp, Homo sapiens
agggtgtttcagcattcttccttacaaattcgccagccaccaagcaccacctccattctctgcttctcttgtgctaggactttaggatgaaattcactgtagttcccccacaccctgtaatagaatccataaatgagccctcctgatatgtccagagctgctgctgggctgcctcctgccactgctgccctgtcctgctgggccttcccacctcctagggcatctccatgggacacgggaatccactaaagctcatgcttgtgccaagatggtgctgtgggaccccaccccatgccctgatccctgcagaagggagaggaaatgccctccttctccacaccaggttacacatgggtgcacggtmccctgtgtcttgcaaagtgtttgtgaacacacattctcagtttctcctcatgaccctcccattcccaggatcctgccagatgtcctcaggacctgagctgggggatcgattctagagaggacaccatactctgatcagaattgccctggctccacaccagtccagtcctccagcttcctctttccttgcgggggagggtcccccactgctgtttctcctacggggagatggagggagctggaaaagagatgaacagatg

SEQ ID NO: 279926 - DNA, 577 bp, Homo sapiens
ctttcgatcatatctccagatggatttatatccaggaggcaatgacctaaaaacaagaactgcatgtactcattacaacagtggatctgctcactagaaacaaacaaggctgtcaactgccttgaataaaatgacattacatacattttttttagcccatacaacgtaccaagcaactgccagctgcatccaccatgttgtctagttcaataatgatgatagcccaatgaggtgaagtcattattttcatttgatataggaaaaagcacaggatcagaggacatcccattggcttagatgtcacttccaatgtttaccccactrcacatgtgtgcctttggcctccaagagactttgatgagatcaactcaatcacattatttgggccttctatggaagttctgctgtctacattcctaacagtatataaggcgttgaattcctcagaatattcctcagaattcctcatccagtaaaaatatccttcaggaatgaaagggaaatagacattctctgatacagaagagctaagagaatttgttaccagagatctgttcaaaagaaatgctaaagaaag

SEQ ID NO: 279927 - DNA, 569 bp, Homo sapiens
catatatgtgatgatttgatatatgtacacactgtgaattgatcactacraccaagctacttaacatatccataacctcacacagttgccttttgtgtggggtgggggttggtgggaacacttaagatctactctcttagcaaatttcaagcatacaatacattattattaaccatagtcaccatgctgtacattcgattccccagcacttattcgtcttataactgcaacttggtaccctttgaccaacatctccccagccccagccccaaccccagcccctggcaactaccattctactatctgtgtctgtgagttccatttatttccatttcaaatataagtgagatcattgactgcttgggtttaaattctggctctgacccttccatatgtgtgacccttggcaagtgcatacctagctgtcaatttctcctctgtcaagtggtgacaatgtggatagcgctgcctgaaaatattgttgcaagaattaggtaaaataatacgaacaatatgcttagcactgcgcccggtacatagcaagttctggatcgatgttctctattttt

SEQ ID NO: 279928 - DNA, 569 bp, Homo sapiens
catatatgtgatgatttgatatatgtacacactgtgaattgatcactacgaycaagctacttaacatatccataacctcacacagttgccttttgtgtggggtgggggttggtgggaacacttaagatctactctcttagcaaatttcaagcatacaatacattattattaaccatagtcaccatgctgtacattcgattccccagcacttattcgtcttataactgcaacttggtaccctttgaccaacatctccccagccccagccccaaccccagcccctggcaactaccattctactatctgtgtctgtgagttccatttatttccatttcaaatataagtgagatcattgactgcttgggtttaaattctggctctgacccttccatatgtgtgacccttggcaagtgcatacctagctgtcaatttctcctctgtcaagtggtgacaatgtggatagcgctgcctgaaaatattgttgcaagaattaggtaaaataatacgaacaatatgcttagcactgcgcccggtacatagcaagttctggatcgatgttctctattttt

SEQ ID NO: 279929 - DNA, 569 bp, Homo sapiens
catatatgtgatgatttgatatatgtacacactgtgaattgatcactacgaccaagctacttaacatatccataacctcacacagttgccttttgtgtggggtgggggttggtgggaacacttaagatctactctcttakcaaatttcaagcatacaatacattattattaaccatagtcaccatgctgtacattcgattccccagcacttattcgtcttataactgcaacttggtaccctttgaccaacatctccccagccccagccccaaccccagcccctggcaactaccattctactatctgtgtctgtgagttccatttatttccatttcaaatataagtgagatcattgactgcttgggtttaaattctggctctgacccttccatatgtgtgacccttggcaagtgcatacctagctgtcaatttctcctctgtcaagtggtgacaatgtggatagcgctgcctgaaaatattgttgcaagaattaggtaaaataatacgaacaatatgcttagcactgcgcccggtacatagcaagttctggatcgatgttctctattttt

SEQ ID NO: 279930 - DNA, 592 bp, Homo sapiens
gtcttcaaggagattttgcacttggagtaaacatctgcacttcatgttaccaattcacactccagttctatttagatatattttggtgggaagttttcagaagcatcctagacaatcaaattttcatttttcaagttgtaataggaaatccagactcaacactccccttctgcaattctattccttctatattcatgctactttcaatcaaactgaacttgggcatatccaacatgagcctgactggagtcatgaatgttgagaaagaacataacagtctaaactgggtggtctgaaacatgtcattcatatgtatgaatacatagatttgattcccttttagccratttttgaaactaaatgaaatgtcaaagagcaaggtcttgctgtggactcccatgggggtgaaataagcatgagagaatcaagctaggatagaattggagagacacattcagttaatttttaaatggtttcatttgcctattatacttgtaaataacatatttaaactcagaatgcttatgaggaaaacttgccttctaattaataactcacattgggataatattcatgcttggaatttaaaact

SEQ ID NO: 279931 - DNA, 1189 bp, Homo sapiens
ttttataatttttgaattttttactttaactataaagctatattagttcttatgtttttatacatgccattaaattttttcaaattaatgaacttatcatctatgaataaagaatgctttcctttcttcctttccagcataaataccttttatttctttttctttyctattgcactggctagatctttcaataccatgttgaagtggtaagagatatttatcttgttgttgatcttttgattattgatctatagtctataatgttagtggcaggttgtttataaatcccccttatcaggttgagaaagattccctttatacttgtattgatgagaactattgtaaagaacagatgctgtgtttcataaaaggcctttatagtgactgttaagataattatgttttccttttttagtgtgctagtatactaaatgatattgatttcccaatgtcaatccaatcttccagtccttagataaatcccacttagtttacacactatatatcattgtattcaatttcctaacatttttattaaattttttgcatctatattcatgawagagacaacccatggactgggagaaaatatttgtaaatcatacatctaacaagggactaatatccaacwtatatgagaaactcaaacaactcgatagcaagaaaatagaacacctttttaaagaacagacaaaggatctaaacagactcttctcaaaagaaaagatacaaatggccaaaagatttatgaaagaagctcaacatctctaatcaccagggaaatgcaaattaaaaccacagtgaaaaatcaccccatagaatggctaatataaaaaagatgaaagttaacaagaggtggtgaggatgtagagaaaagggaaacttgcacactattcatggaaatataaattagtacagccattttggaaaatagtatggaggtacctcaaaaaaatagaattctataaatagaatcactatataattcagcaattttacttctggaaaactgtcaatcatatttcaaagagacttaagtaataagtggaaaattccatgtatttattcatgtaattccaatttcaatagttttttattaatttcatagatccgtatttccatctggtagaatattcctcctgcctgaaggattttctttaacatttcttatgtgtctgctggcaataga

SEQ ID NO: 279932 - DNA, 566 bp, Homo sapiens
ttatgttccagtattgatacatagggaaaagatacaaaaatataaaccaaagagatttccatagaaattatttagtggctacacagcatttcattgtttggatgtgtcatattttattttaaaaatcctctgttgctggatatttatgctgaattcaacttattactgtttttaacaatactgagaaaaatcttacacatatatattcatatatggcacaaaatttcctcgacataccattgataaatgagattgttcaaatggattagcaatatttcaaatcagataataaatggtgtttgtaaagcacttactgataagatacaattcctaaagcgtattttcaaactcaaagtagagatatatttaactaccctccatctatgaaacaaaacagaaaacggagtggaaaatcmtgataagattaaacatatttcttatttattgcctgacctaatttggtcagtcacctctagttacctttaacagtttgaagtctgtgagagaggcctttgacttatgcttctttctttaatggaaggatttttttccctttttaaatagta

SEQ ID NO: 279933 - DNA, 566 bp, Homo sapiens
ttatgttccagtattgatacatagggaaaagatacaaaaatataaaccaaagagatttccatagaaattatttagtggctacacagcatttcattgtttggatgtgtcatattttattttaaaaatcctctgttgctggatatttatgctgaattcaacttattactgtttttaacaatactgagaaaaatcttacacatatatattcatatatggcacaaaatttcctcgacataccattgataaatgagattgttcaaatggattagcaatatttcaaatcagataataaatggtgtttgtaaagcacttactgataagatacaattcctaaagcgtattttcaaactcaaagtagagatatatttaactaccctccatctatgaaacaaaacagaaaacggagtggaaaatcctgataagattaaacatatttcttatttattgcctgacctaatttggtcagtcacctctagttacctttaacagtttgaagtctgtgagaraggcctttgacttatgcttctttctttaatggaaggatttttttccctttttaaatagta

SEQ ID NO: 279934 - DNA, 614 bp, Homo sapiens
gggcaataacttcaaacacatggactgtgaccaattgacaaatatgggtgctatgggagctgcactcaagtttatcttatttcctccatgtcttcccatccaccstatcactaaaatagacttccatggacacacggggcccacatgagcacccacacagccttccctgagagcgccataggacccttctcctgggcctctcttccactgctgtctgcagtccaggggctggcaccaccagtcaagaggctgatgacttacctaaaaccacacaggtaatggctaattattgtacaacagagatgtgtaacaaacaactgaattaccctagcagcatacaacaacaagcatttcattttactagccacctgtgggccagctgggcagttacggtctcaactgagcagttctactggtctgagctgggatcacggggttcacttaggtgttgtgagattttttaaataataaaatagaattccaaatacaattgcatttatggaaaatattgtatttactccaaacaaattgatgcacacatgttttggcgataaggaaagattttacatttgttgtttgtgataaaattaagaatattatttatttttttaaag

SEQ ID NO: 279935 - DNA, 564 bp, Homo sapiens
gtcaatcactaatacacacagtaagtgatttgattcagggcagaattctacgtcttttgcctaccaattaaatgttcctaccctgagctatgttatcctttgtaatatttgttgaatgagttaagaaatgaaagaacacatgaatcaacatgaataatctaaggttaaggttctaaaatagtctagatttagttgtctagtgtgccatcatttttattaagaagtaagctctatatggtcagtgattttattattttctgccttcagctcctagaacagtgaaagccacayactaaatatttgtgtttatattatcggtttccagctggcatgaatgaacttctctcaaaacacatttgctttaattattttattcaaaatagattcacattaaattgctctcttatatagatcagagtggaagagcacagtgaagtgtgtagggaacacactccaaggccctcctgaattcccagacctgccagcaccaggcttctcacaggatcaccccaaaaaggaacatgaggcgtggagatcaggccaggcagaactgacaaagtgggt

SEQ ID NO: 279936 - DNA, 612 bp, Homo sapiens
ataaaccacagtttgagaaacaataaattttattctaagtttgagaaaacatcaccggaagcagaagagttataagatttgactggcgtttagaagaatcactctggctgctgtgtggaaatagactaaaagtagggtggcaagagagaaaacaaagattccgtttgggggatattgagacagcgggctagctaaaagagtggtggctagactagaatgtcagcagtggaaacaatgaaaggtgattggatttagcatgtatttttcatacaaagccaccagagcatacggataatttagatgtgtcatgtgagagaagaagtatcagtaatgtctcctacaggggtatgatcaactgggcgaacggtgatgccatttacttaaaagaacagcaacatagtaacagcaaattgtagcaaagagggaataaagaggtctacttgcctttcagacacccacttggagaagttgagtgggtccgtttgaagttagaatggccatgtggcttgctttggtcaacgaagtatgagcaraagtaaagtgtgtcactctggtggagatgtaaatttggatgatgtcactatctatgtggccagcaagtaaagtcacaga

SEQ ID NO: 279937 - DNA, 603 bp, Homo sapiens
cagctttacatggacttaggaggaatcccttacaatatcccacaaggtcctacaagacccagtttctgccattctctctggtggcatttcaatcatttactccttgcttgctgtgctggacattgcccagaaataatcaatctagtcttcagtctcagtccttaagcctgagccatgaggttcaactgcagaaaatcactccctccacacctgggtgttcaaggctgtgccaccatccttccctgtgtcccaagacaatgccttcaagcaatgattttatttatttagtgatttatttatttatayttttattttagatacagggagtacatttgtaggtttgttacatgggtattgcacacctaggcagtgagcatagtaccaaataggtagtgtttcaacccacacccatctccctctctctccgctctagtagtccacagtgtctatttcccctgtttatgtccatatgtactccatgtttagttctcacttgtaaatgagaacaagaggcatttggttttctgttcctgtgttaactcacttaggattatggcccccagcaccatcaatgttactgcaaaagacacaatttcatttttt

SEQ ID NO: 279938 - DNA, 580 bp, Homo sapiens
gcaccatcaatgttactgcaaaagacacaatttcattttttagagctgtgtagtattccatggtatrtatctaccacattttctttatccagttcaccattgatgaacacctaggttgactccatgtctttgctattgtgaatagtgctatgatgaacatatgagtgaatgtgtgtttttagtataatgatcaattttgggggttggggtatatatacttagtaatgagattgatgggtcaaatggtagttcttttttaagttctttgagaaatctccaaactgctttccacagtgactgaactaattttcattcccaccaaaagtgcacaagtattcccttttctccacagcctcaccagcatctgttgtttttttttttttttgactttttaataacagccattctgactcttgtgagatagtatttcattgtgtttttgatttacattttgatgtaaatgatgctgagaattttttcacatgtttgttgcctgcttgtgtgtcttcttttgagatgcctgtttatggtctttgtcattttttaatggttttttgtttgtttgtttgtttttgcttgt

SEQ ID NO: 279939 - DNA, 526 bp, Homo sapiens
aaaaccgcagtttttctcattttgacccaacaaagttgagcaaagagatcttggggcctgtcctccgcaaagccccagttatacacaactggataattagtaagaatggatcatcccagtaagcctggaacaatctgtagaagtattgaggaacattgcagcttcccaggcaaatgccagggacaagcatggagcagcttcgagacctccaataaagagctgtccacctataaaaatgcaactgggccactaacagtgagcattacccccctaccaaactttgggggtcagcttaggaagaggataatgatagcagacrtatgttccttcacccatgagttagtttctttctttcttttttttttttttttttttgagatggattctcactctgtcacccaggctggagtgcagtggtgagatctcggctcacctcaacctctgcctcctgggttcaagcgattctcctgcctcaggctcccgagtagttgggattacagtgcccgccaccatgcccagctacttt

SEQ ID NO: 279940 - DNA, 548 bp, Homo sapiens
aatttaaacttggagctcaaaatagaagagaaaaaaaccgcagtttttctcattttgacccaacaaagttgagcaaagagatcttggggcctgtcctccgcaaagccccagttatacacaactggataattagtaagaatggatcatcccagtaagcctggaacaatctgtagaagtattgaggaacattgcagcttcccaggcaaatgccagggacaagcatggagcagcttcgagacctccaataaagagctgtccacctataaaaatgcaactgggccactaacagtgagcattacccccctaccaaactttgggggtcagcttaggaagaggataatgatagcagacatatgttccttcacccatgagttagtttctttctttcttttttttttttttttttttgagatggattctcactctgtcacccaggctggagtgcagtggtgagatctcggctcacckcaacctctgcctcctgggttcaagcgattctcctgcctcaggctcccgagtagttgggattacagtgcccgccaccatgc

SEQ ID NO: 279941 - DNA, 526 bp, Homo sapiens
aaaaccgcagtttttctcattttgacccaacaaagttgagcaaagagatcttggggcctgtcctccgcaaagccccagttatacacaactggataattagtaagaatggatcatcccagtaagcctggaacaatctgtagaagtattgaggaacattgcagcttcccaggcaaatgccagggacaagcatggagcagcttcgagacctccaataaagagctgtccacctataaaaatgcaactgggccactaacagtgagcattacccccctaccaaactttgggggtcagcttaggaagaggataatgatagcagacatatgttccttcacccatgagttagtttctttctttcttttttttttttttttttttgagatggattctcactctgtcacccaggctggagtgcagtggtgagatctcggctcacctcaacytctgcctcctgggttcaagcgattctcctgcctcaggctcccgagtagttgggattacagtgcccgccaccatgcccagctacttt

SEQ ID NO: 279942 - DNA, 402 bp, Homo sapiens
agaaacaaggtttcaccatgttggccaggctggtcttgatttcctgacctcaagtgatctgcctgcctcagcctcccaaagtgctgggattacaggctcacccatgagtttcttaactggcccttgagattgagactctctcaatctgtttttaggaaagaaaaaattgccccactgcgcctcatctcagaccttctggaccctatcaaccaggatttctcagaaggytctgcctgcggacccttctgattagagaatcagtgggggccagccactgtctgatctcctggctcctttaatccgataacctaagagctggcatcatgtaaaagtgaattggcatgccctttgccactgcatctacccaataaatttccacttatccttagagattcagcccca

SEQ ID NO: 279943 - DNA, 573 bp, Homo sapiens
aagcagttctacggatgaatccagtccagttttttgagctgcgggtcaggtatgtcctgaaaccactttctccctcattctacttcacgcaaacgtaaacaacgcaaagggctgcaggagagagacaccccggggaaactaatcttgtgacaaatttgcttttcttagttgttttccaaaaacttaaattccaaagttttcactgagctacattctattaaaaaaacaattctttcccagccgtgtaactgaagtacatcctaccctggaaaaagatcaaggactattaayggctaaagaagataatttcagtgctttgacttaacagacaagaggccatcttcctgtagggcacagagggaaacctagtttatgcaggtttatttgttcatatgatggcaaaagagagaaaccatctcaatttacaagctaagacaacttaacatagagatcatgaaaaaaacacagtttgggaaacggtgggaaagaagttaaaatctatgagcagaaaaaaaaaatgagttgtagccaatggccagggtttttcattaagctaaatcataaccaaacatt

SEQ ID NO: 279944 - DNA, 595 bp, Homo sapiens
ggattaggtcttcaacatatgaattttgggggaatacaattcagcccatagcatgttcctttgctctagcttcaaaactttacatcctccagggttctgtcctactcctacccttctcattccttgtgccttttctgtctaaccttattcacattcctggctttagctaccaactgtgtgccagtgagagttaaatytttatcacaagcctagttgtgtgtatccaaacacctactggttcactgtgaaggaagaagggttcttttaaaaagaagaaagaaagaaaaacatccatgggatatttctacatgaatgaccctcaggaatctcaaactcaataaaacctgcttttcctcttctttcttcatctctataatccatcaatcacaacagacagaatctggaacccatcacagcaagcccagtgttcctgtccactcccactcctctgcactcaagtcattcaagttcctttataccactctgcttttagaactcagggacttccaatcaagaaagcacagtgattaaggatgtagactacctgggtttgaattccagttctactccaccacttgttaatgatgtgatctaa

SEQ ID NO: 279945 - DNA, 645 bp, Homo sapiens
cctcttaggacacttctaaaaaattaatgcacatttttgtatgcatgatgccatacaacaatgtagcacatcagctcctctttagggaataatgttgattcaagttcatcttaatcaactcatacttccaacacaactgattcatttatttgtaacggaaactattggctcacaaaactcaaagttgaggaaagtggaaaacttcaggagcagtttgatcaaggcctcagccccatttttctgcagttgtcaagactctgcctcctttatttgctggctctgtcttcaggttatctttcttcattgtagcaaaatggccactatacatccagcctcaggttaaatcacatcacccagaagtgagaacttatgtcttcccaccattgaacaaaagtcaccagcttctcccttaatgtactcattctaattgtgtgcccatttctgaaataatcactgtggccagaaaattatatgctttgattagcttagtcctggttggattagattaaaactggcttcctctttcayggtagcaaaatgactgcagcaattactatgactatagcaattccggcctcacattcatatatcacattatttagaagagacagcacttctaatttggcaatgattctacaaaagacc

SEQ ID NO: 279946 - DNA, 596 bp, Homo sapiens
tcatatttcacctttgaatttaacaggcttgtccatgtgtcttgttgccaaaactaggcaagtgcagacctcctgggcagcagtagttcaaatgcactgtctctgcagatcagtaggaaaacggagagagcgagcgagccatgccgtgcatgttcttcctcccaaacgaacccgtcagatagtccttcattttctggagaggagtgaaagcagatcactgagcaaggggagtcctccttgaacygatgccctctacatcacagatccatgaggcagtgagaaaagaggcttccattctaacacctgcaagctccaggtcattaaaaaaaggtttcctttttccaaaacctgaatataacaaaaatgtcaccaagtgagaaatttccaataaaatataattttgaagacagaaaaaaacccctcgaggagcagtaaaacaaaatctcaaaacaaccaaagaactcagagaattcctcgatcccctctagaaaatgacataaactgtcatctaacctcacacctggatatctaacccattgtctcagacaagagggtcatgaaattgactctggagagcagagctggccagagatatt

SEQ ID NO: 279947 - DNA, 596 bp, Homo sapiens
tcatatttcacctttgaatttaacaggcttgtccatgtgtcttgttgccaaaactaggcaagtgcagacctcctgggcagcagtagttcaaatgcactgtctctgcagatcagtaggaaaacggagagagcgagcgagccatgccgtgcatgttcttcctcccaaacgaacccgtcagatagtccttcattttctggagaggagtgaaagcagatcactgagcaaggggagtcctccttgaaccgatgccctctacatcacagatccatgaggcagtgagaaaagaggcttccattctaacacctgcaagctccaggtcattaaaaaaaggtttcctttttccaaaacctgaatataacaaaaatgtcaccaagtgagaaatttccaataaaatataattttgaagacagaaaaaaacccctcgaggagcagtaaaacaaaatctcaaaacaaccaaagaactcagagaattcctygatcccctctagaaaatgacataaactgtcatctaacctcacacctggatatctaacccattgtctcagacaagagggtcatgaaattgactctggagagcagagctggccagagatatt

SEQ ID NO: 279948 - DNA, 575 bp, Homo sapiens
tgagatactaagatatacccattgaaatgtctataatcaaaaagactaacaatactgagtgttggtgaagatatggaaaaactcaaacactcatacattgctggtacaaatgatacagctattttgaaacacaggcaagttcttaaaaagttaaacatacacttaccatatgacccagcaattttattactaggtatttacttaagaaaaatgaaaacgtatatccatagaaatactttcatgcaaattttcttagcagcattattttataatagctaaaacctgagatcaatcacatgcctatcaattagtgaaaggattaaaagtgtggtatatccatacaataaaaaggaacaaactattgattcatgcaatatagattaaccttaaaacgttatgctaagtaaaaaaaagaggcacaaaaaaactaaatgtagtaaagtttcatttatatgacatttctagaaaaggcacagttatagagacacaaggcagatctgtggttaacttagactggagttgcaggggagtcaaatacaaatgggaacatggrtactttatggggtcatagaaat

SEQ ID NO: 279949 - DNA, 557 bp, Homo sapiens
cacaccctggtgtgacttacctgattaaaacaagtatttattagtgctgatgacatcaggacagaaatgytgctcagggacaaatgtgcaaaaacaataatgtcactttctgtaaacaaactgtgtgtgtgtgcgtgtatgtgtgcatgtgtgtgtgtatgtgtgtcttctaaaaatacgtttgtgtggtcattatgatatctcatctggatccctgcaattgtctcccaacccttctccctgatgttaatcttgcctctcacagagcagccagaatggtcttgtacaaacataacccagattcctatctctcccttcctctctcaatctgtgtgtgcatgtgtgtgtgtgtgtgtgtgtgtctttctgtctctctcgctctgtctctctgtctctctctctctgtctctctctctccctcaataaactgataaagctaaagggagccaccaaaggctcacagcttaggcttaataccagtctgatttattgtgttcataatctgggtcagaaatctattctcaggaagtaacatttaagctgagatcaaagtaata

SEQ ID NO: 279950 - DNA, 578 bp, Homo sapiens
cctctaagtgttggtgtagtttattgcacaaccgtaygaatggaaatgaagaatattaaagcaataactgaaaactaagaatttgaaaattcatagaatgttgtttcctagggtaagactgacttcagaaaaaaaaggcatagacatgatttcagaaaatgtgatgaaagtccttttggggaaatagaaacaatgaaaacagaatcctatttgaagtctcacttttttcattagctgcagtgtaatggaaaacagccaccctgaatatccaatttcccccaatactttaattcttttcttagactgaaagttttaacaatccaccgcttactacaagttaaaaaaatacataatgatttttaaagcttttcttatttctggacagcagattttgaaggtgaagctttaatcacatgctagtcttataatcactgctggttttcgactgaagtattacaaattgggctttagttcaatttaagctgcatgggccaaatcctacccttggttattataagcaattcccattgaaatcattagtagttgtacatgtgtaacaaggagataatttggccaca

SEQ ID NO: 279951 - DNA, 556 bp, Homo sapiens
ccctttctaactctggctttcctttcaatgctttctatattcttcagttctcatccacaatggaaaatgctatttaattccttttcaggaaaccaagatgttgccattggtataaaaagcttatcaaaaaagataatttatccaggaaataaatttttggttacaagcatttcctaatttttgggaacagtgccttctaatcagttattattagaatattaccagttattattgaatattaggaattagtataacctgtgctgggggcacagctcaccttggaagtcacctgcagcttgctaggtacttcctgaacatactagtggcttcttaccccaaacacttgtgtccttctgggagagagctttatctgatcaaaggagagtacacaaggcagrctagatatgtccagttaacacctacttagtgcaaacctcaaaccatgaagaatggttggtagataactaccacaaccttcacatctcattacctgaatgatctgcagtctctcagagggacccccaaggattgaatctctttcccacagtagtacccc

SEQ ID NO: 279952 - DNA, 611 bp, Homo sapiens
tgaatctctttcccacagtagtaccccaatcatgaacacactcttttttttgaatttcctctcttccctggctcccttcctaactccctccctgtgcttcctgaaatcatcttcctaattaactttttgtgcccaaatacttgtttctgatctgccttgggggtaactcaagataagcaaagataarcctctaattgattatgaacttattgaaagtcaatctgagagacagaaggaaaagaaaagatctgttctagaaatccagctgctgaatcaagacaggtgaaactgaccattggcggtaaatgtttaggaatgagcctggtcaagaacacagatgacagcaccaataagtgaaagagatggaccttcctatcacttagtcaggtgattgaggaccaagactgagagattagaagtaattgtgggagaagatggatcaactaactgttaagagggccagttctgagcagatggcccaggcagaacaatgctggaggcaggagctaattgaggctgatgaattaacagacaggctttaagtctacatgtcagaaactaaagatacttccaagtaatgacagtggagactctgctgaaaatggagccat

SEQ ID NO: 279953 - DNA, 611 bp, Homo sapiens
tgaatctctttcccacagtagtaccccaatcatgaacacactcttttttttgaatttcctctcttccctggctcccttcctaactccctccctgtgcttcctgaaatcatcttcctaattaactttttgtgcccaaatacttgtttctgatctgccttgggggtaactcaagataagcaaagataaacctctaattgattatgaacttattgaaagtcaatctgagagacagaaggaaaagaaaagatctgttctagaaatccagctgctgaatcaagacaggtgaaactgaccattggcggtaaatgtttaggaatgagcctggtcaagaacacagatgacagcaccaataagtgaaagagatggaccttcctatcacttagtcaggtgattgaggaccaagactgagagattagaagtaattgtgggagaagatggatcaactaactgttaagagggccagttctgagcagatggcccaggcagaacaatgctggaggcaggagctaattgaggctgatgaattaacagacaggctttaagtctacatgtcagaaactaaagatacttccaagtaatkacagtggagactctgctgaaaatggagccat

SEQ ID NO: 279954 - DNA, 503 bp, Homo sapiens
ttatgtttacatggctgcattcttcaaactacagtacasgaaaacaagctctagctttaatattcaaaaggctttgcaaagaaaggaaatcatttccatgaacaaaatggcactgtgttttcaatattccaacttcttaaatgggtggatgcggtgtttcaggctactgcacacccataatctccttcctcttcttcatgtgttttggtgtacttgacattaacctataaaaacacatgtatctgcttgtgggagttccttggatcttccaggcctgttcttccttggcaaaaatttgatttgacaactatggagtatgcacaagtgctgagcggaaaagcttagaagagaaaagcaattagctttagcccaagttcatttggggttgtatgggacatagttataaaagacaagatgggagggaaacaacactcactggagcctgtcgggggagctgggaggagagcataggaaaaagagttagtgcatgctgggtttaatac

SEQ ID NO: 279955 - DNA, 557 bp, Homo sapiens
gaggatccttttaaactcactgttgaaagaggggattccatctctttattatcatgaaccagtgggttacatcagccatggataaagatgcccagctgtgcttagcggaattgcttgccctctgttagataaagacggatcttgcattttcaaatgaaaatagtamagggagagccatataaaagggatacttttataaagtagttactgtcccagcaaatgatcttagggaaacactaaggcctttggatttagcctttgacaaaccacctcctccacctccctcacctcccaaccttctttctccaccctaaatctgcatggaaatgaccagctcatccatatgtgccccgtgtgtaccttaaaatcacgcgggtaaagcagcctgtggcaaattggtcagctgcattggataaaaaggaaaatgctctaattcactcattttttaaaagaagactagatgtcataagaggagctgttctgtgggtgattaactcaaaggaaaaatatcacctgaagatataaatatatatatatgtatatataaatcaaattat

SEQ ID NO: 279956 - DNA, 576 bp, Homo sapiens
gaattgaactgcctttaaattcagttttaaatttcttagctctaaaaactttctagcatttcataagattcagaagacatacagaaaaaaattaaaacatcagaaaaataaatatgtatgtgtgtgtaggtatgtacataaatagagagtacaaagataaatgataaacagagacagacaagatttctaatyatatacataggcctttaacaaatcaataagaaaagaatgaatagcccaatagaaaaatgagcaaatactatcagtgggtagttcacagaaaacgaaatacaaagagctaataaataaatgaaaagatgctcagttttacacataattaaatgcatgcaaatcagaacaatgagattattttgctttttcaattatataataatttgttttaaatattgaaaagtttaattaaaatgtgatgtgtctaaatggtgttgcagaagcaggttttttcattgactgttgaacatgtaaaatggaagcaacatttttggaagctaatttggcaaaatcattcaaaattttaaatatacaattattttgcccaacaaatacaatggatat

SEQ ID NO: 279957 - DNA, 557 bp, Homo sapiens
tcatttgcatgtacctggtaggcccatccaagtggctaggagccccattagcaattgtgatgggtgcccccagtggcttgggaattcctctagcatcacatcctttctctctgctttgctactcctcattaaggactgccatggtttcttgtgttggcttcagccttggctctgccttctgcttagcaaccttggactcaaagcacttgacttttgtttaaatgtgtgtgtgtgtgtacatgtgatggttgtggggcttgtttgctctaggtacagtgatgttgtgtaagaaattacctacccattctttactttgtttttgccaagttcgcctgttacctagttctttaagaggaaaaggaggttgctcaattctgtcatattaatgtaagatatctcaaaatacttgggaaggaacacttctcctatacccatctcaattgtctagacatattttaagaaatatgattaatatggaatrcatcaaatgcacaaaacagataattttgcatcctatatgttttgttgagtcaatatttatttatttatttattgag

SEQ ID NO: 279958 - DNA, 598 bp, Homo sapiens
cttgcttctacaatgtggcatcaatttaactttccaaattaatctcccacttccaatggatatatggcaccccgtactccagccaaattcttcctctctgattcctgcaagtgccaccaagtattctgttctctttttctcctgcagatccctcttctctgtatcttctgtcaaaataccatttacacatcagcgtctacttggaatactaccttctactttcctgcctgcctgagatgtctcccctttctttccattcacagagcatttttttacactttttatatcatgtaacactcccatgttataattatgtgcatactgggttgtaggtgtttgaggcaggctgtgggttacttatctttcttgactaaatgctcaaaattacttgttaartagaactacgtatatgacaagaaagagctattatatggaaggaagactggagagagtgttagggacttagagccaattttgccatgaatttgtgggaaagtgccccaaattacttaatctcacagtctccatatgctcctcaacaaaataggaatattaagacctgctctatttatcttatagaatggtgacaaaaacttaa

SEQ ID NO: 279959 - DNA, 621 bp, Homo sapiens
atttatgacattaaacaattgatatggtttggctctgtgtccccactgaaatctcatcttgtagctcccataattcccacatgttatgggaggggcctggagggagatgattgaattatgggggcaggtctttcctgtgctgttctcatgatagygaatgggtctcacaagacctgatggttttaaaaacgggagtttctctgcacaaggcctctctttgcctgctgctatccatgtaagatgtgacacgctcccccttgtcttccacatgacagtgaggcctccccagccatgtgaagctataagtctaataaacctctttcttttataaattgcccagtcttaggtatgtctttatcagcagtgtgaaaacagactaatacagcaatcattatatttttaaaaacacttttattaatcaaagacacatgcagctctctcgatcagtctttctaatcaggatgagatcattggtactattacattgagttgaagcaattctggcaaaaagcttaggaatatgattatttagttagactgtactgccttatctgtgagacatatctgatatgttatagtctttgaaatgctaaaaatagtcctcagacctttgcccctccc

SEQ ID NO: 279960 - DNA, 440 bp, Homo sapiens
tgtgtgcaggatttctatccacatttccttgaggaaactttctctggatggagttctgtctcaagccaccacctgaccattggtcatcgaaaagtcctcctttctaacaacagcagcaaacaagaaaggcttatttctccttcattcattcatgcagccctgctagtgattatttttagtagctgtattcactggtatgtttatgtaaaaccatgcttgtgtctttttcaaccactcatacaagcaacattttgcttaaaggagccacaaaatacccaccaacccgtacctgtttaagcaactcctttcgaaggcttaaagtgaaggaggaatttgttattggcttgagaaccctaacactgacccaaattagcccagtggcttcttrtgtgtgtatatgtgtgtaacaagaattccttttacaacacgaatgacatcgc

SEQ ID NO: 279961 - DNA, 504 bp, Homo sapiens
catttacggaaggagaaaattgacccacatatttaatgttcccaaagaaagaaactgtgagctaaggattttacatcctacagagcttattttccaagaataaagggtacagaaaagtcattaccaacaactgaggaaatattgttcccataaaccccaccccccctccacaaggactctgctaaaatcaagcttgagacaatgaaaatgacgagaaagacatcaacataaggactgctggtgagcactaagcatgtgataactcacagcaggcataytaagtgagcattagaaaggagaaaatctaatatgcaaatggctctatgaccagacaattacgatatagtacaaccagaaaaatgtgggagagtgaggactgcattactaaataacaataataataaataataataaacaataaataacaatagcagtaactgtttttagtaatcggaagtggtgaaagtattattagtcttgttattctgagatcattgcatgagt

SEQ ID NO: 279962 - DNA, 522 bp, Homo sapiens
tttattggggaataaactatagaacgacatttgtaagaaagtgagtggagcaataagattgggcagagggaggctgacctaccatgtaggtgtaacaaagacacagcactggaagggtggcttttcacagttactcgaattgacagaagagagacaaaccaagttaggctttgcctagactagtcagcagatgcaggctatccccaggaaaccggcctagaagccccccgttttttgccatctttcctcagcatgtccacttacttcatcaaagcagcaaggacagtttccagaggaactctgctggcaaggcagggtcttatagaatgtaatgtaatcatggatgacgttcycctgcctttgctatgttctattagtgagaagcaagtcataagtcctgcccacactcaaaaggagagcattatatgaaggcatgaatacgaggaggcagggctcatagaggacatcctaagagtgtccccacggtccccctgacagatggtgatgggcactggagggcgc

SEQ ID NO: 279963 - DNA, 593 bp, Homo sapiens
gcaggataaattagttgcatgttaatactaactcagtcttctccaacttataaaataaaggaagagaagttattataagtcatgctggtccttatgaggtctcttgcaaataaatcagttttctagaaagttcatcttttttcttttgcttcagacatcacctacgtttaggcaataattttgccttttcaagctgtacatagctgaataaggtgtcttcatatccctgagataagtgctttctataagtattcagcacagtatcctcgtttaagtattcaaagaatacttttgtcttccaagtaatacttctccgccatggacaggtcacattcttgtttcagtacttactctcatttaattccctttaaagatctttctttgaaatggctttcttggagcaaaaataaccctaaaagacagttaatgccaggaaaacaacatgacaaagaaaatgaagaaataggcattgtcatatggtttggattttggrttttttttcttctgtagcattttttacttatttttccagttttctttccagcagttttcaaacactcagagatgaatctagttttcttgatttatgctgt

SEQ ID NO: 279964 - DNA, 606 bp, Homo sapiens
gtttcagtacttactctcatttaattccctttaaagatctttctttgaaatggctttcttggagcaaaaataaccctaaaagacagttaatgccaggaaaacaacatgacaaagaaaatgaagaaataggcattgtcatatggtttggattttggattttttttcttctgtagcattttttacttatttttccagttttctttccagcagttttcaaacactcagagatgaatctagttttcttgatttatgctgtagcttttctcaagaataaaaaagggtgactttatcttgagacccttctttgtaaggcagagtctttcctacttatggaattctaactacttgataatgaacaagggttggccctaaaactctaagtaccccaagaagaaaattcatttctaaaactgaaactaacatacaactgaagactgaatacacctttaaacgttcattgcaactttaagtaaatcaagtgctaatattggggagacatgcaggcttgacttcacatgtttttccaggaaaaattaagaagtttaaaaggayggattagtatatattttcacacaaatctaaatcataactctcatttcatacatt

SEQ ID NO: 279965 - DNA, 583 bp, Homo sapiens
aaggggattagccatgttacttgttgtttttcagaaattaaaaaagtatggtggataaggaatttgtttccttttggcccaagaaaaatgccaattatggtagctaaactgcccggatcacatatcagcatgctttggaaatgtgagaaatggatgggaaatataaacacaaagcaatagcgtacagttatgttatgaattaagccagaaaaatatcaagatttagtcactgaataagctgccaaggttaattttccctgataaacttgagcaagatcagaaaagaagcgatacgactatagtctcatgttttatataacacccccactgctttctagaatcaaattcttcattttctcagggaaaaataaaaaaaamagcaggctaagagaacatagtcaacaataataaattcgtgacattccctttcatttcttgatttttatttgatcagtgccctgggttctgagtttagatctctggcatagtaaaatcagagccaactctgccatgtagagtcatttaatgatgttctttcttttttaattataccatttggataccagaaataatcacttaaatt

SEQ ID NO: 279966 - DNA, 553 bp, Homo sapiens
aaaactaaaagtaaaatcataaatgcctagccgaagtcattatgagttcctttctctctcactgatagattgtgagcaggacacacgctcacgtgtttggatgctccgtgtcctaacacagcaggggtgttagctgaacaagtgatgaatagttgtgttgcaggaatgtctatgtaggaggctcaagtgtctcatctatggcctgtggtacaccatttttattttcactcccagcaccagagaaccagcacctgagaaaggcagagaatagaactcagcattaccgacctggagtcsggagctccagatctgcaactcatttcacctccttgggcctcaactcccactttctacagggggaagtttgggcttgtgaagatcttagataccttccagctctacgtgctctatggaagaaagccagtatttattgaatgcctactatgcgctcaaacccgggcaatgctatggggcatttggcgacaattcagtggacacgaagcctctcgcccatccctgattcaggtacccagtgcagaatcacccttggggg

SEQ ID NO: 279967 - DNA, 891 bp, Homo sapiens
aataaaatatttaaccttaaaataatgtgagttctaatacacctaatttttaatttttcaacacttttaagctacattaatgttatggaaaaatataaaaattaaaaaatataagctgggttcagtggctcattcctgcaatcttagccctttggraggccgaggcaggaagattgcttgaagcgaggattttgagaccagcctgagcaatagagtgagaccctttctctacaaaaaaaacttttttaattagctgggtgtggtggcactagtcccacttatttaggaggctgaggtggtaggattgcttgagcccaaaagtttgaggctgcagtgagctatcatcacaccactgcactccagcctgggtgacaaagcaaggccacctcttaaaaatgaaataaaagaaaaaagaaaaagaaacatataacatgtacccgatgaataaatatgtcttctttgtacccacaaaattaaaaattaaaaaagtatgaagacatgtatacaggggcacwcctgtaccgtaagatttaaaaaaaaaccttgtcctgttataataaataatagtttgtttggactaaatttttaaaaagtgaataataatttctatcactttgaagaagatgtcttttgattcttaatcttaggatatcctattttcctgtctcatcttttgtgtatatctttgccagttttaatgagggatgttagcttctgaggtcaggtctctgtctactattgttttaaatatttctgtccctggctattgcctcaagaaataaattcaaactttctgggtaaaaattatacatgaatttwaaaaaaaaaactaaaaagattacttaactctttcctgcttttttttcccaaaatttatgaggggtttttttt

SEQ ID NO: 279968 - DNA, 580 bp, Homo sapiens
atgtatacaaaaaaattcccatgttagaagagagggctattattagaaatctaatcaagacaaatggctatagagggaatgaagaaaatcataaaatagatattmcacacacacacacacacacacacacacacacacacaaatacagcagtctcaccaagtcagaaacaatatttccttctagtctgctagataacatggattattcctatagtctgagacattttgttaggtgttctagttatttgtgtacttggctttctcgtccatagctaagcccctcttttttgcacgtagattgggctcaaggcaaagctgcaactcagtgataaatattttgagattacaatcaggaattctatgacttctctaattattaataattgcatttcatgaaaaataaaactcttggataaacaaagagtttttaaaaaaggctattctggtatggttttatgtgataaatattcctttgtgtgtaagccaaagtcgtgtgaaataatgaggcattaatacaaggcaggaacgtattctaggtactggttcaggcatatatagcactaagataacgttccaggga

SEQ ID NO: 279969 - DNA, 602 bp, Homo sapiens
gttataagtagtttgagtagaaatatcctttcaaaacttgagctatctatactgaataatatcaacaaccatatcctcactgactatattagactagaactcattaaaacacacaatttaagtgatctaaaaattcacaatgtaatcattaaacacgaaataaaatatttaattaaaaagtcagtgtataactgaaaaaaatttcaaatggtaataattcaaaagttacagttctgttccctgtttcctttatctattgtatttcattttatcccatgggtaagaagatattatatagctggaaagtaaggaaaaactaacaaaagtagctcaatatactcagttagttgcttatataaaatagagttataactcagtaaaattgcagggttcttgcctttttataacaagaattttgtttcaatttagtgctttagattttgttttgtcactacctrtgaccaaacaacttgctatacagcatttgtcatgaggtgccagcatagactctgcttgatgacacaggaccagggaacaatgaatgaggggaaagaaaaagaattacaagggggaaacaaaataaagcatgtgaaggaaagaat

SEQ ID NO: 279970 - DNA, 584 bp, Homo sapiens
tgccagcatagactctgcttgatgacacaggaccagggaacaatgaatgaggggaaagaaaaagaattacaagggggaaacaaaataaagcatgtgaaggaaagaatgtggagaatatcttgtgtagtaactatatcatagtagtcactcagtagatgaaaaaagtgacaggatgaaaaactaaaaggagaaaagaaaatatgtgatgctttaattcgtgatatggaaagaatgctctgttctcacttatatgaaagagctaaataaggagaattcacggacacagagaggggaaaaacagactctgggacctacttgaaagtgaagggtggggggtggaagaggattagaaactatacctattggatactaggcttggtacccaggtgatgaaataatctgcacaacaaacccccataacatgaattggcctatataacaaacctgcacatagatccgtaaacctaaaaycaaagtttaaaaaagagaaggaatgctctactgtgtcaatttctcctcattctgtgacctattccaaggcaaagacattcctttaaccaccccaatgcgcaaatatttaccct

SEQ ID NO: 279971 - DNA, 530 bp, Homo sapiens
tagttgttgttagtaaccattaaaataagttgatctagttagggtagatgatttttactcaagctaactactgggctcattacactcttaaataccaaaagtaaaatcaaatgtcttttcttatggccgtgatagagtaatttgtaccccattatctttccattataaacaactataaaacaggacaaaatacacaaagcaatacttttcagacattggaaaagagrcagtgcagaaacatcattcctgagggaagagaaacacatgaggtattcctcatggttaccccagttgtctgccttgaaacatttttcaggcaacaatataatgaaatggagcctaagcaaagcatggtaacattaatgagctgaagaagcaatattctgaccccagacctacagaagtggctggaatttgctgtgtagggtcttgaaaaggaggttgctgcacaaagaaggagttctatgaatttgcagatggtcctagttaggtatttttacaaacactacactacacatatagaagatgaa

SEQ ID NO: 279972 - DNA, 530 bp, Homo sapiens
tagttgttgttagtaaccattaaaataagttgatctagttagggtagatgatttttactcaagctaactactgggctcattacactcttaaataccaaaagtaaaatcaaatgtcttttcttatggccgtgatagagtaatttgtaccccattatctttccattataaacaactataaaacaggacaaaatacacaaagcaatacttttcagacattggaaaagaggcagtgcagaaacatcattcctgagggaagagaaacacatgaggtattcctcatggttaccccagttgtctgccttgaaacatttttcaggcaacaatataatgaaatggagcctaagcaaagcatggtaayattaatgagctgaagaagcaatattctgaccccagacctacagaagtggctggaatttgctgtgtagggtcttgaaaaggaggttgctgcacaaagaaggagttctatgaatttgcagatggtcctagttaggtatttttacaaacactacactacacatatagaagatgaa

SEQ ID NO: 279973 - DNA, 600 bp, Homo sapiens
tcttatgaatttatgccaaaagatacaaccaccctcttgtctttcttctatgatattacattgtaattatatattttatttttaaatgaccaataccacctcctatgatgttatcaattgtaggatttaatatcatctatatttctacaattaacctttgcttttttttctctatttttgcctttttttaacatttgtttctacccagtggatataaatggtacagcaaaaatttgaagacctaaatatggcactgtcactcactcctgaacatactcacaaatacgcagatacagattgtttataacagatcaaattgataaaacaatgactaccacagcaacaaagatcaatataatagtaaaactattatctcttctgttttgaaaatcttatatctgaaggattaatatttaatgytttgcattgatataatttaaattatctaaaatatttcaacatatattctatccttctacctatccaaagggttaatcaaggttaaagatcactattctttttttataaataataatggtgctataaagtgctaaactagccaaagtcatacaaagtaatagaaccagaactaaaaatcat

SEQ ID NO: 279974 - DNA, 467 bp, Homo sapiens
atgcttggttttcctaccaagccactacattggctgaatctaagggctcaaagtttaatgcaagaaagaaggaaatgccagttttcaacagaatggttggatttaagaatcctaagtgaaacaatggaggtggagagaatccaaactggtaaaccaaactcaagtgargacaacatgaggtatcaaattacagagccaagaaattcaggtgtaagaacaacttcaagttacaaggtccaagacatagactaaaatatgttaaatgacaagatcaaacagatggttcatataggtgtattaggttgaacaatggccctgcaaaatgtccgtgtcctaatacccagaatctgtcaatatgttaccttacatggccaatgggtcttcaaagatgtgactaaatcaagtttcaagagatggggagattatcctggtttatctgggtgagttcaatgtaaccactagggtcc

SEQ ID NO: 279975 - DNA, 415 bp, Homo sapiens
atacatgtatcaaaatatcatgtgtatccccaacatatgtataactatgctatataaataacattaaaaaactagtaaaaaataagtcatacatgtaccatagagataataagaaggtagtgatataggtacagggttggtatgstaggtccaaggaaaaatcaatagaaaatgtcctgtccttatatttgtggtaagaaccgcctagattttttcttttttgtcgacaggacaaggctaagtcggtttctgtaatcttggtatagcctatgaataggttctaactcaccccagacgtaagcatttctgaagttctctacttatggctaaggtacttgtaatgctccactagacaatgaaagagaaaggacctaagcaacaaaaggcagagaatgagatcccctgagcaagatta

SEQ ID NO: 279976 - DNA, 467 bp, Homo sapiens
agcagtggcagccactgcacgcagacatgaggcctaggctaaaacagaaaggtcaagttgtttgggcagaaagcctacagggtgcggtcctggctcttgttaagaactctgaccttactaaccatgcctagaaaggaaaggagttgttttgtagaagggattggggtttgggagattagccagacaggatcagcagggagagcacatgtgtttttatgagaattatgccgagataggtaacagatgaggaagacatttggkcttgactgaagtaatgggggctgtctgtgaagacttgcggcaatacagcctaggtaatttgctgagcctgatgggtgtcagggtcagtccaagtgaaagcaaagagaggctgggatgaagggtgcaaatgaataataaagaaagcatgtttgagatctaaaacagaataatggattgtggagggaggtgttgaggataggagagta

SEQ ID NO: 279977 - DNA, 263 bp, Homo sapiens
tggtcacatggttaagattttaaggacataaaacracatgagaaacttcatccggtattggtttcaggggcctgcagcaaagtttgtaactgacaagcctgccaggctggcttgaaaagtaggggtttaggggtccacagcccacgttctatcctgtggcactgccgctccattacagaaagacaaattctttgcacaaagtacaccagatttgctgcagcctaataagacgagtttcacaaatcctttttttctattaatca

SEQ ID NO: 279978 - DNA, 571 bp, Homo sapiens
aggatgtttatcatgtgggcagaaagcacgcttgctcagctccaactgacttacattgttttgtaagtccgtgttgtaggaggaaagtatactgggttagacagacaatggttttgtccagaatatggcttctattgatcattttgatattggtcttataggggccaagggaagacttcctcactctctgaaagtttgctgaaaataaactgacaagaggcagattaatatgagaaaatgcatacagatgtattaacgggaataggggagaatcacagagtgattacccaccagacaaatggtacacagatggttatatacccttcttaagggagagggagatggagaagtgtggatattttggtgggggggtggggcggtaaatgattttaggggaatttaatggccttgaagaacatacaatggcctgggacaaagtctgttaggtctgcaaaacaaacartggtttgggacaagtctgtccagttgtgttgacagactgcagcccttcttcctgtgataggagtttagttaatgaaaaactcagggaagggatcacaggtaattgttt

SEQ ID NO: 279979 - DNA, 582 bp, Homo sapiens
tttgcctttgtagtccctctgttcagcatagggcctgacacatacacatgtataaatgcctcttgaatgaataaattagatattgaataagagataaaatgggatattttaaacattcagtacctcagtagtgtttattttcatgatcttgtacagtaagtaaaaagatgaatttgcacagattatgggcaagaggtagttagtgttaaaaagaaatgaaagactcagaattaaatagaccttgtacactacttctactactaacatttatggaggttgcattattctaagcattttacatgtattgactcacttaaccctcaaaataacccccgttttatagaagaatttggaagagaaagattaaaaacttatccagttagtggctggctgagatccaaacctggcagagcaatagatttttttcyttgttgttgttgtttttttttttttttttttttttttttgagacagggtctcactctgttgcccaggctggaatgcagtggtgcaatcacagtttgctgcagcctcaaactcctgggctcaagtgatcctgccatgtcagcctccggggactac

SEQ ID NO: 279980 - DNA, 481 bp, Homo sapiens
atgcactgccatcaatgacaactcgagccgttttggaaaatatctggaaatgatgtttacaccaactggagttgtgatgggggcaagaatctctgaatatctcctggaaaaatccagagttataaaacaggcagcgtaggtgcactactttatcactgtgtttttgccctgcagtaaaaactgggagactttggaaattttaatggttcagttttcattcttgttcttaacattcccctaccctccccaagggcaaagaattatttaagcaaaggatcagtggtagtttttgacctaaaagaaattaatggaaagagtacmaagggctggggtgggcgtgctttagggatgggtatgcttgtttctcctgagttggttgtgtcaggtagaatttagcagcattgcagacattttttaaaaccctgaggccccttaaaattgaacttgttggttaaaaaagaaaaagacaccaagaatattt

SEQ ID NO: 279981 - DNA, 602 bp, Homo sapiens
aaccttatgatggtaaggaaaggaaatkactttttctttactacattatctttacaaaaatatagaaagggagtttttcatagtcagaactttatgtgcctgaaatttaactcattttttttagagtttcctaaagacatcacaatcatttacatgtatcactttagctttgggtacaatcctatatatgtaaagtgtagagtctatgactttagctttattagcttatgttagatgccaaatttctactaaaagatgaaaaaaaattattttgcactatcgcatgacatgttctattaaatcataccgttttcccacctccaggtgcactgaaataagccacctcccaaggcctccaggaaaggtcgtttgaaagcctttataattgtattctaatttgtagtagttatagtatgcataacaatgacaacattgacagagaagagtgatcgtgttttcatgtacactcatttcataatcttcgttggccccataaggaaagtaagaaaagtagcttttaccagttagacttatgaaaaatacagacttttaaaagttgcttttagttcagaacttcttctgtctctgactttattttgacc

SEQ ID NO: 279982 - DNA, 538 bp, Homo sapiens
tccacagttacctggtctaccagacaccacgtgggtgttcctgctccctgttgtctctgcatccgcgctcctgcttcgcctctgctcttggcctcatccctcttggttttgaaccgggacagctttatgtctctctgggcttccagttgcagcattgacaatgcctacatagactgtctccctcagaggaccttttatgtgccatgtaggcagataccgtgtgctctcctgcttggttcccaagtggggctctcacagacttcagtgggaagttcactgggggacttgggcaatgatggggaaagaaagggaagaaaktcacacctccaggaggaatggaaatggaataccttgagatggacctttcagaagtcttaattctgcctgccttatgacttgaacagcctcccctctgatggaatggacagtagggctggaagtggagcagggaacaggaaggtgagtcgaggtctgggaaagagtaaagtgcagtaggaagctctgggaattggagtctgatgcctgtgttgaatgtcag

SEQ ID NO: 279983 - DNA, 544 bp, Homo sapiens
tatataaagttgtataagattatatatataataatcaatatataaagttgtataatataaagttgtataagattatatattgattataataccatataaatactgatattgctaccaggacagcaacaataactgagcaatagaagaaaaagatgttgtataagttaggctgggccagcaatgttgcagtgacaaataaacttgagatttcagtggataaacacaataaaagcttatttctcactcatgtgttgttaggtcagccacacttccttcatcgtgtagctcgcaatcgaatcatgtggaatccaagattagcacagcagaagaaatgaagctgaagagtcagaaaatgttctaagcagccaccgctatcgctttccagtgtgcccctagccagaggccagtcacatggmagaatgtgttttcaaaagagggtgggacaacctcccttgaaatccagcattctcagtaagcggaaaataaagtggacttagtgaagtcaatgttccatacagattcactgaacactggtgggaaactt

SEQ ID NO: 279984 - DNA, 613 bp, Homo sapiens
catcagtaaataagtgacatgcaggcttttatggggtggtgaygtcataaagatgtttacaaggaagggagggtgtctgaggagtctggcagagaatggggaaagcaagatggtgtcatctggttggaggggaagtaatactaggtttgtaattttctgtatcgtgttatgttttgtattttcatttgtatgacttctaatttctttataaaaccaggtcactaacttggtgacattttcatgcatgacttgatactataaaacaacattcactactattctttttgccttatgtactatcatttacatgtttgaacttctctatttcttctcctctcccaataaatgttgagctttgaattgcatatagattatttttcagtcagagattatcttctgaaaaaattctacacacatttctaattccttatattttctgttactactactaatactattaatactactactaataataatagtgagcacctactatatgccaggcaacatactcagaaatttatatgcctaatttattactcctaacaacccctgcaaggttggcatatagccaacattactatatcgtattacagatttggaaactaagtat

SEQ ID NO: 279985 - DNA, 589 bp, Homo sapiens
ctggtcaacatggtgaaacgctgtttctactaaaaatacaaaaattagccaggtatggtggcttgcacctgtaatcccaactactcaggaggctgaggcaagagaatctgcttgaacctgggagtcggttgttgcagtgagccgagattgtgtcattgcactccagcctgggcaacaagagagaaagtccatctcaaaaaaaaaaaaraaaaaagaaaaaagaaaaagaaaaagaggacagtaggaaaaataataataataaccaaagttaatattatcaaaaaaacaaaaatagaaaaagtaagtttaaatgtttataaattatttattccttattaagaataataaaacagataaattccttttgtctgagttggaaaaaaagagcaaaaggagaaagagattaggaatagcaaaggaaacatgtaagtcctagaatagattaatagaattgtaagaaaacacagcacgcaaccctatggcaataaacatgtaactctagagaaaaggtatacatttctaggaaaacataaattaacaaaactgaattaagaagtggaaatttgaacagaccaattgccatagaaag

SEQ ID NO: 279986 - DNA, 671 bp, Homo sapiens
cttttcacaaagatggatttacaatgaagccaacagtctaagctttagggccttccctggaaatggcttctctcaggaccctgggaggggcaccagcaattttctattcaaattgttttatccatttacttaaataaagcctccaaaattaaattcacttcaggccttgcaaaagctggatccactcttatttctatacttcacaaygaacttacaatttctttgtgaatttgacaatgaagcctgtcacagcaaaaatcaaaacaataaactgagcagcaagtgaaccatgaaacatgttatttctactaaaccccaccttggcactattatttcagaaaaaaaaatcacttttgattaagttagtccatttgaacattggtttattgctttattatatttaaaatatataaaagtttcatagttaggtaagtgttataatcataaagggtgtacagatgatcttaattttggtgctacataaaccacactctaagaaaacgtatttactttagcaagagagttcatgagaatttctctctctaaggagaaacttttgaggtactgaagtttgaaatacactacagtagcctaaaaacctggccagtgctcaagggaaggaactggaacaaggtagatatggttagcttcgtaatggagtgaaggactca

SEQ ID NO: 279987 - DNA, 483 bp, Homo sapiens
atagttctctctcaaccccaaccaaactcaggttctctgacaatcaaacmcaataaaaacaaaagaaatgtactgggcgtggaggctcatgcctataatcccagcactttgagaggccaaggtgggaggactgcttaagtccaggagttcaagacctacctgggaaacatagggagaccctatctctacataaattttttttaaaaaattagccatgcatgatgacacaagcctgtagtcctagctactcaggaggctgaggtgggaggatcacttgagcccaggaggtcaaggctacagtgtgcagtgtgctatgatcctgccatggcactccagcctgggcggcagccaaaaaaaaaaaaaaaagagaaatgaaagaacaaacataaaatttagggctatctaatttatacaaagactgtcctgagttgtttttcggtttttggttttgctttttttttttttttttttttttttgagaaa

SEQ ID NO: 279988 - DNA, 616 bp, Homo sapiens
actgtactaatacaattgatgttaaatatatcagactcaaagagaattgaatctagcaatactactacaatttgggcatggaaccagtaatagccaatgggaggaaggacaggttggcrgggtggaatgtctgaggcttatgattatgggaaacagtaaaatagaaggtcaacagcagaagtagtaaacaaacattggaggttggtagaacacagcaactaaaaaagtccaatgtaaatcaaccatggacatttggggaaatctgtcagccaacaatacagcctcctaattataggtccaagaacaagattaccatctccaagagaatagatgagaataaggctaggccttagtcttggagaaaccagaatctaaaagagataagataggaatgtaggtaatgtaaaccaagcagaagtctagttaatggaactgttcccaagtaagaaaccaattattggtgggtaccatttgacttggtggtgagccaattgtgtgtagggctctttaaatgaccctacccccggaataacaatgatactgattccacagccaggtacagaactcacctgaaagagagatggtgagtggtgagtgatctcacagaggggctcag

SEQ ID NO: 279989 - DNA, 569 bp, Homo sapiens
tttgtgagtttggctaaagttgtttcactggatggggagtttggggagtgggtaggaggtagatgtgattgttgtggattaaacgcagaataggaagaaacaaattggagagagtatagacaactctggttgagaacacagactcaggagctagactgcctgactttgaatgtgtttcccaaatgtgatacctcaggcatgttatgtgttctctgtactttgatttctccatctataaacgggggagttcttacctcatagggttgctgtgtatggatgacacatgtaaaatgcttagattatatgctcactaagtattaaataaaacaaacaatccatattgtcacttctcttaattcttaaaaagttggggtccttggaaacaagttctattttcacttctggagactaaactaataataaatgttatttgagcaactstgatgaaatttctggaaatgttgatctattttaacagtgcttgatgacagacttgcattgaaccacctcaagggtgtgtcacattccatttcccagttagtctaaggttccagttttaaaaagcatag

SEQ ID NO: 279990 - DNA, 500 bp, Homo sapiens
aaccctacctatatacgctatattttttcatatacatacgtatgatgaagtttaatttataaattaggccccgtaagagattaactacaataataataaaacaattctaacaaaatactgtaataaaagttatgtgaatgttatctttctctttctctctctctctctgaacatcttattgtactgtatgtacctcaggtaagtgaaacggcagaaaacaaagccactgataaggggggactaccgtatttcccctcytctaatttgctccagcctgagctttaatccccagttcattcacccagaggaagctgtactggcagaaaatggacagcaggtggcgccaaagtcaattttatcaggcttccttctaaatgcatcttcccaggataccaacatgccttagtccgctgggctagatgctacgggaggcagattcttaggagactgtgtagattactgttctcctttgttaaacaagtattttacaaattgtttag

SEQ ID NO: 279991 - DNA, 532 bp, Homo sapiens
ttattcattcatccattcatccatttatttagtttggcctgctattttcagatgcttctggagtacagaaccaaataggacaaaatatcccatgccatgcctaagggatttacagtccagcaggagtcatctaagcagacagggtgggctaaatcaaggagaagaaggcaggattcacaagtctaggctggcagtgtggttcagaggcaggaggtcagaaagtaggcaaaggcagcactgtagaatcctactgrtgacctctgatgctaaagcaaaggctgctgttccccttcaggtggaggtaatggttacaaccttcactgaatcttgatattgctaaaactggaacaggggtgctgcctccctcatgctgtctctccatttccccttacttagtgaacactccaatgttcctaggctggagatcttttgcttattttacttactctaggaagaaaggagaaggcataagggaaggtagaaaaagaaaaacagatgccagtgtttctcctttcatttctatgcttgttct

SEQ ID NO: 279992 - DNA, 591 bp, Homo sapiens
ctcacttcattgaaaatgtacttagtaaggtacatctgtaacactaaacatgctgtaattaccaaccatgacacatatctgtaagaaaacaaatcaggtgactaatctkctggaaaatgcacattcaaaatatctctgacaccttgataatgttctccaagaggatttaataactcatcattctcatagctcaatcttgtactcattccttatgactgaatttttatccatgaagaaagggaaaaaatgaggttatagcggggtaaatacgtgactgaaaatggtggtagacatggatgcaggccttgcctacataacaggcagacatgggctttgaccccccaggaagaaaaattaggcaagagttctatctaaaattaaagacgcccatgtttctaatgctcattagctgacatttatcaaggaggatcaccaatcattaagttatttttataagcagcttaacagaagctgtgtttccatgagaacagtcaatgttgggaaggtaaaaaaaaaaaaaaaagaaattaatggaacttgtagtgatcttaataatgctgtatggaacttattcattaatctggttttcct

SEQ ID NO: 279993 - DNA, 509 bp, Homo sapiens
aggttgaaactccgaggatgacttatttcattgatcttcattagtatgaggactttctctttgacttagttgtctcttcctagctaggaagttctatctgcaggtgagggtagaaagctgaagggaaccccctggccatgcatgtctatgagaggagactcagggctagagcagaacatgacatgttaggaatctgcaccagaattgatttagaaaatgtagggagggatatagagcatagatacttcaggacytagagatattgctttgtttcttataagaactgtttaccttctaatagaaggcattttaaaaactggaactggaaatttgaaatggatgtgctaaatgtacaccttttctttatatactatcaacatcagcaggtataatgattataactaatcaagaatctgacagctgccctgtgtaggaattgtaaattcaacataatttataagctgaaaaagatacaatggactggctcaatacttgggttaaaataaatt

SEQ ID NO: 279994 - DNA, 532 bp, Homo sapiens
ctattagtgtcagaagaattgtgacagataatttatgtggaccatcgatcatctagtccaagtttcttaccactcatttccagtattgaaaagtgaagtagttgaattttcagctcctgtgggacagtgctagtcaattatatagaaattgaagtccctagagagggcagagttgggttttgcccttcacattctcctattcctgatcacttggacatcaaacaatacatggcactgtagcagctgccttgtgaccatgaagacaaaaactatacactaaggatggtggagcaaaaagaaaaaatcatcactgagtgactgtaccactcctagatatctttccctcagaaacaagtcactagcctctttaaagcattgtaatataatagttttcagtttcttgcagccaagcacattccaactgaatacacttatccayagggaaagtactgctttgcttaacagggaggatatcatgtctttttgaagaaaaattttccctttgtttcccgacagaactcagtcaactgat

SEQ ID NO: 279995 - DNA, 559 bp, Homo sapiens
ggacctgcccagctctccccagccttgtcaacattgattaaatagaagctgctatcatcctggggccatgcccacaattactctaccaatcaccaatgagctgggtgtttgcttcctctctttttattttcatctttcttgaatattaagcatcatcacctcaaaagctcaaaggaaagtaataataataataataaaaatctttggcagctaactcacatatggcccttttgttgctcacacagtctttttctttagctatataccagatgtccatctggagcctggatcatggctttcagtggtcactgtgatccacattttgctygtttcattaccatgtttcacattttaagttcctttcaaaacactgagccagtatatttcattttgatgtgaggagaattatgcaagtaacatctctgcccccatttcttccttactttccaagcacttaaaagagagaataacctttttgctaataacactatacactaaaggatttcaaagagtaaccaagaagaaaaatcagaggcagcatgatggggtctcagtgata

SEQ ID NO: 279996 - DNA, 569 bp, Homo sapiens
ctacatgtctactttttccctcaagtttaggcctaagaccaggctgattcctattctagcctagactttgccactaactaatcatacgacttcagagaagatgcttttcctttctttgtctcagtttcctaatatacacataatatgaataataatgcstgccctaccttatcgtgggttgtttggagtttgaagggaggtatttgaaagtgctttataaaatctaaagtgcagaatgtagtttgtcgagattttaatccaatttatggggtttgagatttgctgaattttaatccaaccttcaggaaatgaaggatttgagaaattcactcaacctaattctagctgccaagttttaatagtctcaagaggaaaaaaagcaattcttccactacccaccaaaaaacttctttcccagacagatgattaagagaccttctcccctagaatgtttctgtaaagtctgactctgatgaggaaacaaagatatgaatgactaattaattagagagcactactcagaaaataaagatatgagtgactattaattaaagacagctactcttata

SEQ ID NO: 279997 - DNA, 569 bp, Homo sapiens
ctacatgtctactttttccctcaagtttaggcctaagaccaggctgattcctattctagcctagactttgccactaactaatcatacgacttcagagaagatgcttttcctttctttgtctcagtttcctaatatacacataatatgaataataatgcgtgccctaccttatcgtgggttgtttggagtttgaagggaggtatttgaaagtgctttataaaatctaaagtgcagaatgtagtttgtcgagattttaatccaatttatggggtttgagatttgctgaattttaatccaaccttcaggaaatgaaggatttgagaaattcactcaacctaattctagctgccaagttttaatagtctcaagaggaaaaaaagcaattcttccactacccaccaaaaaacttctttcccagacagatgattaagagaycttctcccctagaatgtttctgtaaagtctgactctgatgaggaaacaaagatatgaatgactaattaattagagagcactactcagaaaataaagatatgagtgactattaattaaagacagctactcttata

SEQ ID NO: 279998 - DNA, 550 bp, Homo sapiens
ttaagtcatttgctcaaggtcacatagctmggaagtgttggggaatcatgcccaggccctcaagctccaggggctgctcttaaccactgccctgtgccttctcctccagttaagatgccacaattctgcatcctgggatttaatctccttggcagaagaaaactctctttgggaagtgcccttggctgccctctgaggcctcaagaacaccacaacacactgctcaaaggacactaactgaccagcacccaatcatgttctattgctaacctgctgtgtgactggagacaagtccctggacctctctgagaatctgtgcagtgtaataagaatgtctcctttacagagtggccttcagccccacatgctgctacctggggtgataatcaccaccctcggcattgggtgggggctacgtacatatctcgaatcatctccacaatggctatggtcatttccccccaagacagaggtcaaaaccctgaggctcagaaaggaacagtaactcactgagggggatacagcttgtcagtggcaaagttggaatttg

SEQ ID NO: 279999 - DNA, 550 bp, Homo sapiens
ttaagtcatttgctcaaggtcacatagctcgsaagtgttggggaatcatgcccaggccctcaagctccaggggctgctcttaaccactgccctgtgccttctcctccagttaagatgccacaattctgcatcctgggatttaatctccttggcagaagaaaactctctttgggaagtgcccttggctgccctctgaggcctcaagaacaccacaacacactgctcaaaggacactaactgaccagcacccaatcatgttctattgctaacctgctgtgtgactggagacaagtccctggacctctctgagaatctgtgcagtgtaataagaatgtctcctttacagagtggccttcagccccacatgctgctacctggggtgataatcaccaccctcggcattgggtgggggctacgtacatatctcgaatcatctccacaatggctatggtcatttccccccaagacagaggtcaaaaccctgaggctcagaaaggaacagtaactcactgagggggatacagcttgtcagtggcaaagttggaatttg

SEQ ID NO: 280000 - DNA, 555 bp, Homo sapiens
tcctgtgagatgtatctcttgtrtctttaaaccctctatgggaagaggtcatgtaagaaatcaacttattatgtgtaaaattgaggtagttggcctaatagacttggttattcagtttcttgggcaactttggcttgggagggggcaggacaacagatattcaagggacctcagagaccaccttcttatttagggaaaatgaggcccataatgttatttcttatgtgctattaacttttaatttgcttgtctgaaggtgtagtagggttatctatttatgcagcacattcattaggaaatgttgaatcacaatgaatcacaaaaaagtatttacaatatcctactgactgaaaaagcagattataaaacagatcagcctgcacagatgtcagggtcgccctcacctgtgtgcttattaaaatccagccatccctggactctggagagaaagtatccaggctctcttaggatggggcctgacaacgatgttttcaaaaggctccacagcaaaatctgaggactctttattagctggtgacctcgagcagattaacc

SEQ ID NO: 280001 - DNA, 555 bp, Homo sapiens
tcctgtgagatgtatctcttgtgtctttaaaccctctatgggaagaggtcatgtaagaaatcaacttattatgtgtaaaattgaggtagttggcctaatagacttggttattcagtttcttgggcaactttggcttgggagggggcaggacaacagatattcaagggacctcagagaccaccttcttatttagggaaaatgaggcccataatgttatttcttatgtgctattaacttttaatttgcttgtctgaaggtgtagtagggttatctatttatgcarcacattcattaggaaatgttgaatcacaatgaatcacaaaaaagtatttacaatatcctactgactgaaaaagcagattataaaacagatcagcctgcacagatgtcagggtcgccctcacctgtgtgcttattaaaatccagccatccctggactctggagagaaagtatccaggctctcttaggatggggcctgacaacgatgttttcaaaaggctccacagcaaaatctgaggactctttattagctggtgacctcgagcagattaacc

SEQ ID NO: 280002 - DNA, 647 bp, Homo sapiens
atgccacatttatcccactctcctaccaagccacgggtctgcatgtgccgggcatttgcctctgacttggcacatctggcttcgaacccaggatgcccaaccctctgtcgacttatttagttagtcttgagagacccagaagaacrtttactatcacttcctgaaaggcttccttgatttattcagcaagaacaatctgtcctcatcctcccctgacagcatttgtcacctggctcatttattcactaacacacatttactgtgcatctctcctgtgctgggttttggccctgggggtcaaacaccaactgagacccaccctttgccactactgtcttctggtttctgattccaccatcccctagagggaggctgcttccaccagcacacagcaggtccttaggaaacctcccctggctcctgcctctctggggactagagatggggatgtaagtgctgaggttgcccagatgctcctgcacacatgggtggccacgtgccccctgtaagagccacttaacagacttggggcagagagacaacgcctctgtgggaaaacagcttgtgttgcgggcatctgctgtgatatcggtctgtatgggctgtcaaggtaagttcagaaccagtctgatggtctgctatcgtct

SEQ ID NO: 280003 - DNA, 523 bp, Homo sapiens
gttttttcattccaagctgtagagcccactttggtgcttgctctgrcagcaagatttgctggaaaaatgtgaagtccaccagcacaaaagctacttgtatgatattatacaaatgatcttttcacagattgacagaactgaggaccccatagtttgcctagaatacctcagatgcctgactcctgcagatgtgccatgtgtctgttcagaacactcttcactacctgggcctttgcctccctaacagctgctgtcctgttcagcctcagtttcccttccttggaagcctttcctgaccacctagactgcataaatgctcctgactcccaggtgcctcccagattgtagtacacttcacactgtattgcttgagcctgcttaactgttttctttccccaggattctgagagcatcatgtgggcagttgctatgtctcttctgtacctagtgcagtgtctggcatccagaaggcactcaataaatatttggtgttgggtctactgcctgtggaagctgtgacttt

SEQ ID NO: 280004 - DNA, 523 bp, Homo sapiens
gttttttcattccaagctgtagagcccactttggtgcttgctctgacagcaagatttgctggaaaaatgtgaagtccaccagcacaaaagctacttgtatgatattayacaaatgatcttttcacagattgacagaactgaggaccccatagtttgcctagaatacctcagatgcctgactcctgcagatgtgccatgtgtctgttcagaacactcttcactacctgggcctttgcctccctaacagctgctgtcctgttcagcctcagtttcccttccttggaagcctttcctgaccacctagactgcataaatgctcctgactcccaggtgcctcccagattgtagtacacttcacactgtattgcttgagcctgcttaactgttttctttccccaggattctgagagcatcatgtgggcagttgctatgtctcttctgtacctagtgcagtgtctggcatccagaaggcactcaataaatatttggtgttgggtctactgcctgtggaagctgtgacttt

SEQ ID NO: 280005 - DNA, 523 bp, Homo sapiens
gttttttcattccaagctgtagagcccactttggtgcttgctctgacagcaagatttgctggaaaaatgtgaagtccaccagcacaaaagctacttgtatgatattatacaaatgatcttttcacagattgacagaactgaggaccccatagtttgcmtagaatacctcagatgcctgactcctgcagatgtgccatgtgtctgttcagaacactcttcactacctgggcctttgcctccctaacagctgctgtcctgttcagcctcagtttcccttccttggaagcctttcctgaccacctagactgcataaatgctcctgactcccaggtgcctcccagattgtagtacacttcacactgtattgcttgagcctgcttaactgttttctttccccaggattctgagagcatcatgtgggcagttgctatgtctcttctgtacctagtgcagtgtctggcatccagaaggcactcaataaatatttggtgttgggtctactgcctgtggaagctgtgacttt

SEQ ID NO: 280006 - DNA, 523 bp, Homo sapiens
gttttttcattccaagctgtagagcccactttggtgcttgctctgacagcaagatttgctggaaaaatgtgaagtccaccagcacaaaagctacttgtatgatattatacaaatgatcttttcacagattgacagaactgaggaccccatagtttgcctagaatacctcagatgcctgactcctgcagatgtgccatgtgtctgttcagaacactcttcactacctgggcctttgcctccctaacagctgctgtcctgttcagcctcagtttcccttccttggaagcctttcctgaccacctagactgcataaatgctcctgactcccaggtgcctcccagattgtagtacacttcacactgtattgcttgagcctgcttaactgttttctttccccaggatyctgagagcatcatgtgggcagttgctatgtctcttctgtacctagtgcagtgtctggcatccagaaggcactcaataaatatttggtgttgggtctactgcctgtggaagctgtgacttt

SEQ ID NO: 280007 - DNA, 606 bp, Homo sapiens
catagtttttctttgagatgcatgcactgccctccactgcccagtttcccctctttgtaatgaggcatcagagtgagggtgaagctgggacracttccctcagccacaaccccagaagattctcaggctcttgctgcctcatccaaatatcatgtgacctaccactctatggctgagagactaaatgaactatgtgaccttggagaagtcatctaactttgctgggcttcctctgtaaagtggggatgaccctgtttgtcttacaggctgctgcaaggactcaatgagagccagctcctggcccagagcagaaaatgaaacactggcttccttgagtcccccctgctcccctcctcctagttattagcaaatgttcctccctcatggttgcaatgaggttcacttgcagtcagctctcaacactgcacaggtgagcacccctgccctaagcaatgggcacacaggcctggacagggcatatagccagacctggcctaaagaggttgagcaacacactaggggtcacacagccaactgagacaaagcccagtgagaatctcctccttgttttcccagctccagtggtgtgaccctgagcaagcccct

SEQ ID NO: 280008 - DNA, 480 bp, Homo sapiens
tgagtcccccctgctcccctcctcctagttattagcaaatgttcctccctcatggttgcaatgaggttcacttgcagtcagctctcaacactgcacaggtgagcacccctgccctaagcaatgggcacacaggcctggacagggcatatagccagacctggcctaaagaggttgagcaacacactaggggtcacacagccaactgagacaaagcccagtgagaatctcctccttgttttcccagctccartggtgtgaccctgagcaagcccctttcttctctgggcctcagtttccccatgtgggaagtgaagggattggattagtgctctctggagtcccttcaggctctgatgtgccaggcccttcagaatccaggagaacattctgacaatattggatttatgcatttcagtttcatcttattagcatttaaattactctgtattgttacatttcaatgactcaagaataggttag

SEQ ID NO: 280009 - DNA, 508 bp, Homo sapiens
aaaataacttctggatgccaaattcttctgttttaagacatgctgaatttaagtgccaccttaatatgtatttttaaggtcacttttccattgaatcatcaatgactgaggtggggcacaagtctggtctgaagatccccagtgatggaagcctagctctgccagtcactagttatgtgacttgggcagggctcttaatcctctgtgccttggttgaccctccccaacatgragacaaccctacagcctacctcacagggttttgtaaggattgagatagagctagcacagtttctggcaacgaggaaacacttgttaaatggtgactctcctatgaaaatttaacttactccctgcctccaatcgctcccagaccagcatgtaccccatagtgccatatttcaaagggaactcagctctgactttcccatgcccaccaggctccttgtcacctctcaggtggctggggaggcctccagcttgttggcacagcaaacaaggctagttt

SEQ ID NO: 280010 - DNA, 508 bp, Homo sapiens
aaaataacttctggatgccaaattcttctgttttaagacatgctgaatttaagtgccaccttaatatgtatttttaaggtcacttttccattgaatcatcaatgactgaggtggggcacaagtctggtctgaagatccccagtgatggaagcctagctctgccagtcactagttatgtgacttgggcagggctcttaatcctctgtgccttggttgaccctccccaacatggagacaaccctacagcctacctcacagggttttstaaggattgagatagagctagcacagtttctggcaacgaggaaacacttgttaaatggtgactctcctatgaaaatttaacttactccctgcctccaatcgctcccagaccagcatgtaccccatagtgccatatttcaaagggaactcagctctgactttcccatgcccaccaggctccttgtcacctctcaggtggctggggaggcctccagcttgttggcacagcaaacaaggctagttt

SEQ ID NO: 280011 - DNA, 601 bp, Homo sapiens
caggtatcagctggaggccagtttctctttcaagtaactagcatcttgaaagttgtagtcttggtgatggtttgaaaacaacgtgcattctaccttgttctcacttgtttcagtttcccattcctctccccgacttaatattyatctttacttctcaatttactgattggttgacttcaggacagcaaaaaacacagaagaaatgacctgttttttaatagttataataataatttaagtcaaatccttataataaatgtcataatcaatattattccttgtaatacattcttttgagtactaaatgatatataaacaggaatatggcagaacatgccaagtgtttcaatatatttttcctatttagcacatatctacagtacatatgtcatgaccccctttgcagctggagtaattaagcatttgagccaatgaaacgtatgtggaaatcatgtatactaggtataaacactctccgtgtcttcctacagtgggctgaacagagataacttgtacaaggtggaaccagaagtatgaagagcctgggcccttgagtaatcacactgagaaacagtatgaccaggaacaccccactgaaatc

SEQ ID NO: 280012 - DNA, 660 bp, Homo sapiens
aaaagaaagaaataactgacatctaaactggaatagaagtcaaattattttgttttagacaatgtgatcttgtatcaatacaaaacataagaacttcagcaaaacagaaagcaaaaacacaattagatctgaaaaagagttttagtaaagttgcagaatacaaaaatyaacctacaaaaatcagtagaattctgtatttcagtagtgagcaatcttaaaaaaaaatcaagaaagtaatcctatttacaacagctacaaataaaattaaatacctaggaatcaactttaccaaagcagtaaacaatttctacaataaaaactataaaacactatcaaaagtaattgaagaggacagaaaaaaataaaatatattccatgttctttgattggatggatcaatattgttaaaatgtgcatactatccaaaacaatttacaggtttattgcagttcctatcgaaattccagtgattttcttcacagaaatagaaaaaataattataaaatttttgtggaaccacaatagactcagaatagccaaaaccattctgagcaaaaagaaacaccgaaggaatcacgttacctgacttcaaacatactacagggctgcagaaacaaaaacagcatggtagtgaaataaaaacagacacatagaccaagg

SEQ ID NO: 280013 - DNA, 392 bp, Homo sapiens
gatttattaactacactggagatgctgttaaaggaatagctgaacaattagggctactagccagagggcttgggaaaataggacagccttaaacatgatattagcagaaagaggaggagtttgcatcatgattaaaactcaatgttgcaccctcatcccaaacaacaccgcccctaatggaagtataacaaaggcattgcaaggtctarctgctctgtccaatgagttagccaacaactcaggggtaaatgatcccttttacagaatggctagaaaagtggttcggtaaacggaaaagaataatagcctcaattcttacttcccttgcagtcgtaatgggtgtacttattcttatcaggtgctatgtcacatcatgcatccatgggttggta

SEQ ID NO: 280014 - DNA, 568 bp, Homo sapiens
acctcccttaactatccttcaccttatccaaagaagcttgttcttttggaaaatcaagcagaagaactaagccaagacatgtttaaaaagtttgaagagaaaaatctgtaggaaaatgcaagaggagggattgttagatgtaagttctaaatttctcttcaaagaatcaatatgtcagtgtgttcaattctttgccgtctacttttaaacttaactccctcgcaaagcaacctttttcgattacctactccaccctgactcattctgattacctactccaccctgaatctttytgatcacctgctccaccctgactcattctgatcacctgctccaccctgactcattcggatcacctgctccaccctgactcattcagattacctgctacctgctccaccctgactcattctccaccctgcataaccaattattttttccccaccaaagcacccaccccagtcactctccttaaattagccaaacagaattagagtttagcctgtggggttttaccctagccaataggggaatgacacagcagcaggggccacatgtgttgcagata

SEQ ID NO: 280015 - DNA, 568 bp, Homo sapiens
acctcccttaactatccttcaccttatccaaagaagcttgttcttttggaaaatcaagcagaagaactaagccaagacatgtttaaaaagtttgaagagaaaaatctgtaggaaaatgcaagaggagggattgttagatgtaagttctaaatttctcttcaaagaatcaatatgtcagtgtgttcaattctttgccgtctacttttaaacttaactccctcgcaaagcaacctttttcgattacctactccaccctgactcattctgattacctactccaccctgaatctttctgatcacctgctccaccctgactcattctgatcacctgctccaccctgactcattcggatcacctgctccaccctgactcattcagattacctgctacctgctccaccctgactcattctccaccctgcataaccaattattttttccccaccaaagcacccaccccagtcactctcyttaaattagccaaacagaattagagtttagcctgtggggttttaccctagccaataggggaatgacacagcagcaggggccacatgtgttgcagata

SEQ ID NO: 280016 - DNA, 975 bp, Homo sapiens
tgaaaatgtatggccttaaatacctatattagaaatacaaactgtataaaattatttagaaagtaaaagaaaataaacaataaaaacaaataacaatcatatatagatgaacatttcakaacgttaaaaaagccaaaattttgttcttcagaaagattaatacaattgataaatcaatccaaagcaatgtcaattaggaaaataaaggagaaaaagcaaatcaacaatagtatagttcttacaacatgaactatatgtaaaaaatgacaacttagattaaatggaaaaaattctaaaataacttctcttactaacacagaagaaagatggaaaatataaataacattctttataataaaaaaataaatttctactaaaaaaagttcccacaaataaatcttcaggcacagatgatgttcctggaagaattctatcacacttttccttcataaataacatcaccttaatatacatacatactttcagawtgaaaatgtatggccttaaatacctatattagaaatacaaactgtataaaattatttagaaagtaaaagaaaataaacaataaaaacaaataacaatcatatatagatgaacatttcagaacgttaaaaaagccaaaattttgttcttcagaaagattaatacaattgataaatcaatccaaagcaatgtcaattaggaaaataaaggagaaaaagcaaatcaacaatagtatagttcttacaacatgaactatatgtaaaaaatgacaacttagattaaatggaaaaaattctaaaataacttctcttactaacacagaagaaagatggaaaatataaataacattctttataataaaaaaataaatttctactaaaaaaagttcccacaaataaatcttcaggcacagatgatgttcctggaagaawtctatcacacttttccttcataaataacatcaccttaatatacatacatactttcaga

SEQ ID NO: 280017 - DNA, 585 bp, Homo sapiens
tgttatctccctaaacctctatctaagactctaagactgcatgctaaggttaaagttaaatagtctgcggtagaaaacaatatattttgagaggaatagattttaatgcaaaatatactggaagacaagaagacacaattagatgacttaaactgaaacatgggggccacattcatactatggcagcagtcaccagcattatagcrtaactatagattaacctgtaccatggtatggtaacattacctgcaatagcatgcctaattgggaagaaggagagtataaattggaataactaccattgatggcctacagttgaatattgggcaattctgaaatttgttatattattataagtaataggaaacttttaaataggaaaattttagaacagctgaaactagaaatacagtatttaataaaagaatggtacaagtaggcacacttacactcaaaatacctccaattacaagaatcctgtgagattctaaggaaagttagcacagtcgagtgactatggttaaaaataatttattatatatgccaaaagagctagaagatttggaatgttcccaacagaaagaa

SEQ ID NO: 280018 - DNA, 631 bp, Homo sapiens
tgttcaactcccacttatgagtgagaacatgtggtgtttggttttctgttcccgtcttggtttgctgagaatgatggtttccagattcattcatgtccctgcaaaggacatgaactcatccttttttrtggcttcatagtattccatggtgtatatgtgccacattttctttatacagattatcattgatgggcatttagttggttccatgtctttgctattgtgaacagtgccacaataaacatatgtgtgcatgtggataaatgatctctttttacttttgaatttgaatttactttcatttggatgggatttttaaatttcctttttggaacatggctacaatgtatgctgtctagggtttttcgcctttggttctaagtgctttcagtggcaaagactctctgtatatgtgttccttggttattgatagccttactatgatggttttctcaagttggttgtagtagctagctatgtacagggcttgtgaacaggctcacaaattcctgctgggctgggatggagggggtgtcagaaagcttcttttctagtgctatgtactcatgtcagcagattttgtattgggtcatgaagttcaatcttcaggctagtaggtcccctctactac

SEQ ID NO: 280019 - DNA, 631 bp, Homo sapiens
tgttcaactcccacttatgagtgagaacatgtggtgtttggttttctgttcccgtcttggtttgctgagaatgatggtttccagattcattcatgtccctgcaaaggacatgaactcatccttttttgtggcttcatagtattccatggtgtatatgtgccacattttctttatacagattatcattgatgggcatttagttggttccatgtctttgctattgtgaacagtgccacaataaacatatgtgtgcatgtggataaatgatctctttttacttttgaatttgaatttactttcatttggatgggatttttaaatttcctttttggaacatggctacaatgtatgctgtctagggtttttcgcctttggttctaagtgctttcagtggcaaagactctctgtatatgtgttccttggttattgatagccttactatgatggttttctcaagttggttgtagtagctagctatgtacagggcttgtgaacaggctcacaaattcctgctgggctgggatggagggggtgtcagaaagcttsttttctagtgctatgtactcatgtcagcagattttgtattgggtcatgaagttcaatcttcaggctagtaggtcccctctactac

SEQ ID NO: 280020 - DNA, 503 bp, Homo sapiens
actacaccaaaataactcttagtgcttaaaaataaattcagtacagttgcagaagacaaaattaacatatacaagttartaacatttctatacaataattaaatagttgaaaaataaatcaagttggtaatcctatttccagtagctacaataaaaacaaaatacctaggaataaatttaactaaggaggtaaaagatctgttcaaggaaaactataagacattgatgaaaaaattgaacaaacaaatgaaaagacatcttatagtcatggataagaagaattaatatcattgaaatgaccatactaccccaaataaaatacacattcaatgccctccctatcaaaataccattgtcatttttcacagaaatagaaaagcaatcctaaaatttttatggaaccaagatgtagtcggaatagccaaagcaatcctaagcaaaaagaacgaagttcaaaacctcacacaaactgacttcagattataaggctataataatcaaaa

SEQ ID NO: 280021 - DNA, 503 bp, Homo sapiens
actacaccaaaataactcttagtgcttaaaaataaattcagtacagttgcagaagacaaaattaacatatacaagttagtaacatttctatacaataattaaatagttgaaaaataaatcaagttggtaatcctatttccagtagctacaataaaaacaaaatacctaggaataaatttaactaaggaggtaaaagatctgttcaaggaaaactataagacattgatgaaaaaattgaacaaacaaatgaaaagacatcttatagtcatggataagaagaattaatatcmttgaaatgaccatactaccccaaataaaatacacattcaatgccctccctatcaaaataccattgtcatttttcacagaaatagaaaagcaatcctaaaatttttatggaaccaagatgtagtcggaatagccaaagcaatcctaagcaaaaagaacgaagttcaaaacctcacacaaactgacttcagattataaggctataataatcaaaa

SEQ ID NO: 280022 - DNA, 637 bp, Homo sapiens
tttttcataggagaaaaagttgcaaactactcatctggccagcaactaatatatagaatatataaggaattcacacaacttaacaatagaaagaataatccaattaaaacrtaagataagaacacgcatagtcatttctttaaaaaaaaacatgcaaatggcccacaggtgtatacaaaaatgctcaacatcacttatcattagtaaaatgcaaatcaaaaccccaatgagatatcaccttaccatagttagaatggctgttattaaaaaaacaaaaaaaatagcagatggtggcaatgaagtggtgaaaaggtaactcttatacacccttagtgggaatgtatgttaatacaagcactgtgggaaacagtatgaaaatttctatgaaaagcaaataaaagaactaccatacaatctagcaatcccactcccaattatctattcacaaaacaagctttcttatacaggtatctcaaagaggtacgtgtacttgtccctcccctgacatgtggggatgacagttcaagatgagatttgggtggggaaacagagccaagccatatcagtgagtgagtcaaatttatagctgtatagaagcaataaaataagtcctagtgtttaatagaataatagagtg

SEQ ID NO: 280023 - DNA, 637 bp, Homo sapiens
tttttcataggagaaaaagttgcaaactactcatctggccagcaactaatatatagaatatataaggaattcacacaacttaacaatagaaagaataatccaattaaaacgtaagataagaacacgcatagtcatttctttaaaaaaaaacatgcaaatggcccacaggtrtatacaaaaatgctcaacatcacttatcattagtaaaatgcaaatcaaaaccccaatgagatatcaccttaccatagttagaatggctgttattaaaaaaacaaaaaaaatagcagatggtggcaatgaagtggtgaaaaggtaactcttatacacccttagtgggaatgtatgttaatacaagcactgtgggaaacagtatgaaaatttctatgaaaagcaaataaaagaactaccatacaatctagcaatcccactcccaattatctattcacaaaacaagctttcttatacaggtatctcaaagaggtacgtgtacttgtccctcccctgacatgtggggatgacagttcaagatgagatttgggtggggaaacagagccaagccatatcagtgagtgagtcaaatttatagctgtatagaagcaataaaataagtcctagtgtttaatagaataatagagtg

SEQ ID NO: 280024 - DNA, 512 bp, Homo sapiens
tctcctgttaatgcagatattggagaataataatatttctcattggttctatttttcctgttgagctaggcctactttttctacactatattgctcacgtccctgcttatttctgtaaaacctcctatatgaaatctttcatttaatgaaaaaggcatgatttttcaaccagttttatgtgcccaatggtgtgatagaaactaaacatacagaaatrctacaaagaattcttcgtcttgcaagagctattcataagcaatagtcaattacagtaggacgtattaagttttgtcataatatgaagtatatagtgttttagaaacacacaagaagtttgattaaccacatattacatagctatgggagttttaccagagaaagttggatcctaaaagacaactaggagtgagtcaaatgtagagaagtttataacatgtgaaaagaacaaagctcagtggtagcctattggaaggttttaatctataacgagagagagaagcggagaaatgatc

SEQ ID NO: 280025 - DNA, 512 bp, Homo sapiens
tctcctgttaatgcagatattggagaataataatatttctcattggttctatttttcctgttgagctaggcctactttttctacactatattgctcacgtccctgcttatttctgtaaaacctcctatatgaaatctttcatttaatgaaaaaggcatgatttttcaaccagttttatgtgcccaatggtgtgatagaaactaaacatacagaaatgctacaaagaattcttcgtcttgcaagagctattcataagcaatagtcaattacagtaggacrtattaagttttgtcataatatgaagtatatagtgttttagaaacacacaagaagtttgattaaccacatattacatagctatgggagttttaccagagaaagttggatcctaaaagacaactaggagtgagtcaaatgtagagaagtttataacatgtgaaaagaacaaagctcagtggtagcctattggaaggttttaatctataacgagagagagaagcggagaaatgatc

SEQ ID NO: 280026 - DNA, 539 bp, Homo sapiens
tcagctttctgtcacagttatataggtctataatttttgttttctatttgagtatactatcaaagcaagacttcaaaaaatattctgtatctaatatccagtagaaggtataatacaaacaaatgctcagtaagtcttcaccaaaagaatcactgcaggcgattgctggtcatggtatatcatgtccatggagactgagctaagagtcaagagaacaaacagtgacaaaacacactagcakgtatatttggcatctgttcactgtctagaagtagataaagtggttgtaatggaaagtgaactccacatatattacatgcatatatgcaacacttacttttcccatattacagctctttcaacatatgaagcatattagagaaagattcagtagataagatgtttccatgacacacgctgataaatagaaatgacttcaagtaataaagtgaaatctgaaaagtagcggtaacttggaaacaatcaagaaaatgaaaggaatgttgtgatctcattgagatatgaataaatacgtggct

SEQ ID NO: 280027 - DNA, 642 bp, Homo sapiens
aaatcataaactgaatagcaaaaaataaaaatttatcctagagacattaaatggcaaaaattgctgcaatggaaaaattgctcattggaattgctctcctggaatgcaaaggctaaagaaaaaagaaaataaaacataaaaggatagcctttggatatatttagagagtagagaaatataattcagcctattaataattgaaatttctgaagaaaatgcattacaattgtaaagtttgtgataatacaaatataatgagaaaattgtcacgttttagacaccgtrattgtcaatttttttaaaaataacctataagtattgatgtcatattttaatcaaacttatcatgttttttcacatggtagaagtattctgaatattatccagaaaaagaaattaatgcaaatgtcaagtatcttgaaatagcattgaaatgataggaaatttataatgatagtaaaatataacagttcctcacacatgaaaataatttatgggatattatttgaatgttaaaatgaattacttgtttaaagataaaataatttgaaattaatattagagcataggtagtatttaaccatacattataaccagttctataataagatatgacaccttaaagggtaccaaagacaggaa

SEQ ID NO: 280028 - DNA, 584 bp, Homo sapiens
tgacaatgcaagaatggcctgatacaacatgcaattcaatcaatgtgatataacttatcaacagaatgaaggacaaaaaccatatgaccatttcaaaagtgctgaaaaaacatttgataaaatttaacattcttttatcataaaaacaataaaaagtgggcaccgagggaataaacctcaacacaataaaagccatatccaacagtataacactgaatggggaaaaactgaaagcttttcctccaagatctagaacaagacragaatgctcactttaactcctatttaacatagtacttgtattagtctattctcacattgctataaagaaatatctgagactgggtaacttataaagaaaagtttaattggctcacggttcttcaggctgtacaggaagcatagcagcttctgtttctggagtggcctcaacaagctttcaatcttggcggaaggcaaagggagaataaattatctcacatggtgggagcaggagcaaggaaagaggaggtgctacccactttttaacaaccagatcttgggagatgtcactcactatcatgagaacagaaccaagtagatgg

SEQ ID NO: 280029 - DNA, 575 bp, Homo sapiens
cttgcaaagtcttgactcttgttcagtattaactcataacttcaaattcccaaatctcatctgagacaaagcaagttccttccatctatgaccttgtaaaatcaaaaacaagttagttactttcaagatacatatctgaccatatttttcctttagccctgatccaaatgaactggtaggagtaaccattgatagagccactgatgacatgtgagttataaaagatggacacacaaacacacacagacacaaaaaagtggcagagaaagagatggagattagtgggatttactctcaggagtgttcatgccaayacagagtggttttttgacacagtttcttaatcttcttgctgtagcacatatagataaatttccacacttttataattgtttcagaaaaaagagaaacagactatagagggaggcttcctcttgttagtatcttgtcacccttagttagtagcagacaaatgcctaggaaactcagattttctgtctatgatacacactagagtgggccaggggaggagagaatcctacttggcacaaggaggaggcaggagtagtcaggaa

SEQ ID NO: 280030 - DNA, 517 bp, Homo sapiens
gtggcccaggggaggaaaggaggacatggaggagatagcagctgacaaggagcagtgacgccctgggcagaaaataatgaacctaatggcatgtggatttgtaccttatcctccagagtcctgttgacatgtgaggttggtgcccataytcagactgatacaaaggtgtataggcaatgggtaaatactctcattccaaaagggagaaataggccaaaaaaaaaaggggggtgacagtccttacacatgtctgaaacccaacaaggtggtaattaaatcttaaagctccaaaataatctcctttgactttattttccacatccagggctcactggtacaaggggtgggttcccaaggccttgggcatctcagcccctgtggctttatggggtccagttcatgtagctgctctcatgggctggcattgtctgtggctattttaggttgagattgaaagctgccagtagttctaccattctggggtctggaagatggtggcccttttctcatagctcca

SEQ ID NO: 280031 - DNA, 1086 bp, Homo sapiens
gtggcccaggggaggaaaggaggacatggaggagatagcagctgacaaggagcagtgacgccctgggcagaaaataatgaacctaatggcatgtggatttgtaccttatcctccagagtcctgttgacatgtgaggttggtgcccatactcagactgatacaaaggtgtataggcaatgggtaaatactctcattccaaaagggagaaataggccaaaaaaaaaaggggggtgacagtccttacacatgtctgaaacccaacaaggyggtaattaaatcttaaagctccaaaataatctcctttgactttattttccacatccagggctcactggtacaaggggtgggttcccaaggccttgggcatctcagcccctgtggctttatggggtccagttcatgtagctgctctcatgggctggcattgtctgtggctattttaggttgagattgaaagctgccagtagttctaccattctggggtctggaagatggtggcccttttctcatagctccawtatataattagttcctttttttccaaaaaatatggcacgctttccctaaatgtgaatgtacataaaccatcccatgggaattggtaatgttttattttgttttcgtaatttagcctcaaatacatataacctgttagactttatgtcagtacwaccactttcttcaacttctgtgctgaagacagatttttaatcctacatatgcacctggaagagaaagttcaggaaaacaatatactcaggaaatagaaataacccacatggcccaggaccggatgatctaaaccatttccaactttacattaccttttcctgggattgtgttccattcctctgagactttctgatgttttggggggtatacatttaaagggtacaagagcaattttttttacatgaatatattgtgtagtggtgaaatcttggctttttgtacatctgtcaccagaatgctgtacgttgtacccactaagtaatttaccaccacctatcactcttctgcccccttccttttggagtctccaggatctgtcattccatgctgtatgtccatgtgcataccttagct

SEQ ID NO: 280032 - DNA, 517 bp, Homo sapiens
gtggcccaggggaggaaaggaggacatggaggagatagcagctgacaaggagcagtgacgccctgggcagaaaataatgaacctaatggcatgtggatttgtaccttatcctccagagtcctgttgacatgtgaggttggtgcccatactcagactgatacaaaggtgtataggcaatgggtaaatactctcattccaaaagggagaaataggccaaaaaaaaaaggggggtgacagtccttacacatgtctgaaacccaacaaggtggtaattaaatcttaaagctccaaaataatctcctttgactttattttccacatccagggctcactggtacaaggggtgggttcccaaggccttgggcatctcagcccctgtggctttatggggtccagttcatgtagctgctctcatgggctggcattgtctgtggctattttakgttgagattgaaagctgccagtagttctaccattctggggtctggaagatggtggcccttttctcatagctcca

SEQ ID NO: 280033 - DNA, 599 bp, Homo sapiens
gggtatcatttcacagcaaaatgaggatccatgaattataaaaagaattattaatgctcaaatagcacatcctaggaacagatcaccaacctggaaagttattttctgcattttcaattgaatgaagtatttgattttattacaaaaaggaaaaactgaattatttttagacgagtataagaaataaattaactcaagacccttactgtaatttgaacatattcaaataaacattcatgttatctgaacttctctgagaaggacataaaagaagtcaactctactataagttgccatccaaatttaccattttcatgcctatttctgacaccaatcagctgtcatatattaaaaagaactattatgaagtgagcttagtaagcagcctgctgatgtatctgaacatattacccaggattctyatgctaggacagaaagtcagattagatctgctatcaaggacaataagaaatctcagctagcaagagagagcctcaagtagcatgggtgtgtgtccattcaaggaaatagttgtgtcaggaaggttggtagcacaagacttggaacttaataaaaaaaacttcagacccagactggat

SEQ ID NO: 280034 - DNA, 424 bp, Homo sapiens
aagttattttctgcattttcaattgaatgaagtatttgattttattacaaaaaggaaaaactgaattatttttagacgagtataagaaataaattaactcaagacccttactgtaatttgaacatattcaaataaacattcatgttatctgaacttctctgagaaggacataaaagaagtcaactctactataagttgccatccaaatttaccattttcatgcctatttctgacaccaatcagctgtcatatattaaaaagaactattatgaagtgagcttagtaagcagcctgctgatgtatctgaacatattacccaggattcttatgctaggacagaaagtcagattagatctgctatcaaggacaataagaaatctcagctagcaagasagagcctcaagtagcatgggtgtgtgtccat

SEQ ID NO: 280035 - DNA, 610 bp, Homo sapiens
tactgaggttccagaaatgaggaaaggacaaagaaggctgaattcagcttccattttactctccaaacattaatgacagaacagtctgagaagctgcatggagttttaatcagtttcatggtgtggatgagacaaagcattggaattcaggagtcaatcaggagtccagcaagattcctcaggctctttgttggaatttcagaagtggagatgaatgaaaggtaaaccaagccttacgcaaactttaaagcagmccttggaaaagcaaagtccctgaacaagttgaggagatttatgattatagtgcctgctagagaagaagataatcatctctacaggaagatgacataatccagagcacctacaattatccacacataatgctggcattcaataatcaaaacaaacacttgacagaaagaatattaagcaaagtgagagaaaaaaaaagcaacacaggaaaagaaaatttatccccaggctctacatattagagatatcagatgctagcatttaaatagttgtgaattaaataagtagatgaaaagatgagtaatttcaccagagttgaaatctatatgccaggtgtggtggctcacacttgtaatcc

SEQ ID NO: 280036 - DNA, 1169 bp, Homo sapiens
tactgaggttccagaaatgaggaaaggacaaagaaggctgaattcagcttccattttactctccaaacattaatgacagaacagtctgagaagctgcatggagttttaatcagtttcatggtgtggatgagacaaagcattggaattcaggagtcaatcaggagtccagcaagattcctcaggctctttgttggaatttcagaagtggagatgaatgaaaggtaaaccaagccttacgcaaactttaaagcagcccttggaaaagcaaagtccctgaacaagttgaggagatttatgattatagygcctgctagagaagaagataatcatctctacaggaagatgacataatccagagcacctacaattatccacacataatgctggcattcaataatcaaaacaaacacttgacagaaagaatattaagcaaagtgagagaaaaaaaaagcaacacaggaaaagaaaatttatccccaggctctacatattagagatatcagatgctagcatttaaatagttgtgaattaaataagtagatgaaaagatgagtaatttcaccagagttgaaatctatatgccaggtgtggtggctcacacttgtaatccwtcctaaaactaactatatgcaaaatattagatattaaaatctgagtaatcattatctgatcagtaaataattcacattttttaaaaacaactttgccacaaaaacatctgcctcaaatggctctatttgtgagttatttccaacattcaagattatcgatgttgtaaatgtttctttagctattaaaaaatatacattttcaaaagaattttcactgattttatgaagccagcatgatgttcattaaaaaaatggtggccaatctttcttatgaacatagacaagaaaacaaataaaatattagtataaaagatacccatttaagaacaatcattaaggattaacgttggtttgtcctaggaawtaagagtatattaaaattagaaatttaataaaaataaagactgcaggagaaaatcacatgattatttaaatagatgcaaaaaatgcattagttgaaatccaataagcaatgtgataaaacttgtcagcaaagtgataataatttttttaggaagcccattaccaaaaaatttacaactaacattatgcttaatg

SEQ ID NO: 280037 - DNA, 506 bp, Homo sapiens
ttttggtgtcaagctcttggacttctcagcctccggagtcataagccaaatgaatttctattctttataaattatctggtctgtagtattctggtatagcaacacaaaatgaactagacatctgccttacaacaaatactaaaggaaattttacagactgaaagkaagtgacaccaaacaataattgaaatccgtaagaaaaacacagaattccttgtaaaaaaagaaatgtgtagataatggtaaaaaccagtataatcacaaacgtctttttccttattttcttaactgattttaaaaattcttatataatatctatataattatattgctgaatctatactgtattgaaatttaatgtatttgataataaaaacacacaacaggggaataagaatgaacctatattggcaacgaatccatgcaggaaatgacaccaaatgataactcaagtccgtggaataagaaaaagccaaaaacggtaaattgaaatgctaacaacagaa

SEQ ID NO: 280038 - DNA, 540 bp, Homo sapiens
aattgaaatccgtaagaaaaacacagaattccttgtaaaaaaagaaatgtgtagataatggtaaaaaccagtataatcacaaacgtctttttccttattttcttaactgattttaaaaattcttatataatatctatataattatattgctgaatctatactgtattgaaatttaatgtatttgataataaaaacacacaacaggggaataagaatgaacctatattggcaacgaatccatgcaggaaatgacaccaaatgataactcaagtccrtggaataagaaaaagccaaaaacggtaaattgaaatgctaacaacagaaaaactgcataaatatatatgtactctaatttcttttctacctactttaaaatacatagtattatatgtcaataattataataatttaattggttggtaatacgtagacatgagtatgaataatagtacagaaagtggaagggatggacccaaatagaaataaaatttttatatcttacttaaattagactaatataaatatgaagaagagtctaat

SEQ ID NO: 280039 - DNA, 485 bp, Homo sapiens
catgtaaacactttagaaatgaaaatacattactgactgatgaactcatgaaaaaagtattcaaaagaagtcattggcaaaatgtaaactcaaatcacaattagataccacttcacattcacagaaaagctgatattataaaacttacaatgttgacaaaaagacatatgttggcaaagatgtggagcagctggaaatcttatatatttcagtggcagtgtaaaatttcacagccacattggacaactctattttaatccactttaaaaaaagaaaaaacaacatctactaaccaacaagagcactcctggtcatttttccaggtgaaattaaaatttatatatacagaaagaccttcayaatatttgtgtcataattttgttgataatagtcacagaacttaaagcaacccaatgtctaaacaaatggggtatattcatagaatttaataatatattaattaaaaattaattgattagaaaaat

SEQ ID NO: 280040 - DNA, 648 bp, Homo sapiens
tactaaaactatcttgagtgcttccatataggacccaatgctacacttcatgaaatattatattccatagtaaatatgaaatattaatttcttaatgatgtaaaatgctacagatgcttacgttatatgtacatacacatgcacaattagatggtgaattgcagaacacaaaggagaaaaaaacatgtaatctgaatacacaagcctatcatccaaatcagtacaggttaagtcctcttaatcttacattctygggatcagaaatgtttctgtttttggatgattctggattttggaatatttatgtttacataatgagatagcttggggatgggactcaagtctaaacacaaaatttgtttatatttcacatataccttatacacatagcctgaagtagttgatatttgttttttttaatctacccatcacatcatagaaccaattaaataataaatgcatgtattttatacaaatgtatatataaatatcaatgcataaacttaaatataaatgcatatattttataaaatattttaaataatttttaactcaattggatggaaagaaataaaataaaaataagaaataaattattttttgcataaaattaagtctgtgtgcattgaatcattagaaagcaaaagt

SEQ ID NO: 280041 - DNA, 614 bp, Homo sapiens
tcggtgcttgtaactggcaaaacttaatgcatatctaaaattctgctgcatgggattctaggaaacatagtctgtatcttccaggctctgaagtggaggaagcattataggagggtgtaatggagtttgaggtatgccatatgtcccagaaatttttgtaaacgttccagagaaatgttcttatattttctcggagtaagatgtgtggagatgtttaccatggaattatttgtgatagtgagttgaaacacatctaggtctcatcagtagaggaaaggaaatgcagcatatggtggatacatactagagtctactatgtagcagaaagaagcagcacrctacacatgtatagtatataaataggtcaagaaaggtaaatacaaaaagcactgttgaaagagagcaacaactacatgagataccttgcaaaaatagcatttatgtaaatttgaagcactataaactaaacagtgtttattttataatatgcacaaattattaaaacacttgtattaatgtagtcacctgtgggagtgcctctcattgccaagtccaacctggaaataatagacagaagggatttctgaatatcctgcctccttctctgtgataga

SEQ ID NO: 280042 - DNA, 635 bp, Homo sapiens
tggtcatttttctctaactaagccaacatttgtgtttgcccatacctctcgattcarggtgtctgggactaaaagggatatttctaaattatttcaagcagcgtgtttttattatttactctgttctaaatgatacagatacacttctaaatatataacacataattttatttatatacttataaatatagatagttctaaatatttctatttcttttcttaatgattcatagcttggcaaccatttatatagttttttataaaatatcacatgtactgtcatttaaaatacataaacatgtttcagaagtattgtaactgagccacacatacccatttccgtgtatttgttattggctttatgatttaagtatataagaattcatacttgagaatttatccttattaaagcattctcttctgcgacaagtgtggcaatgaattttgagctagaagaccttcacagtcagtctattgtagcattcagattttctttagcacttagattcttggtgggcaaaaatgagcgaagaatgctatcagcattcataacccatgataacaaatgaagcaatggctgaccctgtctattttgaagaactgtgcacaatgtaattctcatgacagcaaacgaa

SEQ ID NO: 280043 - DNA, 635 bp, Homo sapiens
tggtcatttttctctaactaagccaacatttgtgtttgcccatacctctcgattcaaggtgtctgggactaaaagggatatttctaaattatttcaagcagcgtgtttttattatttactctgttctaaatgatacagatacayttctaaatatataacacataattttatttatatacttataaatatagatagttctaaatatttctatttcttttcttaatgattcatagcttggcaaccatttatatagttttttataaaatatcacatgtactgtcatttaaaatacataaacatgtttcagaagtattgtaactgagccacacatacccatttccgtgtatttgttattggctttatgatttaagtatataagaattcatacttgagaatttatccttattaaagcattctcttctgcgacaagtgtggcaatgaattttgagctagaagaccttcacagtcagtctattgtagcattcagattttctttagcacttagattcttggtgggcaaaaatgagcgaagaatgctatcagcattcataacccatgataacaaatgaagcaatggctgaccctgtctattttgaagaactgtgcacaatgtaattctcatgacagcaaacgaa

SEQ ID NO: 280044 - DNA, 578 bp, Homo sapiens
caacctgagagatgaactgggtatattcatccagggttctcagataattagcattctcaaacactagtaaggaaggttagaatgataatctgaaattctgttttacatgtaagtgtaaacataaagggaagaaagatgcactattatatatctcattccaaaattatttcagatcaaattaatcactttttatatgttggaaatatgtatataaaaattaaaatgtaatatgccataaaataatagaatttacraagtaattggcaggtataaaagtacaaactgcttttaaaaaatatttgggcttggccgggtgtggtggctcacgtctctaatcccagcactttgggaggccaaggtgggtggatcgcttgaggtcaggagttcaggaccagccgggctgacatggtgaaaccacatctctactaaaaatacaaaaaatagccaggcgtggtggtgcgtgcctgtcatcccagctacttgggggtctgaggcaggagaatcacttaaaaatgggaggtagaggttgtagtgagccgagatcaggccattgcactccagactaggtgacagagaga

SEQ ID NO: 280045 - DNA, 605 bp, Homo sapiens
gagctatatttgttcctatcttattttaacccagaataactaacaactaaactttacctttgctagatatcatttaaaataaagaattttgtactttgtcaaatgaaaagttgggaaaatatttcacctgtgcatcaattttatstgaagtccaattttacatataaactcagagtttgagaggggaaaaaatgaaatgcttttattgatttaaataatcaatcaaggatcattgaaaaaagtgtgtttataatattttttcctactcattaatgcaagataaaatacatttttgttttgcatttgaaaagaccatgatttatcttaagggatttgtaaaaaaaaatattttaaccttttgaaagctgttctttttggaatattttacagccttgtttttttttttgtgaaaaattgactcactttcaaatacccactaagatttgttagtcattaaaaatattcagctattatatagtcattcatgacaatgtcacaaatgtttgagttattttcattgaagactcattatatgtctttatttttctttctctttgacatgaacaaccatcaaagatgaaaatcatttctatgatggacaagac

SEQ ID NO: 280046 - DNA, 1007 bp, Homo sapiens
cacacagaggccccactgagacactacctaatggagctgtgagggaaagagggttgtaccctgcaaagccacaggagtggagctgccaaaggccttgagggcttacttcttgaagctatgtgtcccagatatgggacatgaagttgaagattattttggagctttaagatttaaggactgccctgctatgtttcagatttgtgtggrgcctgtacccatttcttttggccaatttttcccttttagaataggaatgtttacccaatacctgtgcccccattgtatctttgaagtaaataacgtgttttgatattacaggttcataggtggaaggaactcatttccagatgaaactttgaacttttgacttgggactgttatgtwcacttttctttctaacagtgtctgtcatattttagacagttttctcattatttcaaataaccawgctctgtttggggaagacttactatgcctgaagtattgtcagtcagtgttagatgctcatagatgggatcattaatgagggaggggaggagctttagcacagatttagaaattatcttggagattgatcacacaattgcagctatgagaaaaagtatgcaggtcttctaaggggcacttagaaaagcaatataataaggggtcacagttgtacattgtacgtatagggctgcaggatgaacaaaacgcctgctgtcctaacaataatgcaaataggttcctctggtgtggggtaaaatttccagtgacagcatcttcatatggattcaaaaaatgatctctctcaaatatcttcattgaattaaagctgatatgcttagaaaactattaaatgacactgaatcaactgagaaaaacaggttagattattttggaaacctgggttcaaaagcatttagaggcatcagcaggtttctaggttttccaagtctcacagatctctggaagcctcagcttcatctgtgactgtcttcttaccctctcttggaaacttagtcgat

SEQ ID NO: 280047 - DNA, 623 bp, Homo sapiens
cacttttctttctaacagtgtctgtcatattttagacagttttctcattatttcaaataaccaagctctgtttggggaagacttactatgcctgaagtattgtcagtcagtgttagatgctcatagatgggatcattaatgagggaggggagragctttagcacagatttagaaattatcttggagattgatcacacaattgcagctatgagaaaaagtatgcaggtcttctaaggggcacttagaaaagcaatataataaggggtcacagttgtacattgtacgtatagggctgcaggatgaacaaaacgcctgctgtcctaacaataatgcaaataggttcctctggtgtggggtaaaatttccagtgacagcatcttcatatggattcaaaaaatgatctctctcaaatatcttcattgaattaaagctgatatgcttagaaaactattaaatgacactgaatcaactgagaaaaacaggttagattattttggaaacctgggttcaaaagcatttagaggcatcagcaggtttctaggttttccaagtctcacagatctctggaagcctcagcttcatctgtgactgtcttcttaccctctcttggaaacttagtcgat

SEQ ID NO: 280048 - DNA, 520 bp, Homo sapiens
aggctcttccattactgggaccaattaattggaktataataaaggggagatagagccagactcgataccagggaaaatataagagttgggattttggttaatgcaaagggtggaatagagctagcttcaaaatgcgattcaactgggtactctgtcactttaagctagctctaatgaaataagatgagtaggttcatgtttggggggcatggaagagaaagatccctttttttaaaacctagattgaaatgctctgacatacttgtagtatgcacaattttgccattttatgattaatgatggattcagaaagggcttctctaggtacatcttaagaatgcattaagagaacctaatgggaactgacaaccctgaggtatgccaatcatctctcctcatactctgaagaaatagaactctatgactagtccaataggaaaacactgattccgaagaggaaagggccaggccaaaggtcttaaacttgtcagattctatgctttgatactgtttgatgttc

SEQ ID NO: 280049 - DNA, 472 bp, Homo sapiens
gatagattttcctattgttagcaaatataagctgaggctcttgtgcacatacagacttatcaccagaagcatggggctagacctcatgccttccagaaacctcaccccaagcactccttcgagacctttcctattcaaaattacattgagtgctcactttaacttaatcttcactgcaaaaatgtatatcagtgggtaggaaaaatgacagatatctatgatatgctcccaacctggagcattccttgggtggccgttgttcttgcatcctggtagaaggggttcttcctrgattatgctcacagtacactttcattgagctctcaagccatagatcgatgacaagggagaaaatggtgaacttgctccatgagaaatcaatgctctccaattatccacatggacttccttctccatgtcccatagcagctgtttccaatgttctctcccctactcacctctcaattgcacc

SEQ ID NO: 280050 - DNA, 600 bp, Homo sapiens
actaactcttgggttgagagacagagtgcccaatgaagaacctccccaattcctcccagggctaagatctagacgtttttggagagggcatgacctggctcactgaatggcagagaagtcaccattgggctacgtctgcaaagcttgtggaagatgtgccctctgcaacttgctgcaaatgcctctagggtgccagggaagttattcatggggtagtgtctcacctcctctacaaagctcctagagttgggcatgtgagaggaaattgctagttactgagcactataggaccttggcagtggagaaagccaggtatgctgcaaaagcttatcaatacacagaaatcaggaagcaaaatcctttttttctgtaatgtctcttcagcgccctctrctgataaagcttcagtcccagaaggcaaacgaaaaactgtttaaaaggctcagatccgtttttacagtgcagtcaaaaagggcgaatttggagctgagaggcaataaatcaataactggcagaagcatcacttctcagattacactcatggatttcgtagtcagatgtttctacatgtgcctggacggccctttgtcagtctccttt

SEQ ID NO: 280051 - DNA, 566 bp, Homo sapiens
catctttaaatcttgagctcagagcttgtccagtgcttcttgatgaggttgaagaaaacagttggaaaaaggtaaggagttttaagcttagcttgatatgttgtgtaattttggggttgaaattactgtaatttttttccctccagtaacctcattttcagattttcctccattacaggaaaatcataaaaagtgatatttttacttaaagtgttttctaaaataatgtcctttggctttggcttgatgatcacttgaaaatggtttatgcaaacatctggacctgggttttctggcaaccttgacattttctctgttyagaatctaaagacatgagtgactcattcagttactgagaaatcttaggcaaagctaattccagtattgtaatatctatccttagtcctcaatgagaggctgaagttctgctttaagcgtaaagcatttgatgaaaggtcaaagtggctgctggaggggaaggctgttggtactcaactgggaggtggaacattttgcatttaagattgcctttctcagattttctgtactggattttcactgcagaa

SEQ ID NO: 280052 - DNA, 450 bp, Homo sapiens
atgaagctttactgataaggatagagtaatatcagtcaagtttggttagttagaacttccattctaaaatatcatatagtactcaataaaataatctgtcagaacaggcctcatccaaccctgttaactttgataccagctcagttttttaaatgtcactaaaccaatctctctcagttccccatgtaagacttcatatctttgcccttgggattctcagacttctgacaccggtggcatttctccaggctcagtaagctaccccttattgcaaaaaagtgagtacagtccccatggaaacttcactgagatctkcaggatttacataggtagtctcaatctcatcttaagacctaaagtaactgccagcaggaaaatgatgtgagtttatgaaatccctgatccaacagcatcttaagaaggattttaaaagattgagtgtgatttact

SEQ ID NO: 280053 - DNA, 584 bp, Homo sapiens
gctctggatttaaactgatgtcaggtagctctaggggctgaacttgacctttcctgggctgaaaatagatatggaaggaaagttccttcttctagcctggtggggccctaggataacaagccagggtttctccagtttgaggcaaattgttggttctgtctcacatgatctagaagaaacagattagcaaactctccttggtgtctcttaatgcaacataaaagtctcccagagtttggaattcatattgttattcttaaaaataatgaattttaccaaagaataaatatgcctgggatacataacaaacaggtttaaaacaactttacagataaacacgaaatgtttgccaactcttaaattgtttttactagtagttctctctctaggaaggagatagtaaaataaattaaattamtttccctttgtcttttgttgatggttaatgttatttttcagtttaagaactcataatacaatgacgataatgtgtaaaacctaaaaaagaaaagaaagaaagaaaaaaaaaggtatcaagaactagagaaccaaaaaatacttgtagtttagtggagttgcaacta

SEQ ID NO: 280054 - DNA, 1185 bp, Homo sapiens
gctctggatttaaactgatgtcaggtagctctaggggctgaacttgacctttcctgggctgaaaatagatatggaaggaaagttccttcttctagcctggtggggccctaggataacaagccagggtttctccagtttgaggcaaattgttggttctgtctcacatgatctagaagaaacagattagcaaactctccttggtgtctcttaatgcaacataaaagtctcccagagtttggaattcatattgttattcttaaaaataatgaattttaccaaagaataaatatgcctgggatacataacaaacaggtttaaaacaactttacagataaacacgaaatgtttgccaactcttaaattgtttttactagtagttctctctctaggaaggagatagtaaaataaattaaattaatttccctttgtcttttgttgatggttaatgttatttttcagtttaagaactcataatacaatgacgataatgtgtaaaacctaaaaaagaaaagaaagaaagaaaaaaaaaggtakcaagaactagagaaccaaaaaatacttgtagtttagtggagttgcaactawcattgtactgtacagaataaaatttaaaacaccataaatgaccacaaatagggtattggctgaatgtattcaggcacatctgtaaaaggggtacaagtagccataaaaacgacaccactacagagtatttgatgacataaaaaatgtttatagwacattattaacagaaaagcaggtcatcaacaattcaaataaaataaaacttttataaacctgtatacatacatataaattaatgtgagcaaatagactaatggttatttccggatgatgggcttttcaatggtttttattttctactctttggtttttctttaatttctttttatcataaaattgtattgcttcttttttaaaagcttttgttttgtttgataagaaagcctaagagaacatgaaagaaataatctggacaaatagttgaaagaaaagcagatgatgactaagcctcaaatgctaaataatcacatgcctttcccttgctgtatatatgaagagctggttcagtgtttgtttgctctggtgggtaaaagttcatttcatgaaaagagaattacacaaaatcacagagaaattttagcatttatgggctgtgctttg

SEQ ID NO: 280055 - DNA, 1112 bp, Homo sapiens
tataaatttccttgggtttttgttttatttatttattgtttattggcatcctaataacaggaaataaaattacactagaagtctagtgtcagactataaaggccttgattttcaggttaagatttctgaattttattatgagaagacattctasaatgtaaacagagttagggagaattgatgtatctgtcatcatgttggagatgggaatgaggaagcctaaacctaaaaccagagccttaagagattgctgagaagagcggcaagtgtgttgacatctggactaggatttagcagtgtacaggaaagagagaaaaaatacaagaagaattacagaaaaaatttaacttttcttctgcaattctctgcctgcaaagtcttttgccaattctcccctatgggaatcttagtcttcaagactggcataaatctagattcttctgggatttctcctccaacaattctaggcacaagtcctttggagcactttgctcacattcacctagtgtcacaccagagtacaatatggttaacaacagagggaaagaaaaaagctgcattggtcttctgagagccttgagatctgcaagtaagtcttagwttttaaataaccatggacttccaagcattcataattgtatgagccagtttctcgtaacaaattacatatatatacacataaacctatatatatgtgtgtgtaatatatatgtataaaacaatgtataaaaatatwtacattggttctgtatctttggagaaccctgactaatatgtgtacttttgacactaacatttattgcataagcaaagcagacaccctgagattttcaggccaggtattggaaagaggtggccgttctgacagaaatgggcactccaaaactgcactgaaacaaaggcttgggacttattgacaaataggagtatccagaagaggagccagggaggatggaaagtgtaactgtacacactaaataaggtgaagtgacagccagagagccaagttgaaatgttcagctagaagcaagagacaagatcctgaagttctgaaggtcaagatcaaagaggtgagatttgagtattattgacataaagacgaaagttgaaga

SEQ ID NO: 280056 - DNA, 589 bp, Homo sapiens
agagtactggtattgtagtcaatagggcatggatgtttgttccagacctgccacctgctagtggtataacttttagagataataatttctctattaagttttcagggttgtggtaaatctaatgacataatgaatatgataacctgtaaagagtcgcatgtaatggccgagaaacatttctctatcctcttacgaggccagggaagaagaaagttataaagggttttaaagaggacgtgtcattacactaaatacaattttggagcmcttctatgaacaggcatctatgctggaacatctccggctccaaaacctgcaactaagcacggcctatgcaaatattatcctttttccttatttggaggctgcatttctaatcattgaaaacatgcacattgtcagggaaagacactgataattcagccactgagccagtatagagaagttattcattcctgggttcaacccaaggtcaaaaacatcaaaccccaaccattaagcaaaatggtgacaggcatggtagagatgacctggagtaaatatattgcacagaggaagcaaggtcaggaatacaacaggcctgaaaaaa

SEQ ID NO: 280057 - DNA, 1083 bp, Homo sapiens
tacactcatgggataaaatgtccaacttccagagaaggcttattcccagtgttgtttttctttcccctctttatagaaaatgcctccaactggaaattctctaaggatttcagctagttgaagggttttctatatctttmttttatgtagaccataagaggagaggatcatacataaagctagtaatatatgaagaatgaagctttttgcatataataatgagcagactcacatggtttaaagatatatgtgagacaactagttccacataaaagtattatttttatagtatagtaggtaacgaactcagtttattgtggttgtattagttgccatgttcacacagacacaccttcttcagtctctttatcatcctctatttttttctgcagacaatgacaatagctttggctctaagtatgggccattttaaggtcatattaaaagagtttaactatactgtagccaaaggatggtgttatcaaagtagcggcattgctttcaaccaaagagtgacacaactcgaatgcacagggcagtgaaggaaggwacgtgtcattacactaaatacaattttggagcccttctatgaacaggcatctatgctggaacatctccggctccaaaacctgcaactaagcacggcctatgcaaatattatcctttttccttatttggaggctgcatttctaatcattgaaaacatgcacattgtcagggaaagacactgataattcagccactgagccagtatagagaagttattcattcctgggttcaacccaaggtcaaaaacatcaaaccccaaccattaagcaaaatggtgacaggcatggtagagatgacctggagtaaatatattgcacagaggaagcaaggtcaggaatacaacaggcctgaaaaaatgttgcagagwcaaagtcaggaacaactagtttagagttcagaggtgtacatgaacagaatcttccagatggaataaaagagaccagcaaaggaggaaccagccaccaacaaactggagatgcaatggaaatcctctgtgtctaactgcatttataagctgcatatccttccaaactc

SEQ ID NO: 280058 - DNA, 519 bp, Homo sapiens
ttaaaaaaaaaaattaagttgctgaaagctatgtttagctgagttccattggttttcaagtctagatcttatctctggggccagtggtccccagtcgtttaggcaccagggactggttttgtggaagtcaatttttccaaggcaggggggatagttttgggatgattcaagggcattacatttgtagtgcactgtatttctattattattgttacattgkaatatataatgaaataagttgtacaactcaccataatgtagaatcagtgggagccctgagcttgttttcctgcaactagactgtcccattaggggctgatgggagacagtgacaggtcatcaagcattagattctcataaggagtgcacaacctcaaatgcacagtgcacaatagggtttatgctcctacgagaatctgagaatctgatgctgccactgatctgataggaggcagagctcaggcagtaatgtgagccgtgggaagcagctgtaaatatatatgaagctttgcttactca

SEQ ID NO: 280059 - DNA, 595 bp, Homo sapiens
caaatgcccaaggctgctcattacataattgctcagaaacactgtttctcaggtgtacacgatgctgcacacgtccactgagacacctagtggtaggcagttctgtctatctgaagataaaaagcaaaacactatgctcagtgttttgcattttaactcataaaatataaaattggttctctccccaaatgctcaaagacttttgtttattctaactcctctttaaatcatgccaatgaggaatacaaacaaaacagactgtgtaagcacattgccctgggtcaaagtcagcatgaaatgctctcatctcctaatctttgtactaattgactaytcactaacctactatattgttttaattattaattctcatggctcttttaaaatcatttatttataaaacaaaatattataggacattatctgaatcttcagatttattccactgcaactagtagttgttcaataaatattaaatataattgacttacattaagatataatgagtgtaggcaatgtgctaggtcctaaacacagatacaaatgcagatataaacatcataataggaattcaaatgcacggattggaaattat

SEQ ID NO: 280060 - DNA, 524 bp, Homo sapiens
tgtcaggcagctttttctcagaagccccgaatggctgtgtgggaagaaattagacctcgatgagacaaacaaaatgattattagggacttgctttgtttaagagaggaaatacacttggggtgattgcttaacccagagattattactgagaagagtgggactcacaaaagaggagacacctgcagggcctcaaacactccagatgagaaataagctgagggctaccccttgactcacataatggttactttgtaaaagatccttttatacataaacaaygtgtctaaactatgaagcaaattacacaatagagtccagtaggtgaatagatttcttgcaaatcctggttggcaatattactaggaggagaggaaaacaaagaaaatggcagaattttttataactcatctttcacagctagaagctttttttctaacagaatttaatgaaacattaagagccacggtttcctgcgcaagagttatagaactggtatgatgccacaaggcagacataaaagatt

SEQ ID NO: 280061 - DNA, 634 bp, Homo sapiens
cacacctctctctttctctcttacacacacacacacacacacacaatttcttatcgtggtgaataacaatcacacaatcatccatccagtactacaaatagaaacccaggagttgactttattatccacctctcaactatcaccaagtctatttctacctcctaaatatcttcttagttgcatcccacacataatgatatatcatatttctattactatttagttcaaactattttctatattgtgtctactgttaaatccatccaatgaatgttttaatttttaaatttataattgacacataataactgtatgtttatgtagtacaacctgatattttaatgcatatatgcatagtataaagattaaattggggtaattatcatattaaccacctcaaatatttatcatttctttgtggtggcaatgttcaaaaatcttctagcgatcttgtaatatgcactgtattgttatttggtacagtcactaatgctggtgaagatgcagagaaaaggggatttttatacatcattggtgagaatataaattggtacagttattatggaaaacagyataaagatttcacaaaaaattaaaaatagaagtaccatctccagcaatcccattactggat

SEQ ID NO: 280062 - DNA, 604 bp, Homo sapiens
gtgtcataagtgagggggaagacttaggacccagaagggagggtttttagtctccagtgtgcaatcttggactttaggaagaggctgcacatcaagtggattgttgactgcctttggcaggcactagttgcagaagaaatacrcaatcaaaggaatgcagcactctgcaaagaaaagcagaattcaaagagtatttcttgaatttctcagtgtcacagatcacaaaaaaattccggaaaacaaagatattattagataatccagtattcctgaattcttaaatttccattcctgtttaaacataacatttctgtaatttgcagtcaagagtcctaaataatgttagaaagtataatttaaaaaatattaacattggccttgcaggcagagacattagtaaaatcttgtttcagtgacctggctctctctgggcactttgattggactatataatgctaatttagcttgtcagaagacaaaattacaacatatttagttataaatttaattgccttttatccaccattcatcagggaagcccttcattctataaagtagaatgagaaatcccactggacaatagcagaacaaggggttttttaag

SEQ ID NO: 280063 - DNA, 604 bp, Homo sapiens
gtgtcataagtgagggggaagacttaggacccagaagggagggtttttagtctccagtgtgcaatcttggactttaggaagaggctgcacatcaagtggattgttgactgcctttggcaggcactagttgcagaagaaatacacaatcaaaggaatgcagcactctgcaaagaaaagcagaattcaaagagtatttcttgaatttctcagtgtcacagatyacaaaaaaattccggaaaacaaagatattattagataatccagtattcctgaattcttaaatttccattcctgtttaaacataacatttctgtaatttgcagtcaagagtcctaaataatgttagaaagtataatttaaaaaatattaacattggccttgcaggcagagacattagtaaaatcttgtttcagtgacctggctctctctgggcactttgattggactatataatgctaatttagcttgtcagaagacaaaattacaacatatttagttataaatttaattgccttttatccaccattcatcagggaagcccttcattctataaagtagaatgagaaatcccactggacaatagcagaacaaggggttttttaag

SEQ ID NO: 280064 - DNA, 604 bp, Homo sapiens
gtgtcataagtgagggggaagacttaggacccagaagggagggtttttagtctccagtgtgcaatcttggactttaggaagaggctgcacatcaagtggattgttgactgcctttggcaggcactagttgcagaagaaatacacaatcaaaggaatgcagcactctgcaaagaaaagcagaattcaaagagtatttcttgaatttctcagtgtcacagatcacaaaaaaattccggaaaacaaagatattattagataatccagtattcctgaattcttaaatttccattcctgtttaaacataacatttctgtaatttgcagtcaagagtcctaaataatgttagaaagtataatttaaaaaatattaacattggccttgcaggcagagacattagtaaaatcttgtttcagtgacctggctctctctgggcactttgattggactatataatgctaatttagcttgtcagaaracaaaattacaacatatttagttataaatttaattgccttttatccaccattcatcagggaagcccttcattctataaagtagaatgagaaatcccactggacaatagcagaacaaggggttttttaag

SEQ ID NO: 280065 - DNA, 580 bp, Homo sapiens
tcccagtttaataaatatttgcttacttcacagacttgaagatattcttccatgtttttgtctacaggctttcttttgttaccttttacttttaaatttgcaattcatctgaaagtgattcctgtgtatggtgtgaggtacaggtcaagatatatcacttttaatatgaatatccaattgactaaattatttttatggaaaacacttcagtgtcatctttgccagagagtaagtatgattttttgcaatgtccattatattccactggtcaatttgctaatctgtgtgccaatactacttttgtcttaagtaatataccttttaatagatattaatatctggttttgtaatatctctagtttcattctttaaaattgctgtgactgtatttagctctttgtacctctatgtgaattttgaaaccagcttgtcaggtttttttttttttgaaaataaataaataaaatacttcctaatattttgactgggacagaactamatgtatatactaatttaagaagaattgacatcaacatcttttcaccatggagttttccaatccatatgcatggtttattac

SEQ ID NO: 280066 - DNA, 1239 bp, Homo sapiens
accttcatcacggccgggcatggtggctcacgcctgtaatcccagcactttgggaggccgaggtgggcagatcacgaggtcaggagatcgagaccaccctggctaacatgatgaaaccccgtctctactaaaaatacaaaaaattarctgggcgtggtggtgggcgcctgtagtcccagttactcgggaggctgaggcaggagaatggtgtgagcccgggaggcagagcttgcagtgagcggagattgtgccactgcactccagcctgggtgacagagtaagacttcatctcaaaaaaaaaaaaaagaaaaaaaatgctaccttcatccctatcacattttcttgctttatttttctttagtacctgtcactagtttttgttcaattctgctattgtcatctctctccccagtagaaatgactctggaggggcggagggtggccttggttggcttgtggcgtatccctagcatgcggaacagtgcccacacaaggggagcacctggcgaatgtatgttgaatgaaattaattatcattatcgtaacatacagatactcacaaaacctaaagggaagagaaatattcaaaattataaattagcagcttctgtcacctgggwaccttcatcacggccgggcatggtggctcacgcctgtaatcccagcactttgggaggccgaggtgggcagatcacgaggtcaggagatcgagaccaccctggctaacatgatgaaaccccgtctctactaaaaatacaaaaaattagctgggcgtggtggtgggcgcctgtagtcccagttactcgggaggctgaggcaggagaatggtgtgagcccgggaggcagagcttgcagtgagcggagattgtgccactgcactccagcctgggtgacagagtaagacttcatctcaaaaaaawaaaaaagaaaaaaaatgctaccttcatccctatcacattttcttgctttatttttctttagtacctgtcactagtttttgttcaattctgctattgtcatctctctccccagtagaaatgactctggaggggcggagggtggccttggttggcttgtggcgtatccctagcatgcggaacagtgcccacacaaggggagcacctggcgaatgtatgttgaatgaaattaattatcattatcgtaacatacagatactcacaaaacctaaagggaagagaaatattcaaaattataaattagcagcttctgtcacctggg

SEQ ID NO: 280067 - DNA, 544 bp, Homo sapiens
  misc_feature (1)...(544): n = A,T,C or G
ctcctcactctcaaggtccttaaataaatcaaatctgcaaagtctcttttgccatgtaaggtagcatattcacaangttgcangagatttcaatgtggatgtctttgggggccctcattctacctgctayagaggaagaattgagtctcatggaatctcaggattcagttgccaatttgcaggaaatacagaggacagaggaatatgttgaactgcagcaggagaatgcaattctcaaaatccaggtaaattgtaaggaagtaaaagagatggtggggaacactaagattaagagaaatttaaaatacattgtcaaaaattcttagtacccggatatgcacatgagtaataagctggggagaaatggaaggaactgattcttataaaaagtcaaggaagtaattactttagaaaggaaggagagattgtgtttggaatggagaagctttgggggagaatggcaaggatctattgattgggtgaagatgatgggctattggtcttataataatttaagatttaaaaaagcaagcgcaggacccaa

SEQ ID NO: 280068 - DNA, 544 bp, Homo sapiens
  misc_feature (1)...(544): n = A,T,C or G
ctcctcactctcaaggtccttaaataaatcaaatctgcaaagtctcttttgccatgtaaggtagcatattcacaangttgcangagatttcaatgtggatgtctttgggggccctcattctacctgctatagaggaagaattgagtctcatggaatctcaggattcagttgccaatttgcaggaaatacagaggacagaggaatatgttgaactgcagcaggagaatgcaattctcaaaatccagrtaaattgtaaggaagtaaaagagatggtggggaacactaagattaagagaaatttaaaatacattgtcaaaaattcttagtacccggatatgcacatgagtaataagctggggagaaatggaaggaactgattcttataaaaagtcaaggaagtaattactttagaaaggaaggagagattgtgtttggaatggagaagctttgggggagaatggcaaggatctattgattgggtgaagatgatgggctattggtcttataataatttaagatttaaaaaagcaagcgcaggacccaa

SEQ ID NO: 280069 - DNA, 610 bp, Homo sapiens
gaaatcactactcaggtgtcctaactgcagtagactctgtattctcctatgcagaatgttttcaaacatgttactagcacctctttcttaagggaaaaatgtgcctcaggaaacacagcacatttcaaggaccactgaccacattgccacccccgccactgctgtgagtcackcagattcccaggtggtatgggggttcatgacccttcctacatcaaagagatcaagtagagcctctgagggcagcaatagaaatgagaatggccagtattaggattgcagtgatgcacctgcttaaatggcaaggaaaatctttggcaccactgtgaatagatctatgtggaaaatcactacaatacatggacacattgagtgtatcatgaattaacagcttccctttgaaattatcgcggatacccaggagagtggcccactggaagcaaaagtgaaggaaggcctcttggctcatttcctagtgccttcagctgccttcttgtttaaaatgcttgcccctcatcctttgaagttaatttcatagtgggcctcaaaaaacaacatgaaacaagtcttttaattagtgaatgactgcatgattgcatgcatacatggc

SEQ ID NO: 280070 - DNA, 610 bp, Homo sapiens
gaaatcactactcaggtgtcctaactgcagtagactctgtattctcctatgcagaatgttttcaaacatgttactagcacctctttcttaagggaaaaatgtgcctcaggaaacacagcacatttcaaggaccactgaccacattgccacccccgccactgctgtgagtcactcagattcccaggtggtatgggggttcatgacccttcctacatcaaagagatcaagyagagcctctgagggcagcaatagaaatgagaatggccagtattaggattgcagtgatgcacctgcttaaatggcaaggaaaatctttggcaccactgtgaatagatctatgtggaaaatcactacaatacatggacacattgagtgtatcatgaattaacagcttccctttgaaattatcgcggatacccaggagagtggcccactggaagcaaaagtgaaggaaggcctcttggctcatttcctagtgccttcagctgccttcttgtttaaaatgcttgcccctcatcctttgaagttaatttcatagtgggcctcaaaaaacaacatgaaacaagtcttttaattagtgaatgactgcatgattgcatgcatacatggc

SEQ ID NO: 280071 - DNA, 588 bp, Homo sapiens
atttataaattattcataacccaatgtgttgttctagtttatgcagtgaatacatactgtttttaaggaaggcctaaacttacttttcctccaagaaaaatgataatctacaccactgcccattatcaatgtcataaaataatgctcacaaattacaaagaatgattattaactccttcctgctcctggaaataaaagtcagttatttgggtctcaaatgttaccttcccttgccatgaaatgcygttagtcacacagaatgtggtagtcaaaaccttttttagcaaacatttaatgcatggttattacatggttattagtgctataatagtaaataattccaacagatttccttcttttgactgcagacatttgccagtatcaatcaatatttaaaatgaaagagggaatatccagagcctataaggaattcaagtcaacaagacaaaaacaaaaataaccccattaaaaagctggcaaaagacatgaacatttttcaaaagaagatgtacaagcggccagcaaacatatgaaaaaatgctcaacatcactagtcagagaaattcaaattaaaatggcaatgaaata

SEQ ID NO: 280072 - DNA, 602 bp, Homo sapiens
tttgtccactattagtttttcaacaaaacaagccagagaagtttctctgtgtgtagctgataggtgtccttgaccagggagtggccttcttgctcaaattgccacaccactttgggaggaagctgtgtggaatagtgagggagaatagggacagccacctaaccagccagattagttgaatcagccctgcagatcagcacaatgacagatgtcccaaccagatggtgcacacatccacttcataaatacaccaaagaagtctggaatctaggggaaaaagcttttctgccatgagtgctcctgcccaggaacaattggctgacaccactctactgaaagtcaggctcagagaaaccacaacttctctgccatgtatgtagtggtaaaatcctgccccatgtttcttaattcccrtctttgatgcctgaaatctcaccattagcaccctattctttggtttaaggatttctgctatacaaatacatttataaaaaccaagataagagttttcagttcttatgttgaaagaattacatatactttttgagagcaagtttacatgtgagggaagtgtggtggttaattttatctgtaaacttgac

SEQ ID NO: 280073 - DNA, 1205 bp, Homo sapiens
tttgtccactattagtttttcaacaaaacaagccagagaagtttctctgtgtgtagctgataggtgtccttgaccagggagtggccttcttgctcaaattgccacaccactttgggaggaagctgtgtggaatagtgagggagaatagggacagccacctaaccagccagattagttgaatcagccctgcagatcagcacaatgacagatgtcccaaccagatggtgcacacatccacttcataaatacaccaaagaagtctggaatctaggggaaaaagcttttctgccatgagtgctcctgcccaggaacaattggctgacaccactctactgaaagtcaggctcagagaaaccacaacttctctgccatgtatgtagtggtaaaatcctgccccatgtttcttaattcccatctttgatgcctgaaatctcaccattagcaccctattctttggtttaaggatttctgctatacaaatacatttataaaaaccaagatragagttttcagttcttatgttgaaagaattacatatactttttgagagcaagtttacatgtgagggaagtgtggtggttaattttatctgtaaacttgacwtttgtccactattagtttttcaacaaaacaagccagagaagtttctctgtgtgtagctgataggtgtccttgaccagggagtggccttcttgctcaaattgccacaccactttgggaggaagctgtgtggaatagtgagggagaatagggacagccacctaaccagccagattagttgaatcagccctgcagatcagcacaatgacagatgtcccaaccagatggtgcacacatccacttcataaatacaccaaagaagtctggaatctaggggaaaaagcttttctgccatgagtgctcctgcccaggaacaattggctgacaccactctactgaaagtcaggctcagagaaaccacaacttctctgccatgtatgtagtggtaaaatcctgccccatgtttcttaattcccatctttgatgcctgaaatctcaccattagcaccctattctttggtttaaggatttctgctatacaaatacatttataaaaaccaagataagwgttttcagttcttatgttgaaagaattacatatactttttgagagcaagtttacatgtgagggaagtgtggtggttaattttatctgtaaacttgac

SEQ ID NO: 280074 - DNA, 451 bp, Homo sapiens
taaatgtcaaataatgctttatacataataagtttgcagtaaaatcagctatgttccttctcttggggaaaagaaaaaagtaagcagacgtagcgcagagaactcgtagtgacttgattcraaatatgttttaggaagatttgtttggcaattcttaaaaaaaataaaatccattgtcatggcttcatcttttcttttctttctttctttttttttttttttttttggtctaaacgttggtattgtaaaattgtaaacctttgggatgaactatttgttcttcattttcagacatgacctagctgaaaatctgaacaaaagaatgaaaattccctagggaagcccataactgtgtagctttatttgatcctctcataatcagcattgtggctaagctcccgtggaggccttctctctaattgtttttcaccaggagtattttcctttcagg

SEQ ID NO: 280075 - DNA, 574 bp, Homo sapiens
agactgtgcctgttaacaatcttcccactagggttctctcatcctatgtctttgtcttcatcttctgttcacacaataaaccatcctgattgaatctccagatcttggtggcactacactgagctgtgccttgagaaggcaggagaaagatgtcaacattttcrgtgtacagtgtgctatcaagtcatgacaccactgcccatatcggcttcaaaagacttagaaatggagatttttgtagtcaatgataaaagtggataggctgaagtgcatgaaatattaagaaagcaacagctgtgtgcctcttagtgcatcctgtgaatcatttaacatcctactctgagaaccacaccttttcaggcccctttatatgtgctctatgctttgggatgagcactaagtttattttaagatcacacagagatggtccaaggtccaaggaggcactgtgtttcctagaaggtaaagaagcagaggtaagctgccagaggctatggaagtaaggaggatggagtagacaatttaaaataggctgaggcctctgtccctgctttaatcttgttcttttctttct

SEQ ID NO: 280076 - DNA, 590 bp, Homo sapiens
ttttataaaggggagttcccctgcgcacactctcttccctgctgtcatgtaagtcgtgactctgttcgtcattcaccttccattatgattctgaagcctccctagacatgtggaactgtgagtcaattaaacttttttcctttataaattactcagtcttagatatgtctttattagtagcatgagaacagactaatacaagtactacagaacatagatgctcagagagataaattagaaagttcatagacagtctgccttgaatattcagttgattactgatcagagcattcatgtgagaaacttaccttgagccaggaaaaagatcactaaaaggattagarggaaaaatgtctgaagcttacaaaggacggggactaatgctgattcccaccagtcagaataaaaaacttcataagtcatgggacatcagatagagaactactaagggtcttgcttcagtagtggggcatagttacccctaaacgaaatgctgtgctgaaggtccaacctgaaaagcttaaaagcacgagctaaagaatcaaactgtttccaagtaatataactatgccccagaccaaagttcatga

SEQ ID NO: 280077 - DNA, 1064 bp, Homo sapiens
ctagatgggttgattagattagagattgaagaaaaaaggtaagaaacctgaatagaaattatctagaatgaaacagaataagggttgaaaaaaatgagtagagcatcagtgaaccaagggacaacttstaggagccaaagattgtgaaattggaatctctggaggaagaaatgggaaagaggtcagaaaaatatttgaagtaatagtagctgagtgtttccaaattcaataaaaactacaacttactgatccaagaagttcaacaaaacccaaatacaagaaaaccaagaaaaatgcaccatgaaatagcacaataaaatttcttaaaactggtgaaaaacagaaatgcagtcagaaaataagtaccttacatgcacactgaggaataatggtaaggatgacagatttcttgtaagaaaccacataagctagaagacagtaaagcaacatctttaaagtactgtaagaaaaawtatgattccacatcctgatatttgtgctgttgtataactccctcctatgagtgtgggctggatgtagtggtttgcttctgaagattagtatatggcaaaagtggtgggatatcacttctgcawttaggttacaaaagactatgacttccattttgtcagttttctctctgtggctcttctttatgcttgtgtgatggagagggccacttggtgaggaactgagatgacccctatccaataacctgtaagaaacttaggcccttatcccaacaatcctcgaggaaatgaatcctttgaacatccacatgagcttggaagcagatccttcctcagtcaagccattagatgagactatagcctggttggcatcttgattgcggcattatgaaagattctgaagcagaaaactcaataatgtggcctggatttctgacccacaaaaactttgagataaaaatgtacgtggttttaagctgctaactttgaggttatttattttatagcattagataatcaataaaattgtatgtgttagatttttatctggaaaatacattgcagatattttccctgatctttcatttgttcagc

SEQ ID NO: 280078 - DNA, 591 bp, Homo sapiens
tatgattccacatcctgatatttgtgctgttgtataactccctcctatgagtgtgggctggatgtagtggtttgcttctgaagattagtatatggcaaaagtggtgggatatcacttctgcatttaggttacaaaagactatgacttccattttgtcagttttctctctgtggctcttctttatgcttgtgtgatggagagggccacttggtgaggaactgagatgacccctatccaataacctgtaagaaacttaggcccttatcccaacaatcctcgaggaaatgaatcctttgaacatccacatgagcttggaagcagatccttcctcagtcaagccattagatgagactatagcctggttggcatcttgattgcggcattatgaaagattctgaagcagaaaactcaataatgtggcctggatttctgacccacaaaaactttgagataaaaatgtacgtggttttaagctgctaactttgaggttatttattttatagcattagataatcaataaaattgyatgtgttagatttttatctggaaaatacattgcagatattttccctgatctttcatttgttcagc

SEQ ID NO: 280079 - DNA, 627 bp, Homo sapiens
aactgttactgttcttctctaattatttcaaggatgctcttcacttcttacaaattggcatgccaggctgctgctcaggtaatctgcctcttggaccggctctgaaaatgggacaatgatcagtgcaagatccctgagatgctgagacacgatgggatggaagaaagctatgggacaagtggcctttcataggaggaggagctccttgtcaaatgtgaggagcgaagcaggacaggagcatgagaacaggtaggtgtagagatgtggagacttcccatttgctgagataggtgagagattcagaagtttgacaggaattttgacatggaaatgggaagacaaactgaccagggaaacaaagattgccmggctgttccatttgagagcccagctgaaggtgatgaccatgcttttatgaggacagcaatctgaccagctgtcaatcttgctgtagcagtcttagcaggctgggttaaggtagaggagctcttcatttcaggaaggacagtatcagaaacctgaggagagaaccaaattacaaaagactaaggagttaagacatgaacgtaaatgtcttagtttattcctgctgttataaatagtaccttaaattgggtaacttataaa

SEQ ID NO: 280080 - DNA, 1239 bp, Homo sapiens
ccaaacacacaaggcagggaattgctctcacttggtggctttatgtccctgattgcatcaattcatccagagacaactcgtgcccactgaatagacatgtgctttcctgcattttccaggtcctttcagctgggttgggaccatgtgacagagttctggcagataggaatgagagcagaagtgacatggcacttctggtcctaggttcctaactgttgctgtgtctcccgtatccttcttcctcctgatcagaagaacttaaagtcatatgttgaagtgctggcagacaagatggagagagccttcacccctgagtcactggatagtagagagctctgctgacccacgtgacttcacatgagcaagaaacaaaattttgcagttattgagcacctgcagtttaggggtatctctattgttgccactagcataaccccccaacyctaaaagcatttatccttgaacatcacctggcaaaggtgtagcaatggcttagcccttatacttctttacaaggaacttctgagaaactctgcttgtagccccagttttgaggtttttggtggataaataatgtactcgcacacaaaactgatggaactcaattttagtaacatgacgaagawttcttgtgaactggtttttgccaaaaagaagwtttgactttttaatcattccaaactgtcaacctttccttcatggactctgggcctcctgttagacttagaaggttctccccactccaagactgtaaaaatgtggacagtgtatttatttagagcattagatgaccaaattcaaagaggccacagtaacataattgatacgatgccaaagaaaatagcccgaagccctgccgaggaatctgcctagccctccttttcccctccactgtacttttccggcctgtgattatttgttatgcctctaggcagccctgactttccattaagtcctcctccctcctcttttattcctgtgcagagagctgtttgcttttcagtttttgctttttgttttcacagactgtgatggccaataagtgggacccctttgacctgtacttctcccttcctaggaccaaatgcagcattactgactatatgtacaccttcctgttctcccgtctctcctttcatcctcccccttcctggagtgagcaagcaagggagccaaaagcagactttgacacatctgccctggcttggctctattccaatgggaaagtttgatgttgca

SEQ ID NO: 280081 - DNA, 331 bp, Homo sapiens
caacaggccagtcatagatgtggagcacaaggaaggtgctgccagagagaatgaatatcctgcctttggggacacctgtatgactgtactacatcccagataactgtagagggcaatgattctccagggaagtgtctacaggttggcctcaagcccctccaactctgttaatggagcagtcagggttggctctggtgaacaacctggaagctaagttttttgggagcaaaargtaagccaggaaaaaaatgcaggtcttctagaaatggtctgctttccatctaaggtgagatttttctaggtggctgtggttgttaattttatatgtcaa

SEQ ID NO: 280082 - DNA, 592 bp, Homo sapiens
tctgttggttttgttttctcatgtaaaatggaattttattgtatttgcttttaacaccattttcttcttgaaagaaaataacattttattatacaagttacacatgcctactatagaaaacgtagttgtactctagcaaaaaattayccataatctaatattctaccagagaaaactactaacattttcatattactgaaacacacacacagacacgtttgcatatctattttcatactatacatagaccaaagcccttctaaaaatgactcctttcagaacaactaaccatatagaattggattacatcctttcatcaggaagtactagagtaaatttatcttaactaaagaacccgagttttgtgtacaataaaccctccatatccacgagttccctgtctgtggattcaagcaactgcaaattagaaatatttgaaaaaaaaactacaataaaaattatatgaataaaaaatggtgtaacaactatatacctagcatttacattgtattatgtattataaatagtctagagatgatttaaagtatgtgggaggatgtgcatatgttatatgcaaagattaatccatttt

SEQ ID NO: 280083 - DNA, 1702 bp, Homo sapiens
tctgttggttttgttttctcatgtaaaatggaattttattgtatttgcttttaacaccattttcttcttgaaagaaaataacattttattatacaagttacacatgcctactatagaaaacgtagttgtactctagcaaaaaattacccataatctaatattctaccagagaaaactactaacattttcatattactgaaacacacacacagacacgtttgcatatctattttcatactatacatagaccaaagcccttctaaaaatgactcctttcagaacaactaaccatatagaattggattacatcctttcatcaggaagtactagagtaaatttatcttaactaaagaacccgagttttgtgtacaataaaccctccatatccacgagttccctgtctgtggattcaagcaactgcaaattagaaatatttgaaaaaaaaactrcaataaaaattatatgaataaaaaatggtgtaacaactatatacctagcatttacattgtattatgtattataaatagtctagagatgatttaaagtatgtgggaggatgtgcatatgttatatgcaaagattaatccattttwggcctggaaactccttttttgatgacaagggtgaaatggtaatgcgtaaaaacacacagaactatggtgtttgagagggcgaagccttgggaaacaagaacaaggatggagttccaagttgtcataggtaagactagcaaaccaggaggaaaggtcaatattagcaacactacatagatgcctccaawatatgtttccaattaatttgcagaaatacttaagtgccttactataatgtcttgctaaggacatggctcatgcagaagagttgggtgaagacttgaaaacagaaattgagaaagagtatgaaaactgtggcaaaactggaaaatgtgaaatgttacgaattcctggtacatggaaggatacctaatgataggctttaaatttctattatcaggtatttggatagcttaagctatatctctcctcttacagtggaaataaatcaacgtagcatagcaaattaaaactcaggttttggaatgactatagaatagagtgactttgaacaaataactctctgaatagcagtgggctggaaaactagctctccacaagaawtttggtaaacattgctgcatagtcttagctggtacttcaaggaattagcaatgcccatatgagagaatctaatgtccatacctaaggaggaagcaagttatgagatggtaaaagatgaatgactgggagaaaaaaaataccagtccagagcaagaaagctggctgggggttccagagatgaccgagtagtttaatggaacatwaaagcattcctaagagaattctccaaaatttacttaaagatagtaggagggtagagaagaatcttgtatgaccacatttccacattgcacagaatgggactattattatgtttgtttattgtcatcattgtttgaattaaaaggaaaaattacccagaaagtgggagagtttgccggcattaaagctgaattaacttgctagggctaacgtaacaaataccacagtctgggtggcttaaacagcagacacttattttcttacagttctggaggctgaggagttcaagatcaaggtgctggcaggcttggcttcccctgaggcctctccctttggcttgcaga

SEQ ID NO: 280084 - DNA, 545 bp, Homo sapiens
tttggtaaacattgctgcatagtcttagctggtacttcaaggaattagcaatgcccatatgagagaatctaatgtccatacctaaggaggaagcaagttatgagatggtaaaagatgaatgactgggagaaaaaaaataccagtccagagcaagaaagctggctgggggttccagagatgaccgagtagtttaatggaacataaaagcattcctaagagaattctccaaaatttacttaaagatagtaggagggtagagaagaatcttgtatgaccacatttccacattgcacagaatgggactattattatgtttgtttattgtcatcattgtttgaattaaaaggaaaaattacccagaaagtgggagagtttgccggcattaaagctgaattaacttgctagggctamcgtaacaaataccacagtctgggtggcttaaacagcagacacttattttcttacagttctggaggctgaggagttcaagatcaaggtgctggcaggcttggcttcccctgaggcctctccctttggcttgcaga

SEQ ID NO: 280085 - DNA, 537 bp, Homo sapiens
catccctggtgtctctttctcttcataagaactccaggcatatgagattagggcccctcctgatggccttataaccacctctttaaaaaccttatcttcagatacagccacagtactggggactagggcttcaacatatgaacttgggggagggtggggggcacaattcagcccgtaacaggtgttcatacagatgttaaaatgcattcatatttcagccctaaagtgttgaaaaacacaacgacatgatggacrtcgatgtcagggtaacagcctctttcctccttactctgatactctccctaaccctctgcaaagcgtggcatcatctttaactgactgtctttctagaaaccctaggctgtcttctagatgctatttctctagaagattttaatagagagacctacattaaaggtcacaggagtgggaggatggaaaggactgcaagggtaaaatcgggaaaggaaggaagctcctgcctctaggcccagcatgtaggagcacagttaagagatgacaagttgtgctgcaggc

SEQ ID NO: 280086 - DNA, 537 bp, Homo sapiens
catccctggtgtctctttctcttcataagaactccaggcatatgagattagggcccctcctgatggccttataaccacctctttaaaaaccttatcttcagatacagccacagtactggggactagggcttcaacatatgaacttgggggagggtggggggcacaattcagcccgtaacaggtgttcatacagatgttaaaatgcattcatatttcagccctaaagtgttgaaaaacacaacgacatgatggacgtcgatgtcagggtaacagcctctttcctccttactctgatactctccctaaccctctgcaaagcgtggcatcatctttaactgactgtctttctagaaaccctaggctgtcttctagatgctatttctctagaagattttaatagagagacctacattaaaggtcacaggagtgggaggatggaaaggactgcaagggtaaaatcrggaaaggaaggaagctcctgcctctaggcccagcatgtaggagcacagttaagagatgacaagttgtgctgcaggc

SEQ ID NO: 280087 - DNA, 489 bp, Homo sapiens
aaaccaggttcaaataaggcaaacattcagaccatktggcagccctggaatcactctgaacctattctggttctgagggctacccaatttgccaatcatccttttcccaattaaactctgttaaatttaatttttctgaaggttttcttttaacaaaacagccaaaacctaggcccctaggatcaagtaacattttatcactaaacattctttttaattatgatgtggaacaaaagccctcaccagaagccaaggtcatccccgtgaactttccagcctgaagaaccatgacctaaataaaccttttttctttacaaattgcacagtctcagattttctgttacagtgacgctaaacagaccaagacaccattctttctattcagttcccactgccagcctccaaggttactttacctcaaaatttgtaattacacgtggggcccctttccgtgaacttcacagtgttattttgcagtcacctttccaa

SEQ ID NO: 280088 - DNA, 1081 bp, Homo sapiens
aagttcttttaattaaatcatgatactataaaaacactccaaatagatttgcttattctagcctttagatgtgattcaaaaataaaaaggaggcctctagggaggccactagtggcctttctatgcacctaagttatttccctagtggaataaagagcatcaggggactaaaggaagaagctgctgctaagttctggccctgaagataatttgcatatgggatttttcatgaattgagtttgaggcactggggttgatgacttctargcctaaccatcactctacagagaccacatctttgagaatattaacttcctgtgcctaagaatgttttaaagttcagctactctctgtagcactatgtttcttggagatgaaccatggaacacctgaattcaaatcaccaggaatgcttcttaaaaatgtagatttctaggacccacccagtgcagtgaatcagaaactatgggaaagggaccaaattagtacttctaaaataagtactcacagttgattcttacccacattaaawatgtacttaatattaagtaaaacagttcttctaagttgcacaatgtttatgttgtggcttaatatagcccttggcataccaatgtgtacttcaggaatgaaaaggttaagcagcacatttcaaagtcagaaagacctaggtttgagatccacatatgctactccatgtagcttgaacaagtaatttaacttaagtgaacttttcagctcaagtattgtcattttaatcatcactgtgaaggttggaaaaatgacataaatctgggctcacttttttttcttttggtatggaaggatggggatcattctctttcttttccatatgagctgccacacagaagacgacaaaaaatatgcctgtccgaagggtgtgtataaaagcagataatgagggaccacaagtctgtcctttgattacagggggaatgacttggggaatgacaatgtgtatttttctctcacagctttttgatagcatttgatagaaccattttctttattgtcctwctgtctaagcttccctgcacagacataaaaacagagtccctac

SEQ ID NO: 280089 - DNA, 555 bp, Homo sapiens
atgtgccacattttctttatccagtgcagcaytgatgggcatttgggttggttccaagtcttcgctattgggaatagtgctgcaataaacgcatgtgtgcatgtgtctttacagtagaatgatttaaaatccttgggtatattctgggtggtattttctatttctattctgggactccctgctaaggtgaccatataatttgtttctcaaactagaatactttttaaaaggaaaagggtgttaataatatttatactaggcataaactgggacagtcctagaaaaatggagacgtttgctgcttaccaattgttgacagagttaacatattcagaacaatataaactatagaaaataataatagcagctaaaatttcttgagagcttagcatgatccattcactttgctgaatgctttatacggtttaatacgtttaatctctattaaattgttattattgtccttattttatatgaggaaacaaaaggtacagtactaacctgcacagctggtaggaaattgaactgggatttgaaggagacggtcagaatgac

SEQ ID NO: 280090 - DNA, 555 bp, Homo sapiens
atgtgccacattttctttatccagtgcagcattgatgggcatttgggttggttccaagtcttcgctattgggaatagtgctgcaataaacgyatgtgtgcatgtgtctttacagtagaatgatttaaaatccttgggtatattctgggtggtattttctatttctattctgggactccctgctaaggtgaccatataatttgtttctcaaactagaatactttttaaaaggaaaagggtgttaataatatttatactaggcataaactgggacagtcctagaaaaatggagacgtttgctgcttaccaattgttgacagagttaacatattcagaacaatataaactatagaaaataataatagcagctaaaatttcttgagagcttagcatgatccattcactttgctgaatgctttatacggtttaatacgtttaatctctattaaattgttattattgtccttattttatatgaggaaacaaaaggtacagtactaacctgcacagctggtaggaaattgaactgggatttgaaggagacggtcagaatgac

SEQ ID NO: 280091 - DNA, 595 bp, Homo sapiens
accagagctccaactgaacaaccagacagacaactctcatcatcctccagagagaaaataggccgtgtctcaaagaaaggttcttggtctatgcctctggtctgtgggctggcagggcaaccataccatacycccgccagtcctcggctcctgctgcaaagttggccatgtttcacagggaaacttttggaagagtggctgcttatgagattccaaaatgaagtgttggccaacaccgctcatggccatcctggattttcccagtggcttcccttcctgctcgcctccctgaacaggggagaaagcttaacctctcttctcctctccaaacctttcaccttgaatgggtaatgtttggtgggggctgttccttcttggagaagccttgagtcggaccattttgagatcatggaggaaggatgaagaagtgaaaatgacaataatgactctcaagaggctggcgatgtgacatggcaaatgtagaactgacttaaattgaacaaaccctcactgagcacctctgatgttgagcacctgctgaatactgagcactgaatgggggagggggaggggagcacggggtgagtcaacctgg

SEQ ID NO: 280092 - DNA, 590 bp, Homo sapiens
tgctctctgccagtgatgctttcacaccaaactcgaccagctcctatgagcaagctcaggcagaaggggcccacatcagaacctygaaggattccccacagaagatagaggatcttgtccatgcgtttcagatctcagattcttctaatttctattctaaatatctctaaggccattttttccttagaaccatctcaagatcagcccaacccctatcttcagccttccactgtgctcataccagccttgattgtccttcagggtgaattcagcaaggacaaggtctctgatggtcaagagaaggagacaatagaggccagaccccctgagagagtaggacagaggcctgtgtagtgatgcaaagcaaagactgatgggctccattctgtgtgtgtgtctctttttctctctgcagagtacaaggtaaaggatgtgcatagaccctgggggtctccaggattcttggagccgctacactggggatcaccaggaggatgacagcactgtctatgtagggaagggaacatagataaataaccccaggggtcctttcaagaccaacatttcctgtcccttcttggcccactttt

SEQ ID NO: 280093 - DNA, 590 bp, Homo sapiens
tgctctctgccagtgatgctttcacaccaaactcgaccagctcctatgagcaagctcaggcagaaggggcccacatcagaaccttgaaggattccccacagaagatagaggatcttgtccatgygtttcagatctcagattcttctaatttctattctaaatatctctaaggccattttttccttagaaccatctcaagatcagcccaacccctatcttcagccttccactgtgctcataccagccttgattgtccttcagggtgaattcagcaaggacaaggtctctgatggtcaagagaaggagacaatagaggccagaccccctgagagagtaggacagaggcctgtgtagtgatgcaaagcaaagactgatgggctccattctgtgtgtgtgtctctttttctctctgcagagtacaaggtaaaggatgtgcatagaccctgggggtctccaggattcttggagccgctacactggggatcaccaggaggatgacagcactgtctatgtagggaagggaacatagataaataaccccaggggtcctttcaagaccaacatttcctgtcccttcttggcccactttt

SEQ ID NO: 280094 - DNA, 550 bp, Homo sapiens
ttgtcacagcttgtcattgaatgtttacacttctatttggcactgttggtttctctttccagagagtgaactccaccaggacagcaagcatgcttgcctcactcatctctgaatgcccaacatgtagcagagagcctggcacatagcgtggcccccagtttgagtggatcaatgaaagacgatgatgttatcctcattttacaggtgaagcaagagatcyagagaaggaagccacttctcaaggtcacagcctattagtggaattgctgacgcttgaacccgggagtcctggctctcagccacttctttacactcctgagctacccaggagcagggttttcttgccaattctgggggatatcatattgaatcctggtgtccccacttggtgagggtgtccaaggcccagatctcagtggtagcagaacccccacaagacactcacagcccaagtgagcgtgactctagcactgcttggcctggtccccctcattccaggatcacttagcatcctttcaggcaggtccttgaatgccctgcaattactccc

SEQ ID NO: 280095 - DNA, 594 bp, Homo sapiens
gtccttgtggtgcctcaggtctgccctgtctgccctctgcacactttgccagctcgctttggacccccacctacctcttgccctgggctcttctcacactggccctgctccttgcagctttgaatattttgtgccttcacctggttcacccttgctcttccttagctcactgctgaaatatgacttcctcaaggcaatgtttcccaatctcccaagatacatgcctgttgtagatgttcagagcaccctgcacttctcaatcacagttcactgtgggcttgaattagctgttcatatgagctctgttggggcagggctctcctctccttggtctctgcccttcccccaggacctagtgtaatgcttgatgcatagtaggtgctcaataaatgtctgttgagatgatgaataaatgaaagtgagagtacataattcacrgaggaggagttggatatggccacttttaactccaggattctccatgtcaatgattctcactttagggacagaaatgtagacttcatcattatccatcatttcctttgccttcatcctttatacagtcaaatcccaaatcctgttgactattattgg

SEQ ID NO: 280096 - DNA, 541 bp, Homo sapiens
ttttcctccttcctttcctggccaaacttctcaaatggtcagcaactcctcttgcacactcctttcacctcctgcagccttgcttccaatcacaccctccactgagaaccctctctgamgggtcacaaatggcttccacttccattggaccaaagtctagcctttcacctccatcaaatcccatctcctggcctgtagctctgttgattgagcctctactcctttctgatgtattctcctaatttgcagagatgtgaaaatcatggatttgggggtcgaataagtctaggttaaataaccactgcctcatccctccaggaagccttttctgccttctccctgccccatcccaatgttataggtgctcatagcctctaggcctctcccacactaagacaagttacccaaccaagttgtttcctcagtctttgtaaagcaagaagaatgacacccatagttgggagactgaaatgcaataatatttgcctagctcccagtgcctggcccatagtaggtgcttactaattgttatttcccatct

SEQ ID NO: 280097 - DNA, 1193 bp, Homo sapiens
gtgtgcttcattctgaatagagcgtctctgattcccgtctggtgcctgagggtgcatggcccatgagccttagaagagacgtcttcgggccttgcacgttggcctccatagaaacttgtggcaaattctgggctccggactgggtgatggagktagaggtctgagggcagaggtgggcaggggctccaggccgtggagatccaagtggaattcttcaggcagagcctgtctccagggactaggcttgggcatttgggatgagccctgggggacggccgctctgtagtcaggtttgaggtagaggacacgccaggaagaagggctgactccatgcacaaggtttgctgggggtcccatcaggggcaggaagccttggggagcctcaccctcttctactgaaggcgccacacacacattctctgctctctgggctctcacagatccattttcaatgtcaatctcccagacagtctctgtactagtgagcaggagccagcgggcatgggcagggtacaagagatccttcagggacatcaagagttgctcagggaccaccaggagctgcacattgaggaggctgagtcgcagggctccctgtgggtccagccccaggaactcctgccccaggcgcaggtgcaggaccattcctggttccaagaccgwtatcatgaaaggactcacactggagagaaaccgtatgagtgtaagcaatgtgggaaagccttcagatctgcctcacaccttcaaatgcatggaaggactcacactcaagagaaaccctatgaatgtaagcagtgtggtaaagccttcattttttccacttcctttcgatatcatgaaaggactcacactggagagaaaccctatgagtgtaagcaatgtgggaaagccttcacatctgcctcacaccttcaaatgcatgaaaggactcacactggaaagcaactgtatgaatctaaacaatgtgaaaaaacctttggatctgtcagaaaccttcaaattcatgaaaagacacaccctggagagaaaccctataaggaatatggaaaagcattcaacaatttctcttcctttcaaatacatgcaacaatgcacagaggacagawtgcctatgaatgtaaagagtgtgacaaagcattcatatctgccaagatccttcgagtacatgcaagaacacaccctggagagaaacc

SEQ ID NO: 280098 - DNA, 503 bp, Homo sapiens
gtcaccggcctcagactctgctgccccctgcaggttattcacctgcatttcacctccatgatcagacaaaaagatcttcaacctcatcttttaaaaacaagaaaccggccgggcgcagtggctcacacctggcaaagtgctcaatcccagctctttgggaggccgaggcgggcggatcacaaggtcagaagatcgacctggctaacacggtgaaaccctgtctctactaaaaatacaaaaaaaatccaggtgtggtggtgtgtgcctgtagtcccagctactcgggaggctgaggcgggagaatggcgtgaacccggaagctggaacttgcagtgagccgagattgcgccactgcactccagcctgggcgactgagcaagactctgtctcaaamaaacaaacaaacaaacaaacaaacaaacaaaaaacccaagaaaccaacagagtccctgctttcctcctgtgtgtgtatgtaaagtaaagaaggaaaattctaagaaaat

SEQ ID NO: 280099 - DNA, 511 bp, Homo sapiens
tttcttttataatcaattttgatttcaagtcactgaaagcattactgaaaaagaatatggagtttcactctctggactattcaatgtcatagcaagaaaaaaaccttcctgggtgtgttggataaactgagcactctcagaatccttcccaacctatgagttcctcattattattaatcaaatacctagcagtactacttctaggaatctatcttacagaaatagcagcacaagttcacaaaaacaaaaacattaccatgttcactacagtgttatttgcaatggcaaaagtgttaagtgatctaaatggccaacagttgaaggatgattaattatggaccatccatactcgggagcactgtgcagccaytaaaaataacatagtatgcctctgtttactggcatgaagctatgttcagtgaaaaaaggatgatggacaacatgtatagagtgataccatatttggaaaaaataccactgtgtatatacagaaatatatgtgtacaaaggg

SEQ ID NO: 280100 - DNA, 591 bp, Homo sapiens
aatataacctttattctgattgaagccaaggtggaggaggtagcttagtctgaaatccaaaacacacatggctaagctatagaattatatcatcttggggccgggcatggtggctcatgcctgtaatcccagcaatctgggaggcagaggtgggtggatcacttgaggtcatgagttcaagacaagcctgaccaacaggtgaaatcctgtctctactaaaaatacaaaaattagccaggtgtggtggtgcacacccataatccctgctattcggaaggcagaggcacagatcacttgaacccaagaggcggaggttgtagtgagccgagattgcaccactgcactccagcctgggcaacagaatgagactgtctcaaaaccaacaaacaaaaaaaattgtatcatcttggcaggccaggacmgcaaaagctgggatgagcccccagccttagagaaaatgtgtgctcttggtaggcaggcccttctccagatagaacgagcatggcagtaagctgagctagcccacttattcaccccaaatttaccaattaggtaagtcactcccctatagagtacagtgagaaagagggt

SEQ ID NO: 280101 - DNA, 1630 bp, Homo sapiens
ttcacacgagcacagcagtagtaggtatccccttgaggaagaagataacctgcacatgctttgatttttcagaactcctaactcttagttcattaactataaaccacctttttgaattggaaaaaaaaaatggacatttcttaataagaatctttgctaaatgaaaacaaagacaagtgttctcaattagttggtctttttactataggccttagaggtaattgcattctgctggaaagaaggctgcactaagttttcatcatttggtttgattcaaaccaaagcttgatttgagcaacataaaacaaaaacatctttcaaatcatgttctgtttcccaagtgaaacttcggggaaatatcaggtgggaatactttgcattgtatatataacaggaaatagaaagcaagmttgcttaaatgtctgcactaacagaaggcccatgtatacaatgaaaatgtagcattagagaagcwctaataagctggtttcctcaacaaataaattgcacaagacaaaaaggaggaaaaaaaatcttgtaaagaaatttaataataaatttttaattctaattttttgtttcagttcctctaaatatggcaaatactgattggaacaaaaaattacaatttgttattcagaagccataaaattcaaaaaaagttaaataaattgcagatcattgttgtataagtccatgtcatttatactcttgaagtcatttaagcttaaaactgcactaagacttttggaatattctgtacaaacaaactaaatttgactaaagaagaatatagaaaacatgaacatattcaagatatcaaagaaattaattcagcagtcaaaaatatgawgaaaacctcagtcaaaagtttatagacaagtatcaccaaatcttaaagaaacaggtaacccctattttaagcatgatattccagagaataaaaaataggaaaagctatccagctcatcttataagactagggtattagtccattttcatgctgctgataaaggcatactcgagactgagaagaaaaagaattgaaagaattgaacttacawtcagggtttccttttattagtacattattagaacatgacttctttattaagaaacaaatgggaattttaaaaatatctatgttaactttattgatttactattaaaattggaaaagtagtattcttgaagactatttccttcacatacatatttaaccaaaggcaggaacagaagcttaccctttgcctttgtgttgggcataaagatggcaataggctgcattaatgcaggaagataatgcataaatcagcccwaaggaattaggatgtagtagcaatacacacatatcaaaaaaaaaaaaaaaaaagcctttacaaagttctgaatttaccaccaataattagagaaatgtagcaaacacaacaaaatttgagctaactcacattatttttgacataagagaaaaaaggaaaaaataatttcaaaccattgcagcagtttgctacaaattctcttcccttctctcacagtctctctcctttttaacatgtctttacctttccttaagtaatcttgctgagatatttaacttgtttttgaaaatattttttttcttaaatgtttt

SEQ ID NO: 280102 - DNA, 568 bp, Homo sapiens
gctatcaattaaacatttactaatttcttccagcaagaagctttctttctctctaaaaactcttatagccctttacttttcttgtagcatttattatttattagtatcataggtagttatgaacatcacttattatacatttggtatttcacaagctcaataaatttaatatattttaagtatgatatcttttttaaatacaagaagaaatataactattttcttatagttcaccratttatttaacagaaaatctgtttaaaaacaagtgctaagatattgagagaagtttcagctactatttttgttgactagctaaatagctcaacatattctagcaaagaaaaccaccatagacccttattcagtttagaatgtttttcccatcttacttctaaagtaaagctggctacagaatcttgactttaaaagatgcaatctttacaactgtagtagagtaacaattgttcatcttgccccaaaaatattccatgtccataaaataaatacaaaatgttatataaattgattttatagtaaacagataataaaataataattatatatt

SEQ ID NO: 280103 - DNA, 583 bp, Homo sapiens
aataatactctgtgaattaatcaacctattccacacaaaccttttcaaaacacaagccttccattttggagaaactggcaagttgattctaatatcatatggaaatgcagtggaacaagaatagccaaaacagtctttaaaaagaataataaaactttgaagactctacacttctttaatttcaaactgtgggactgacataagcatagaggcagatcaattgaatagaattgagagtctagaaataaaccatccatttatgagcaattgattttcaacaaaggtgccaagacaattgaaaggaatataaaattcaataaatagtgcaaggacaacttgatatccacttacaaaaaaatgaatgtggactcttatctcacatcatatcagaagttaactaaactgcatcaaagacctcastgtaaaactaaaactatagctaaactatacatctctcagaagaaaaataggcgtaaacctttgttaccttggattaggcaatagttacctagatacatcaccaaaagcaaaaacacacaaaataaataaatttcacttcatcaaaactaaaaacttttgtact

SEQ ID NO: 280104 - DNA, 612 bp, Homo sapiens
gaaaatgtagaggttttgttaatgaattttacaattattgtgatagttttattttgtaggttatttcaagaagattttcgttgtacatgtgctgaaagttaggtatactgaatttacttgtacaatatctaagctctttaataacttaaaatgatcgttaatgcagttttatttcataaaaacaagtgttactttttcatatcaagctccttgcatagaagctgcaaaattttaatgtaatgaagctcatgaacactattactcatctagattttgaaattagaataacgtaattttcatatctgtaatgtcttacatttttatttcaatgttgcatttatagaaattgttttaggatgccatcgtgtggtataatgactacattcaaaaggtaaatgcagacaaatgtggaatatatgccaattatagcaatgctataattttcttaataaaatttcattctgtttaagaatttatgagagaagagagaacagatgtctcagatgagaggacacatgcggttctttcataaccaggatacctctttgtcygcaaggctcataaggagaaacagataccataaaatcaaaatcttggaaacaacagagttag

SEQ ID NO: 280105 - DNA, 609 bp, Homo sapiens
atatacatgcataactatttgttcatactgttccctctgcctagcatggaattccctcttctctctcagcagagaaacttaatactcccaattcaaaacgcagatggcaccacgcgaggtcagagaaagaggcaagaagttttagtcaacctgtctttgattattggcttgccatatgcagtctacgtgtacttgatcatcgcttaactttttagcctgtttctcatgtatgaaacgagaataatgatatccagctcatgggttgtttaaaggaatacatgacatgataaggtaagagcttattacatattatttttctttggtttcctttttcccttgcagtatcacttgctttcagctatgtactggcaycactcagaataattttagagtcattaattttatttatttatttttctcttttatttcttttaactttattttttttaattttaaagacatggtcttgctttgttgcccaggctggtctcaaactcctgggctcaggtgatccttctgcctcagcctcccaaaatgctggaattacaggcatgagccacagcacatggatccaagtcattaattttgttttatttaatgtaatttatt

SEQ ID NO: 280106 - DNA, 452 bp, Homo sapiens
atagcacaacagggtgactctagtcaataatataaatttttaaaaattatatatgtatttatttatttattttaaagagttgggactgagctggagcataggccataagattgcctctcaggagcagaagtgagactgtgaaagtaagaaagcaggggtagggctgggtgggatgaggtgagggagtgaagggcacatacctaggggagtttcactttgcaagggtgttctagatgctgggattgtctgccttctgcaaccacagagggctagccagraaccagggagcctccttgtctgtactctgatcccatccttgggcttagttgattagtccaggtatgggaacctctgacctgggccattaagcctcttcccttggtttctgtctcttagacttcaagaatgcttgaggtcaggctgtctcccatgactgaggcagtgaaaggtaa

SEQ ID NO: 280107 - DNA, 438 bp, Homo sapiens
aatcttatgcttccatccaagccaagtaaagtgccacctgccctgcagtcttctttttcattcatttataaaatatttattgagyctttaccatgtgcccagcactattttaggttctggggacacaacaatgaacaaagcaaagtccatacccttgtggacctccaggctctaggaattacatttttatgaattttagtaactcggtgtgacagccagcctccaagacggctcctagtgattcacacgcttatgtagtcccattccacagtggatggggtgacctgtgtaacccaacaggatagtgcagaaatgatgggtgtgtcttctagggttaggtcataaaagccattgcagcttcttctttgttttctctctgggatcaccttctcagtgatgtcagctgctccatttccacactggagcagccttatggaa

SEQ ID NO: 280108 - DNA, 604 bp, Homo sapiens
ccagactgcctctgctgcaggaaaacagtaccaggccagtgtctagtctttggttgcagctacagatatgaaatcttgtcaacacaagcacaatttgtcaggcagttgtgcaaggctgagtgacattcagtggtctaagccttttttccctccatgcagatataaacatggagggtaagcatggaggctgaaaagggaggaaggaggtctccaggcttaatccatgaaggtcccaggaaaacttgataaagcattcctgatcccacaaccgtgaatgcctctctgatcattagaagagtctggtcctctgttttcaggggtcccttaccccttcctcagtcgtggataagcaccagtacattctgcctgacttctgtgtckcatgacaattaagctgtctatcattcaagccatgttcttcctggatggtctctgtctaaggtgcagatatctgctgtgacttatacattaattttgttagtaatttgatgaacagaagttctgaaaggaagtttgatatctgccaaaattataagtctatacctatatgatctgtactttttataagtagtagttgctctcagaatagcctgtgtcaattgtg

SEQ ID NO: 280109 - DNA, 514 bp, Homo sapiens
ataatccttcaatctagccaagtttcaaaagcaactatttatatgaggtatttttatagactgtacaaaatggtctttagaattcagtatgcttttagtaagatggcatttcatttcaactcagaagccaacatttaaaacagagtttggttaaaattttttttctctttgctttgaagaaacaaaatagtaatgagtaaactctaataactataccatatatcaatatttgattaagaaaaaaggcccgagtatcaaccacagaaarggggaaaagaaagatattgattaccaaaacagagcaaaatgttcattacacttagggaaccagagtgcagcctcaacagaccagtgagatgatgcgcaaagggttaaaccattcataaagtatcatatgttccaggcagagatcctgcccttggggagaaaatagacctccctgctggtctgagagaaaactttgccaaaggaagcattgcacgtgccctgggagcccaagaggagtgagcaaggg

SEQ ID NO: 280110 - DNA, 514 bp, Homo sapiens
ataatccttcaatctagccaagtttcaaaagcaactatttatatgaggtatttttatagactgtacaaaatggtctttagaattcagtatgcttttagtaagatggcatttcatttcaactcagaagccaacatttaaaacagagtttggttaaaattttttttctctttgctttgaagaaacaaaatagtaatgagtaaactctaataactataccatatatcaatatttgattaagaaaaaaggcccgagtatcaaccacagaaagggggaaaagaaagatattgattaccaaaacasagcaaaatgttcattacacttagggaaccagagtgcagcctcaacagaccagtgagatgatgcgcaaagggttaaaccattcataaagtatcatatgttccaggcagagatcctgcccttggggagaaaatagacctccctgctggtctgagagaaaactttgccaaaggaagcattgcacgtgccctgggagcccaagaggagtgagcaaggg

SEQ ID NO: 280111 - DNA, 477 bp, Homo sapiens
attaagacagtaaagatagacaaatagatcaataggacaaaatggagtcaagaaagagacccaggcatatatggacaacttattttcaacaaaggtgcaaaggcaattcagtggaggaagtatggtctattcaacaaaagatactgaaacaaatggatatctatatccaaaaaggtggacttcaatccataactcatcatatacaaaatttactctgagtgagtcatagacctaaaatctaaaactataaaatttgtagaggaaaaacatttgtgactttgagttagagatttcttagctataacaaaaaaagaatgatccataaaagaaaaagttaataatttgatttaatcaaaatttaaaacttttgctccttaaargacagtgttaaaagattaaaaagagccacagactgggacaaaatacttggaaatcatatctgataaaggatttatattcagaatatatcaagaatct

SEQ ID NO: 280112 - DNA, 642 bp, Homo sapiens
aaatgggcactaactttatgcttggttttgcagagacacttaagatgcctaggggattggaaggcttcctagttataacacctgcacatctttgtagtccaaagtgcacaagaagtccttaattaaacaggtggctttaggaatagatactaaataaagccaggtaactggctggttgttcatcctcaagggaattagtaactgagtcattagtygtagcatataatcaacgtgtgcatgaagcctctttaaatatgtgcaaccatcttgactttggtcttgactatttcctctctgtgtcaccatctagggctcctcagtttcttttttgtgtgtgtgaaataacaatgaaaacaccatttcaccatcaccttcgtgctggcaagaagagccgtcgttgagtcttccagcaacaatgtcagcctggtttcgcgtctgtttaggcccatgagagagtaccaagaacaatcatatgacttaattacaattcacttatcttgatgattttttttttttttttttggtaaataatcttgatgtaaattcctagtgggccacgagagaggaggcgggattgtaatgaactggtgatgaagtggaaatattttgaaacgccgaataatgtattttgcttgtcaccta

SEQ ID NO: 280113 - DNA, 642 bp, Homo sapiens
aaatgggcactaactttatgcttggttttgcagagacacttaagatgcctaggggattggaaggcttcctagttataacacctgcacatctttgtagtccaaagtgcacaagaagtccttaattaaacaggtggctttaggaatagatactaaataaagccaggtaactggctggttgttcatcctcaagggaattagtaactgagtcattagtcgtagcatataatcaacgtgtgcatgaagcctctttaaatatgtgcaaccatcttgactttggtcttgactatttcctctctgtgtcaccatctagggctcctcagtttcttttttgtgtgtgtgaaataacaatgaaaacaccatttcaccatcaccttcgtgctggcaagaagagccgtcgttgagtcttccagcaacaatgtcagcctggtttcgmgtctgtttaggcccatgagagagtaccaagaacaatcatatgacttaattacaattcacttatcttgatgattttttttttttttttttggtaaataatcttgatgtaaattcctagtgggccacgagagaggaggcgggattgtaatgaactggtgatgaagtggaaatattttgaaacgccgaataatgtattttgcttgtcaccta

SEQ ID NO: 280114 - DNA, 1215 bp, Homo sapiens
aaaaacaaaaatagccagtcatggtggtgcatggctatagtcctagattctcgggaggctgaggtgggaggatcacttgaacccaggagggtcaagtcagtagtgagctctgatcatgccactgcacttcagcctgggtgacagagtgagatgtgcatatttccaaactttgttatctgtcatataaaactggtgcattgaatccttcaaactcccagccatattaactcctctttccttctcaacattcccagatctcatttcttgtttttcaagactgggggctctaccatagctttcaagagcctagtgtaggattcaaaaccaacacrttggttctttgtcatcatttgtatcagtctgttctcatgctgcgaataaagatgtacctgagactgggtaatttataaaggaaagaggtttgatggactgacagttccacatggctggggaggcctcaaaatcatggtggaaggccacggaagagcaaaagcatgccttacatggcagcaggcaagagagggcatgtgcagaggaattcccctttataaatattgtcaaagaagcaatattcattgtccactgcaggcaatgtagaatgcctacawaaaaacaaaaatagccagtcatggtggtgcatggctatagtcctagattctcgggaggctgaggtgggaggatcacttgaacccaggagggtcaagtcagtagtgagctctgatcatgccactgcacttcagcctgggtgacagagtgagatgtgcatatttccaaactttgttatctgtcatataaaactggtgcattgaatccttcaaactcccagccatattaactcctctttccttctcaacattcccagatctcatttcttgtttttcaagactgggggctctaccatagctttcaagagcctagtgtaggattcaaaaccaacacattggttctttgtcatcatttgtatcagtctgttctcatgctgcgaataaagatgtacctgagactgggtaatttataaaggaaagaggtttgatggactgacagttccacwtggctggggaggcctcaaaatcatggtggaaggccacggaagagcaaaagcatgccttacatggcagcaggcaagagagggcatgtgcagaggaattcccctttataaatattgtcaaagaagcaatattcattgtccactgcaggcaatgtagaatgcctaca

SEQ ID NO: 280115 - DNA, 1115 bp, Homo sapiens
tctgctgttaggtggctgatggtctaagatggcctcactgaacatactgcagttagcagttggttagttgtgttgaacaggggtaactggtctatgggtttctcatcctccaggagtctaggggatcccttcttcacatggaggcagatttcaagagccttagagtagaagttgctagaatctactggtccaagctcaccataatgccagracatattcaaggcatggggaaatagattccacttcttgatggtaagagctgcaaagtattttggtcattcttggaatatgccacatattccctcacgtgggttgctctttctgttactcttcaccttctgatctcagcttaaagagttctttctcaagaggcaggatgaatgcctgcctctctagtagaatgtttattccaggatggcaggaaccatgtctgcttctgtttccgattgtctttcatatttcaagtgtccagcatatggtgggtacctgtttgatgaatgactaaatgattgaawagtacagctgcagaagataggctcaaacatcccagcggtgatagagtctggaaacaaaagcaggwgaggacgtttacaggtgattagttatgtgaggcagtggaatggaaataggtgggtaagtagattgaaaaccatcctgcctcttcccaaaccatctggcttctcaatttagtgaggcagctactatgactgagagttcttggagtggagggacagaacaatcctctgggtagaggagggtgcttaggaaaaactgcccccacccagaagaccacctgcccaaccgtctcctgagtgacatttcctgtccctcccccagagtgtggataagaaactgccagtaataagagtttctgtccgcccctcccacaagaacataatgctaacaaatccagcagagtcaacaaggaaccacaatcacaaaacttcacatccaatccatggtcactaactgcataataccaacaccatgaaataggaaagataaactcaaaagtggaagaattcaaatccatggaaacagagccaagagagcaattagatcaggaccttaaagtaagtgtaattaacatcctcagaaggatgagagtacattgc

SEQ ID NO: 280116 - DNA, 600 bp, Homo sapiens
agtacagctgcagaagataggctcaaacatcccagcggtgatagagtctggaaacaaaagcaggtgaggacgtttacaggtgattagttatgtgaggcagtggaatggaaataggtgggtaagtagattgaaaaccatcctgcctcttcccaaaccatctggcttctcaatttagtgaggcagctactatgactgagagttcttggaktggagggacagaacaatcctctgggtagaggagggtgcttaggaaaaactgcccccacccagaagaccacctgcccaaccgtctcctgagtgacatttcctgtccctcccccagagtgtggataagaaactgccagtaataagagtttctgtccgcccctcccacaagaacataatgctaacaaatccagcagagtcaacaaggaaccacaatcacaaaacttcacatccaatccatggtcactaactgcataataccaacaccatgaaataggaaagataaactcaaaagtggaagaattcaaatccatggaaacagagccaagagagcaattagatcaggaccttaaagtaagtgtaattaacatcctcagaaggatgagagtacattgc

SEQ ID NO: 280117 - DNA, 530 bp, Homo sapiens
ttaacatttctgattctctgtttcttcagctataaaacagtggtaatcatagtatctatcttttaatggtgttgtgaggacaaaataagataaggcatgtagagatgtttatgactagcacagagccagcactcaacagacatcagagagattttgttttgtttggtttggtttttgttttattgagacagagtcttgctctgtcaccygggctggggtgcagtggtgtgatctcagctcactgcaacctccgcctcctggttgttctcccgcctcagcctcctgaataggtgggattacaggcacctgccaccacacccagctaattttatttttatttttagtagaggcagggttttgccatattggctggtctagaaatcctgacctcaaatcagctgcccacgtcggcctcccaaaatgctgggattacaggtgtgagccaccatgcccagcctagagggatgatgttgttatagagttaagtggttactcaaagccttagacatcaacaactcaatgattttgag

SEQ ID NO: 280118 - DNA, 530 bp, Homo sapiens
ttaacatttctgattctctgtttcttcagctataaaacagtggtaatcatagtatctatcttttaatggtgttgtgaggacaaaataagataaggcatgtagagatgtttatgactagcacagagccagcactcaacagacatcagagagattttgttttgtttggtttggtttttgttttattgagacagagtcttgctctgtcacctgggctggggtgcagtggtgtgatctcagctcactgcaacctccgcctcctggttgttctcccgcctcagcctcctgartaggtgggattacaggcacctgccaccacacccagctaattttatttttatttttagtagaggcagggttttgccatattggctggtctagaaatcctgacctcaaatcagctgcccacgtcggcctcccaaaatgctgggattacaggtgtgagccaccatgcccagcctagagggatgatgttgttatagagttaagtggttactcaaagccttagacatcaacaactcaatgattttgag

SEQ ID NO: 280119 - DNA, 585 bp, Homo sapiens
atcatgcaaggctttttgcattgtatacaataagaaaatgcaaaacattctggcttaaataatttatgcaacttattgactaaagcaacaggaaaatcaagttatgatgcccagttcatgtggggcttaatctagtagtttaaagacctgagttcctctctctttgccttttcattccatcctcgggcacctcttggtgggtcatcgtagctctatgctcttttcttctggtctgaaaacagctgcagcagctgcacaatttccaccttcagcacatcccrttcacagaagagagagtgtctctgcaggtacctccttctcatgtcccggcattctctctctttctctttctctctcattggcttgaatgggatcagtgtctgggagatgccaggaaggtcaatccttagaaccaaggggaagatcagtcccgtctaaaccatatggctaagattggtgtacaggtaagttccccaaatgagaagcagattatgattgaaaggaatggggagaatggatactggaaaggcaatgaaagtactctttgcaatggtagtttgtacatgtgtgggtggggggctgaag

SEQ ID NO: 280120 - DNA, 504 bp, Homo sapiens
cataggttccagatatcaattggcctcccttagaggagaacacagactcacagatatgttcacatcatttgcccattctctaaggccgaggttcaagtccatgcccttgggtgaagctgtccatgattaattccgcagaaacttctgccatctttgaatgctgctgaagctcatattgctgcctcttcttcctgactcctgttctttctcccacaaatatttgttgagggcctactatgtgccaggcactggaaataaagtaagtcataaaaccaactagctatctgctgtcagataattttccattctggtagaggaaagcgaaaataaacaagaaataaaatarttctatattgctatgggtgagtgttaggaagactgaaacaatgaagtcagggaagattgggaaactttaagtgtggatgtcaatgaggtgccttctaagaaaggctgagccatatgaaggcctagggaagagagttccaggtggaaggaatcacaggt

SEQ ID NO: 280121 - DNA, 520 bp, Homo sapiens
tgggcttttgcaatttcctgattttggttattggtttggtcatgagccgccgggtgcaaagcaggtggaagacaggagggtgatgtgaggtgaagttttttaataaaaatcaaatcctactygctcctgagttcagtcccctttgaaaagcacacagcaagtgctgggattttgatgagcttccttgggaacccatagggcatgaaatgaatgcgcaaagagggttctctggtttgtagaaaatgctcttgcatcaagattgcaataaacatttgactagtttggccgtgtgtccttccgaggctaacccagccagatcctgttcattccaaagccatcttgcgtgacactcacagcacacacagtaggcaatcaacatatattttgttaataaattattaaatgaaactgggcatagtgttcaaaggaaattttgtcttttctggaaaggtactgggaaatgagaatcaaccagagggaagtctggaaacctgtattctagacccaatactggtttatc

SEQ ID NO: 280122 - DNA, 520 bp, Homo sapiens
tgggcttttgcaatttcctgattttggttattggtttggtcatgagccgccgggtgcaaagcaggtggaagacaggagggtgatgtgaggtgaagttttttaataaaaatcaaatcctacttgctcctgagttcagtcccctttgaaaagcacacagcaagtgctgggattttgatgagcttccttgggaacccatagggcatgaaatgaatgcgcaaagagggttctctggtttgtagaaaatgctcttgcatcaagattgcaataaacatttgactagtttggccgtgtgtccttccgaggctaacccagccagatcctgttcattccaaagccatcttgcgtgacactcacagcacacacagtaggcaatcaacatatattttgttaataaattattaaatgaaactgggcatagtgttcaaaggaaattttgtcttttctgraaaggtactgggaaatgagaatcaaccagagggaagtctggaaacctgtattctagacccaatactggtttatc

SEQ ID NO: 280123 - DNA, 647 bp, Homo sapiens
tcactcagactctaactgtacttagctggatgactttgagcaggtcaatgaagctcttggacttcagcttcttcatatgaaaaatgagaaaactgaactataagatgtccaagttccattttaattttaaaattagaaaattaaataattctactcattctagttattagaatgccttaaacatgtsccattcatttcctgccaactcagggaaaaaacggtttgaataaagggtgttaatgttggttgttcctgaggcaaattctccccaaacctgccttcctttctattttattgtattttatttttgtttgcttgttgggatcaccctcactcatgtttaaagagacctcttttccttctttttctttttttttcttttttttttttttttgagacagagtttggctcctatgcacccaggctggagtgccatggcgcaatctcggctgcacacacaaccgccgcctcctgggttcaagcgattctcctattgagagaattggacatgcaccacctagtcatacatggcatgtaactgcagaatggtttctgttcccaagggtttcactgcccagctcttggtaaaatattagcacacactggggaattgttagtggctaaaccgtataggactttgtaccaga

SEQ ID NO: 280124 - DNA, 647 bp, Homo sapiens
tcactcagactctaactgtacttagctggatgactttgagcaggtcaatgaagctcttggacttcagcttcttcatatgaaaaatgagaaaactgaactataagatgtccaagttccattttaattttaaaattagaaaattaaataattctactcattctagttattagaatgccttaaacatgtgccattcatttcctgccaactcagggaaaaaacggtttgaataaagggtgttaatgttggttgttcctgaggcaaattctccccaaacctgccttcctttctattttattgtattttatttttgtttgcttgttgggatcaccctcactcatgtttaaagagacctcttttccttctttttctttttttttcttttttttttttttttgagacagagtttggctcctatgcacccaggctggagtgccatggygcaatctcggctgcacacacaaccgccgcctcctgggttcaagcgattctcctattgagagaattggacatgcaccacctagtcatacatggcatgtaactgcagaatggtttctgttcccaagggtttcactgcccagctcttggtaaaatattagcacacactggggaattgttagtggctaaaccgtataggactttgtaccaga

SEQ ID NO: 280125 - DNA, 655 bp, Homo sapiens
gatgtccccatggggcttcccgcagcctcccaattagactggttgtggggagactccggaggagggaggtcttggcccgtgccagcaggatggctatgagtctgtggagaaagaaaatagagcacagaaagggagctgaactttctaagcagccagtttcattttgggcayggcagttgcttgtgctgtcagggagaatcaagctcatctgctgaggagagctgccaggggctgacagactccatccttataggttcctcagctcctcttgggcttattaaaaacttggctctgcctggccggggtacagagcttctaggttgaggaacattgagcatgttgaagttgagagcgccctttcagatgatttattggcacttgaagtcttcatcatttggcttctatcatagacacactttactcttggatctcaccaagggttgacttctccatgtgccctggtctctctattcccataggtagtgtgctaccttctgcctctttacctttgtccctgcagccctatgccattattatttttgcagatgaggaaactgagcctgagagagatcaaataacttgctcaaggtcacatagctagtaagtggcagagctggaattagaacccagcttttaatgattcaagagcctgagt

SEQ ID NO: 280126 - DNA, 503 bp, Homo sapiens
tttctcttattaactaaaacaccaaattgctctctaaacatatcaagaactaaagctttatttggcatctgacacaagtcctcaggcctttttctgacgaatcatgaaacaacctagtccatctcctttaaaaacaaacaaaaaaaaatccttacccttttgctgagtggtatgaccacctgggcataagatagaaaggcctttggagtcatttttagaagacaaatgggaaagagcaaaggcccgaaagtcagacagacctggttttgagtctactacctagctgtgtgtctttaggcaagtttcctaacctctctgagcctcagttttctcatctgcaaatacaagatgaaatgggtttccacgaatgtctgcctcaacagatgataactgaagaccagatggcctctcacctatccaggaacaaycatagtctcctaccctcctttaaacacaattctgccacacatttacagaatccaaatctttggggagaggcaatt

SEQ ID NO: 280127 - DNA, 622 bp, Homo sapiens
cgggggtgggggcgggagtcaaggaagccctttcttgaagctgacatgaaggaaggcaggggtgtgctgatgaatgggggtgcttccagcagaggaaatagtacttgccagggttctgccctgggagagaaagaacaaasagcatttggggaaatgaaaggagaccaggtggctaaaagtttagcaaagagcaaaaaagtggggagtgacatggcacgaggctggaggggtggatgggggctgtgtgggccgggtaaggactgtcatctttatcctgagagaatggtaaccactggagcaacgtaggtgacatgatcatgtttgcatatatgtgttgacattcgtatgcatatgataaaattgcaacattgtgtgatgctgagtgaatagctttctctctcggattctctcctcatttgttaaatgatactaataacaggacttacttctagttttacagtagctattatatgaaataacccaaatgaaaatgcttatccctagtgtttggtatgctggatgtatacaaggcaattttcttccttccttcccactttctctccttcccttcctttcccccctttccctccttccctcctctcttctgcctttataaaatgag

SEQ ID NO: 280128 - DNA, 1243 bp, Homo sapiens
atgtatgttcttggcacctttgtcgaaaatgagttcattgtaggtgtgtggatttgtttctgggttttctattctattccattggtctgtatgtctgtttttatgccagtaccatgctgttttggttactatagatctgtagtataattttaagtcaggtaatgtgattcctccagttttgttcttttttctcaggatagctttggttattctaggtattttgtggttctgtacaaattttgggattttttttcctatttctgtgaagaatttatttggtattttaatagggatttcattgactctgtagatcattttaggtgatatagacattttaacaatattgattcttccaatccatgaacatggaatatctttccattttttggtgtcctcttcaatttatttccttagtgttctrtagtttcatctactctttttttttttaatataaaaacactttcctcaaatgtctgttaattttgggtgcatatttaaaagtgagaatttaaaagccaattagaggctctgtgtgtcaaaagaaagtaaaacaattctgaggaaacaagcgatgcacagaagcagaagaaacagaaaaagaagcaaaaaacaactataatatcttcagaattatgagaaaggacagcacatgcatgaaacaaaaacaggagwccagtgtcagacttctttagtcataaagtgcgtgccttggtcagaggcaatactgtttggaataccatgacagtggataaggcattccgcgagtccacggctggtagtcttggcagaagcattgcatgcaggataggcaaacctatatccagagtaagtgtctattccagtgaggataaatttctgccatgatgccatcttccatgatggaaaaggtccattataatcaactwgtcactaggtagctggctgatcaccccgaggaatggtgccgtattgagggctcagtgttggtctctgctgctggcaaattgggcactcagcagtggctgtagccaagtcagccttggtgaatggaagtccatgttgctgagcccatgcgtaacctccatccctgccaccatggccactttgttcatgggcccattgggcgatgacatgtggctggggaaagaggctgagtggtgtccacagaacgggtcatcgcatccacttgattattaaaatcctcctctgctgaggtcacccattggtgagcactcacaggggatacaaatatcttcacagtttt

SEQ ID NO: 280129 - DNA, 621 bp, Homo sapiens
ttatgaaatgtagagaaccccagtaagttacctcaggagatcatccccaagacacataatcatcagattctcccaggtcaaaatgaaaggaaaagtgttaaaggcagctagagagaaaggtcaggtcacctacaaagggaagcccatcagcctaacaacagacatctcagcagaaacgctacaagccagaagaaattggaggccaatattcaacattcttaaagaaaagaatttccaactcagaatttcatatctgaccaaattaagtttcataagcaaagaagaaataaaatatttttcagacaagcaaatgctgagggaattcattaccatcagacctgtcttacaagagctcctgaaggaggcactgactctggaaaggaaagactattgctagtcactactaaaacacacygaagtacacagaccagtgactataaagcaaccacacaaataaagtctgcataataaccagttaacatcatgatgacaggatcaaatccacacatagcaatactaaccttgaatgtaaacaggttaaatgcccccagttaaaaggcacagaatgacaagctgaataaagaaccaatactcattggtatgctatcttcaagagaccca

SEQ ID NO: 280130 - DNA, 601 bp, Homo sapiens
cacagagcaattaacaatattatgacacttgatygtactccaagagggagagaactactagaaaattctgaaacagaaaaccattcccctttgcttgaaatgatagctttttttctttaacatcattagttctgacaaaaattaactcgttttcccaaataaaacctttgttaattttaggttttttcaacagacctttgagactctcaatgaatgaaaatgtagggcccagttctgcagaatctaatacgtttacagctctttttctatttttccttcaacttttaagttcaggggtacatgttcaggatgtgtgggtttcttacataggtatacgtgtgccatgatggtttgtttcacctatcaacccatcacctaggtattaagcccagcatcccttagctattcttcctgatgatctccttcccactacccccatctctgacaggccccagcatgtgttgttccccacatgtgcccatgtgttctcttcattccattcccacttataagtgagagcatgcagtgtttggttttctgttcctgtgttagtttgctgaggataaaagcttccagctgcatccatgtgcttgcaaaggac

SEQ ID NO: 280131 - DNA, 601 bp, Homo sapiens
cacagagcaattaacaatattatgacacttgattgtactccaagagggagagaactactagaaaattctgaaacagaaaaccattcccctttgcttgaaatgatagctttttttctttaacatcattagttctgacaaaaattaactcgttttcccaaataaaacctttgttaattttaggttttttcaacagacctttgagactctcaatgaatgaaaatgtagggcccagttctgcagaatctaatacgtttacagctctttttctatttttccttcaacttttaagttcaggggtacatgttcaggatgtgtgggtttcttacataggtatacgtgtgccatgatggtttgtttcacctatcaacccatcacctaggtattaagcccagcatcccttagctattcttcctgatgatctccttcccactacccccatctctgacaggccccagcatgtgttgttccccacatgtgcccatgtgttctcttcattccrttcccacttataagtgagagcatgcagtgtttggttttctgttcctgtgttagtttgctgaggataaaagcttccagctgcatccatgtgcttgcaaaggac

SEQ ID NO: 280132 - DNA, 599 bp, Homo sapiens
cactgtcctaatgttctataaaagtactaacctgagacaggggcacactgtccccayttgcgaaatgatgggatagaactagctgacctttaaggtcagtttttgccctgaccttcaataaatcaaacctgatgaaaaaaaaatagttaagtccctaggtttaaccaagatctctagaatctagcttttcttttcccctctttttgtctagacagtttatttttataaaacaggatagaatctgattccataatgtgtactttggtggaaagccttttataccaacctgctgtctcccattatatttatatagcaagccttgaagtctacatttatcctgatgaatggagtttcagccaaagctaagagtagcaacttgatgttcaacaggggaggcacaagaactaccttttagctcttactaagacttgtcctgtgggtaacctggttgggatcatttcagaaagtctgtggggctaggtcaaaagaggaaatgtggagggcaagattgcctcctctctaattccctgccctctctcttgtctattaaccccacaccttctgaaagagaggcctgggaggataggaagtgtgggaag

SEQ ID NO: 280133 - DNA, 599 bp, Homo sapiens
cactgtcctaatgttctataaaagtactaacctgagacaggggcacactgtccccacttgcgaaatgatgggatagaactagctgacctttaaggtcagtttttgccctgaccttcaataaatcaaacctgatgaaaaaaaaatagttaagtccctaggtttaaccaagatctctagaatctagcttttcttttcccctctttttgtctagacagtttatttttataaaacaggatagaatctgattccataatgtgtactttggtggaaagccttttataccaacctgctgtctcccattatatttatatagcaagccttgaagtctacatttatcctgatgaatggagtttcagccaaagctaagagtagcaacttgatgttcaacaggggaggcacaagaactaccttttagctcttrctaagacttgtcctgtgggtaacctggttgggatcatttcagaaagtctgtggggctaggtcaaaagaggaaatgtggagggcaagattgcctcctctctaattccctgccctctctcttgtctattaaccccacaccttctgaaagagaggcctgggaggataggaagtgtgggaag

SEQ ID NO: 280134 - DNA, 505 bp, Homo sapiens
ccataatgtgtactttggtggaaagccttttataccaacctgctgtctcccattatatttatatagcaagccttgaagtctacatttatcctgatgaatggagtttcagccaaagctaagagtagcaacttgatgttcaacaggggaggcacaagaactaccttttagctcttactaagacttgtcctgtgggtaacctggttgggatcatttcagaaagtctgtggggctaggtcaaaagaggaaatgtggagggcaagattgcctcctctctaattccctgccctctctcttgtctattraccccacaccttctgaaagagaggcctgggaggataggaagtgtgggaagagttcctagaaacaggatgtaagaagaatcttcttgccattggagcctgagcatgcaaagtatatcatccttgatgtccacacatctaggggactgtgcctttctaaaatgcaggagctaggctagtgtagaatgcattattacaggcaaaaa

SEQ ID NO: 280135 - DNA, 1232 bp, Homo sapiens
gaccagctgctttgctttccccacctccatgcttcaaagtgtccctaccacttccctgctgaattccagtgtattatcctagatgcactattcgacgtgtggttatctgtttgctgttttggtccttctttgtggaggaggcaagtgctgggtgcctctattcctgctccaacaatttattatcttcttcagacctatatgctattttcatggcaaaaggcagaagagccttaggtttgattctgtctcttccactgaccagctgtgagaatgtgggtggaagtttgcctttgtgaatcctggtttcctcctcaggagcctcttgcagatggaggtgtgtgaagcttgaccagattacatgtaaagtagscagctgtttgctgcccctttcctatgtatttatttgttttttgagttgtttgtttttgagactttggatactacatttacttaaagtgattatacccagactcatcaactcctttcctcttataagctggagcttaatgtttatctggagttggaaagaagctgatgcctcataaatccaagctctgatcgtcttatagcttcattaatattttcctgaaggatgagatgttaaacctacgctwatgctctttatatatttttgtttctgccagtggaagaatgtcaggatacaaaaattgagacattcttaccwcaaaaaactacatatttaagttcataaaaaaaacctatactaaaatgttcagatcaggactactaataatagccaaatttaagagaccacccaaatgtccatcaactataaaatggataaatatgattattctagaatatatgtctactgtcttgtatattatattttatatgtaataatattttaataaaataacagagtccacacaatggaatattatgcagcattgagaacaaacattgtacaactacattctatgacatggatgagtctctcaaacatattgttgaacaagaaaagccagacaggaaagatttcatttatataaactatgtaaataggccaaactaatgtaggccattagaaattagaccaaccattacctttacagtgggtggtaacagaggggatagagggatacaggggtgtttctggagggctagtaacttttttcttgctttgggccctgaatatatgggcattgctgaaaatttatttattgcatagagtttttctgtatgcatggtgtacttcaatacaaagtttt

SEQ ID NO: 280136 - DNA, 618 bp, Homo sapiens
atgctctttatatatttttgtttctgccagtggaagaatgtcaggatacaaaaattgagacattcttaccacaaaaaactacatatttaagttcataaaaaaaacctatactaaaatgttcagatcaggactactaataatagccaaatttaagagaycacccaaatgtccatcaactataaaatggataaatatgattattctagaatatatgtctactgtcttgtatattatattttatatgtaataatattttaataaaataacagagtccacacaatggaatattatgcagcattgagaacaaacattgtacaactacattctatgacatggatgagtctctcaaacatattgttgaacaagaaaagccagacaggaaagatttcatttatataaactatgtaaataggccaaactaatgtaggccattagaaattagaccaaccattacctttacagtgggtggtaacagaggggatagagggatacaggggtgtttctggagggctagtaacttttttcttgctttgggccctgaatatatgggcattgctgaaaatttatttattgcatagagtttttctgtatgcatggtgtacttcaatacaaagtttt

SEQ ID NO: 280137 - DNA, 618 bp, Homo sapiens
atgctctttatatatttttgtttctgccagtggaagaatgtcaggatacaaaaattgagacattcttaccacaaaaaactacatatttaagttcataaaaaaaacctatactaaaatgttcagatcaggactactaataatagccaaatttaagagaccacccaaatgtccatcaactataaaatggataaatatgattattctagaatatatgtctactgtcttgtatattatattttatatgtaataatattttaataaaataacmgagtccacacaatggaatattatgcagcattgagaacaaacattgtacaactacattctatgacatggatgagtctctcaaacatattgttgaacaagaaaagccagacaggaaagatttcatttatataaactatgtaaataggccaaactaatgtaggccattagaaattagaccaaccattacctttacagtgggtggtaacagaggggatagagggatacaggggtgtttctggagggctagtaacttttttcttgctttgggccctgaatatatgggcattgctgaaaatttatttattgcatagagtttttctgtatgcatggtgtacttcaatacaaagtttt

SEQ ID NO: 280138 - DNA, 618 bp, Homo sapiens
atgctctttatatatttttgtttctgccagtggaagaatgtcaggatacaaaaattgagacattcttaccacaaaaaactacatatttaagttcataaaaaaaacctatactaaaatgttcagatcaggactactaataatagccaaatttaagagaccacccaaatgtccatcaactataaaatggataaatatgattattctagaatatatgtctactgtcttgtatattatattttatatgtaataatattttaataaaataacagagtccacacaatggaatattatgcagcattgagaacaaacattgtacaactacattctatgacatggatgagtctctcaaacatattgttgaacaaraaaagccagacaggaaagatttcatttatataaactatgtaaataggccaaactaatgtaggccattagaaattagaccaaccattacctttacagtgggtggtaacagaggggatagagggatacaggggtgtttctggagggctagtaacttttttcttgctttgggccctgaatatatgggcattgctgaaaatttatttattgcatagagtttttctgtatgcatggtgtacttcaatacaaagtttt

SEQ ID NO: 280139 - DNA, 582 bp, Homo sapiens
attgttatctagggctgtgtaaaaattattccaaaacttcacagttttaaaccacaaacattaaytatctcacagtttctgtgggtgaagcatcctcgtgtggcttagctgggccatcagactcagagtctctcacaaggctgcactcaggtgtccaatgggagtgaatctacttccaagcctactcatggggctgttggcaggattcagttcctcacaagctgttggcctgagggcctcaattcatttctaggtattggccaggaccttccctcggcttctcaccactgggcctctccataaggcatcttgcaacatggcagccggtttccctcagagcaagcaagagccaagagagggcaagatggaagccagagtctttctgtaacgtaatctcagaagtggcatcccatcagttgtgccatattttatttttttgttaggtctagccacactcaaggggtaggaattatacaagagcataaatacccagagacagagatgatttggggccattttagaagctgtctaccacagaattattggtctggacctatgtgttcttgcccaggtgtgtagtca

SEQ ID NO: 280140 - DNA, 582 bp, Homo sapiens
attgttatctagggctgtgtaaaaattattccaaaacttcacagttttaaaccacaaacattaattatctcacagtttctgtgggtgaagcatcctcgtgtggcttagctgggccatcagactcagagtctctcacaaggctgcactcaggtgtccaatgggagtgaatctacttccaagcctactcatggggctgttggcaggattcagttcctcacaagctgttggcctgagggcctcaattcatttctaggtattggccaggaccttccctcggcttctcaccactgggcctctccataaggcatcttgcaacatggcagccggtttccctcagagcaagcaagagccaagagagggcaagatggaagccagagtctttctgtaacstaatctcagaagtggcatcccatcagttgtgccatattttatttttttgttaggtctagccacactcaaggggtaggaattatacaagagcataaatacccagagacagagatgatttggggccattttagaagctgtctaccacagaattattggtctggacctatgtgttcttgcccaggtgtgtagtca

SEQ ID NO: 280141 - DNA, 577 bp, Homo sapiens
atgccccagagcaattgctgtgtcatagagtaacagcaatatttagttttagaaactgccaagtgacttgccagcatggctgtttcattttacattcccgctagcagtgtacagaagatccagtttctctgcatccttgccggcattcagtattttcactacttttaattttagtcattctggaaggtgatagttcatagtggttttagattgcatttccctaatggctaatgatattgaacatcttttcctgtgcttattcgccatattctctttggtaaaatgtctccttgtgtcttttgccctttttctaattggactgtttctctttagctgttaagttttgagagttcttatttatttatttatttatttaatcctagatctaaaaaagaactagatgtaaataagtcccttatcggatatatgtttttgcaaatattttctaccattctgtagactgccttttcatcctcttaccagggtctttcasacacaaagcaaaagcgtttaattttgatgaagaaaattttatccattttttattttatgggttgtgtatgctttccgcattgca

SEQ ID NO: 280142 - DNA, 559 bp, Homo sapiens
taggttaaagcccccattgtgcactcagatacaggaccatcaacctttctttcagactatgatgcaccactgcaagtttacactgatatgtgtgattctgtgaaaaatgtctaccaaactagaatacttattcatgagggcaatggtccaggtatatttacttcactggctactacagctctatctttcaccatcaactatagcaatggatatgaattggaagtgtgtgcatgcacgtgtcatttttcattttggatacrtgaataggtaaattagtgaatgaatggtagagagagttgccgaggggcagtgtgtcaaaatgacctttcaatttcaactgatataaaccctctgagagtagatgagttcttttaaccttttggtcctccactttctcattttttttgtgatgatataaaggttaaataaagaaatgaataggctgatctaaccacttccttccttcctgtatcaatacaggcatgccacctagcagcgaagcccaagaatgggcccaagaaaaaggaagaacaaaagtggcacaagctaagccatgaaa

SEQ ID NO: 280143 - DNA, 583 bp, Homo sapiens
aatgcttctaatagttttgaagcctatggtaccactggggagttctgaaataagggctaagaaaggggttctgtacctgttggtgccgagtcccttcccctacacaatcagaggcatctcaagactaggcagtctcttagaaaatggcccaataaaaagtgaccaaatggctgtgctcctacagccatccaaaagacagagtcttttaacagccccggaagcgttcttgctggtgaataaaaactgctgcttgctgttcaaaacatgattacaacaatgatgatgaatagaaaaataaactttcttttccattagttcaagcattgcctgttgctttgtaccttgtggatataagcaacttatctcttagtattattcctcagtaacattgggggaaaaaagtgctctggacacccgtgaatactactgttcaacatccatgcmcctctttttccagggataccaccctcattttccttggggagccacctccctgccaaggcaagttcatatggtttgggtggggctgatcccaactccatcttcaggtttgttgcatgtgatccagactatgcatcctact

SEQ ID NO: 280144 - DNA, 528 bp, Homo sapiens
atggctgtgctcctacagccatccaaaagacagagtcttttaacagccccggaagcgttcttgctggtgaataaaaactgctgcttgctgttcaaaacatgattacaacaatgatgatgaatagaaaaataaactttcttttccattagttcaagcattgcctgttgctttgtaccttgtggatataagcaacttatctcttagtattattcctcagtaacattgggggaaaaaagtgctctggacacccgtgaatactactgttcaacatccatgcacctctttttccagggataccaccctcattttccttggggagccacctccctgccaaggcaagttcatatggtttgggtggggctgatcccaactccatcttcaggtttgttgcatgtgatccagactakgcatcctactgcacatatgattggcccaagccaaactcagccgatgacactcactcattttttattacaactatgggaaatgaggccttgtgttgctaggaaaacaggatgcatacctgaa

SEQ ID NO: 280145 - DNA, 596 bp, Homo sapiens
cttaaacacacaaaataaaagttatttttaaaaataaggaatacaatacaaaggtytgggattaatttaagcctgtattaaaaaaacaaaacaaaaaaaggcccctcaaagaggtaacagtcttttaaggcagtcccctagtgttggctccaagttccctattcagatgaacttcctttcactcaaatattagaagaaaatgtgcagacagcaactggtttctgagcaaagaagcatcttaaatggcctggcaagggaatcagaaggagagcaggccttcccatgatgaaagccagatagcagtcacccctcactgcttctgacttgctcttcctcatcaagaaacctcacaactgtatcttttttttttttttagatggaatctcgctctgtcagccaggatggagtgcagtggcacaatttcggctcactgcaacctccgcctcgcaggttcaagcaattctcctgccccagcctcccgagtagctgggataacaggcgtgtgtcaccacacccagctaatttttgtatttttagtagagaaggagtttcaccatgttggccaggctggtctcggactcctgacctcaactgat

SEQ ID NO: 280146 - DNA, 546 bp, Homo sapiens
tatatcatggaatactacacagccataaaaaagaatgagattatgccctttgtgggaagatggatggagctggaggtcgttatccttagcaaactaacgcagaaatagaaaaacaaatactgcatgttttcacttacaagtgggagctaaatgatgagaactcatgaacgcagaggggaacaacagacactggagcctacttgagagtggagggtgggagaagggagaagattggaaaaaaataactattgggtactaggcttagtacctgggtgacaaaataatctgtataacaaactcccatgacatgagtttacctaggtaacaaacctgcacatgtacccctgaacttaaaataaaagttaaaaaaacaaacaagagttaagctgcctctcattgtggaaaaagttgtgcccaccctctgttctacccacagttcacatggctcatctgtttgggggttcaggttacttayctcacactcaagtagaagcaaagctttgtacatagatagcttatcaaccagacatttaaaacaaacaaaca

SEQ ID NO: 280147 - DNA, 637 bp, Homo sapiens
aatccatcgatgagagagaactgcttatagattttctgctcttagactgagtacatagaacttaacttcttttgtcaatttaggctcatgattactatttggtgctctgtcatcaggggaaggacagaagtatgtaaacccagatcactgtgcttttatagtatactttcttctgctgctgctaccagcaaacacttcttgctgtatcaggttgtcctagctgtcttayttggatgagacagcttcagctatggccatgaggccatgactctgtcttttctattcaaccaagcacatggggtttgtgatagtcattgctgcctagaggccatttctattactgggcccttggaatacaaaaacagaccaatcccatatagttgccttttcccacctttatttccaggttcacaacagtgtcacacatggtagggtttgtccaaagtttggccaccagacttgtcagatgtggctggcagaattctaaaaatagctcccctgaggtttccctcctgtggttattcaatcaaacactaatctaggtactactgtgaaggggttttgcagatacaattaaagtcccaagtcagtagaccttaaaatacagagatatccagatgggcttaattgaatcaca

SEQ ID NO: 280148 - DNA, 600 bp, Homo sapiens
gtcttctcaagctctgatagtctctaagtttaataattccttattacattagaaaacaactaaaaacaaatatgcacattttcctctatatattttcctttctttttttttcttttctttttttttttttttaagagacagcgtctcactgtgtcatccaagctggtctcaaactcctggcttcaagtgatcctctggccctggcctcccaaagctctgggattataggtatgagccactgcacccggcctatgttgaatttgctaatsacactcatttttcccagctcattagcatacctgtatctcaaggtcacaatagttaaggaaggctgctgaaaaaggaatctacttatactgttttgtttttcaagacagggtcttgctctgtagctcaggctggagtgcagtggtgcgatcacagttcactgcagcctcaacctcctgggctcaagccatctcctgcttcagcctcccaagtagctagcactacaggcacatgccaccacaaccagctaatttgttttatattttgtaaagacggggtctacttatgttgcccaggctggtctcaaactccaagactcaagcaatccccctg

SEQ ID NO: 280149 - DNA, 600 bp, Homo sapiens
gtcttctcaagctctgatagtctctaagtttaataattccttattacattagaaaacaactaaaaacaaatatgcacattttcctctatatattttcctttctttttttttcttttctttttttttttttttaagagacagcgtctcactgtgtcatccaagctggtctcaaactcctggcttcaagtgatcctctggccctggcctcccaaagctctgggattataggtatgagccactgcacccggcctatgttgaatttgctaatcacactcatttttcccagctmattagcatacctgtatctcaaggtcacaatagttaaggaaggctgctgaaaaaggaatctacttatactgttttgtttttcaagacagggtcttgctctgtagctcaggctggagtgcagtggtgcgatcacagttcactgcagcctcaacctcctgggctcaagccatctcctgcttcagcctcccaagtagctagcactacaggcacatgccaccacaaccagctaatttgttttatattttgtaaagacggggtctacttatgttgcccaggctggtctcaaactccaagactcaagcaatccccctg

SEQ ID NO: 280150 - DNA, 533 bp, Homo sapiens
aataattcttccaaataaaactcaactcatgcggcaggcatttttcaaatttaataacaacctataatacagaggccaaatacctgttggaatccaggggaggaattttttttttttaaataacagctttcttggtatatacttcatataccataagtttacccattttaactatacaattcagcaatttctagagtatttacaaagctgtgtattaatcactattatctaactccagaacatttttgccctcctccctaccccaaaaacccatacacattagccatgtcttcccttcycccagctgtgggaagaattccttttctatggatttgcctattgtgaacacctcacataaatgggaatcatacacgatgcggtcttttatgtctagctccttttacttaacataatgttttcaagccctagccatgttgtagcatcagtacttcacttatttttatggttaaataatattccacggtccagatatatcacattttatttatccattcatcggctgatagatattt

SEQ ID NO: 280151 - DNA, 505 bp, Homo sapiens
tgttttgcaattacccatacagagtcataaatatcacttgaaatcaccttaatattatttacaataatcaaattattatcttcattgccttctcatgtacattgtgtctggaccttctctgttctctggatttacatgcaaacgttgaaaatattttattttaaaaaatatatatttttctgtcatgacattttatagagaagaattctaaaaataaataaatgcaaaagaagtaacctatatagttatctacagaaattgtaacctactatgggatrgccaaggcttgcatccaaattaatttaaatgttttaacaataaaaaacaatttttaaatatttgaatattaatgctattttcttgtggtctaatattaataacagtaatgcagactgaatagaattaattggtaattaactttttattttgttaaatgtaggcaactgaaggactttcaaagtagaatgagaagaaagagtaagacatagatttttgctttctgcta

SEQ ID NO: 280152 - DNA, 517 bp, Homo sapiens
atttatccaaagtgaagggagtatgtacaccaaagagatacctgcaacttcttgtttattgtagcactacccacaatagcaaagatagggaaacaacatgagtgtccatcaaaggatgcacgaataataccatatcatgtcatttgcagcaacataaatggaactggaggaaattatgttaagtgaaataagccagacataaaaacacaaatatcgtatgttctcactcatgtgagagctaaagttgatttcatggaggcagatattgtaatgatagatatcagaggctattaacggcatgtatatgggggagggtgattgaaaagaggttgattaatgggtacaaaccyacagttagatagaaaaaataaattgtgaggttggttaacagagtaatgtgactataattaacagcaaggtattgtatatttgaaaatagccagatgagagggtttgaaatgatctcaacacatagaaatgataaatactggagatgatgaataccttaaataccctg

SEQ ID NO: 280153 - DNA, 321 bp, Homo sapiens
acaaaatcaataataatacatttcaagttcacattttatttctgtgyctattgaaaatatagagcatcacaaatatttatttatgcaagcactgtggatgtattgccaatgagacctatttagactgcaagcatcttttattttgaccagatgtgtcaaacaaatagtatttctaaatctctttagatgtagtgattgatttccagtttgccaaaatccccaacattctcttatgtctactcattattctgcttaaataaatacatttttttattgtaggcatttgaattgagcaacctcatttttttccatcaaacatgg

SEQ ID NO: 280154 - DNA, 578 bp, Homo sapiens
tctgtaccatttcccatgtttaaaaaatactgctttgattatggttccaagagttagtacctcagttagcattcataaaataatatgtctgaaaataagtgaattttcatctgcattatgctattgtcttatcccttagattgggtactgctaagatagtaaaagtgaaatattgcaaattaggtagatgagatattagactgtaagtaaaatttacattttccaaaatattttataatcattgtctcttttatatttagtgtctgtatcttctatgttatactactattttcccttgagtgtttgattgcaagatctaaggcctgtgtaaaaagttcagacaattctagtatgatgctctaatactcaaattaaaaatatataattatatcatggacttctaggctgctgaaggggattcttyaaaatttctacaagatatacatgaattcactttgtccacttcagatttagctaaaaaccaaaaatcaatacaagattcaatgtttctaatagaataacaatgataaaatttttaggaatggccagtgttcaaattgaagaaaaccggcttcaag

SEQ ID NO: 280155 - DNA, 578 bp, Homo sapiens
tctgtaccatttcccatgtttaaaaaatactgctttgattatggttccaagagttagtacctcagttagcattcataaaataatatgtctgaaaataagtgaattttcatctgcattatgctattgtcttatcccttagattgggtactgctaagatagtaaaagtgaaatattgcaaattaggtagatgagatattagactgtaagtaaaatttacattttccaaaatattttataatcattgtctcttttatatttagtgtctgtatcttctatgttatactactattttcccttgagtgtttgattgcaagatctaaggcctgtgtaaaaagttcagacaattctagtatgatgctctaatactcaaattaaaaatatataattatatcatggacttctaggctgctgaaggggattctttaaaatttctacaagatatacatgaattcactttgtccacttcagatttagctaaaaaccaaaaatcaatacaagattcaatgtttctaayagaataacaatgataaaatttttaggaatggccagtgttcaaattgaagaaaaccggcttcaag

SEQ ID NO: 280156 - DNA, 611 bp, Homo sapiens
gaggcacacacttttcatgtggatgaaaagctatagaggatgttgaaggggaaaaggtgtggcctgtaccaatggactgctgggccattggcctccagttgcttccagccagtgagaccctcagcagagttgggagggaagaaaacaaaatcaggacatgtatacccctggctcttcccaggaggaggttgcacacttgtgctgctgatgtttcacaaccaaaggtcactgctgatctcatagcaataactacagaacacttcccttctaggttccagcaaatgctggctaccctcaccctgcctggcctacatgtggttacagatttcccacaattactatttgtaggatcctgactccctatacttctcatctgttttaaataaaccctctttaaattactctaacccgagtgtgccctctgttctctgttggagcccygtgtgatataatcatgttcctcagctataaaatggtgatagaagtaataaacctgattccagaacttgttgggaggataaaatgaaagtacaagtatacaaagtactttgcaaattctaaagggctataaaagttaattatgtttggggaaatgaatgctctagccggtt

SEQ ID NO: 280157 - DNA, 618 bp, Homo sapiens
aacagttgacctttcagcagaaactctacaagccagaaaagattgggggcctatattcaacattcttaaagaaaaaaatttctagccaataatttcatatcccaccaaactaagtgaaggataaataagatcctttttagataagcaaatgctaagggaattcattactatcaaacctgtgctacaagaggtcctgaaaggggcactaattatggaaagaaaagaccattaccagccactacaaaaacacacttagatacacagaccagtgatactatatagcaatgtttatagtatgcataatgaccagctaacaacatgataataggatcaaatccacacatactaatattaaccttcaatgtaaacaggtttaatgccccmattacaaggcacaaactatactacagggctacagtaaccaaaacggcatagtactgatacaaaaacagacacacagaccaatagaacagaatagagacctgagaaataatgccacacacctataatcatctgatttttgacaaagctgacagaaataaataatgggaaaaggactccacattcataaaatggtgctgggataactggctagtcatatgcagaagattgagactg

SEQ ID NO: 280158 - DNA, 609 bp, Homo sapiens
taagctatcaagatgatgatagttagaaaacgtgaatggacacattctcccaagaagagctctccctgtggagatgagctacggaaactggaagagctcaacattaaagagctagaacatatgggaagcccagaggttaacttctctgtggatgatgaagtagctggactaatctactttccaaaagttaagaagtgatcacagagattcttccagagatgagaaaatgggaccactctctgaatcaatactgagatgtgatgtgtcatgaatgcaggtaaaaccatggctatccaaataggatggagctttgygaccgtaagagaccagctcttgcattcgttctccccatctttgttctgctttccctgctcacttccaaaatgaaggaaagccaggacctgtgtaatatctttcttgagctattttcagttgtattttttatctattcctgggttggaaaattgaggccttcggctgtttttcctgttttctgtggtcaggcttcagtatttttctacctctttttaaatcctcttgatgaacttatacttaaaaaacaaaagttgcatgttgcaggaatattccagttggtttcagagagggagc

SEQ ID NO: 280159 - DNA, 609 bp, Homo sapiens
taagctatcaagatgatgatagttagaaaacgtgaatggacacattctcccaagaagagctctccctgtggagatgagctacggaaactggaagagctcaacattaaagagctagaacatatgggaagcccagaggttaacttctctgtggatgatgaagtagctggactaatctactttccaaaagttaagaagtgatcacagagattcttccagagatgagaaaatgggaccactctctgaatcaatactgagatgtgatgtgtcatgaatgcaggtaaaaccatggctatccaaataggatggagctttgcgaccgtaagagaccagctcttgcattcgttctccccatctttgttctgctttccctgctcacttccaaaatgaaggaaagcsaggacctgtgtaatatctttcttgagctattttcagttgtattttttatctattcctgggttggaaaattgaggccttcggctgtttttcctgttttctgtggtcaggcttcagtatttttctacctctttttaaatcctcttgatgaacttatacttaaaaaacaaaagttgcatgttgcaggaatattccagttggtttcagagagggagc

SEQ ID NO: 280160 - DNA, 1142 bp, Homo sapiens
catttattatcagacacttagaaaataaagataagcaaaatgaagcaatacaatgtttggaaaatttccatacacctttctgttactgatttctaagtaaattacattgcagctagagaacgtaatttgtatgaatttaatattttcaaatttattgagattattttaaggacaaaaatacagtctgtcttgctaactagtgtatgcstagttataaagactgtgtattctgctgttgttgggtgggatgttttataagtgtcaatcaggccagattggttcatagtgttgctcaggtctcatattcccttaccgattctctgtttacttgtttcatcaattaatgagagagaggtattgaaatatacaacccaagctgtggctttgtctattttgttttcagttcttttagtttttgcttcatgtagttgaagaagctctgttactagcttctagttcttactttggtgctgctgacccctgggtctgcacagttcagggtctcgtggatcaggggcaggttttgagtgtcwccccgtcccattcccttcttcccccagcccctgacaaccagcaatctacattctgtatctataggcttatatattctatatatgtcatataaatggaatcacactatatgtgactttttgcatctggctgcttttactacgcttaatactttggagcttcactcgtgttgtagcataaatcagtacttcattcctttttatggctgaatatttcatttttatatatactatgatttgtttatctgccattccttgatggagacatttggactgttttcaccttttggttgttgtgaataatgctgctatgaacgtgtctacatgtgtttgcttgagtacctgttttcattcttgtgggtatatacctaggggtggaattgtgggatcatatggtaattctgcatttaactttcttttttctttctcgagacagggtctcaccgtcacccaggctggagtgtgatggtgtgactatggctaactgcagcctcagcctcctaggctcaagtgatgtttccacctcagcctcccaagtagctaggaaaacaggcatgtgccattatacccagttatttttwaaaaaaaaaaattgttgtggagatggggtcc

SEQ ID NO: 280161 - DNA, 621 bp, Homo sapiens
cattgtagtatcatacgaagtattttcactgccctaaaaatcctctgtgctctgcacatttatccctcccttccttctaaaccctggcaaccgctgatttttttttgctgtcttcacagttttgccttttatggaatgttatatagttagaatcacacagtatgtagccctttcagattagcttttttcacttagtaatatgcatttaacgtccctccatgtgttttcatggcttgacagcttatttctttttagtcctcaatagtattccatcatctggatgtatcatagtttatcacttcacctactgaaggacatctttgtctttgctagctaaaaagtaatctcacagaagttcgttttataaactcttgttgccattttctagataatgaatctctgacaatccagctcccatgctatgttaaccaatccccaatagtaattaagcacaccttttctaggatgcgcctttttctcccataatttctcatacatgctaatactcattaggaaactaaaatttttaaccaaataacagtgtagtrgacaaaatcactgtagttagctttctttttccatgtcttcccatgatcaaagatcaaaggaaggaaggagaaa

SEQ ID NO: 280162 - DNA, 1219 bp, Homo sapiens
tatgtaatcagctctcagatcaagaaacagaacagtaccccaacaggccccctttctgcccaattccagccagtacccaccaagggtaactacttttttgataaactgtgttttacacagtttgatagattatgtttttttatttttatttttttgagatggagtctcgctctgtcgcccaggctgggagtgtagtagtgtagtggcatgacctcactgcaacctctgcctcccaggttcaagcaattctcctggctcagactcccgagtagctgggattacaggtgcacgccaccacgcctggctaatttttatatttttagtagagacagggtttcaccatgttggctaggattgtctcgatctcaggacctcgtgatccacccgcctcggcctcccgatgtgctgggattacaggcatgagccaccacgcccagccaatagattgtgttttaaacaaataatagtttggggtagatggttaactgtatcaggttcaattctttgtaaagaayaggccacaaaattgaccactagactataattcacctttgttcagagctgctctccaatgccaaatatctgtaccagctgtttcaatttcwacttagttttgttgcaagcaaagcaattgctacaaggaggattatgggtgaaagtcatggatggattatgagttawtcacacacctagagaagcatgtaaaatgtgcaggtaaattacacccattcattcaggcagacgtttcctggcacctgaatgaaaggcaagcactgtgaggatccagtatcatgctacaaatgataacgaaccttgaaactctggtctaggatggagtaccagaatattttgtagccgcctcttgtgtctcagtactattacgaagagaatcagctttacatacagacaaatctgggttcaaatcctagttccagtgctctaatagctgtgacagtggctagctgacttaacttctttgagtccattcccttattagtgccattttagggggtttgtgtggattatatatattagagttatataaagcattgttacatacttggtgatcatcacacaataggtctctaccctacccccaaggattaccttcttcctttctggaggatcttagggaaagagaagtgctacagtcttccccatgagcctgtagaaggttaatggtcctccagaaacttaagttcaggtaattatagattgc

SEQ ID NO: 280163 - DNA, 543 bp, Homo sapiens
gtttggtcactgtgtttgggtaacttacttcctaacagctgtatccttctttgctcttcaaaccaagtgtcaaagatggagaaaaacagaataagtcttgagaccccaagcactcccttctcaggctgtgtgttatcagttctgtttgctcaggcttgcattaggggatgygagttttaagcagaagcaataatagtacattgaatggtaaacagaataccaagaaccagtatggtaagaagaaagactaaaaactttttgatcgcatagttatttctagaatgaagaccggattttgttcccaccttatggttcctcacacataagagcatacaaggataatagatggttcataattcagaattaggaacatgatgtcttcagagaaggcaagaacatgttggagacaatagtgcagttattgactttttccaacaaggtatctcgagcatctttgaaatgccatttgtgttcacctcaaatacaacagtaacttatttctaaatattttattcgattcttaaagagagatttgaatttctc

SEQ ID NO: 280164 - DNA, 636 bp, Homo sapiens
actatcacgagaatagcaagggaaagaccagaccctgtgattcaattagctccccctgggtccctcccacaacacataggaattctgggagatacaattcacgttgagattctggtgaggacacagccaaaccgcatcactatctctgttaccagttggactgccacagtatcacagtgcttgtgttcaagtaacccttattttacttaatggtggccctaaagcacaagaatagtgatgctggaatattgttacaattgttttattttattattagttactattactcttttactcttcctaattagtaggttaaacattaaccataggtatgtatgtataggaaaaacaatatacatataggatttgggattatctgtggtctgtggtttcaagcatacactaggggttttggaacctatcctccatgaataaggggtgggggctgctatatttagtaaataatgaaaacattggtaaccttacccctagaagatcaaggagraaagaaatagtttttaaaattatataaaagttatatagcagacatctgcaatacagccagttagataaaaaatttaagactgaaaaaagttttcagtaggtgaaacaaaatatctctttcacaataataat

SEQ ID NO: 280165 - DNA, 490 bp, Homo sapiens
tcccatgtacgagaagactatgatgtaccttacgaagaaagtacatgtatcataagttttgatcagacatgatttatagtgctgttagccatgagttcaatgttaatgaatcaacartatatattaagtatggtatctttaaatagaaacacacatgaaacaagggcacaacttaaaattttcccataaatatagaaagagaataggtcttactgtatttgtaaatatttttccctacaaatgctccttgtattattgacaaaggaaaacatctgaataatttttctctccatgcatgccaacctggtgaaattttacacaaattcttaattattgttgcattacatgtggtaaaactgaagtggagggaggatcagagagagaagcctcttctacagatttctctcttcttagtcctccaagttcctgagaaaggatgaggggggtcaaagatgatcctactgtctttttgtggcgattgttaaacagt

SEQ ID NO: 280166 - DNA, 394 bp, Homo sapiens
tacctctgtatgtccacgttccttctctctaagctcatgatagacctcaggagaaagtcaggtaggcctgctgcttttggctttattataatgtaactagtacatggactatttggctattgtgggattctcctcatgttatcagggttccagcttgcataatcacctccttggcaacagaatttattggcatatttgttgtccttcttagtgcagtggttctaaatgtaggtgatcatccaaaatttttagggactttcaaaaactcasactcttgggttctgaccctgtaactcttaaatgggggtaagagcagggagggaagatgatgtacagaaatccgtatttttcttactgcattccaggtgtagctgtgtaccactagtttttaata

SEQ ID NO: 280167 - DNA, 575 bp, Homo sapiens
attacattatctgacttcaaattatgctacaaaactataataacccaaacaacatagttctagcataaaaacagatacacagacctagagaacccagaaacaaattcatacacctacagtgaactcattttcagcaaaggtgccaagaacatacactagggaaaggacagtctcttcaataaatggtgctgggaaaactggatatccataggcagaatgaaactagacccctatctctcaccacatataaaaatcaaataaaaatggactaaagccctaaatctaagacctgaaactaggatactaaaagaaaacatttgggaagctctccaggacactggtatgggcaaagatttctttagtaatacctcaaatgcacaggcaaccaatgcaaaaatggacaaatgggatcacatcaagctaaaaaacttctgcacagcaamggaaacaacaaagaagcaacccacaaaatggaagaaaatatttgcaagctacccatctgagaagggattaataactagaatatataaagagttcagacaacaggaaaaaatcaaacaatccaacttaaaaaa

SEQ ID NO: 280168 - DNA, 558 bp, Homo sapiens
gtaaatctgtgatttaactacatttcaaatttgatgtggagctacaggaaggatgccagagagaacctgtgtgctccgaatacatctgttgctctagctctttaaaagactttcttttccccacatraaaggagcccaaatgttctctctgctatataaggctatttaactgacctaagggctaactcttactttttggtgcttcacagatgactaagtggtggtattattttaaccagtaaaaattcagaaatctagggtcaggcttgcagctggcagaacttgtaaacagttaatgattgaaaggactaatcagcatcttgaaaggcagctcatgagaagcataagcaaaatgcttaggggtgcctgcagatagaggactgtggcactctgtggtgacagtgaaggaaaatgtgtttgatgtcatcttgtcacagagaaaggctatctgtcagacctcaacttagcatgagtttttcttttgtaagtatgtaagatattttcagaaatgttttagaaaaaagattgttttttaaaccaaattttcagtgtctactc

SEQ ID NO: 280169 - DNA, 1166 bp, Homo sapiens
ggctgggactacaggtgcacaccaccacacccagctaatttttgtatttttagtagagacggggtttcaccatgttggccaggatggtctcgatctcttgacctcgtgatctgcccacctcagcctcccaaagtgctgggattacaggcataagccaccttaaattctcttcttaactccagttgatcttgtccctttctgtagttccatttatcagcaacatatctgtgttggtgcattttgtcactgctataaagaaatacctgagactgggtgctttataaaggaaagaggtttaattgacttacagttccgcatggctggggaggcctcaggaaacttacaatcatggcagaacgagaagagacatgtcttatatggcggcaggctagagaagtgttaggagcgaagagggaagagtcccttataaaaccatcagatctcatgagaactcactatcacrgagcattcacccccatgatccagtctcctcccaccagtctctccctagacatgtgggaattacaattcaagatgagatttagatgaggacgcagccaaaccatatcaatgccaaaaacwaatctaccctcctgtctctcatcggcccccttgttctgaaacactgcagtggttcagagaagtcccctcttagagctttcatttcttttggagggatggtttgaacctagactggatctgccccatttttgccttagcaagtcttgatgagttcattggacagaggcaacaaaatccatatactcaagagactgaaaaaggggagwggagggaaggaacgtgtgtgaggccaaattgccccactgggggtgggattataaaggagtgcgacctttctggcaatacgtgttgtaagccttatgatgggcttatattttgactcagccactgcacccctagtatttatcagaaggaattaatgagaggtctatgcaacagtgagtggatttttacccctgtattatttactatagtaagagaaataatttaaatgtccaacaatactgatggttgggtagttttcacacagccatgaactacaatgcaactactggaaattatattgctgataactgtttattaatatggggatattacataacaaaactactttgttgaagaaaacagagtgaaaaagtatgtaa

SEQ ID NO: 280170 - DNA, 1238 bp, Homo sapiens
aatctaccctcctgtctctcatcggcccccttgttctgaaacactgcagtggttcagagaagtcccctcttagagctttcatttcttttggagggatggtttgaacctagactggatctgccccatttttgccttagcaagtcttgatgagttcattggacagaggcaacaaaatccatatactcaagagactgaaaaaggggagtggagggaaggaacgtgtgtgaggccaaattgccccactgggggtgggattataaaggagtgcgacctttctggcaatacgtgttgtaagccttatgatgggcttatattttgactcagccactgcacccctagtatttatcagaaggaattaatgagaggtctatgcaacagtgagtggatttttacccctgtattatttactatagtaagagaaataatttaaatgtccaacaatactgatggttgggtagttttcacacagccatgaactacaatgcaactactgraaattatattgctgataactgtttattaatatggggatattacataacaaaactactttgttgaagaaaacagagtgaaaaagtatgtaawtgtgggtgtgcctccaacaagaccactgtccttccaagctgagtgagtcgctgattgatacctttgggtcttgaggtcagggaaggttgttcctgaggtagaagcagtaccagcatcagccctgataccagcgtctgccatggccctgagtgagagccatgtcaaagtcccccataagctctgcaggcaggctcgcagccacttctcaaaccccaggcagtgaggtgattttcctgggatcctgtctccctgatattttctgcctgggatttgctggtgtggatcatgcatggctgttaggcagtcctaacaaatggacccacagtactttccctgagcaatttgattctgagaaatctgtcggcacacagacgtgccacggtaacaatcacctgagacgacttgggtctcagcctcaggtgtggacccttttgttccctccatcgttgttgagttggaagtgtccagagatcctccagtgggaacacttaatgatgcagatgaaaataaagaacaaaggtgggctgggaggattaccattaacttgactattaawtatgcatgaggtagggaaccagtcaccaggaagctatctgttctttttatttcactcctttatttcactatttttcataatgactgggatatcatta

SEQ ID NO: 280171 - DNA, 530 bp, Homo sapiens
agggcatttgagggaaactcctgtgagtgctttccaggccttgtgccatgctcagaggtgaaaattaaaagggaactagcaggaggatccmaacttgttcatgcccttaaaggcccagctgaggtctgaagggcactgtgacaggagcagccgaaaactaccccaggccctctgtatccagttttgagatatactgtggagaataggaagccaaagaaccaatgatgcctggtggagattttttattttatttttttatcagagccaaaacctacaaatacaatctctctgccaacaggatttgtctgttttggtaggaaccctacctaaagcaaactgcttaagacctttcagaaggagttatgggacacttgacttgttgggctgacaagcttttaagaagataagactttttgggtagggttgccagatttagcaaataaaataaaaatacagcagacccagttaaatttggatggtagataaacaacaaaaattttttcatatatgtatgtcccatgcaatatttg

SEQ ID NO: 280172 - DNA, 530 bp, Homo sapiens
agggcatttgagggaaactcctgtgagtgctttccaggccttgtgccatgctcagaggtgaaaattaaaagggaactagcaggaggatccaaacttgttcatgcccttaaaggcccagctgaggtctgaagggcactgtgacaggagcagccgaaaactaccccaggccctctgtatccagttttgagatatactgtggagaataggaagccaaagaaccaatgatgcctggtggagattttttattttatttttttatcagagccaaarcctacaaatacaatctctctgccaacaggatttgtctgttttggtaggaaccctacctaaagcaaactgcttaagacctttcagaaggagttatgggacacttgacttgttgggctgacaagcttttaagaagataagactttttgggtagggttgccagatttagcaaataaaataaaaatacagcagacccagttaaatttggatggtagataaacaacaaaaattttttcatatatgtatgtcccatgcaatatttg

SEQ ID NO: 280173 - DNA, 632 bp, Homo sapiens
tttaccattttatgttcctaccttctttcatttttaagtctttctgcagtagcttaaatagttaagcataaagggggaaaaaggaagagaagcctggatgattgttaactgccaagtcctttttttccccagcagagtgtccttcagcttccacagccatcttcactgccacaccgaagctccgggcacctccacctctcacctgggcacttccactggccgcctgacacatcttctcacatctgctcttgctgccataaccccctctttacagagcagcgagagtgatctttgaaaaacggaaatggcattaaagcccttcagtggcctcccattgctctgagaattacttacaaggccctccagggcccagttyctgcccctctgacctcatgccctcacttgacatactacagcctcatgccttcttcatgttctcaagcaaggtcggcaaactatgacctgcccgtcaaatccaacctgccacctgtcacctaacaattctgtaactgctcccacatacaacatggtcgtcatcataaatcctataggtattgttgagagcaggaggaaagtttggttgagtgagtgagagaccttacccaagccttcctgtggtctctaggagtcat

SEQ ID NO: 280174 - DNA, 632 bp, Homo sapiens
tttaccattttatgttcctaccttctttcatttttaagtctttctgcagtagcttaaatagttaagcataaagggggaaaaaggaagagaagcctggatgattgttaactgccaagtcctttttttccccagcagagtgtccttcagcttccacagccatcttcactgccacaccgaagctccgggcacctccacctctcacctgggcacttccactggccgcctgacacatcttctcacatctgctcttgctgccataaccccctctttacagagcagcgagagtgatctttgaaaaacggaaatggcattaaagcccttcagtggcctcccattgctctgagaattacttacaaggccctccagggcccagtttctgcccctctgacctcaygccctcacttgacatactacagcctcatgccttcttcatgttctcaagcaaggtcggcaaactatgacctgcccgtcaaatccaacctgccacctgtcacctaacaattctgtaactgctcccacatacaacatggtcgtcatcataaatcctataggtattgttgagagcaggaggaaagtttggttgagtgagtgagagaccttacccaagccttcctgtggtctctaggagtcat

SEQ ID NO: 280175 - DNA, 601 bp, Homo sapiens
ttacagaacactattattctgtcaggcggtgggtggggtggggggtctttttccttgttccatttcttgttagtttactgctggggatatgaggtaaaggctrtttaatttgtatgctgtgtagttgtcagattaaatcatcaaaccaatcagaaagtgcacgtgtgtgtgtgtatgtgtgtctttttgtgtgtttcaggattaagaagaatgaataaggaagaggaaaagggaggggcccgtggaggggaaagtctgttgtttcgtaatgattaatcttgaagcctttggattccaggggcccctactgtgactctggagtggctgctgctgtcagctcatgggctttgtgcagtgggaaatggatgtgcaatacgtgcaatacctagaaataattccagtgtcatccctggccaatctactgggaaactgtccatttcaacaagagcacctcagacagtaactggaaagagaaatagctcatattctcaggaacgttagtcatcttgaagcagcatgattcgtgatacctggaaaatgcacatggcagtcactaaaattgggttctagggatacttttaataagatttgagaggagctg

SEQ ID NO: 280176 - DNA, 626 bp, Homo sapiens
gtgattattggaacccagtgagtttagggtggtttaatatgcagtgatagtaaactgacacaagtcctgtgagtttgtgaccgcggagtcatgggcagctgtcttgggatggggctgagctgtctgcatgaatagaaaggtatggaagagtctcactatagtatagtgcagcatggagactagcctctcagttttcagaatcttcttggaaagaaaacaactygtaactgagattctaagaaatttgggaaacaaaatttatggctaatggctgaggcaaacaagaaaggtggctcaaatattggaatggaaagcaggaaaccctaggttttagttctggcatcgacattgcctggctgatgatactggtctctggacctgagcatgcccactaccaccatcttccactgtctctggtggaagaaatggggctgatccacctccaaggatgagggtcgttcaatgggtgcttactgagggctgcagaagtaaatcattctctccttccacagtgaccagtggggcatcatgccaactcctttctgggagagagtgattttaaaggaggaagtaaacaaatgctgagaaagaagtcagggaatgccccaccagggacataacatgct

SEQ ID NO: 280177 - DNA, 626 bp, Homo sapiens
gtgattattggaacccagtgagtttagggtggtttaatatgcagtgatagtaaactgacacaagtcctgtgagtttgtgaccgcggagtcatgggcagctgtcttgggatggggctgagctgtctgcatgaatagaaaggtatggaagagtctcactatagtatagtgcagcatggagactagcctctcagttttcagaatcttcttggaaagaaaacaactcgtaactgagattctaagaaatttgggaaacaaaatttatggctaatggctgaggcaaacaagaaaggtggctcaaatattggaatggaaagcaggaaaccctaggttttagttctggcatcgacattgcctggctgatgatactggtctctggacctgagcatgcccactaccaccatcttccactgtctctggtggaagaaatggggctgatccacctccaaggatgagggtcgttcaatgggtgcttactgagggctgcagaartaaatcattctctccttccacagtgaccagtggggcatcatgccaactcctttctgggagagagtgattttaaaggaggaagtaaacaaatgctgagaaagaagtcagggaatgccccaccagggacataacatgct

SEQ ID NO: 280178 - DNA, 583 bp, Homo sapiens
aatgtgctttataaagttcattgccctcaagtcaataatatagtatcacaatatggattgtttttttcaatttgtggaaggagttggcaatgtcttgatgtttcctaaattgttgcagagccattactgcattcagcctgccagtcttgggagtcacctggggctctatgggttctgcccattaccactgtaaaggagaaccctacatatcaggtgtcatccatttctccccacttgtttccctggccatggccgaaaggactagacacgagtagacacctgatggggtccggatctgtgtccctgcccaaatttcacattgaactgtaatccccagtgttggaggaggggcctcgtgggaggcagttagatcctgggtgtggaaktggaggaggggcctcgtgggaggcggttagatcctgggtgtggaattggaggaggggcctcgtgggaggcggttagatcctgggtgtggaattctcatgaatggtttagcatcgttcccccttggtctgtacagcgaatgagttctcaggagatctggttgtttaaaaacatgtagcacctcccatctctctctctt

SEQ ID NO: 280179 - DNA, 583 bp, Homo sapiens
aatgtgctttataaagttcattgccctcaagtcaataatatagtatcacaatatggattgtttttttcaatttgtggaaggagttggcaatgtcttgatgtttcctaaattgttgcagagccattactgcattcagcctgccagtcttgggagtcacctggggctctatgggttctgcccattaccactgtaaaggagaaccctacatatcaggtgtcatccatttctccccacttgtttccctggccatggccgaaaggactagacacgagtagacacctgatggggtccggatctgtgtccctgcccaaatttcacattgaactgtaatccccagtgttggaggaggggcctcgtgggaggcagttagatcctgggtgtggaattggaggaggggcctcgtgggaggcggttagatcctgggtgtggaattggaggaggggcctcgtgggaggcggttagatcctgggtgtggaattctcatgaatggtttagcatcgtycccccttggtctgtacagcgaatgagttctcaggagatctggttgtttaaaaacatgtagcacctcccatctctctctctt

SEQ ID NO: 280180 - DNA, 550 bp, Homo sapiens
gatgattatgaggctggtgaccctcaaaactcattttagggtcaaatccagacatgactgatgctttaatagacacatttctttttttattaaatattaagcttttctgggttctgtgtatgctgttgttagcaactttccttgtgccacagatgtatgaataagaagcttcttcactgtgtcttgattaacataagcataatatggaaaaatccatatttaggtagatcataaattggtagctatatgatgaaagacctcaccaaacttttcctttaaatactggaatgaactcacttactttaaaagattagattttcagtaacccaattgccagaaactatttcaagcacgcagggattctgacaggatctaaatcgacacaccttcctaactttagtgctgattagagtcagggaggcttttggccaaagcagaaatcactacaaatacaggctgtcagtgacaaagccacggtttctccttcacctcctctgtyctgaatagatttgagtaagtggcaaaaaagaatataggcttaagtatccca

SEQ ID NO: 280181 - DNA, 1149 bp, Homo sapiens
attcccaaacccagcactttgggaggccgaggtgggcagatcacgaggtcaggagttcaagaycagcctgaccaataaggtgaaaccctgtctctactaaaaatacaaaaattagccaggcatggctaattttcaccggaaacaatcccaggaacaaggtcggaggctaattgcaaatgttgctggataagggaggtggtaaacacatcattgcagctgcaaagctctggccagtcttcagctgtcccagggtgggaaagcgttaagtagaacttaaagcagaacttttctggagggtaatttagtcacatgcatcagaaccttaaacatgtgtaaacccaacagcccagcattgccacttctaggaactaaaactgaggaaattaaagaaaagaagcacttcagcactgtcctgggttatagaaaaaaaaaaaaaagcagcaccaagatgtatgggtgagaatgttcatttcagaaatacttattgtaatcaacacttggcacaacatatatgtccaaaaggagagggctggctacttaaattacagtataattataaaatggaatactatggwattcccaaacccagcactttgggaggccgaggtgggcagatcacgaggtcaggagttcaagaccagcctgaccaatawggtgaaaccctgtctctactaaaaatacaaaaattagccaggcatggctaattttcaccggaaacaatcccaggaacaaggtcggaggctaattgcaaatgttgctggataagggaggtggtaaacacatcattgcagctgcaaagctctggccagtcttcagctgtcccagggtgggaaagcgttaagtagaacttaaagcagaacttttctggagggtaatttagtcacatgcatcagaaccttaaacatgtgtaaacccaacagcccagcattgccacttctaggaactaaaactgaggaaattaaagaaaagaagcacttcagcactgtcctgggttatagaaaaaaaaaaaaaagcagcaccaagatgtatgggtgagaatgttcatttcagaaatacttattgtaatcaacacttggcacaacatatatgtccaaaaggagagggctggctacttaaattacagtataattataaaatggaatactatgg

SEQ ID NO: 280182 - DNA, 574 bp, Homo sapiens
attcccaaacccagcactttgggaggccgaggtgggcagatcacgaggtcaggagttcaagaccagcctgaccaataaggtgaaaccctgtctctactaaaaatacaaaaattagccaggcatggctaattttcaccggaaacaatcccaggaacaaggtcggaggctaattgcaaatgttgctggataagggaggtggtaaacacatcattgcagctgcaaagctctggccagtcttcagctgtcccagggtgggaaagcsttaagtagaacttaaagcagaacttttctggagggtaatttagtcacatgcatcagaaccttaaacatgtgtaaacccaacagcccagcattgccacttctaggaactaaaactgaggaaattaaagaaaagaagcacttcagcactgtcctgggttatagaaaaaaaaaaaaaagcagcaccaagatgtatgggtgagaatgttcatttcagaaatacttattgtaatcaacacttggcacaacatatatgtccaaaaggagagggctggctacttaaattacagtataattataaaatggaatactatgg

SEQ ID NO: 280183 - DNA, 604 bp, Homo sapiens
gctggttattgtgcagggttagtacccagaatgcagtgcagattggattggaactgaaggctgtcagtcagygggtgctcggatctcaaacggtgtctctgactctgctccacctctgggctgctctgttagattcctgactccccttcctactttaggtctctttctgcacggactttttggactgagagattgaacttcttataggactgttctgatcgttattgcctcctcaaagcaagcaagcaaatgaaatccttcaataactccctagtggattctaaataatgtttcaactccttatcccaggactggccctaatcttcccaccaccttaagtcccttcatgctgccaagtctatatcttactgattttcccacatcccatagtatctgagggcaccactacaactacttatgggaagtgaaaaaaaatagataaaatagagtgtgtccactctgacttttattactcacaattatgtcttttttaaaatgtggaacactttgttggttatataaatcctttccctctaaacttggcatctttgtgtaattgacaatttggtcaggagtttgagaccagcctggccaacatggtgaa

SEQ ID NO: 280184 - DNA, 1070 bp, Homo sapiens
  misc_feature (1)...(1070): n = A,T,C or G
tacaactaacctatagtcagtgtgttaatccattttgcattgctattaagaaatacctgagactgggtaatttattttaaaaagaggtttattttgccttatggttctgcaggctgtacaaccatggcaccagcatctgcttctggtgaggactcaagaaactaccaatcatggcagaagcaggtgtgtcacatggcgacagagagagaaagagagggggaggagatgccaggctcttttaaacaactagctctcatgtgaacytaatagagtgagaacccactcattacctcggggagggcacaaaaccattcatgagggatctgcccccacgacccagacacctcccaccaggtcccatcttcaaccctgggaatcacatttcaacctgagatttggaggggacacacatccaaaccatatcagtcaggaaatgttcaccccctttctccacctccaaataacaattacacagtacccagcatctgtgcaaacattttattctattcacaattctcatatggtgtaaattgcaatctctctgtagtaggacaaattctagggatgacctctgtattagtcaggcttctctagagggacagwcagcaactgcccagctgagtcttcccatcatcggacgtccccaatccattccagccatggtgagctttcaataatgcaaatcaagtcwtcaaggtcattcctgtgtagaaagcccatngccttcttcatatacttacggctttcaagttccttcatatctagtctctgttcccctttctagcctacctcccagtactctcactccaatatagctcatgtcaaacagatactacttttggtttcctgaaatgcctttccttgacagtgaaccttgcttctgcctgaaacactctctctttccctatttctatcaagctccctgattttcaaggttcatttcgggcagcatgccctctaggaagcatttcttggcagcctgatcctctgcccagcctctcatctgatttaggccatagattgagcataacatgtttcacagtattgtaattgttcgtttatgtggtggt

SEQ ID NO: 280185 - DNA, 625 bp, Homo sapiens
caactaaccataccaggcataatttctgaaggcttcaattttctgtgtggttctctggaacagtattcagcctgtttgtgcaatcagctatgttagagttttttaaattcaatctaacagatacagactctcaagaggaactgcagcaataaaagattgctattatctatgcactaataaacctgtgtgtaaggattctttcatcagatgcaatgacatgctattctgtctcaattcaacactaagggaagagatttaatttctcttyaatgcaaatgaaatcactgtatgtagtagcagcagtacggaagaaggccaaactgagtaactgtgttatgtgtccactaagaatgttcattcactcctctcagtcctgctacaaacaaggctcaggaaatccacattctttctgtatgattgttttaaatgcctgaatgtagtatatggaccctcagctttatggcttaggattttctttccccctgccttgcctttgtcagtctatggtttgacatttctaaccctcaaaacagggaggttccattacaatctgaaagttgaattactttactttctttatactgaagactcaacagatagtctccactgatcacacagaggatgc

SEQ ID NO: 280186 - DNA, 629 bp, Homo sapiens
attgaaatttgtatgtaagtagatttaattagccattttcactattaaacttattgataggattgtgtattttgtcacatagttggtacacattttgtgctgggcatgacacctgagctctcaccaactagcaactatattatttttaaaaagctcttaatagcagttttatggaataatgtatctaaatgttttaacagtagagaattatgtatccaaaatgtttaaacatgtaaagatttatatgaatggataagttatttgttttgccaatactgtacttaaaaaaattgtgtcaataacattttgaacttttataaattggaaggttttttcttttgtcttggggagaaacacagccaattggaactgtttccttcttgttaaaaataatagttgctttgtttgtactacatgccatgcactgaactaggtcattaacaagcatgaaaataatagtagttaatattgtaacatttattgaccatattgtgtatgtgatgctgtgctaagaactttatgtgcattaagcaataggtttcactggatttgtatttctctttctcccatkttaataccacgtttgctatttgtaaggaaaaatatgaatcctgatttgattagtttta

SEQ ID NO: 280187 - DNA, 617 bp, Homo sapiens
tatcttataaggggcttggagtatataaaaaattctcagaactcagtaataagaaaacaataactcagtttttaaagatggtccaaagatttgtatagactacttcatctaaaagaatacatgtgacatggctattaagcatatgcaaatatgctaagcagtcattagtctaaaaccataagtgagacaccacttcacacctgctaggatggctataatcagaaagaacaggtaagtgttggtgagcattgtagaaataattggaaccttcatttgttacgctaggaatgtaagatagtgtgactgatttkggtaattcctcaaaaagataagctgagtaaccatatgacccagaaatttcatatacccaagagaattcaaaaaatatattcacacaaaaacctgtatatgagttagcagtattatttataatagccaaatagaaacaacccagtgtccatcaactgatgagtagataaatgtgatctatttgtaaaatagaatattacccagcagttcaaaggaattaagtactgatgcatggtacaacttggataaatctcataaacattaggataagtgaaataagccagtcacaaaagaacatattttctatg

SEQ ID NO: 280188 - DNA, 522 bp, Homo sapiens
aggggactttgtcttgtacattaggtaccagctcagctacagaggggtagagcacaaagtgggctcttgaggtcccccrtgccaaaacttggcttttagatggcacttctggaccttctctgggccagaggggcatccactgcccctgaagggtgagtcccagtccagatagtattcactacaagttgacttaagaacccttgggcataaagggaacatcagagatacactggcagtattccctgtggacctgtggtggcgatggccatggggtgaggctcctctgcctttggaaagcagatggaagagcgggaaggattacatcttgtggtttgagtgccagctcagctgcaggacaatagaataccaggtagacgtctcaggtttttgactctagtctctggctcctggatggcacctttagacccacccagggactggggtaactcaatgccctgaagggaagaatacaagcccggctggctttgcctctgctgattgtagagccccaggtctttgaga

SEQ ID NO: 280189 - DNA, 522 bp, Homo sapiens
aggggactttgtcttgtacattaggtaccagctcagctacagaggggtagagcacaaagtgggctcttgaggtcccccatgccaaaacttggcttttagatggcacttytggaccttctctgggccagaggggcatccactgcccctgaagggtgagtcccagtccagatagtattcactacaagttgacttaagaacccttgggcataaagggaacatcagagatacactggcagtattccctgtggacctgtggtggcgatggccatggggtgaggctcctctgcctttggaaagcagatggaagagcgggaaggattacatcttgtggtttgagtgccagctcagctgcaggacaatagaataccaggtagacgtctcaggtttttgactctagtctctggctcctggatggcacctttagacccacccagggactggggtaactcaatgccctgaagggaagaatacaagcccggctggctttgcctctgctgattgtagagccccaggtctttgaga

SEQ ID NO: 280190 - DNA, 579 bp, Homo sapiens
  misc_feature (1)...(579): n = A,T,C or G
aaagatcaaccatgcaaacagacaataaaagagagcagggatagctctttttatatcagataaacagacattgaacaaacgccagtagaaaagaaaaaacaacaacaaagaaggacrttatgaaatactaaagggttcaattcaacaagaagacttaagtattctaatatatatgcattcaacattggaatactcagattcataaagtgagtacttctagacccacaaaaagacttagactgctgtactataatagtgaaggatatgaataccccactgacagcattagcagataccaaggcagaaaactaccaaagaaattctggacttaaacttgatgcttggccaattggaccaaatagacatctacagaatactccactcatcaaacacaaaatatgcattctcctcatctgcatacaggacatactccaagatcaactacatgctctgtcataaaacaagtctcaagaaattaaaaaaaaaatccaaatcataccaaccatagtcttggacccagtgcactaaaaataaaaatcaannnnnnnnnnnnnnnnnnnnnnnnnnnnnnnnnnnnnn

SEQ ID NO: 280191 - DNA, 579 bp, Homo sapiens
  misc_feature (1)...(579): n = A,T,C or G
aaagatcaaccatgcaaacagacaataaaagagagcagggatagctctttttatatcagataaacagacattgaacaaacgccagtagaaaagaaaaaacaacaacaaagaaggacgttatgaaatactaaagggttcaattcaacaagaagacttaagtattctaatatatatgcattcaacattggaatactcagattcataaagtgagtacttctagaccyacaaaaagacttagactgctgtactataatagtgaaggatatgaataccccactgacagcattagcagataccaaggcagaaaactaccaaagaaattctggacttaaacttgatgcttggccaattggaccaaatagacatctacagaatactccactcatcaaacacaaaatatgcattctcctcatctgcatacaggacatactccaagatcaactacatgctctgtcataaaacaagtctcaagaaattaaaaaaaaaatccaaatcataccaaccatagtcttggacccagtgcactaaaaataaaaatcaannnnnnnnnnnnnnnnnnnnnnnnnnnnnnnnnnnnnn

SEQ ID NO: 280192 - DNA, 579 bp, Homo sapiens
  misc_feature (1)...(579): n = A,T,C or G
aaagatcaaccatgcaaacagacaataaaagagagcagggatagctctttttatatcagataaacagacattgaacaaacgccagtagaaaagaaaaaacaacaacaaagaaggacgttatgaaatactaaagggttcaattcaacaagaagacttaagtattctaatatatatgcattcaacattggaatactcagattcataaagtgagtacttctagacccacaaaaagacttagactgctgtactataatagtgaaggatatgaataccccactgacagcattagcagataccaaggcagaaaactaccaaagaaattctggacttaaacttgatgcttggccaattggaccaaatagacatctacagaatactccactcatcaaacacaaaataygcattctcctcatctgcatacaggacatactccaagatcaactacatgctctgtcataaaacaagtctcaagaaattaaaaaaaaaatccaaatcataccaaccatagtcttggacccagtgcactaaaaataaaaatcaannnnnnnnnnnnnnnnnnnnnnnnnnnnnnnnnnnnnn

SEQ ID NO: 280193 - DNA, 521 bp, Homo sapiens
gaaaattttaaattatgcaatacagacaatccatttgtatcattgtataatcattacccacaactgtttcccgatctgtaggcattttgtgagaagtgcaggtgacccgaggactctccactgatggctggcatctaaaacaagggcagtctcgtgaagtaccaaacccttaatctgtgggatatgtgctaaatttggggggtgggggtggttagaatcttctatgttttgaatgtgatcccgccaaaacttaggtgttgaaacttgttgaccaatgtgataatattaagaggtgttgcctttaagaaaacattaggtcagagggttcttctttcatgaattagattaagatccttataccaaaggcttcatgyagccttcatccttccacacttcttctgtcccttccacacttcttctatcctttccaccaacacagtgttcctccactctggaggatgcagcaacaaagtgccatttcagaagcagagactgagctctcaccaaacactcaaccttcc

SEQ ID NO: 280194 - DNA, 494 bp, Homo sapiens
atcttgatttcgtttttgacccaatgctcattcatgagcaggttatttaatttccatgtatttgcatggttttgaaggttccttttggagttgatttctagtttattccactctcgtctgaaagagtgcttgatataattttaattttcttaaatttattgaggcttattttatggtctaacatatagtctatcttggagaaagttccacgtgctgttgaatagaatgtgcattctgtggttgttggatagaatgttaagtccatttgttccaaggtatattttaaaggctagaattagttgattctgtaaaagagatccacattttcatttcctcaagacgatactactatttgaagtagaaatactctggttgctgctygctcaaattatttcataacatgggatttatactgataaatatttatgttttaaaaaatttctctccatttacatcccagcaccaactaccactgtctcacaggtggtctttta

SEQ ID NO: 280195 - DNA, 621 bp, Homo sapiens
aaactttttgaatctttttcaaagttcaattatggtgtatgcttggcaatagagtaacaaaatatatggtccctgtatctttcacaatattttgtgaaagcagaaacttgcttagacaggtgtcataaggaccagataaaagctgaaattgcactgtaagaaatatatccaaggtgaatccactttaggttcctagaaatatagtgcaccaagaagatatgcactcttagttttttgactttttagaactttttagtttttatagtttcattaatatccagagtacgtaataaaaacygaattttgcataactgctttaacactttgtttacaaaatgctcacaaatatgactttaaacaaatggatgtgtttatgtgtttttatcttagaagtagagacatctgaaaacaaatttcaagtttatgtataatgaatcctctgatctcttaaccttgactaataatccatgtaatagttcatatccctgtaatcatagtaataaattctacatattatcatttaattttattctggaaacttaatttaattataataagttggttgtttaagagaagtgatgaaggataaaaagatggaagtcaaatatttaatagcctaga

SEQ ID NO: 280196 - DNA, 489 bp, Homo sapiens
aagactatggaagtatgtattcttataaatgtttgccttttcatagaacttttcttgaaagtcattttgaaaaattcatcaaaaatcttaaaatgcatgcattgtgagttcaaatccaatttattgaaatttattatttaaaaaattataattcagcatgtaaatttatctataaggtaaacaaagcaaaaatgttttaatacaaaatattaagaccctctacatatacaacaataaaacagtgtttgtatatagtagtaagtratgcacatcaattatactttacactttaaaagattaactcctgagagggaattgtaaataaaacaatagtaactttaaaatgttgcaaaattatcgtaggcaaatgctagtttatttaagttttgaggtaggaaaattaaaatggggttcatattcaaagttaaacagagtgaaaagaattgaggtaatgactttagaaaggagccattaccttagttatgatag

SEQ ID NO: 280197 - DNA, 489 bp, Homo sapiens
cattttgaatcatttgtaaggacagtacgtgcatagtagcatttagcaatctaaaaaaacaattgtatcaacaagtttaactaaaatatcatgagactgccaaaaatctgaaaccgtaacctagtattttccaaatgtgaacgagaaaacttggacagaaaaaaagtctcaaccactctaacaatctatctaaaacaatcagattgctttttctttcagcatagattgctccatctgatatttagtgttaacccaaattgatcaagaagtgccagcaatggkgtaaacatccatctggttggccagaacaaatccaaagttatttaattatctaaaaataagcattttaactagcttaatatgcttccagggaaagaactcttatgtatgatgttagccaaaatgaagactatgttgctcaggatgctcaagttaactcctccatatgggaccactgtccttaggttcatctgtctacttgatatttat

SEQ ID NO: 280198 - DNA, 1184 bp, Homo sapiens
aatgagtatgctttatttcttcatttggcttcaaattactgcttagtgtcattttatttccacctcaaatttttttttttttttttttagcatttcttgtayggcaggtttaatagtgataaacttccttaactcttgtttatctaagaatgtctacatctctcttcatttttgaagaaaaaattgtcagatatcaaatttttggctcactgttctttgttttcagcactttaagaaaaatatcccacttcatggtttgatgagaaatttgttgttaataatattgaggctcctttatacataagaagtcattttttttcttattgcttttgagattatcttgttttgtcttttgacagttttacaataagtctcagtatacatctccttgaatttagcctacttgcgttcattgaacttcttggataggtagatgcatacatttcatcagatttgggaagtttttagccattacgttttcaaatattccctctcacactttttctggggcccctacaacacatatgttgatacacttgatggtgtgttataggtctcttattctctatttattttttgtttgtttatgcttttcagactggttaatttcawcttccattgtatttagatgtcatatgttctagaattttccattgatcttgacggttaccgtagatgatatgaacagtcttggggaaagcagtacaataatctatctatgttaaaataatagaggctatcctttgggaatagtggtagtgaactatagaacctctcacaaggacagagctgctttttctttctattttactttttcctcccttagccaatctagattttcgactctattcagtgattcatccaaaagaattgttttgggttacttcctgatgatagatgtttatatcttaaaacatatttcccagattatgttctttttcactgttwtgatggaaaagatagaacctgtgtttacatagagtaaagccagttttattcttagtgttcctttacaaatcacgaaaagtttgaatattactctataatgacaaactttcattaatcatagcttatattctcaacagcgttttatgaaaagaaaatttcacttaaaagttatggtttctttctctgtagttgtgttagttgtgcattatatatttataaatgtgtattttatagac

SEQ ID NO: 280199 - DNA, 573 bp, Homo sapiens
cacctattgttcagctccatagtgatagacattatggtaaaatccaggaaacggaaaatggaaaattcatgtcacgttttcattaaaaatattatcttttgaataaaactaaaagatatagcattctaaacttagagaacaatatataaaatatactaatggtctttgcactgaacaccctttacaaatgaataataatacagagggaaaatattarctttgacaataaaatgtaaacataaaattaataaaatttggaaggtagatagcaggataaaggtgaatcaagtgatactggctatgggaaaactattaaccaataggcattaacgatgtcacctgttttacacaggtaacctatatatagggaaatatagctgggagatggtaaaagtaattgaaatcttcatctagtgtagcaaaagtaaaataagatttaaaattgatcagcccaatactaagcgtctgacaattttattgagagatgttgattaaaaaaaaacagacaagtaaaaatgttagtgtaaggtaggatcctgtagattttatgtgcctcactatgtggcattattt

SEQ ID NO: 280200 - DNA, 573 bp, Homo sapiens
cacctattgttcagctccatagtgatagacattatggtaaaatccaggaaacggaaaatggaaaattcatgtcacgttttcattaaaaatattatcttttgaataaaactaaaagatatagcattctaaacttagagaacaatatataaaatatactaatggtctttgcactgaacaccctttacaaatgaataataatacagagggaaaatattagctttgacaataaaatgtaaacataaarttaataaaatttggaaggtagatagcaggataaaggtgaatcaagtgatactggctatgggaaaactattaaccaataggcattaacgatgtcacctgttttacacaggtaacctatatatagggaaatatagctgggagatggtaaaagtaattgaaatcttcatctagtgtagcaaaagtaaaataagatttaaaattgatcagcccaatactaagcgtctgacaattttattgagagatgttgattaaaaaaaaacagacaagtaaaaatgttagtgtaaggtaggatcctgtagattttatgtgcctcactatgtggcattattt

SEQ ID NO: 280201 - DNA, 500 bp, Homo sapiens
catcacattggttgatctggctgctacatctctcttgggtggagtgcccaagcaaaaggccctttgccacaaccactgccaaggacccttcccttgctgcctccaagatagggagggaacataaagtctgagcttgccctggagctgtggtgggcagcccaagagtgccaagccaaaatctgcaagcagaactcaagtgggagaggagcccaccctttcagagcactgagaaagagcaaggctgcaattgtgagacaataygaatgagccacgtggccaagcaaaagtctagtactgaccaatactcatctgcaccatctactggttcacagcccaaacttcaacatcagaaatattttgctaatatattttgaaaccaaggacaagaattcagctacaaataaataccatgcatagatccctagtcctctgaaaacatacagaaaagaagtttactggcagtactcaatttacacctcagttaaaggaacagcccacac

SEQ ID NO: 280202 - DNA, 494 bp, Homo sapiens
atggcttggagtatcattgtaaagtaggaggcttaataggaaagataagaaaataggtattcaaatatgggcataattattcttgataatttctgaattcagaagagttaagtccattaatgttaaagaaagtgtttcctcccctttacaactctgaagattatgaatttatctctaatgtggattaagaaagaatgatgaaaaaatatcagtgactggttttatcaaaaataataaagaaaatgtggtatatatacacaaggaaatagtattcagccataaaaagtatggaaatctgtaatttgcaacaacatagatggaactggaggacattatgttaartgaaataaatgaggcacccaaagacaaattttgcatgtttttaatcatatgtgatagataaaatttttttaattgaactcatggagatagagaatagaatcatggttaccagaagctgagaagggtagttgggaaggaaggataaagtgtgg

SEQ ID NO: 280203 - DNA, 494 bp, Homo sapiens
atggcttggagtatcattgtaaagtaggaggcttaataggaaagataagaaaataggtattcaaatatgggcataattattcttgataatttctgaattcagaagagttaagtccattaatgttaaagaaagtgtttcctcccctttacaactctgaagattatgaatttatctctaatgtggattaagaaagaatgatgaaaaaatatcagtgactggttttatcaaaaataataaagaaaatgtggtatatatacacaaggaaatagtattcagccataaaaagtatggaaatctgtaatttgcaacaacatagatggaactggaggacattatgttaaatgaaataaatgaggcacccaaagacaaattttgcatgtttttaatcatatgtgatagataaaatttttttaattgaactcatggagatagagaataraatcatggttaccagaagctgagaagggtagttgggaaggaaggataaagtgtgg

SEQ ID NO: 280204 - DNA, 584 bp, Homo sapiens
catgccaatgaaaacagagaaacagcaaagtcatgctaataaagagagaggagcagaacaatctcatgctaatatagacaayttgtggtttgggttctgtgtccaggctgtacgtaggggtagataatttcaggtctcattattatctctgttttgttttattccctccgtctttcccttttctcactctcctcctccccaaaaatacagaattccatagaaaatacctcaacccttcagagttcagccccaaaagtgattaatccatgtgtgcttcccaatctcttcacagtcaaattagttatgaggtttaattcatattagaaaactgtatgacattctaatcagagcctgggaaatacttctttttaattatttaaaatgtctaaaacacttcagattaatactggcattttaatttacattattaaaaataaagctaatttaaatttttttttactattattatttattcaaaggacacaaaagagtaatttgaggtaacctggttgtgatcattaattttaagtgtcaacttgactggattaaggaataaccaaagaactggtaaagcatcgtttcta

SEQ ID NO: 280205 - DNA, 584 bp, Homo sapiens
catgccaatgaaaacagagaaacagcaaagtcatgctaataaagagagaggagcagaacaatctcatgctaatatagacaacttgtggtttgggttctgtgtccaggctgtacgtaggggtagataatttcaggtctcattattatctctgttttgttttattccctccgtctttcccttttctcactctcctcctccccmaaaatacagaattccatagaaaatacctcaacccttcagagttcagccccaaaagtgattaatccatgtgtgcttcccaatctcttcacagtcaaattagttatgaggtttaattcatattagaaaactgtatgacattctaatcagagcctgggaaatacttctttttaattatttaaaatgtctaaaacacttcagattaatactggcattttaatttacattattaaaaataaagctaatttaaatttttttttactattattatttattcaaaggacacaaaagagtaatttgaggtaacctggttgtgatcattaattttaagtgtcaacttgactggattaaggaataaccaaagaactggtaaagcatcgtttcta

SEQ ID NO: 280206 - DNA, 634 bp, Homo sapiens
atgaaatcaggggattcagagaattgagacagaaaataatatttttaaatttttaaaattattttgatgatattttttccaatttgctgttaatattttggtagccatttacattgaataatagttctttgtatcttgaattttatgtcaatatacttctgattggagtctcataaaacatcaaatgtagcataatttagcatatgtatacacacttaaattcaaagcagtacctaaggattccacctgcagaacctgtttgctcctcattattggcttacaaaagcctggttcaattgtaatggataggattaggctgtcagaagaacactgcatggaatatacataccttaacgcattttgcaagcatcactacattgatagtcaatatatacattacatttgagagcaacagtttttgatagtaaatcaaaacrtaattttataagtttctgaagttttccctagtttcttcacattaagccagtagtaaaacccattattgcttaaaggtaagtaaatacaaaccacatctatgaaaaacatttttactgttccaaaacttctattatttcaatttcttttaagtctgtttcttttctatttaaacttaaatactgttataaacagttaa

SEQ ID NO: 280207 - DNA, 577 bp, Homo sapiens
ccaggtgacacctactccactggattaggagtttaggccaccccctatctccatgcagaatatgaggctgaggaggtttcccagttccatgcctaggcacacctctgggcacacttggtgactgcccactggattcttcctgagccctggtgcttgtgccagccattggaagacctgtatgtgaactggcctggctgagcactgctcttcatggccccactcccagrgctgagcagggagctcagaccactgcattccacgaatcagcccattgcctgtggcatcacagagattctcccagtaaacaggaatcaagtgtatacctagctgcataggctgctactggctcttacctacaagcaccattaactggcttgtaggtcaaactgaacagtccaatataaaaccttttgaaacaagtgcgtagggctatagaagcaagccaaaaagtctacacagcatgctcacatcttctagggaagggacaaagagaaaggggtaaaacataaatatacgtacttacataaagactatataaaaatatatgtatttatatcaaagtatataaaatatatgt

SEQ ID NO: 280208 - DNA, 577 bp, Homo sapiens
ccaggtgacacctactccactggattaggagtttaggccaccccctatctccatgcagaatatgaggctgaggaggtttcccagttccatgcctaggcacacctctgggcacacttggtgactgcccactggattcttcctgagccctggtgcttgtgccagccattggaagacctgtatgtgaactggcctggctgagcactgctcttcatggccccactcccagagctgagcagggagctcagaccactgcattccacgaatcagcccattgcctgtggcatcacagagattctcccagtaaacaggaatcaagtgtatacctagctgcataggctgctactgrctcttacctacaagcaccattaactggcttgtaggtcaaactgaacagtccaatataaaaccttttgaaacaagtgcgtagggctatagaagcaagccaaaaagtctacacagcatgctcacatcttctagggaagggacaaagagaaaggggtaaaacataaatatacgtacttacataaagactatataaaaatatatgtatttatatcaaagtatataaaatatatgt

SEQ ID NO: 280209 - DNA, 577 bp, Homo sapiens
ccaggtgacacctactccactggattaggagtttaggccaccccctatctccatgcagaatatgaggctgaggaggtttcccagttccatgcctaggcacacctctgggcacacttggtgactgcccactggattcttcctgagccctggtgcttgtgccagccattggaagacctgtatgtgaactggcctggctgagcactgctcttcatggccccactcccagagctgagcagggagctcagaccactgcattccacgaatcagcccattgcctgtggcatcacagagattctcccagtaaacaggaatcaagtgtatacctagctgcataggctgctactggctcttacctrcaagcaccattaactggcttgtaggtcaaactgaacagtccaatataaaaccttttgaaacaagtgcgtagggctatagaagcaagccaaaaagtctacacagcatgctcacatcttctagggaagggacaaagagaaaggggtaaaacataaatatacgtacttacataaagactatataaaaatatatgtatttatatcaaagtatataaaatatatgt

SEQ ID NO: 280210 - DNA, 577 bp, Homo sapiens
ccaggtgacacctactccactggattaggagtttaggccaccccctatctccatgcagaatatgaggctgaggaggtttcccagttccatgcctaggcacacctctgggcacacttggtgactgcccactggattcttcctgagccctggtgcttgtgccagccattggaagacctgtatgtgaactggcctggctgagcactgctcttcatggccccactcccagagctgagcagggagctcagaccactgcattccacgaatcagcccattgcctgtggcatcacagagattctcccagtaaacaggaatcaagtgtatacctagctgcataggctgctactggctcttacctacaagcaccattaactggcttgtaggtcaaactgaacagtccaatataaaaccttttgaaacaagtgcgtagggctatagaagcaagccaaaaagtctacacagcatgctcacatcttctagggaagggrcaaagagaaaggggtaaaacataaatatacgtacttacataaagactatataaaaatatatgtatttatatcaaagtatataaaatatatgt

SEQ ID NO: 280211 - DNA, 558 bp, Homo sapiens
gcgctgtggctcacgcctgtaatcctggcattttaggagactaaggcagatggatcatgaggacaggtgttcaagaccagcctggtcaacgtggtgaaaccctgtctgtactaaaaatacaaaagttagacagcgcggtggcaggtgcctgtaatcccagctacttggggagctgacacaggagaatcgcttgaacccagagggcagatgttgcagtgagccgagatcacaccactgctctccagcctgggtgagagagtgagactttctcacaaaacaaaacaaaacaaaacaaaacaaaacaaaacaaaacaaaacaaacaaaaaatgttttctagtattggtaactttgaaatgatcaaagtgaatgattttaaaatattgaatttgttttcatctgatacaatattatacagtgttacaaatattaaataatcygcatgttgtaaacacttttgtgggatttttacatgtcacagagtacctgcaaacataaatttgcctttataaaattaaataacattttgaaaggctaatgcttatatgtacatttttttt

SEQ ID NO: 280212 - DNA, 601 bp, Homo sapiens
aacatattttggagataagttgagaaggactgagatttttcaaactacgggtcaagaataggattcaactcatgctatagaattattccctttaaaacattagtaaagcaatttaagagaaggtaggcagtgtctgggaagatagatgttatgcctatgcactcatatcataaattgtgactaaaagaaaaatattttgtgagctatttgaagaagtcttgagtagagggtggcagccactttgggctacaccttctaactgcagacacttttatggagctcattttacagctggtacaagtacaaaggtggggtttgtgaattcatatcctgactgctgtcctgaaatacacacacctgtggtattgcttacctccccaaccccacmcccacctgcacccctgccatatcattatgtgtctttggctgcacttgttttagcataaatcctagaaatcaaagatgggagtcatgacttagcattatagaataacatgtattactccaggttgtagcatcaaattgcatcagctgaattctactctcaccacctttaaattggaaactatgaacaacctattttttctaaacaaacttaaat

SEQ ID NO: 280213 - DNA, 536 bp, Homo sapiens
tttaacaatatgaattatactaacccatgatcttggatgtctttttattatttgtgccctcttcaatttctttcttcattgttttgtagtttttcttgtcaaggtctttcactttcttggttaaatttattcctagttattttttctttctttctttttccttttttttgaaatgggagaatacatttataaactatttatctgacaaagcactaatatccagaatataaaacaaactcagtgacttaagagaaacaaagaaacagatatccaattaaaaastgggtaagtaatctctatagataatataatggtgtttgtttttagttctccttttactacatgtcaatcttatatgtaatacaaatttaatagaaccatattgaacactggaactctgattaatataatcaagatgtgtccactaggttagacataattctcaaagaggatgcaatttgttttaactataacttaggaagaataacaaaatgatttgctgagattgactaaatctgtttcctgaactgagaact

SEQ ID NO: 280214 - DNA, 475 bp, Homo sapiens
tcgtttaggtcagaggagtttgttatcacccaccttctgaagcctacttctgtcaaactcattctccatccagtttggttcccttgctggcgaggagttgtgatccttttgaggagaagaggcattctggtttgtgtagttttcaggcttttttattggtttttcctcatcttcgtggatttatctagctttggtctttgttgttggtgaccttcagatggaatttctgcatggtcatcctttttgttgatgttgatgctattgctttttgtttgttaattttccttctgacaggcccttcttctgcaggtctgctggagtttgctgggkatccactccagaccctgttttcctgggtatcaccagcagagggtgcagaacagcaaagattgctgcctgctccttcccctggaagctttgtcccagaggggaacccgccagatgccagccagagctctcctacatgaggtgtcct

SEQ ID NO: 280215 - DNA, 1097 bp, Homo sapiens
aataacataaattttctacttactgcagcaagtaatacactggcttttaaagaaatggtccttgaagtgcaatacatggatctaccagggttaaggggattgcaaggtcaaaatcatttttataaaaattcaacgctccatttattttttcatattatgttgacattgcactgtttgtgcaaaacaatagctggtaaaactgttggggtcttagcactaataatggcagtggcaccacactgtattagtggtcattgtattttttactgccatgcatgttacttaatgtgataatattcggtatttatttttcctgatatttcttaatttctgtaaatttttagattagagttttatcttcttttcctcctccaaatctgctactttactgggaggcaaggtaaatggtttaaaattggaatagtaagagtctcattmtcagtaaaaattattgccctatatgttactcagtttcaaaattttgattattgcaactatwcctgctggctttacaaaaaccacctctggcaggaaataatttatttctgtaaaaatcagtctcttgagagtgagatctcactgctgcaagaacaacaccaaaccattcatgcggcttctgctcccataacttaaacacctttcactgagctccatctcccaacatttgcaatgttgggtgtattagtcttttctcacactgctataaagaactacctgaaactgggtaatttataaagaaaagaggtttacatgactcaaagtactgcacacttaatgggcagcatgacagggaggcctcagaaaacttttaaaccatcagatctcatgagagatcttgttattatgagaacccaagatccaatcacctcctaccaggcccctccccgatwagtgaggattacaatttgatatgagatttgggtgagaacacagagccagactatattattctccctctggcacctcccaaatctcctgttattctcaccttttgaaaccatacatgcttttccaacagtcccctcaaatcttaactcattccagcattaactcagaagtccaagtccaaagtctcacctgacacaatgcaagtccct

SEQ ID NO: 280216 - DNA, 602 bp, Homo sapiens
ttacaatttgatatgagatttgggtgagaacacagagccagactatattattctccctctggcacctcccaaatctcctgttattctcaccttttgaaaccatacatgcttttccaacagtcccctcaaatcttaactcattccagcattaactcagaagtccaagtccaaagtctcacctgacacaaygcaagtcccttcttcctgtgagcctataaatcaaaagcaagttacctacttcctagatacaacgggggtacaggcattagataatgctcccattacaaaagggataaaatacaatgggggtacaggcattagataaaagctcccattacaaagcagctgcatggatcatgcaagttcaaaacccagtggtgcagtccttaaatcttaatgctctgaaataatctcctttgactccatccctcacatacaggtcacactgatgcaagtggtgggctcccacagccttgggtagctctgcccctgtggctctgcagggtagagcctcattcccggctgctttcatgggctggcattgagtgcctgtggcttttccaggtgcatggtgcaatctatcagtggatctacaattctgg

SEQ ID NO: 280217 - DNA, 602 bp, Homo sapiens
ttacaatttgatatgagatttgggtgagaacacagagccagactatattattctccctctggcacctcccaaatctcctgttattctcaccttttgaaaccatacatgcttttccaacagtcccctcaaatcttaactcattccagcattaactcagaagtccaagtccaaagtctcacctgacacaatgcaagtcccttcttcctgtgagcctataaatcaaaagcaagttacctacttcctagatacaacgggggtacaggcattagataatgctcccattacaaaagggataaaatacaatgggggtacaggcattagataaaarctcccattacaaagcagctgcatggatcatgcaagttcaaaacccagtggtgcagtccttaaatcttaatgctctgaaataatctcctttgactccatccctcacatacaggtcacactgatgcaagtggtgggctcccacagccttgggtagctctgcccctgtggctctgcagggtagagcctcattcccggctgctttcatgggctggcattgagtgcctgtggcttttccaggtgcatggtgcaatctatcagtggatctacaattctgg

SEQ ID NO: 280218 - DNA, 602 bp, Homo sapiens
ttacaatttgatatgagatttgggtgagaacacagagccagactatattattctccctctggcacctcccaaatctcctgttattctcaccttttgaaaccatacatgcttttccaacagtcccctcaaatcttaactcattccagcattaactcagaagtccaagtccaaagtctcacctgacacaatgcaagtcccttcttcctgtgagcctataaatcaaaagcaagttacctacttcctagatacaacgggggtacaggcattagataatgctcccattacaaaagggataaaatacaatgggggtacaggcattagataaaagctcccattacaaagcagctgcatggatcatgcaagttcaaaacccagtggtgcagtcsttaaatcttaatgctctgaaataatctcctttgactccatccctcacatacaggtcacactgatgcaagtggtgggctcccacagccttgggtagctctgcccctgtggctctgcagggtagagcctcattcccggctgctttcatgggctggcattgagtgcctgtggcttttccaggtgcatggtgcaatctatcagtggatctacaattctgg

SEQ ID NO: 280219 - DNA, 582 bp, Homo sapiens
ataaaggagaaaaattatgaacccattagcatatkgtggtattcggcaaaatataatgtgtactcatgaaaaaaatcctcagtatactaaaaagaaaaaactttttcaatatgataaaagatatctgtataaacctactgctaacatcagatacacagctcatgttttgaacactctacctttccttctattagaaacaaagcaagtaggtctaccatcagtcactgatattagattcagattgtacaggaggccttaacaaattcaaccaggaaaggaaaaaagtaaaaaggcataacaatttaaaaagaaagggagaaatgtctgtcttacagccatattagaactagtatatttattattatctactagaagtaatatgtttagcagtggtacatgttataaaaactttagctgtttttagtaataccattttgaaatatttcatgactttatgttactttgaaaaaacacaacaatgtacactaaattaataaataataatcatttattaggctactaaaatctcaattttcattaaatatatgccctttgttgtatttaaaaaccaataatatttaa

SEQ ID NO: 280220 - DNA, 582 bp, Homo sapiens
ataaaggagaaaaattatgaacccattagcatattgtggtattcggcaaaatataatgtgtactcatgaaaaaaatcctcagtatactaaaaagaaaaaactttttcaatatgataaaagatatctgtataaacctactgctaacatcagatacacagctcatgttttgaacactctacctttccttctattagaaacaaagcaagtakgtctaccatcagtcactgatattagattcagattgtacaggaggccttaacaaattcaaccaggaaaggaaaaaagtaaaaaggcataacaatttaaaaagaaagggagaaatgtctgtcttacagccatattagaactagtatatttattattatctactagaagtaatatgtttagcagtggtacatgttataaaaactttagctgtttttagtaataccattttgaaatatttcatgactttatgttactttgaaaaaacacaacaatgtacactaaattaataaataataatcatttattaggctactaaaatctcaattttcattaaatatatgccctttgttgtatttaaaaaccaataatatttaa

SEQ ID NO: 280221 - DNA, 582 bp, Homo sapiens
ataaaggagaaaaattatgaacccattagcatattgtggtattcggcaaaatataatgtgtactcatgaaaaaaatcctcagtatactaaaaagaaaaaactttttcaatatgataaaagatatctgtataaacctactgctaacatcagatacacagctcatgttttgaacactctacctttccttctattagaaacaaagcaagtaggtctaccatcagtcrctgatattagattcagattgtacaggaggccttaacaaattcaaccaggaaaggaaaaaagtaaaaaggcataacaatttaaaaagaaagggagaaatgtctgtcttacagccatattagaactagtatatttattattatctactagaagtaatatgtttagcagtggtacatgttataaaaactttagctgtttttagtaataccattttgaaatatttcatgactttatgttactttgaaaaaacacaacaatgtacactaaattaataaataataatcatttattaggctactaaaatctcaattttcattaaatatatgccctttgttgtatttaaaaaccaataatatttaa

SEQ ID NO: 280222 - DNA, 555 bp, Homo sapiens
gagtgtgtggtgtggtgctgasaatgcaatgggagcagggtcctgtccccacgctaaagaagctcacagcttaatgcaaatgagaagccagtgaggacatcactactcctgctgtgcacttgggaactagaaacacaaacctgactctggagggaagctaaggaagcattctactcttgagttgacataagtgcatctgaagcttctgatctccgatgagaacaatgggggacaccaaacagaatataaaacccatgattgaatacatcaaattgctaacatggcagtaaacagacatgaggtgaagatggagaagaaggaaacccaggacgaaagtcagcctcgcatttggaacccatttccctgagtttcattgctgaattccagaaggaactactgagatgcaaagaagcacagcagcttttgcacacatgcgtgggattagatggaaaacaagtggattgagggtctgccaatgaaagcgacccgtactgaagtccactggctctggttgagacccagaagagtcatgcatcagaataaaggtggacagga

SEQ ID NO: 280223 - DNA, 555 bp, Homo sapiens
gagtgtgtggtgtggtgctgagaatgcaatgggagcagggtcctgtccccacgctaaagaagctcacagyttaatgcaaatgagaagccagtgaggacatcactactcctgctgtgcacttgggaactagaaacacaaacctgactctggagggaagctaaggaagcattctactcttgagttgacataagtgcatctgaagcttctgatctccgatgagaacaatgggggacaccaaacagaatataaaacccatgattgaatacatcaaattgctaacatggcagtaaacagacatgaggtgaagatggagaagaaggaaacccaggacgaaagtcagcctcgcatttggaacccatttccctgagtttcattgctgaattccagaaggaactactgagatgcaaagaagcacagcagcttttgcacacatgcgtgggattagatggaaaacaagtggattgagggtctgccaatgaaagcgacccgtactgaagtccactggctctggttgagacccagaagagtcatgcatcagaataaaggtggacagga

SEQ ID NO: 280224 - DNA, 555 bp, Homo sapiens
gagtgtgtggtgtggtgctgagaatgcaatgggagcagggtcctgtccccacgctaaagaagctcacagcttaatgcaaatgagaagccagtgaggacatcactactcctgctgtgcacttgggaactagaaacacaaacctgactctggagggaagctaaggaagcattctactcttgagttgacataagtgcatctgaagcttctgatctccgatgagaacaatgggggacaccaaacagaatataaaacccatgattgaatacatcaaattgctaacatggcagtaaacagacatgaggtgaagatggagaagaaggaaacccaggacgaaagtcagcctcgcatttggaacccatttccctgagtttcattgctgaattccagaaggaactactgagatgcaaagaagcacagcagcttttgcacacatgcgtgggrttagatggaaaacaagtggattgagggtctgccaatgaaagcgacccgtactgaagtccactggctctggttgagacccagaagagtcatgcatcagaataaaggtggacagga

SEQ ID NO: 280225 - DNA, 537 bp, Homo sapiens
  misc_feature (1)...(537): n = A,T,C or G
gtcgacagctcttccggccctctgccgacttccccaatgttgccatgctttccaactttgtggttgaaagcactgaagttttaagaaaaactggacaaattttgcttttgctagcttttcttactgctaactaccattaagcttaaaaagtatatagcacatgtaaacccacaatgtaagtaagatatgaaaagcacttacaactatataaatgataccatacayggagagcccttcaaataatgctaacacacaactagagctaataaggtgtaatagtatgaggtaatgttgcatgcttatatattacatggttttttatccacccaatgccgtggtattattatgcacatttacacattagcaacttgatcaagaccacactatatatgagtgaggaacagacccagtactgaccaaatacaagcttgttattctgaatcactaccctccttggaaaatctacctgatgaaagctcagttccagcttgaagcctagtggctctcccccaccctctntatatctggctgcttgag

SEQ ID NO: 280226 - DNA, 581 bp, Homo sapiens
tacctcaaagcagtatcaatactgaacagtggcatccatgtctagtttgcaaatcatttggccttcgtagccaaggatgacaaagtacttgacctggcacttgaatttatcatttaagctagtacttctagagatgagtaaatgaaaaatataccttagattgttgtaataattatcattaacatttttgaatacttcaatgtgccaggcacttgtttgaacactttatatcattatcttatttaatctttattctaactgtaggaagtagatactcttattttattccagtttataaattaagakattgaagtctagaaaaattaagggacatgcctaaaatcacacatctgctaaggtaaaagtggaatagaaactcagagtcagattccaaaagtagatctctgaacactaggttttggcctttggagaaggacaaccatttggtgcctgtggaagctagtccaggttaagaaatgcaaaaacatttagttaccctgttaaccaacattcgctctcactgcaaggcttgtgataactacacataattaaccgagctcctgttcaagccaaaagaaaag

SEQ ID NO: 280227 - DNA, 488 bp, Homo sapiens
tgtggttcaggacatgataggatagtgcccatcaagttacctcccactgaaaacaactataaaagatgtaaagtattacacagcaattgacacaagcaggtcatgaggtgctaggatccttgacatgagaaaagttyatgaggttggttccgcatttgcatgattttcctcagttccagaagatggtttttaaaaattatttctttgattgtttacttccctagtcatttgctctttctttctgttttcctagtatgaatgtcaaaatcctgcattgttcttccttcagtttcaacctttctcttgaaggtttcttactttcttttatattttggaaaatttcttttacttttcttgacaaatcttccactacattttttatttcagcttttacatttttactgacatctgtttaactctctaaatggccttttatcaaaggattctattctcttttatgtatttaacatcatactatatcaaataga

SEQ ID NO: 280228 - DNA, 606 bp, Homo sapiens
ggcaaggttgtggagataaaaaggaatgcttatacactgttgggagtgtaaattaattccaccattgtggaaaacagtatggtaatttaattagctaaaaacagagctaccatttgatttattagtggatatatatgcaaaggaatataaatcactgtatcataaagacacatgcatacatatgttccttgcagtactattcacaatagcaaagacatgaaatcaacctaaatgctcatcaatcgtagactggataaggaaaatgtggtacatatacaccatggaatactattcagccataaaaagaatgagatcatgtactttgcaggaacatggatgaagatagaagctattatccttagcaaaataatgcaggagcaaaaaaccaaatactgcatgttctcacttataaataggaactaaattatgagaacacatagatatataaagggaaacaacacaccctggggcttattggagggtgaaggctgggaggagaaagaggattaggaaaaataactaatgggtactaggtttaatagttgggtgacgaaataatctgtacagcaaaccmcccgtgacccaagtttacctgtgtaacaaacc

SEQ ID NO: 280229 - DNA, 395 bp, Homo sapiens
gcacattttttccctgatatatatctgtaactcagggtctgtaaagtccctggatatatatatatcyggatatatatatctggactggccttatgatttgattttgccaatagaatgctctgccagttttcactcttcaagaaaattagcttgtttttacattctctctctccctttctctttctctctcctgaccctgccatcacctccaaaacaagtttgggctagcctgctaaagagtaacagatcacttatagtagatgtgatgcttcccttcctgggactttctaaaccaatcaaccctagattacctgtcagctttttatagacacttgagtgaacccagacaagatcagccgagacaagttcagatcagcagaatcactcagctgatt

SEQ ID NO: 280230 - DNA, 506 bp, Homo sapiens
ttttagttggaggggtcatacgggaatttgacctatgactacattgctcacacctatttgaattagcagaattataactttcatgtatataagtagacacgtatcagaaaaaaagaaaaggtactggtattgtactgaaaaaaagaacaacaaaaaagcaaatactgaagcactgcttaaaacagtaattatggttaatgcaatggttaatacctcattaacsatttgtattgtattatacctagaagtgaattaaactctctgaaaatattcacttactaaattcaaggttacccacagaccattggatatatgcccaggtgctttttgagggcagtaggactctgaatatatgaaagggcaatctaatcatggtaaaataaaactctgcaggttataagaatttaaaatcaaagagaaacttatttagaactttcttcaaaatactatagtataaaacatttttcttttttgccagaatactggtattcttttctcaaataaaa

SEQ ID NO: 280231 - DNA, 596 bp, Homo sapiens
acagttcatttaggcttgaaaggaggctctggaaatggcactatcagttcttttctgtgttacatattcctagtttacaaataagctgacatttatattaatcagycctctagagcaactgtagctgaggaagggctaatacatcatccccaaattgctacccaagttctattccaaaatctttattgctgctgctgataaatggaataaagcaaaataaaaatttggaattttcagtgttctggtaactattgggaagacgatgttacgcaattgtagataaattttgaaatctgcatatatttaaatagttttgatgaaccaataatgatgacatgtcataaaatgcatatttatcgtgttttcccagaagattattttagatgaatatgaggttaataagccccctttttggccctggagtggcttcaggactcattgcccaagtctaagaatgtacaaaactatatagcaatgatcaaactacttactgatatttgggatgatattcattggcttacgtaggcatttttcacaaaggctttacatttcaattgtcttatacgaagtgaaatatcacagccaaaagataaaaa

SEQ ID NO: 280232 - DNA, 596 bp, Homo sapiens
acagttcatttaggcttgaaaggaggctctggaaatggcactatcagttcttttctgtgttacatattcctagtttacaaataagctgacatttatattaatcagccctctagagcaactgtagctgaggaagggctaatacatcatccccaaattgctacccaagttctattccaaaatctttattgctgctgctgataaatggaataaagcaaaataaaaatttggaattttcagtgttctgrtaactattgggaagacgatgttacgcaattgtagataaattttgaaatctgcatatatttaaatagttttgatgaaccaataatgatgacatgtcataaaatgcatatttatcgtgttttcccagaagattattttagatgaatatgaggttaataagccccctttttggccctggagtggcttcaggactcattgcccaagtctaagaatgtacaaaactatatagcaatgatcaaactacttactgatatttgggatgatattcattggcttacgtaggcatttttcacaaaggctttacatttcaattgtcttatacgaagtgaaatatcacagccaaaagataaaaa

SEQ ID NO: 280233 - DNA, 596 bp, Homo sapiens
acagttcatttaggcttgaaaggaggctctggaaatggcactatcagttcttttctgtgttacatattcctagtttacaaataagctgacatttatattaatcagccctctagagcaactgtagctgaggaagggctaatacatcatccccaaattgctacccaagttctattccaaaatctttattgctgctgctgataaatggaataaagcaaaataaaaatttggaattttcagtgttctggtaactattgggaagacgatgttacgcaattgtagataaattttgaaatctgcatatatttaaatagttttgatgaaccaataatgatgacatgtcataaaatgcatatttatygtgttttcccagaagattattttagatgaatatgaggttaataagccccctttttggccctggagtggcttcaggactcattgcccaagtctaagaatgtacaaaactatatagcaatgatcaaactacttactgatatttgggatgatattcattggcttacgtaggcatttttcacaaaggctttacatttcaattgtcttatacgaagtgaaatatcacagccaaaagataaaaa

SEQ ID NO: 280234 - DNA, 588 bp, Homo sapiens
  misc_feature (1)...(588): n = A,T,C or G
cttaggctacatttttttgtgtgtgatcatgagcccataaaactctttctaatcagacaaaatcattgtctcttctccacctcagtcctttgatctttgtggcagcatctaattcacgctcatttgctttggatatttcatcctcagccagctgtgacacctgagtaatttcacatacaaaacacatttctgaaatattcatatttatcaattntactaaagtattttacaattttaaagtacatttaaacagacctctaaatcaatttaaaagaaaagaagtttaatacagkcaataaaaagtgtctgctcaacgtacatttgtaacgtgcataagtaaaatacagttacaaagtaaataccttggctcttttctgttagcaaagtgaaatatgttctaatatttaagttttacggatggacactaatgagaaaaaaaattgttttaaatatataaatttatggggcacaagtgcaatttcattacacgcatagattgtgtaatggtcaagtcagggcttttaggatgtccatcacctgaatgatgtactttgtacccattaagtaatttctcatcctccaccccct

SEQ ID NO: 280235 - DNA, 536 bp, Homo sapiens
tcttagatcaaaggaccaaaagactaggaaagggccaggttagctagccaatcatcactgctagattctctgyacaagagactgccagttagcctccaacatttgataaaagcctcgaattttaactgagcacatgagttcctagaataagagcctctcccaccttctcttgtagctcagagtggccacttgactattcttacagagagatataaatataaatgtatatatgcaagtccaaaaaaagccataccatttttggcttcagtttttattcttggctttcttctactctatttctctttctactgtctcaaaatcagatgtggtggctggagaaaccatcatggattacatggtgggtcttcagaaagaaaattgcttttagcaggaaaaccagacagtaggaatctgggttgctgacacagtacggaggattatatcagcatttgactgtttgcctgggttttattagagagaaataaactccacattgttgtagtgggttgaactgtggcctcaaaaatatgtttcca

SEQ ID NO: 280236 - DNA, 595 bp, Homo sapiens
aagctagagagttaaggagaagctcttcaccatttcttcaatgaactcatgctttggctctcccccatgcatatagaaagcagctcacataaagagtgagtgcatgatgtgatctcatcctgtagttggacattactttgttggctcccacacttaaagcaatttgaatttctcagcagccatacatcaccagttttgacagaatttgcaggtttgttctttactcccagcctaatggatgaaatgaaacttggtgagctcccagagttggacaaccttcagaatgctgagacatactaaatgaaggaagaaagtccttttgtgagttctccaaaactcagacctcccagtgactacagcaaggtcctgttgtttcagtgaaaagctgttcaacttggtgaaccagtaagtgatctctacagttacaaaaacttctgagattccagaatcctttgctcatcccttttgtttytccaggcaaagaaaatggcattttaataatggcaccttcactagtaaaatgacttgcacatgcaaagtagattctcagtgaatatttgttcattcctgattatcactaagagaacagacacat

SEQ ID NO: 280237 - DNA, 453 bp, Homo sapiens
tgctatatattcacataaatgcatattctatgtgttcattatttagtctttcycttaaagtcctccttgggtggggtaggaaagcaaaaaccttgaaaacagcaggagcctacttctacatacggtgctttaagaaactgatgtgtcttaaaaccaaagcaaatcccattaacagaataaaaccctagtatacacttacagtgctgagtagatgaaatttaatggaatcctgtaagtagctaccttgaaattgccatcttgttccaagaaggtttctagattattttagtatttttatgtaaatttataataacttgaattctaaaagctgttttatcaaggatttttccactgtgtagagttagcttattaggtttattccatttttctctttcttgtaaagctttaacacatatttagttatgacctaataaagaccttgtacaacaaaac

SEQ ID NO: 280238 - DNA, 601 bp, Homo sapiens
ttgggtgtgcccttcctcttttctgaatattttggggcctgcattgcctatcaaatagttgaaaagatggaattgttcatatgttrctcagttttcaccgaagagttgaaactatcaaaaatctgagaaactcatcttgttcttacaaaattggcttatttcaggaagagctgagaactttcagaaaaggacacattcaaaaaatggtatgtcacaagtgaaatatattgacagtccatagcttatccttgggccttcccctccctggattcaaattaagtcaaatcttttcaataatattctcactgtggtcctagatctgcctcttgggtaacaagtaaataggtaacaaatcaaatctctttttccttctctttggcaccctttaagacataaaggggctatagggacactttggcaaaatttaccaagattctgtataaacataaaaaagaaggctagaatatcgccataaaaatggaatgtcttggtttgcatagtttccagaaataaaactaattctaaatatagtgtattctaaatcagaataatagctttgaggttatttgaagactgaaacatggaggagccatgataccac

SEQ ID NO: 280239 - DNA, 578 bp, Homo sapiens
gacttgaatccatatggcattgtaacagcaatcattgtggtttcactctccagccaattctgatcttagcagggaaggagtgtttcttttgttgggtgtgcccttcctcttttctgaatattttggggcctgcattgcctatcaaatagttgaaaagatggaattgttcatatgttactcagttttcaccgaagagttgaaactatcaaaaatctgagaaactcatcttgttcttacaaaattggcttatttcaggaagagctgagaactttcagaaaaggacacattcaaaaaatggtatgtcacaagtgaaatatattgacaktccatagcttatccttgggccttcccctccctggattcaaattaagtcaaatcttttcaataatattctcactgtggtcctagatctgcctcttgggtaacaagtaaataggtaacaaatcaaatctctttttccttctctttggcaccctttaagacataaaggggctatagggacactttggcaaaatttaccaagattctgtataaacataaaaaagaaggctagaatatcgccataaaaatggaatgtc

SEQ ID NO: 280240 - DNA, 370 bp, Homo sapiens
gcaaacttttaaaaaattaattctaaaaatttggggaagaaatagaagtagttaagaagcagcaggaaaacaatagagtgaactgtgggatagagtttgtgccaatgtcagcacatacatttttgtacatgataatttgaaaaatagtttatagttcttcaacctaacaactgagaccccacacactgcaaaataatcacgctactgaagcaaacaaacaaaaactgctactgaaaaataatcaccttttacaaaacagtggcccaayattaacagaaactgaggtcaatttaagcacacaatattttcacagccccttcaaaaccaagcaaacttatcctcttttttaaatagtaaagttgaaagtgaa

SEQ ID NO: 280241 - DNA, 526 bp, Homo sapiens
taaatgtacatttcatgtggtctctggcatttttgagcttttaacttcaaaaaaataggtggactggtaattgagaagrggggaatacaatgtaatttttttaaaagagcattttttaatattctgggtattgcaaagatctaactctctagaaattatattttccatgacattgtaagttctttgaaggcatagatatttgttttatttgctgatgtattccatgcatctagagcagcaagtcctggctaaaagatgctcagaaattgcccatggaatgaatgactaataatcacttagatcagaatgcaactatatattgtgtgcatattaccaatagttaactactaagggagaaaaacaattcttgctttatttatctctctgttctttgagattttcctgctattacacttgaagattaaccaaaatataaagtactgcctcatgggtgtgatcacactgccttccagctcctttgatggtctcacctgcggcccgcccttgtcatcagcctgggacttaa

SEQ ID NO: 280242 - DNA, 566 bp, Homo sapiens
ccataaccctttgcttacatctttaaccatcagcaacaaacaggaggcgctcatgtctcttcaggatcagaaaggaaaaagcagaaggtaactaggcatttctttatgacttttaagaaaagtctgaatttgtgtcattttgtgatatggttgtacaacacaaaactattattcaactgaatgacagaaatatcagcaaaatttgtctttttcaatcaartatcactgaagttaaaaaaaatcaagttacctaagtatcacataaacacagtttaggactctaagatggaatataacctctgcctgatgccaagaaattacagagttgagcagcgtcatgcctcttacccagcctaatttttggaagtttcccaggtttgactccattttattgctggtttcacttctatagataattcagtaatcctttatttgttctgtgatcttgttttatttttgcaaaagcactgcagtttccctttaaaatgatttttgtgatgttgtgcaccaaaatcatcttaacacatacacataatattctgggatacataaaaatgatgatgaca

SEQ ID NO: 280243 - DNA, 604 bp, Homo sapiens
acttggaactaatcagtaaatagtcattgtgtcctttcagtggcatgtcaatcagtactttgtaatataatggtgtggatacaccatgtttyggggatctatatctctggtgcaattggaccaggtatctttggtatgatttcttttttcccaacattaagaggttagttgacttatgctgaccaaaggagagggtaagccagataaaaacatcccaaatttgtgttataccatcttgacattgagttatcttatttctcaactggggaagcatcagtgttaaagctaataaactatatcttctactgagaaactcttcccatgcactttattctgtattatttataggcctgtgatgtacattatctttagccatactagtgttaagcaccaatgactttttgagaaacacaaatatatttctgatattctatccaatctcatccttggaaaggagatacctaccatagaaggccagaattactggacaggggcatgaggctgcagacccaccaagcatccttttgtaatctactagtatagtcttgaacccactacaaaagaggtttgctttatggaaaacagctagtgatggtagtaccaa

SEQ ID NO: 280244 - DNA, 557 bp, Homo sapiens
ttttgtctcttttacttactgttgttacctcagccttcaacgtatgtctggcatttagaatgcacttgatcattatttgctgaatgaatgaattacatcttctccastatactttttacttccctattatacgttccatgcagagctcttagaagtgaagttgatagttgtaaaaaccacttccatgcaaatacatttttcataaactctgctaccttattgggtacataaaaccccaaggttgtacagaattcaaatctaggactgtctggcttcagagtcatatattggatgaattcgacccattcagttagttttctctgaaaagaaaactaaagaaatttttgtgacaataacaaaacaatgactttttcttaaaaaagtaggaaagataaaaaagaaggaaaatggaatcagtattataggaaaaactctatagagtttacacagcagtgagcttcctgatgtattttttcatatatctacatttatatctttatccacactgttatgtctatgttataatactcaagagaaatatggtggaaagaattcac

SEQ ID NO: 280245 - DNA, 1055 bp, Homo sapiens
tttcactgagctccagctgacaaccatcatcaaatcaccagccatgtgactgtgccatgatgggagggaatcacccagtgtccaaatgatctgatgccacatgtaaaagagaagagccttcccctttgagccctgcccagattgctactctgcaccaagtaagtggtggctgttatcttaagccactagcatttaagattttattttttkgggtgcagggtgggagttggtgtgacatagcaattgatgaccaggatagaaccaaaaagggattatttacttagccagagttacttaagagagttctgctgttcctttggccaagaaattgaacatttttattagtactacattttgtattatgtgagttctccatgatatgttacctccttaataaactatgtgtagagcattttcacttcattgtgwtgggcccacaatagacttctaagaatgggawaatttatcatttggggaaaaggtaaacttataataaaaaatgcctcatctcatgcagtactttccacgcagacataaatgtaatatttatgtctcagagaaatcagggccacaaaaataaagtgagtagagagtattgttgagactcaaaaatgcagtttttccaactttaattctccatctttcatggcagctttggtctttatgcttatgagtcatagtaagaaaattttgaaacaaagctgacaagatttatgaaaatttcattccattagtttttggaagaaagtaggcattcgtttctctcatatgtcagtgtctcaactgtgttgagcactacagcaaaaacgttgatctggtttacagagaggtaaataatcctgttacatttgtcctaggtaactttaaaaagcaactataattctgaattttagagtcaaacagaactggctgtagctcttattcctggtgtagacttgaaccatttacttaaactaattaagcctcaatttctctctctgaaaaatcaaaatgatattcatgcctgcctcttagggatactataagaattgcatgaggaaatgaaacataaagca

SEQ ID NO: 280246 - DNA, 623 bp, Homo sapiens
tgggcccacaatagacttctaagaatgggataatttatcatttkgggaaaaggtaaacttataataaaaaatgcctcatctcatgcagtactttccacgcagacataaatgtaatatttatgtctcagagaaatcagggccacaaaaataaagtgagtagagagtattgttgagactcaaaaatgcagtttttccaactttaattctccatctttcatggcagctttggtctttatgcttatgagtcatagtaagaaaattttgaaacaaagctgacaagatttatgaaaatttcattccattagtttttggaagaaagtaggcattcgtttctctcatatgtcagtgtctcaactgtgttgagcactacagcaaaaacgttgatctggtttacagagaggtaaataatcctgttacatttgtcctaggtaactttaaaaagcaactataattctgaattttagagtcaaacagaactggctgtagctcttattcctggtgtagacttgaaccatttacttaaactaattaagcctcaatttctctctctgaaaaatcaaaatgatattcatgcctgcctcttagggatactataagaattgcatgaggaaatgaaacataaa

SEQ ID NO: 280247 - DNA, 626 bp, Homo sapiens
tgggcccacaatagacttctaagaatgggataatttatcatttggggaaaargtaaacttataataaaaaatgcctcatctcatgcagtactttccacgcagacataaatgtaatatttatgtctcagagaaatcagggccacaaaaataaagtgagtagagagtattgttgagactcaaaaatgcagtttttccaactttaattctccatctttcatggcagctttggtctttatgcttatgagtcatagtaagaaaattttgaaacaaagctgacaagatttatgaaaatttcattccattagtttttggaagaaagtaggcattcgtttctctcatatgtcagtgtctcaactgtgttgagcactacagcaaaaacgttgatctggtttacagagaggtaaataatcctgttacatttgtcctaggtaactttaaaaagcaactataattctgaattttagagtcaaacagaactggctgtagctcttattcctggtgtagacttgaaccatttacttaaactaattaagcctcaatttctctctctgaaaaatcaaaatgatattcatgcctgcctcttagggatactataagaattgcatgaggaaatgaaacataaagca

SEQ ID NO: 280248 - DNA, 523 bp, Homo sapiens
tttggatattccaagcaggcctcagtagtctgtgcaagtgctaatgtatgaatcaaaagggtgcctgctgactgtcacctacatgctattgactttagagtcaatattcatagaaagcaaatggaaataaaggtactggacaaagtaaactctaataaccttcctcaggccattatccaaagtgaaaggacttagaaacaaagtcaaataccacatgttctcatttataattgggagctaaacaatgggaacatatgagcatagagagtggaagagtagaccctggagactccaaaagatagtagggcggcaggggacagggaggtgtgtgtggggggtgggtggtgatagctgcaaaatcacctaytgggtacaatgttcactatctgggtacactaaaagcccagagtttccactatgctatatatgcatgtcagatatctgcacttgtacctcctaaacatacaaaaattttttaaaattaaaaaagtaataatcatcttcagggcaaatgtgaacttgg

SEQ ID NO: 280249 - DNA, 523 bp, Homo sapiens
tttggatattccaagcaggcctcagtagtctgtgcaagtgctaatgtatgaatcaaaagggtgcctgctgactgtcacctacatgctattgactttagagtcaatattcatagaaagcaaatggaaataaaggtactggacaaagtaaactctaataaccttcctcaggccattatccaaagtgaaaggacttagaaacaaagtcaaataccacatgttctcatttataattgggagctaaacaatgggaacatatgagcatagagagtggaagagtagaccctggagactccaaaagatagtagggcggcaggggacagggaggtgtgtgtggggggtgggtggtgatagctgcaaaatcacctattgggtacaatgttcactatctgggtacaytaaaagcccagagtttccactatgctatatatgcatgtcagatatctgcacttgtacctcctaaacatacaaaaattttttaaaattaaaaaagtaataatcatcttcagggcaaatgtgaacttgg

SEQ ID NO: 280250 - DNA, 523 bp, Homo sapiens
tttggatattccaagcaggcctcagtagtctgtgcaagtgctaatgtatgaatcaaaagggtgcctgctgactgtcacctacatgctattgactttagagtcaatattcatagaaagcaaatggaaataaaggtactggacaaagtaaactctaataaccttcctcaggccattatccaaagtgaaaggacttagaaacaaagtcaaataccacatgttctcatttataattgggagctaaacaatgggaacatatgagcatagagagtggaagagtagaccctggagactccaaaagatagtagggcggcaggggacagggaggtgtgtgtggggggtgggtggtgatagctgcaaaatcacctattgggtacaatgttcactatctgggtacactaaaagcccagagtttccactatgctatatatgcatgtcagatatctgcacttgtacctcytaaacatacaaaaattttttaaaattaaaaaagtaataatcatcttcagggcaaatgtgaacttgg

SEQ ID NO: 280251 - DNA, 606 bp, Homo sapiens
gttcaatgacttatgatacatccttatgatagaatgttatgaatgttatgaagagggaagcccatgttccccagtccccatgttctcactgtcactttccatcactttcacacttggccttgtaagagagcctttgccctcctcactacctstactcctcaaggtcagaggagttactaaactcattggtacgagtctgatcttcatcagctcacatttttcagtagtgtggaattcctttacctcacaagtggtgacacagtttcagcctttcagcctctatttcattctctctcctttccttgggtcatgctctttggagaactgaaagaaagttagtgagattcttccctgggtcttttctgcatgtaaatgcacacctagctcaggatccatggattacctgcttgctgttcagaatatagatcttaaaaacctgataaggcaatttctctatatataatttttcatttttcaaattgtagttatttgtggatctctattttccaagtaacttaagaaactttactgagttcctcaaatgtctaaatagatattaactaaccttgcattaaatttatagaagaacataggtagcatcatctg

SEQ ID NO: 280252 - DNA, 569 bp, Homo sapiens
ttatgcctagcctcacacaatcctagcacatagaaggcaggtagaatgttctatcctcttgtttttttttttcctttgagaatatgagggctcacttaccatctcatagatggttaatagcagarattaaatttaaaaatgagtgttctgacttttggcctgaatttgttacctttcataccttgttgcttataattaaagataatttgtcaaatattcacacataattttgctttaatttactcattttctaatcaaacaagaaagtatggtagctgaagaataataatccagtactaagcattatgggaataacagattagggaaatttctttccttccaaatgaatttaagaaaatttaaggaaatcagaaaaattactactatcttgccaaaagtcatggaaaataacatgtagcatctgccacaaagtcccacagaaaacaaaaatataggatgtgaaatgtgaagtaaagagggtcaaactatgtagataataacaaatttgacctttccttcttaatatctaagtcactctctagtgagttagttatttgatcgtattaccc

SEQ ID NO: 280253 - DNA, 546 bp, Homo sapiens
cacaaacacacacacacatacacatttctttgtatttagtttagagtttgccataatactgatagattcatttatgcctttttctaccataaatatatggtacatataatacattatatatatatatataatatgcgcatattatatatgttcaatatacttatttagacagcttattatttaaaccagtaatattaatgagcacatatattgtcctctacagtatttctaacaatcctttcagaacatgcattaagtaataatctttggatatgttaaatgtgctttatacagaaattctccaaaataattagcatggggctactcctaagcctagggaaaccaaaacctagactttagaattgaggcgcagaacacrtttaacaaagtagattgcttgcccttagcagagtaccatctgtggttcctatgatagatgggtgggttgcactagaggctgaaggccagcatgtgctgtcagggaaaggccatgataactcagggttttactctgcttcttgctggtatttaggtgaaaggtatcaa

SEQ ID NO: 280254 - DNA, 596 bp, Homo sapiens
tggggatgaacaaaattaatgagagagagaaagaaacttgctctcaaatagcctacattctggttgcaaggatagccaacacacaaagtaatttaaaataaaggataaagttaagcatcaagtaggaataccaaatgtgaaagacttttaacattagtgatggttctttttttaaaaagccagtttttgaagtataattgacaatgaatgctgtacatatttaatgtatacaacttgatgaatttggagataaatatacacttgtgaaaccatcaccatcaatcaatgcaataaacatgtccatcacctcccaaagtttcctcctgccctcctaattaattaatgtgtgtgtttgcaaataagaccatcagggaggccaatatggccggaagaatcagaaaggtaatggagtgaaggaaaaatcacataagatgttaggactatgacttttactgtgacacgaggaatgactggacagttttgaaaagaagagtgacacgatttaacttacstgtaaacattactgatgattgtgaagagagtagactgcagggggtgtggtcggtgggagggaagggtggaagcatggagatcag

SEQ ID NO: 280255 - DNA, 549 bp, Homo sapiens
ccatgaactcaggtgggaaagcatgtttgggggccggtgtctggacatatttaacatattcagtttgagctgcttcttccacatccaagtgaagaattcaagtcaggagctggatataggaatttaaattttggggaagggtcatgctggtaatatgaatttgggaatcatcartatatagatgatcgctaaagacctgggtctgggtgagagtaggggatgaatgtaaataggaaagaccataaaagagaagaggctcaagttcaaggccccataagatatgggggagataaggaaggactagtgagaaccctgagaaaatccaggaaggtaggaaaaatgcccggcaatgattcctccttgtgcttttccatcccctgatatggaggggttgtacatgttagcagtgacagtctagtcctggaaaatacagtggggatgatgttgtttagttcaaatgtgtttaaagatgctgagaagtataccatatgcagtccactgatatttttcttcgatttgaattaagacttcctggctacagaacactaa

SEQ ID NO: 280256 - DNA, 424 bp, Homo sapiens
ggggactttgatcaggagtgctgctgtggtccatgcactgtaggggcaacttcagctttaatgcagttatgtttccatatctttatcgacrgtaaagtaaattgtattatgttatctatttccattggcttctgtcaatcacgttgccatctatcttgtgatgaagctacagttttcttccttttaggcaaacaaagatagggcagcatggatgtttttggcatctttacaaaaccaaaatcagctgcagccagtgataatggttagccattctccctgccatgtctaggaagatatcctaacctaaagccttctacatggtacacttgttcttaaactctatccctggtaaatcctggacataagttcatgtaatgcatggcagaaaagattctattttaacttgacattgtgtaatcttttc

SEQ ID NO: 280257 - DNA, 549 bp, Homo sapiens
ccatgaactcaggtgggaaagcatgtttgggggccggtgtctggacatatttaacatattcagtttgagctgcttcttccacatccaagtgaagaattcaagtcaggagctggatataggaatttaaattttggggaagggtcatgctggtaatatgaatttgggaatcatcaatatatagatgatcgctaaagacctgggtctgggtgagagtaggggatgaatgtaaataggaaagaccataaaagagaagaggctcaagttcaaggccccataagatatgggggagataaggaaggactagtgagaaccctgagaaaatccaggaaggtaggaaaaatgcccggcaatgattcctccttgtgcttttccatcccctgatatggaggggytgtacatgttagcagtgacagtctagtcctggaaaatacagtggggatgatgttgtttagttcaaatgtgtttaaagatgctgagaagtataccatatgcagtccactgatatttttcttcgatttgaattaagacttcctggctacagaacactaa

SEQ ID NO: 280258 - DNA, 549 bp, Homo sapiens
ccatgaactcaggtgggaaagcatgtttgggggccggtgtctggacatatttaacatattcagtttgagctgcttcttccacatccaagtgaagaattcaagtcaggagctggatataggaatttaaattttggggaagggtcatgctggtaatatgaatttgggaatcatcaatatatagatgatcgctaaagacctgggtctgggtgagagtaggggatgaatgtaaataggaaagaccataaaagagaagaggctcaagttcaaggccccataagatatgggggagataaggaaggactagtgagaaccctgagaaaatccaggaaggtaggaaaaatgcccggcaatgattcctccttgtgcttttccatcccctgatatggaggggttgtacatgttagcagtgacagtctagtcctggaaaatayagtggggatgatgttgtttagttcaaatgtgtttaaagatgctgagaagtataccatatgcagtccactgatatttttcttcgatttgaattaagacttcctggctacagaacactaa

SEQ ID NO: 280259 - DNA, 1091 bp, Homo sapiens
ccatgaactcaggtgggaaagcatgtttgggggccggtgtctggacatatttaacatattcagtttgagctgcttcttccacatccaagtgaagaattcaagtcaggagctggatataggaatttaaattttggggaagggtcatgctggtaatatgaatttgggaatcatcaatatatagatgatcgctaaagacctgggtctgggtgagagtaggggatgaatgtaaataggaaagaccataaaagagaagaggctcaagttcaaggccccataagatatgggggagataaggaaggactagtgagaaccctgagaaaatccaggaaggtaggaaaaatgcccggcaatgattcctccttgtgcttttccatcccctgatatggaggggttgtacatgttagcagtgacagtctagtcctggaaaatacagtggggatgatgttgtttagytcaaatgtgtttaaagatgctgagaagtataccatatgcagtccactgatatttttcttcgatttgaattaagacttcctggctacagaacactaawactagtgcacctagaattctacctagaaacacattcttcagcactaaacatgctgacagcacagtgtgaacatgaccttaatcacaaaggacagcaggctaagctacccacattgcaggataggaaataagaataagaaccgtctctgatcccctgccacctagtttgagattatccatagaaactataaaagtgaagagaggagagaaatcacatactgcattagttttggataatggccagacaactccttaagtatatatatatacttccctttcccaataagaccacctattttccatttttcttaacacatgactaagctaacwatatatatatatatatatatatatatacacacacacacacacacacatatgtgtgtatatatatatttgtgtgtgtgtatacatatgtacatatatattcattcaatccctggtaagacaaaaagattcttatttctcaggaataacatggaaatttctattgtttatattcccgttttcttagcccagcagtctaacagctacatggccat

SEQ ID NO: 280260 - DNA, 541 bp, Homo sapiens
actagtgcacctagaattctacctagaaacacattcttcagcactaaacatgctgacagcacagtgtgaacatgaccttaatcacaaaggacagcaggctaagctacccacattgcaggataggaaataagaataagaaccgtctctgatcccctgccacctagtttgagattatccatagaaactataaaagtgaagagaggagagaaatcacatactgcattagttttggataatggccagacaactccttaagtatatatatatacttccctttcccaataagaccacctattttccatttttcttaacacatgactaagctaacaatatatatatatatatatatatatatayacacacacacacacacacatatgtgtgtatatatatatttgtgtgtgtgtatacatatgtacatatatattcattcaatccctggtaagacaaaaagattcttatttctcaggaataacatggaaatttctattgtttatattcccgttttcttagcccagcagtctaacagctacatggccat

SEQ ID NO: 280261 - DNA, 553 bp, Homo sapiens
gaatattcatagcttctcctacaggctgttggatacctatgtttaggcaactggttcagcataaagctcctccctcaacccctcctcctttgaagtacctgtctctggtctttgccagaggctactcttctgagcctgcaggatggccaccttgcagcctataactctttataagaaataaaatcctttctccaaatttataagttgtgtgatttgttttcagttaacatggtaatacttcacaatttactcttctattctaatactgatgcattgttttggatttgtggctgtcactaayagtctgattacattcatttttttgtacatcctggtgtatgtatgtttacatttctactggtatatacctgttagttcaataattttattttggctgggcatgatggctcatgcctgtaatcccagaactttgggaggccaaggcaggtggatcacttgaggtcaggagttcaagaccagcctggccaacatggcgaaaccctgtctctactgaaaatacaaaaattagctgggtgaggtggtgtgcgcctgt

SEQ ID NO: 280262 - DNA, 553 bp, Homo sapiens
gaatattcatagcttctcctacaggctgttggatacctatgtttaggcaactggttcagcataaagctcctccctcaacccctcctcctttgaagtacctgtctctggtctttgccagaggctactcttctgagcctgcaggatggccaccttgcagcctataactctttataagaaataaaatcctttctccaaatttataagttgtgtgatttgttttcagttaacatggtaatacttcacaatttactcttctattctaatactgatgcattgttttggatttgtggctgtcactaatagtctgattacattcatttttttgtacatcctggtgtatgtatgtttacatttctactggtatatacctgttagttcaataattttattttggctgggcatgrtggctcatgcctgtaatcccagaactttgggaggccaaggcaggtggatcacttgaggtcaggagttcaagaccagcctggccaacatggcgaaaccctgtctctactgaaaatacaaaaattagctgggtgaggtggtgtgcgcctgt

SEQ ID NO: 280263 - DNA, 489 bp, Homo sapiens
ggaatagcactcatcagaatcgtgcaccaccagctgtgctgtgtttccatgtctggtctccagggttccgttctgattgtrgttgaccctactggttgtagtgcaagtgctctccacatgaattatgaatggtttgccttgtccatttatcatctagactctgcaggccacctatgcctgtcagaagcaggcaggttactacttgtaaaaggctgtaaaaaataacttactacatcaaagaaaagatgacattctctgcgtgtattttgtgtcgtccagctctgggttttccacttgccctcattcaagtccatgcagcttttctttctttctagccagtgaggaggttttgcagtgggaaatctgacgaacatgaaatgtgctgcatggaaaaagtcagaagtcttgagtctgagttctacttgaggatgtgagcacatttatgcaatctggacctgcatattcatctaatgaattcagtttagaaat

SEQ ID NO: 280264 - DNA, 489 bp, Homo sapiens
ggaatagcactcatcagaatcgtgcaccaccagctgtgctgtgtttccatgtctggtctccagggttccgttctgattgtggttraccctactggttgtagtgcaagtgctctccacatgaattatgaatggtttgccttgtccatttatcatctagactctgcaggccacctatgcctgtcagaagcaggcaggttactacttgtaaaaggctgtaaaaaataacttactacatcaaagaaaagatgacattctctgcgtgtattttgtgtcgtccagctctgggttttccacttgccctcattcaagtccatgcagcttttctttctttctagccagtgaggaggttttgcagtgggaaatctgacgaacatgaaatgtgctgcatggaaaaagtcagaagtcttgagtctgagttctacttgaggatgtgagcacatttatgcaatctggacctgcatattcatctaatgaattcagtttagaaat

SEQ ID NO: 280265 - DNA, 489 bp, Homo sapiens
ggaatagcactcatcagaatcgtgcaccaccagctgtgctgtgtttccatgtctggtctccagggttccgttctgattgtggttgaccctactggttgtagtgcaagtgctctccacatgaattatgaatggtttgccttgtccatttatcatctagactctgcaggccacctatgcctgtcagaagyaggcaggttactacttgtaaaaggctgtaaaaaataacttactacatcaaagaaaagatgacattctctgcgtgtattttgtgtcgtccagctctgggttttccacttgccctcattcaagtccatgcagcttttctttctttctagccagtgaggaggttttgcagtgggaaatctgacgaacatgaaatgtgctgcatggaaaaagtcagaagtcttgagtctgagttctacttgaggatgtgagcacatttatgcaatctggacctgcatattcatctaatgaattcagtttagaaat

SEQ ID NO: 280266 - DNA, 489 bp, Homo sapiens
ggaatagcactcatcagaatcgtgcaccaccagctgtgctgtgtttccatgtctggtctccagggttccgttctgattgtggttgaccctactggttgtagtgcaagtgctctccacatgaattatgaatggtttgccttgtccatttatcatctagactctgcaggccacctatgcctgtcagaagcaggcaggttactacttgtaaaaggctgtaaaaaataacttactacatcaaagaaaagatgacattctctgcgtgtattttgtgtcrtccagctctgggttttccacttgccctcattcaagtccatgcagcttttctttctttctagccagtgaggaggttttgcagtgggaaatctgacgaacatgaaatgtgctgcatggaaaaagtcagaagtcttgagtctgagttctacttgaggatgtgagcacatttatgcaatctggacctgcatattcatctaatgaattcagtttagaaat

SEQ ID NO: 280267 - DNA, 605 bp, Homo sapiens
gattttagaggtgtcagagttttcccaggggtctaagttcaggagaagtaagccatcctttcctgatggtgttgttgtctaataaattatggagcaatattttaatcagttgcttcgacagtcctagcaacatgagtgcaatatcaaccacattgatcagtctgtgatcagtctgtaaaactaacctgtagtcacctcagccattaatcatgtgaaaaagtttgtttaattttcccttctactttgtactaaaaaatgacatctttagattccattacaataaagaaaagatggattatgcttttctgtacttctaaataaagatgaatgcagctaatattattgaccacttaaaattgtgatagtaacatacatatatatatgtatgtatatatatacatctcctcatttaattcttatgacaatcttatgaaggtratatccttattatttatagtgagaaaagttaacgttcaagcctttaaaaattcccaggattatgacaagtaagaggcaaaaccaaatttgaaccctcatcattttgaccttaaagtccatacaactacctaaatactctgctattttaattgagttcatgttattac

SEQ ID NO: 280268 - DNA, 1143 bp, Homo sapiens
gttcaaatagaacatgtaatggtgctgagaattttgggggaagtcatgggatgaaaatattgaagcaacttcatgccaattgttttgttttctttatattcatgaccaaatttttgtttcttcttggagtracagaccacaaaataaagcttcacagtttcaaaaaaatcatttatagccctgaaaagtttcccaatctagacccagatactttagctggacactacaaacaacatgaatttagagagaacatctttcagctatttcctacagcttttgtttagtcatatttttacttgactctaacatttttccaatccagatgctatttggcatttttgtaacctttgatccattaaatgaattatagtctcaaactaatctagattccaacactccaaacaaaatggtttcttgactttcctggttcatgaatgtaaagaaaaaaataaataattaaataattaagtttaacaacagcaaaaatacacaaagtccacagcaatcttctttttacctctctttatagcacttctgacattaggccatttattaacttattcctgatttgwgttcaaatagaacatgtaatggtgctgagaattttgggggaagtcatgggatgaaaatattgaagcaacttcatgccaattgttttgttttctttatattcatgaccaaatttttgtttcttcttggagtgacagaccacaaaataaagcttcacagtttcaaaaaaatcatttatagccctgaaaagtttcccaatctagacccagatactttagctggacactacaaacaacatgaatttagagagaacatctttcagctatttcctacagcttttgtttagtcatatttttacttgactctaacwtttttccaatccagatgctatttggcatttttgtaacctttgatccattaaatgaattatagtctcaaactaatctagattccaacactccaaacaaaatggtttcttgactttcctggttcatgaatgtaaagaaaaaaataaataattaaataattaagtttaacaacagcaaaaatacacaaagtccacagcaatcttctttttacctctctttatagcacttctgacattaggccatttattaacttattcctgatttg

SEQ ID NO: 280269 - DNA, 432 bp, Homo sapiens
ctaaaggactatctagagggtacactaccattcacagataggaggtcaggctagaagtttaatagaagaatgtcttggagcgccaagctgaccataatgatctataccttgcagttcagataatctagttcaataattgtcaaactttttttgtaaaggcaagacagtaaatatcttaggcattgaaaagtcagacagtctttcccacacctgtttatctctactgttataacacaaaaacagccatagacaatagataaatgaattgatatggctaaatgtggcttacgaaaaggccttagtttgcctacccatcatcttagtcacatattactctatatctacttatttcttttatcattaactttgaatgaaactttatttaaacattccaattagataccaaatgtacygtaagacattgaggggaaa

SEQ ID NO: 280270 - DNA, 631 bp, Homo sapiens
aatcccagttattgggaggctgaggcaggagaatcgcttgaacccatgaggtggaggttgcagtgagctgagatcgtaccactgcactccagcctaggcaacagagtgagattccatctcaaaaataaataaataaataaataaataaataaataaataaaaatcaattaaaatatgactctgccttctaatatttttcatgaagggatgattttgctagtttttaattcattaatacactgtaaattgtctttcaagaggatcatgaaaattttaactctttagctagtctggaattcagtcttcccaaaccctaaattcattttagggaattcatataaccataactacatttgaatagtgatttaaaccctatctcctccatatacattgatttttttccccaattatcaggtttcagcatcatccagattagatagttccagaaatccagattgagaaaaactatcaagacaaaaacaaacaaaaaatcytccatagtgggcttgaaatgaacccaagagatgaaactttcatttgaatttttgctttctttaaacatctacttgccaacatgatgtggtgaaggtcaattgctatgaagaaagttaatttgcgaaagaatgaaaac

SEQ ID NO: 280271 - DNA, 541 bp, Homo sapiens
gcgctccagcaactgggacatttggtagcagtttggcaccattcctaacctgggtgtccagagaaacttcctgattctttggaaacccatggtagtctggrgagctgatattgtcctctccattcttaaatgatgtttaatacaccaaactccttaggttaaatcgctttctgcttcgaatatctagaaacactatttctttctcaataaaactctgactaaaaaagagtacttgtggcttctatacattgcggcttatcaacaatgacttgctttaatgaatcagtctgccagaggcctaactagaaataaggaaggcatgagagagtgaatgcatgctcacttgagctttctgattcccttctaaagctgaataaatacaacattctaattacttgaaagtaatgtttgtattgacaaaaaattcacgtaacataaattcatcattttaaccttttaaaaatatacaatgaattgatcttggtatactcacaatattgtacaatcacctatctaattccagagctttttcatcactcca

SEQ ID NO: 280272 - DNA, 541 bp, Homo sapiens
gcgctccagcaactgggacatttggtagcagtttggcaccattcctaacctgggtgtccagagaaacttcctgattctttggaaacccatggtagtctggagagctgatattgtcctctccattcttaaatgatgtttaatacaccaaactccttaggttaaatcgctttctgcttcgaatatctagaaacactatttctttctcaataaaactctgactraaaaagagtacttgtggcttctatacattgcggcttatcaacaatgacttgctttaatgaatcagtctgccagaggcctaactagaaataaggaaggcatgagagagtgaatgcatgctcacttgagctttctgattcccttctaaagctgaataaatacaacattctaattacttgaaagtaatgtttgtattgacaaaaaattcacgtaacataaattcatcattttaaccttttaaaaatatacaatgaattgatcttggtatactcacaatattgtacaatcacctatctaattccagagctttttcatcactcca

SEQ ID NO: 280273 - DNA, 630 bp, Homo sapiens
ctagggctttgtgggcagaaagggccttctagttccctctcactctccgccatcctgcatctcatgtcagccctgctcctcatgacagggtccatgatctgaggagaagtgggtcaggagatcaggatgaacagggagagttgtttacctgaagtggccagaaacaacgtaattcatgggaagaactaactccatggctgggaaaccaggcagtagcactagttagaattgcatctgtgggtaagcctttttccctgtacactttttacctctggtgaaaagtggtgaactgtcctgtgtccctgttcatatctaggctaytcactctatgctgcacccaatttcatttcttctcaccttctcaaggcttctgctccttccttcatttatcacctgtccttcatctatctctcatctctctttcatctctctttttctctcttatctatttctcatacctctctccccctgctcttcctttactttctctcatctcttctaggttaaccccaccagcttactaacaagctgcattatctctaatctaagccacaaaataaactaaaacaaacctcccttcaccccatgtgttcctctagctcttacccgtttgcttccttttatagtaaa

SEQ ID NO: 280274 - DNA, 630 bp, Homo sapiens
ctagggctttgtgggcagaaagggccttctagttccctctcactctccgccatcctgcatctcatgtcagccctgctcctcatgacagggtccatgatctgaggagaagtgggtcaggagatcaggatgaacagggagagttgtttacctgaagtggccagaaacaacgtaattcatgggaagaactaactccatggctgggaaaccaggcagtagcactagttagaattgcatctgtgggtaagcctttttccctgtacactttttacctctggtgaaaagtggtgaactgtcctgtgtccctgttcatatctaggctattcactctatgctgcacccaatttcatttcttctcaccttctcaaggcttctgctccttccttcatttatcacctgtccttcatctatctctcatctctctttcatctctctttttctctcttatctatttctcatacctctctycccctgctcttcctttactttctctcatctcttctaggttaaccccaccagcttactaacaagctgcattatctctaatctaagccacaaaataaactaaaacaaacctcccttcaccccatgtgttcctctagctcttacccgtttgcttccttttatagtaaa

SEQ ID NO: 280275 - DNA, 660 bp, Homo sapiens
gctcagcatacaataagtgctatgtaagtatttgttaaataaaaccaatygtataactgacagcaatatttttaaaacaagtgatagaaataaggcataaagatgggctagacatgcagagtaggtggaagaagataggctgttggtctttctcagtttatggatttcacccttaaccagttatcaagtcatgatttattaagaaatgatacccctatatgcctgagaaaataacttaaaattaaatgatttcagggttgactctctgaaacccatgactgctgctagattgaaacttccctaatagccactaagagccattcattcctctatactcatcctttgcatgcaggtgctcacctagggcaacatctgtcttgcctaggtgactttccaattctcctcacacacctagctttgtagaatctcactttttgaatagcttttccttacttcttattgaagtcactctgttctctctaaaagtaagcaaagaatcccaaaccctgatgcctcaggggcgaagaaggtaatcaaaatggcagaagtggttccaggaagagacacgactgagttccagcagttgggtagcattggagatggacccaggtattctctgtagaacctccctagaacctcatgaagatgtcaaatgcaact

SEQ ID NO: 280276 - DNA, 630 bp, Homo sapiens
tgattttccagcatctttttttttcattaaattttcagaggattttaaacttgacaccaatatttctttggaattttgaagcaattgtgtgggagaattttgagtaactatacaaagataattctagtactgtttgctgtacacccttgtaggcctatatgcctgagaaaataacttaaaattagcatttggataatgtttaaaatctacaatccagtggaacaaatgtattgacactaatatatagacatcttgcttactttgatacaaataatgtttarccaatattttaactgtgggtattagggaaggaatctttatttataaatgcattaagtcacattgtaatatttcaaatagtaaggacatagtttgcatagtaatctttcactagcaggaacttcattcattttgaatagtttgatagtaactaattgtgcagaactgattgttaaagccaaaataagcaattcgattatgctatggctgattaggcctcgtcatccagacaagatctcatagtcagtaactggtcatacattgtctatatacactaagtaatttcataaccttataattatcatgtcccacacatctcaacaatgagagaataagaccaactcccccagg

SEQ ID NO: 280277 - DNA, 630 bp, Homo sapiens
tgattttccagcatctttttttttcattaaattttcagaggattttaaacttgacaccaatatttctttggaattttgaagcaattgtgtgggagaattttgagtaactatacaaagataattctagtactgtttgctgtacacccttgtaggcctatatgcctgagaaaataacttaaaattagcatttggataatgtttaaaatctacaatccagtggaacaaatgtattgacactaatatatagacatcttgcttactttgatacaaataatgtttaaccaatattttaactgtgggtattagggaaggaatctttatttataaatgcattaagtcacattgtaatatttcaaatagtaaggacatagtttgcatagtaatctttcactagcaggaacttcattcaytttgaatagtttgatagtaactaattgtgcagaactgattgttaaagccaaaataagcaattcgattatgctatggctgattaggcctcgtcatccagacaagatctcatagtcagtaactggtcatacattgtctatatacactaagtaatttcataaccttataattatcatgtcccacacatctcaacaatgagagaataagaccaactcccccagg

SEQ ID NO: 280278 - DNA, 569 bp, Homo sapiens
ctgttttacagctgagaaaatttaggctcaaagaggttaattattttgcctaatattaccagacactaagttgtgtgaattattttagatcaaaaactcccttattacaccaggctaatttccatcttagaattaaaataaacacaatgtggacatgttagttaaaaaaatatatatcaggtgtatgtttgtatgtatatgtatttatatatataaaaatataaaaatttatctctgtacatacatatatatgtacacatacacacatacctattcatttgtaggcactgtagacacaaatatgtgacaattatacagaaaagcrtaagtgactaccatcgtaggagatagagggatggttaacataccaataagagttagcaccatcttggcacagaaatttcagaagtgaacaaaattgacacaagtcttgccttacagagcttacccttcagcaagagtgcaaagcagtgctgaaaacaaaagtcaaagaaaagaatccaaacttaaagaagccaaagtcaatcgctttagccaaatttacttaagaatgtcacccattgaaggaa

SEQ ID NO: 280279 - DNA, 547 bp, Homo sapiens
atatattggtaataccaaaggctggtgagaatgcagagcaattagaactttataaattgctggtgagaatgcaaaatattacatccactctggaaaacagtttggcagcttcttagaggatttccatatgacccagcaattgcattcctggacactggcccaaactggcactggcccaactggaaacaaccaagacatccatcagtgagtgaatagataaacaaacggtgaaacattcctacaatggaacactactctcaataaacagaaatgaacccttgatacacacaacttagatgtcttcaaaggcaatatgctgagctaaagcagctagtcytaaaatggtaaatattatgtgatttcatttatatgatattctcaaaaagtcaaaatacatcacttgaagggggttgattacaaaggggtaaatgagggaatattttgttgtgatgaaactgttttgtattttaattatgttaatggttatatgaaactattgtgtaaaaattcagacaaattaaaaattatatttttattgtatttattt

SEQ ID NO: 280280 - DNA, 546 bp, Homo sapiens
ttcttggttctattggttttaatgaaaatattaagtgcactctaggaacagcagctaagtgacattttgattgaaatacacaaggaaatgtataatggaagcaggcactattacaaygttaatagaaactgaaagaagcaacatccagaacaacatttttgctattgttatgcatatagctagtcctcagaagggtaataggggacttacccttctagctcttggtaaaagaggctttcacctcagctacctgactttttttggttttgttttctagaagaataaagtggccagctttgatgtattttctttcattagacacctcttagatagcattcatggtcaagcatatattggaatacctttcctcttctctggagtcacaactcagtagagtttctgtagagaagttggatttattgacatgaatataggatgaaaacaatgattccttgcaggtgaactctcttaccagtcgcaaagatgcgctgtctgagccaatctcctagactcaaaatataggaagaaaaaagtcaaaataaaaat

SEQ ID NO: 280281 - DNA, 546 bp, Homo sapiens
ttcttggttctattggttttaatgaaaatattaagtgcactctaggaacagcagctaagtgacattttgattgaaatacacaaggaaatgtataatggaagcaggcactattacaacgttaatagaaactgaaagaagcaacatccagaacaacatttttgctattgttatgcatatagctagtcctcagaagggtaataggggacttacccttctagctcttggtaaaagaggctttcacctcagctacctgactttttttggttttgttttctagaagaataaagtggccagctttgatgtattttctttcattagacacctcttagatagcattcatggtcaagcatatattggaatacctttcctcttctctggartcacaactcagtagagtttctgtagagaagttggatttattgacatgaatataggatgaaaacaatgattccttgcaggtgaactctcttaccagtcgcaaagatgcgctgtctgagccaatctcctagactcaaaatataggaagaaaaaagtcaaaataaaaat

SEQ ID NO: 280282 - DNA, 597 bp, Homo sapiens
aagatcaaacagcattttagagactgtaaaatctgtaccttttgagcaaagaaagggtttaacrcatcctgaaaatagacatttgataatgagaacatattcagatctcatggagaatgaaagctggggagggaaaaagccatctgaggtggccaaatgaccctttaggctttgattcatgtccatgctttatcttcagtttttctagcattgtatttttgacatgacatgattggaaagcaagctatcctgttttttaagttttccaaccaatattgatttaagacaataagccatttgtctatagcatgattaatagctttatgaaaaaatagctaatatctatttgaaatcatctgatgctaccaaccagtgaccttgtgatcatcagagattatttgaatgaagggtagaaccagattttttccattcttgctttacaaaataaggagctacacaatgatactgcttactaacctctgaacccttccagaggcttatcctttaagagtgtatataggactacagccttgattaaggttgcttgtctgacataaccaacttctagagacttctcttttaccatccatattttaa

SEQ ID NO: 280283 - DNA, 588 bp, Homo sapiens
caagttctgtaataatatatttatatactacattttaaagtgatgtgataaaccagtagcagacaatgttacataatmgtgaatgaatgttaccataaattttatgtaaaagtgtaaaatttattttcctacaattaggaattttcttcaatgtatattttttaagtaacaaaaataatgaggaacagatactgctttttaaaatatgccttacactatatttccttctaatttgggtatgtcacattttatttacctatcatattaagattctcatgatgcgtataaaagtaacatcacaagtaatcacaattatgtagagacattttgattcattttatcttttatcatatcattcatacatcagcaagcatgaaggggtgagtgcgtttttatcaataaatcagtggtgggtggtggttgttgatggggtatgggtataaaatctctattattgtgatgtttgccatatactataccccattgactatgcagtattgctataatatatgcatatcatcaaagtttgatgacacataaaattagctgcttacatatttgtatttgataatgatatcctaaaacatg

SEQ ID NO: 280284 - DNA, 588 bp, Homo sapiens
caagttctgtaataatatatttatatactacattttaaagtgatgtgataaaccagtagcagacaatgttacataatagtgaatgaatgttaccataaattttatgtaaaagtgtaaaatttattttcctacaattaggaattttcttcaatgtatattttttaagtaacaaaaataaygaggaacagatactgctttttaaaatatgccttacactatatttccttctaatttgggtatgtcacattttatttacctatcatattaagattctcatgatgcgtataaaagtaacatcacaagtaatcacaattatgtagagacattttgattcattttatcttttatcatatcattcatacatcagcaagcatgaaggggtgagtgcgtttttatcaataaatcagtggtgggtggtggttgttgatggggtatgggtataaaatctctattattgtgatgtttgccatatactataccccattgactatgcagtattgctataatatatgcatatcatcaaagtttgatgacacataaaattagctgcttacatatttgtatttgataatgatatcctaaaacatg

SEQ ID NO: 280285 - DNA, 448 bp, Homo sapiens
ggttacagaaatatggaaagagtgatttcaattcttggcattcaattataatccttcttgaggcccagctacacctcacttyctttccttaaatacagccttaatgtatatccttgtgtgagccattattttattttcctcatcaattagagttttttctttcctttcttaattttctttttttcctcctttctttcttactggggtgtgtatgtgtgtatgtgtttaagagacagattcctgctgtgtcacctatgctggagtgtagtggtgcaatcatagctcactgcagccttgaacttgctggctcaagtcccccaaggagtagctgggattacaggttcaattagagttattaaaataattgtttttattatctcaaatgagtttcaatgtgtttcagtcaaaacagtcttaacacgacatagaatagaacacaaaagtgagc

SEQ ID NO: 280286 - DNA, 448 bp, Homo sapiens
ggttacagaaatatggaaagagtgatttcaattcttggcattcaattataatccttcttgaggcccagctacacctcactttcttyccttaaatacagccttaatgtatatccttgtgtgagccattattttattttcctcatcaattagagttttttctttcctttcttaattttctttttttcctcctttctttcttactggggtgtgtatgtgtgtatgtgtttaagagacagattcctgctgtgtcacctatgctggagtgtagtggtgcaatcatagctcactgcagccttgaacttgctggctcaagtcccccaaggagtagctgggattacaggttcaattagagttattaaaataattgtttttattatctcaaatgagtttcaatgtgtttcagtcaaaacagtcttaacacgacatagaatagaacacaaaagtgagc

SEQ ID NO: 280287 - DNA, 554 bp, Homo sapiens
aacacgacatagaatagaacacaaaagtgagcatgaaactacagtcctcaaagagttcataatttaaatgtagagatacagaaataaaccaataggcaaatacttcccaaggcaaaaaatcttcacttagataaagcacactagcataccttggctagtctttaagccacaagagaaggttctctagtgatagttaaagactttcagaatcatcttaatttggtgtgccatcaaaagaactgctcactctaattagaaggtgatgttttcaggtataaaattttggtccaactctatccctattctttcaaggttccacttctgctttgttagaccastctcagacgcacagaagatgataatcagagttgccagcacctctaagtcaaggcagaaactccccctcacaaagaaagggaaagtccacacagaacacatctgtgccagggacataaaggaacacatgtggtgtcattgtctctaaaggagttctgaagagttagactgtttcacgccagtaaaacgaaaggttttacaaaatcagaaaactattc

SEQ ID NO: 280288 - DNA, 577 bp, Homo sapiens
acctcaaagaagccacaaaagacatctgcattatcatacagagtaaagtgggtccagtaaaattaggttccagctgagaagaaagcttcctgaagacatttggtgcctcagagtcatggactagatcaaattttccattagaaattgtaattggtttcattcttcattctcccagatgtcattcataaaaaattattaggcggtcatgtttgaccacaaggtagaccgttttatgcaaacttgaatctgctctgttacttagctaaacaatctagttctttaaaacagtcctcttcagatttgttttcaccccttcatcattactgcacatggtattttttgtctgttctgtttttcatgttttaaaaagcaaagaccaaaaytggttatagcaaaaactgatttctccgcgcactggggagaaatgccctctagtgtagatgcacaaagaaggaagtgcttgactcttctttttatagtgagaaaatcttaactgagaaagatagattacatggaaacacgtaattgttcagtttatgttgagacttagcctctgttttttgaaaattcacacagt

SEQ ID NO: 280289 - DNA, 577 bp, Homo sapiens
acctcaaagaagccacaaaagacatctgcattatcatacagagtaaagtgggtccagtaaaattaggttccagctgagaagaaagcttcctgaagacatttggtgcctcagagtcatggactagatcaaattttccattagaaattgtaattggtttcattcttcattctcccagatgtcattcataaaaaattattaggcggtcatgtttgaccacaaggtagaccgttttatgcaaacttgaatctgctctgttacttagctaaacaatctagttctttaaaacagtcctcttcagatttgttttcaccccttcatcattactgcacatggtattttttgtctgttctgtttttcatgttttaaaaagcaaagaccaaaactggttatagcaaaaactgatttctccgcgcactggggagaaatgccctctagtgtagatgcacaaagaaggaagtgcttgactcttctttttatagtgagaaaatcttaactgagaaagayagattacatggaaacacgtaattgttcagtttatgttgagacttagcctctgttttttgaaaattcacacagt

SEQ ID NO: 280290 - DNA, 593 bp, Homo sapiens
ttggggacagctaatacacttaggctgtgaggagcataggaatgctaagagagaatgaagcggtaacattgatggcagtgagaagaagcagggtgtcacacyaaggccagccaagacccatgcagcattaaggccataggcttccaaatggggacttccctggctgatcttttattagtgtcacttgagtagttttgtgtgttccttgcccccttggcaaaaactgaatctatatccttccctgtcttttagctttctgcatcactatttccactcaaatgacagtgtgatattctaaggaagtaatcagttaatagccagatgttatagccaaattatgaatctttctctgatgaaaggtgatcataactaatttaacgtcaataattttcttttcatctttttggtgcagtaagaggttgtcttttcatccctacatcatgaatgaataagtacaaagtcccctagttctctttactgaagtatggctaattaccctgaaaggacgaaacaaatcatagttatgagcaaggtgaagacatttccttccacctccgatcaaattcatttctcttcctcctgtaaccttataa

SEQ ID NO: 280291 - DNA, 593 bp, Homo sapiens
ttggggacagctaatacacttaggctgtgaggagcataggaatgctaagagagaatgaagcggtaacattgatggcagtgagaagaagcagggtgtcacactaaggccagccaagacccatgcagcattaaggccatrggcttccaaatggggacttccctggctgatcttttattagtgtcacttgagtagttttgtgtgttccttgcccccttggcaaaaactgaatctatatccttccctgtcttttagctttctgcatcactatttccactcaaatgacagtgtgatattctaaggaagtaatcagttaatagccagatgttatagccaaattatgaatctttctctgatgaaaggtgatcataactaatttaacgtcaataattttcttttcatctttttggtgcagtaagaggttgtcttttcatccctacatcatgaatgaataagtacaaagtcccctagttctctttactgaagtatggctaattaccctgaaaggacgaaacaaatcatagttatgagcaaggtgaagacatttccttccacctccgatcaaattcatttctcttcctcctgtaaccttataa

SEQ ID NO: 280292 - DNA, 548 bp, Homo sapiens
cgaaacaaatcatagttatgagcaaggtgaagacatttccttccacctccgatcaaattcatttctcttcctcctgtaaccttataactccaactcaaggtgtatgtttccaaggaaggtcatgttttaaaatatgactttaagcccatagattttatgcaacagtctcatcctgagcaagcacactacataaatccaggtattattgctgttgtcattaaatcatgttagtggcttaaagcaacatttctcaaaatgttgtcacctgaccaatgcattagcatcatctgggaacttgctagaaatgcaaatccttggccccactcaaaacctgctgaattataaactcgaggggtgaggcccagcaatccgttttcacaagccttccagctgattctgatgtacagcaatgttttggyaatcactgtcttaagaaataacacaaaatatttgagtcaggcaacacagatgattgctaagagctgtagaattaacaaagaccaccccgatgggaacaaacagatgatatttatcagagctttctagag

SEQ ID NO: 280293 - DNA, 548 bp, Homo sapiens
cgaaacaaatcatagttatgagcaaggtgaagacatttccttccacctccgatcaaattcatttctcttcctcctgtaaccttataactccaactcaaggtgtatgtttccaaggaaggtcatgttttaaaatatgactttaagcccatagattttatgcaacagtctcatcctgagcaagcacactacataaatccaggtattattgctgttgtcattaaatcatgttagtggcttaaagcaacatttctcaaaatgttgtcacctgaccaatgcattagcatcatctgggaacttgctagaaatgcaaatccttggccccactcaaaacctgctgaattataaactcgaggggtgaggcccagcaatccgttttcacaagccttccagctgattctgatgtacagcaatgttttggcaatcactgtcttaagaaataacacaaaatatttgagtcaggcaacayagatgattgctaagagctgtagaattaacaaagaccaccccgatgggaacaaacagatgatatttatcagagctttctagag

SEQ ID NO: 280294 - DNA, 592 bp, Homo sapiens
tcactggagagggtgagacagtatgtaaaagttgtaggcagmggaacgagataaggaggcttgcattctagagagataattctgccaggagaatgaaaaaagagaaaaagatggtagggaaacaagactggaaaatggaagatgtgtttggaggctattaaggcaatccagcaagaagtgatgagagtgattctgaaggcacttcaaaaagagctacaaagaatgctttgagaaatggcagtcctgttgatgcaagtgtagaggctgcctgatgagtacttttgagaatctggaactcatttagaagtgtgttcaggcatttttgcatgtgtgacaaggacagttttccaaacaatagtccttgaagagaaaatttactccttggaatgtgcatgatactcatcaccatagagattgcttttgctaaacctttcaagaaacaagctgcttctccctgaaaatccctttataagctcttctgtctcttaacaagacatgtagagccccaaaggttggcagagaggaatgttctcttttatctccatccagaattctatcgagtggcacctgagatcgaccctagtgcaatggc

SEQ ID NO: 280295 - DNA, 580 bp, Homo sapiens
tgtccactaataagtcaattcatcatcatcatcatggtaatgatgatcataccttcgattttttttatctggttatgtttgctgcataacacatcatcccaaattataggtcataaaacagctatttcattatggtgtaagactctatgggtcaagaacttggactgggtgcagtgggtgtggtttgtctttgcttcatgaagtctggagcctcagctgagaaggcaagaatgactgatgacactggtatcatctagaggcatttttagtcagcacttctaccctgactgtccaygcggccagtgattcctcgaagtgtggcaacctggggtagttgaacttagttcatgggagctcagggacctcatgagtgaattctagaaaacaacgtggagtctgtattgcctctcatgacctagccttgaaagtcacatagcatcacatccgccatactttgttgtttgtatcaacaagtccatccagattctaggggtgacatagcaagacgggtgactagcaaggtgctgtaggctgaatgcttgtgtccccccagagttcctgtgttaaatgctaatgccca

SEQ ID NO: 280296 - DNA, 1192 bp, Homo sapiens
tttaattttgggggtatcataaaataaaataattatatgtactttttttttttcttgagttcaaatagtacagaagggtgtaaaatgtaaactaattatctccccatctcactttcccactctcatgcccattcctattttgaaactttaactgttttaactatctttgttgatctggtggttatcaccacacttgtaaaaaacaggcttacatgtagccctattatttgatgtataaatttataatttttctttgaattgtactataaaagatgagcaattagacttacttttactacctcccacactgtttcaattcctttcctctacttttaaaataattatattattatatrtaacatatatagtaattgcattaggtagttttatttttctttcagatgaatacctttgcaactctgaataatacacctggttaagtactcatatgtgagactgaaaccatgggaagtgtgacatcaaatttttgtaaatgggaagggcttctcgatgggaggcttcacctcaggcaaaagaaaagataaaggctatacatcagaggactcgccataaagctagcttgaatttattgcattaaaatatggaaaaattgttaatttatgwctggttttagttttgccaattttttcttttcctttttaatgttttaaaattttaggtattctttttctgccacttgcacttgaatgttttatcttattttctcctgttttataataaagcaatttcagactatggatttaccactgagtatagcttaatgtgttgttattccttttttaacagtgtacaattacagttttgatgtcattttaagagttaatctgggtagtaacttttatttctaaatggtttttttttattgttgtgattatttttttcatttgtgatttccaaaggtagatcacacaattatatgtcattgcagwtgtgaacacacacacacactcacctcgtaggcttcatcattaacctgggagtaattaagaaacccacaacagagtttaactatgagcagaaccaatcatatttttactataggaagcctttctaatttccatgtgaagaaggcagttcagaagggcagagagacttgttaggaatatgtagagtaatccaggcaagagatcatggtatcctgaaataaaggactgtggatatagagaaatat

SEQ ID NO: 280297 - DNA, 642 bp, Homo sapiens
tgacccgaaatccccactcctcaaatgaacaaccaaattgccctgacactgtgtctttgtagaagctgtccctcccgggagcacgcctctgtgtgagtgggctatggagagttggggagcaagaaagggcgactgggttcaaaagtaaagtcatcagaaataacgaggctgttccgcccagctccctgccagccaggcgagcggagtgccctctccagcggggtgtcccagctctgccgctgaaataactggtcayggagagcggcaagcaaattgctttgacaaggccgttgctgttgtaagggttcaagggtgccggccactaggtcagcggctgccaatcaagcagacagaaaaagccgctcattgagcctgtgatttctacctaggccgcaattatctctgactattcctgtacctcagcagctcctctgattaaacctgcctcccttttacatctctttcagagtgcgcttcacacactaattagttgcctgctctccactgagatgtcagaccctccgtcaatttatctctatttcagcctgctcagagtgacttccccagttatcaaaatttaatcatgccttcaaaaatgttgaaaagtggtcattagaggcaaaaggccacaggatacaatat

SEQ ID NO: 280298 - DNA, 469 bp, Homo sapiens
aatgattttacatctctgaatcatacatcgccttctctgctcaggaagacccttctcatctgtccctatctaaatccaaaatgtccattttgcctagtatttcttgttcagaattaatgactcacttctgtgtgtcatctagctctctattgctttgctcattatagcctgaagtagattattaggattttttaaatttctttctactctactaaattgtggattcttgaaggacaggatcatgctgcttgcatctctgtatccttcatggctaaggagagtatccggaacatagtaggatctcagtatctcttcatggaatttacacgtccatttggcctctgaaaaccacatcctctcctctacagcttgtctacttycttttcctgaggccaactgttaggaaatgatgttctaaggtaagaatttccttcacacagcaccctagttgccctcctatcagggccaa

SEQ ID NO: 280299 - DNA, 579 bp, Homo sapiens
ctgtgaccagtcaattcaatagtcagcatcaagtgttcagtacagtgcccagcacagaccaggcctacagggactctgtgcttgctgtctgctctgccaagaacaccatttccctgggaaaacacatggtccagtctcctgcctgcctttgctcaaatgcatcttctaggtgggacattccctgakcacccaatttaaaactggaaatctctctgccacccccagccccagggctccattccctttctctaccttgattctctccctagtacttgcttatttacttcattcactccctgcctccttctactacattgtctgctccagggaggcagaggttcctgtctgtcctgttcactatgtatccccaagacctggaatagagcatggcctcaagataggtgctcaataaattttaatatatgctgaatggatgagtagcgtcagctaataccgttgctctgatgcacagcataaacttgcatctcaagataaaactgctgtttgtgttgtccaatgagcttgaaatttacaactaaacaaaagtttaaattaaaagacccacagtatttccagcta

SEQ ID NO: 280300 - DNA, 570 bp, Homo sapiens
ttcgctctgtgcctaccaggaactgtgaatggaccacaaggcatcacagacgtccacagggtacccatcatgtctgagggctgtttggagccactgtttttttcccttgttaaaataaatgggcttttgtgttggaaatgatttcacggtttgatttcctctgaggacatgcaacccctattgacatgaaagtgcctcacagatcctccctctgctgtggagctggttgtcctgggtgacyttcccttgaggcctgcagggaggcctgtgtggggatggctgtttccctcccacagtctcaccaccttgggaactgactttgctgggactggctaggcgccgagctggtggcaggctgtggagaggactgggccacagccctcttagcccactgccaggccctccaaccttccactgtgggagcgtgattgccagagaccccagacactgtgctcgggacccgccaccccatctgtgccaaggctatgcctcccacaggctgctcccagcctatggctgagcaaggcagggatactcgggcaggcctattcctgagagatgtggggctcc

SEQ ID NO: 280301 - DNA, 561 bp, Homo sapiens
cttgtcagctttttcatgtttctgtgcttttccattttgactataggcaagaatacagaaaagtaacacatctttaaggatgtcaagagtttccaacttgttgaaataacctaattcttttatctgacagaatagaagaatttgccaaatccagggagaaaatatgtggtatgaactcaatcgctcaggcatcactcagacccctacattcattcagggagctctgttcctccacatagagagggtacagaggccagaaataaagctgaagaagtgtcaacaaataagaccatgctggacccagggccacttcaggttatacaaaccagagaggcaaaaacctgccaygcatcattgtgttcattatcagagtgcagatgagcgacactgattaactttatgtctgaatcagcataacttttttttttttaaatcagcttaagaagaatttgggatatcagatacccattacaatgacttcagatttgcagaaattaacccacaatagttcacatggatattgtgtaacaaagtaactgagtgggaaagtcctcactatgt

SEQ ID NO: 280302 - DNA, 514 bp, Homo sapiens
ggcaaagtatagtgtttaatcacaattaaaattgtgttggcttttacttttccaacaactctaatctagtcatatgaaatcattagctatgctaaaagtgtgcgtaagagtgacaactggagtgtgttggggaaacttagtcataatggcaggcacagccattggtaatggcaaccttgggtataagagaggagtaggcttagagaaattcaatctcctcmtcagaaccagagagttgtggtcatgtaaaaaggctggcaggagtcctcaaaatcatgctcacaatgacagctacagacttattaaacaggtggctatgcaggtgctgtcctaggttctgaagtttggagtacaagaaggtagacacagcactaaggatagttaattgctagtaaggcttgaatctgccccaaataaggcctcgtgggaagttcacataggcggtcaagaggctgcgtggtgtagagggaacagaacactgaacttgaaacataggattagggtgtgagtcttg

SEQ ID NO: 280303 - DNA, 514 bp, Homo sapiens
ggcaaagtatagtgtttaatcacaattaaaattgtgttggcttttacttttccaacaactctaatctagtcatatgaaatcattagctatgctaaaagtgtgcgtaagagtgacaactggagtgtgttggggaaacttagtcataatggcaggcacagccattggtaatggcaaccttgggtataagagaggagtaggcttagagaaattcaatctcctcctcagaaccagagagttgtggtcatgtaaaaaggctggcaggagtcctcaaaatcatgctcacaatgacagctacagacttattaaacaggtggctatgcaggtgctgtcctaggttctgaagtttggagtacaagaaggtagacacagcactaaggatagttaattgctagtaaggcttgaatctgccccaaataaggcctcrtgggaagttcacataggcggtcaagaggctgcgtggtgtagagggaacagaacactgaacttgaaacataggattagggtgtgagtcttg

SEQ ID NO: 280304 - DNA, 618 bp, Homo sapiens
gaacagaacactgaacttgaaacataggattagggtgtgagtcttgactcagcacttcactagttgattttggaaaatcatttaacttctctgagcttgtcctcttatttttgaagggttgtcacaagaatcccaataaaattcttcataaactataaatcaagatagagctattttatattcttttagaatgagtcaagatacaaattgattttaataatcaatcaacaaaaagcctatcatgtaaagtatccaaattgttatttcattaaaagaaaaaacaaygaaagatcagattgaagccagacaacttacaatgaagctcatccatgaaaagtgaaaaactttcctggaaataaaaagtcagaataattctttgataaatccttattaatcattattattaatgataaatctaaatcattattaatttagtgttttttgaattaacctcacttttgtgagatggccaggttaatacagtgtgaatttactctaatagatattaattgagaacttactaggtacaaagtgcagtgttaggcatggaaaagtgcatgaccgatacacatccagtatacatgggcacagctattttacttgtctatggtcagcacc

SEQ ID NO: 280305 - DNA, 564 bp, Homo sapiens
cacttcactagttgattttggaaaatcatttaacttctctgagcttgtcctcttatttttgaagggttgtcacaagaatcccaataaaattcttcataaactataaatcaagatagagctattttatattcttttagaatgagtcaagatacaaattgattttaataatcaatcaacaaaaagcctatcatgtaaagtatccaaattgttatttcattaaaagaaaaaacaacgaaagatcagattgaagccagacaacttacaatgaagctcatccatgaaaagtgaaaaactttcctggaaataaaaagtcagaataattctttgataaatccttattaatcattattattaatgataaatctaaatcattattaatttagtgttttttgaattaacctcacttttgtgagatggccaggttaatacagtgtgaatttactctartagatattaattgagaacttactaggtacaaagtgcagtgttaggcatggaaaagtgcatgaccgatacacatccagtatacatgggcacagctattttacttgtctatggtcagca

SEQ ID NO: 280306 - DNA, 608 bp, Homo sapiens
tacatttcaatggaaatttatgacttactagcttgacccatattttctttagtgttgttttttcttttgctgaccattgatattttcttctacttgttattaaacatgaaatgataaaatgtataatatagaaaacttattatcttgacatgtttacaaaataagtaacactattattttgtaggctgagccaagagctcagaastgactgatgtattttccaaggaatagtgactaggatggtgaaggaattgaacccatgtctgtctgacctcaaatttggacctttaaccatttcctagtgaatgtttaacaggattttttccccgtcatgggctccatttttccttgggttatactctacttctctctagcacttcaattcttcatccatcagattgtagttcagaatggaaggccacgttcacacagtgaaaaggaggaactttcctctctcaccacagctatgaagataaatgacagttatcctatgaccagacaggaacatgacaatcaccagatcagagttggtagtgatctgttatcatcaataaagaggagtttttttcttcattgcaaaatattttactacagaatgcatagaattc

SEQ ID NO: 280307 - DNA, 608 bp, Homo sapiens
tacatttcaatggaaatttatgacttactagcttgacccatattttctttagtgttgttttttcttttgctgaccattgatattttcttctacttgttattaaacatgaaatgataaaatgtataatatagaaaacttattatcttgacatgtttacaaaataagtaacactattattttgtaggctgagccaagagctcagaactgaytgatgtattttccaaggaatagtgactaggatggtgaaggaattgaacccatgtctgtctgacctcaaatttggacctttaaccatttcctagtgaatgtttaacaggattttttccccgtcatgggctccatttttccttgggttatactctacttctctctagcacttcaattcttcatccatcagattgtagttcagaatggaaggccacgttcacacagtgaaaaggaggaactttcctctctcaccacagctatgaagataaatgacagttatcctatgaccagacaggaacatgacaatcaccagatcagagttggtagtgatctgttatcatcaataaagaggagtttttttcttcattgcaaaatattttactacagaatgcatagaattc

SEQ ID NO: 280308 - DNA, 608 bp, Homo sapiens
tacatttcaatggaaatttatgacttactagcttgacccatattttctttagtgttgttttttcttttgctgaccattgatattttcttctacttgttattaaacatgaaatgataaaatgtataatatagaaaacttattatcttgacatgtttacaaaataagtaacactattattttgtaggctgagccaagagctcagaactgactgatgtattttccaaggaatagtgactaggatggtgaaggaattgaacccatgtctgtctgacctcaaatttggacctttaaccatttcctagtgaatgtttaacaggattttttccccgtcatgggctccatttttccttgggttatactctacttctctctagcacttcaattcttcatccatcagattgtagttcagaatggaaggccacgttcacacagtgaaaaggaggaactttcctctctcaccacagcyatgaagataaatgacagttatcctatgaccagacaggaacatgacaatcaccagatcagagttggtagtgatctgttatcatcaataaagaggagtttttttcttcattgcaaaatattttactacagaatgcatagaattc

SEQ ID NO: 280309 - DNA, 393 bp, Homo sapiens
tcccaccctcttgctggtgtcttcagttggctgaacccaatgggaagacagagcccattgatgcagtccatgttctaatggagaagagtggaaagtggatctgcaggggccaagagaaaagaaaaaactgtctctcctctttatgctatcccaacctcaggctttcatgttatgttataagcttcaagtttagtttggttttcaaaaaccataatcacaaaaagaatcaattgtagaacatttcaattacaataaaaccccattaaactctacatgagtataccttgcatttggttatgcattcctttttagaaaccaaataaatatacatcgtgacatgtaaygcatctttcatgaatatagggcactcttagaattttaagtgtcattcct

SEQ ID NO: 280310 - DNA, 562 bp, Homo sapiens
ttcccttggagacttggctctggcatataaatctgtaagaagcctcagatacagggaaagaaycatcatgagagccaatggagagcaatccctccatctgcaccccaactttgccaaagagagagctttgccccagatctggtttctaagtactgtatgtaattcagctcaaacaaaaaaatcctggctcacgtattgcagcagccattatgatctgacaaagcatcagtgaaatgaccagctctctaagcaatgtaacacacctgtgatccatgtcacagaatagacctgccctcaaggagtttacagcctaaaatgtgactgtgtggcattacatccatgtagaaaaacagaacacatgaagagccaaggaagcaagatgaggagtgaagacaaatcactcttcagtaatcaatatcattcccacttccgtcttggagcctcagagacaacagagctaggcaagaacatttcacaaggttaatacccaggaggcctgagctctacttgagctctaccctttatagcaagaatcaatattaaccaacatgtgggcttaaaa

SEQ ID NO: 280311 - DNA, 482 bp, Homo sapiens
cccaatgggaggttaagtggaaatgtgtgtaaattctatgtatgttaagtgtcctcaagaagggacacatctttctttgtccttcctttttcctggtggctggaatgcagttacagtgcccacggctccaacagcaacccagggccatgcagtggacactgcatgttgaatgtggaagagcagaaggactgatatagtcctggctgtgaccaactcacagagcttcacaatcagccctgcactgcctgcctgcagacttcttccaccttagctattatctttaagataaacattgttatgagcgatcccagctgatatttctcaagtggctgaggagcctcccggcatggaaggcatcctaagcaaagagagagtcgggcacacaagcttagtgtggtcactggggcaagtggggtgagtctgaggatactgaacatgtrgcacttagcttatttccaaaacttgactctcttggtttcaaa

SEQ ID NO: 280312 - DNA, 621 bp, Homo sapiens
tatagtgaaaacttaagaagcaggaaatctgtcacatatcagtattatcagtattttatgggtgagaacaattttatagcaatatagaaagtcatatgggtataaaaatccatataacatatccacataaatataactctaggcaaaagttaacatagaaaacaaaattatgactaataatgtagggaccagccccacagggtctgtgggtttttctccccatgtgtggagatgagagatcatagaaataaaggcacaagacaaagagaaagaagaaaagacagctgggcccaggggaccactaccacctagacacagagacaagtagtggccccaaaggccaggctgcgcttttattrgatacaagacaagggggcagggtaaggagtgtgagccatctccaatgataggtaaggtcacatgggtcatgtgtccactggatgggggcccttccctgtttggcagctgaggtggggagagagagagacagagaggagacagcttatgccattatttctgcatatcagagacttttagtactttcactaattttgctactgctaactaaaaggtgagccaggcatacaggatggaacatgaaagcggactaggagcatgacc

SEQ ID NO: 280313 - DNA, 520 bp, Homo sapiens
ggaatcctatgtgagtcacagacattcagaccacagcaggattgttctggagtcttatgtgaggtatcaacattcagactccagcagcattgttctggagtcctagtgaggggcaatcattcaggccctcatrgcagtgttctggaatcctaagtgaggggaaatactcagaatccagcagcagtgttttggaatcctatgtgagggactaacattcagaccacagcaggaatgttctggaatcctatgttagggacagatattcagacccttgtggcagtgttctggaatcctatgtgaggaagaaatattcagaccacagcagcagtgttgtggagtcctatgtgagggacaaacactcagaacccagcagcggtgttccggaatcgtatgtgagggacaaacattcagaccacagcaggagtgttgttgaatcctatgtgagggacaaacattcagaccctcgttgaagtgttctggaatcctatatgaaggacagacacttggaacccagcagcag

SEQ ID NO: 280314 - DNA, 520 bp, Homo sapiens
ggaatcctatgtgagtcacagacattcagaccacagcaggattgttctggagtcttatgtgaggtatcaacattcagactccagcagcattgttctggagtcctagtgaggggcaatcattcaggccctcatggcagtgttctggaatcctaagtgaggggaaatactcagaatccagcagcagtgttttggaatcctatgtgagggactaacattcagaccacagcaggaatgttctggaatcctatgttagggacagatattcagacccttgtggcagtgttctgkaatcctatgtgaggaagaaatattcagaccacagcagcagtgttgtggagtcctatgtgagggacaaacactcagaacccagcagcggtgttccggaatcgtatgtgagggacaaacattcagaccacagcaggagtgttgttgaatcctatgtgagggacaaacattcagaccctcgttgaagtgttctggaatcctatatgaaggacagacacttggaacccagcagcag

SEQ ID NO: 280315 - DNA, 364 bp, Homo sapiens
actctctcctgagttgatgtgttgctgttggtgattacaatttgccagaaaaatctatcatgactttcatggctcctttcaataaggtcatcaatgatctggacagctgaaatgagaaaaaaggtatccatgaaccacacatgagcatgtcttacagaatgcttgtgtaaaggtaaaaaaaattacttcctatcycagtggagtaagatttgacaaaaataaatatgggtattggttttatatgcatatggtttctgttcctactgacataatgtaataaatcagtatattttctaatgttcaattgagtttttctttgcattttgaagttttcctgttcttttttatttcacaaagaattatt

SEQ ID NO: 280316 - DNA, 729 bp, Homo sapiens
actctctcctgagttgatgtgttgctgttggtgattacaatttgccagaaaaatctatcatgactttcatggctcctttcaataaggtcatcaatgatctggacagctgaaatgagaaaaaaggtatccatgaaccacacatgagcatgtcttacagaatgcttgtgtaaaggtaaaaaaaattacttcctatctcagtggagtaagatttgacaaaaataaatatgggtattggttttatatgcatatggttyctgttcctactgacataatgtaataaatcagtatattttctaatgttcaattgagtttttctttgcattttgaagttttcctgttcttttttatttcacaaagaattattwactctctcctgagttgatgtgttgctgttggtgattacaatttgccagaaaaatctatcatgactttcatggctcctttcaataaggtcatcaatgatctggacagctgaaatgagaaaaaaggtatccatgaaccacacatgagcatgtcttacagaatgcttgtgtaaaggtaaaaaaaattacttcctatctcagtggagtaagatttgacaaaaataaatatgggtattggttttatatgcatatggtttctgttcctwctgacataatgtaataaatcagtatattttctaatgttcaattgagtttttctttgcattttgaagttttcctgttcttttttatttcacaaagaattatt

SEQ ID NO: 280317 - DNA, 801 bp, Homo sapiens
actctctcctgagttgatgtgttgctgttggtgattacaatttgccagaaaaatctatcatgactttcatggctcctttcaataaggtcatcaatgatctggacagctgaaatgagaaaaaaggtatccatgaaccacacatgagcatgtcttacagaatgcttgtgtaaaggtaaaaaaaattacttcctatctcagtggagtaagatttgacaaaaataaatatgggtattggttttatatgcatatggtttctgttcctactgacatmatgtaataaatcagtatattttctaatgttcaattgagtttttctttgcattttgaagttttcctgttcttttttatttcacaaagaattattwatgcccgccagacacattcctcttcccttttagtttctatgggaatactctctttgaagaacccawgaagcagtgtcaggctggtgtgaggatcagcagccgtttctttgaggaggagagcctgtttcttcactcacaggccatgtctgagtggatcaagaagaacagagtgcccttttatgagatttttctgcgtagaccattaacttggtaaaaatgtcgaaaccatcctcgttctttaatagattattttggacttttctttgcaagaagcagcatgggcattcagatgcttttaaggataaaatgttctttctcatccccaggcctggtgctctggatggctgaggttttaatgtgactggatgtcccttggagtggctcccaggctgtgatcttgtggttgggtggcaaggggttgctttattcgctggtg

SEQ ID NO: 280318 - DNA, 436 bp, Homo sapiens
atgcccgccagacacattcctcttcccttttagtttctatgggaatactctctttgaagaacccatgaagcagtgtcaggctggtgtgaggaycagcagccgtttctttgaggaggagagcctgtttcttcactcacaggccatgtctgagtggatcaagaagaacagagtgcccttttatgagatttttctgcgtagaccattaacttggtaaaaatgtcgaaaccatcctcgttctttaatagattattttggacttttctttgcaagaagcagcatgggcattcagatgcttttaaggataaaatgttctttctcatccccaggcctggtgctctggatggctgaggttttaatgtgactggatgtcccttggagtggctcccaggctgtgatcttgtggttgggtggcaaggggttgctttattcgctggtg

SEQ ID NO: 280319 - DNA, 436 bp, Homo sapiens
atgcccgccagacacattcctcttcccttttagtttctatgggaatactctctttgaagaacccatgaagcagtgtcaggctggtgtgaggatcagcagccgtttctttgaggaggagagccygtttcttcactcacaggccatgtctgagtggatcaagaagaacagagtgcccttttatgagatttttctgcgtagaccattaacttggtaaaaatgtcgaaaccatcctcgttctttaatagattattttggacttttctttgcaagaagcagcatgggcattcagatgcttttaaggataaaatgttctttctcatccccaggcctggtgctctggatggctgaggttttaatgtgactggatgtcccttggagtggctcccaggctgtgatcttgtggttgggtggcaaggggttgctttattcgctggtg

SEQ ID NO: 280320 - DNA, 436 bp, Homo sapiens
atgcccgccagacacattcctcttcccttttagtttctatgggaatactctctttgaagaacccatgaagcagtgtcaggctggtgtgaggatcagcagccgtttctttgaggaggagagcctgtttcttcactcacaggccatgtctgagtggatcaagaagaacagagtgcccttttatgagatttttctgcgtagaccattaacttggtaaaaatgtcraaaccatcctcgttctttaatagattattttggacttttctttgcaagaagcagcatgggcattcagatgcttttaaggataaaatgttctttctcatccccaggcctggtgctctggatggctgaggttttaatgtgactggatgtcccttggagtggctcccaggctgtgatcttgtggttgggtggcaaggggttgctttattcgctggtg

SEQ ID NO: 280321 - DNA, 455 bp, Homo sapiens
gaccagtggcaaattaaacaagcaatcagataaaagtcagaggatagttgaggaaagtaaaagctaaactgtttggggcctctttcctggggcagcctccaggctactacaaaactgaggcgstgagcagagaggtgacaagatgcagagcactcaggtgagggacagagagcggaaggtggacagtccaaaaagagaaagtggcaaacatcttgtttagccaaacccattcttctcagtattcccaagggcctctaaccctgtgagcttggcctctaatctgaatatgatgcccctgggcctctaacttttggggctgagtctctcaccctaacattatgccctagggtctctcacttaaataatagtggataatcgttcttgcccgcctgaatggcttcacgactctaaaagatggcccacttgccagctgattgattctgtgtggattgttt

SEQ ID NO: 280322 - DNA, 2374 bp, Homo sapiens
acaattcaatatgagatttgggtggggacacaaagcctaatcatatcaggtagctattaattgcttttcagatggataatttacaaatattttctcccattctgtggattttctcttcactttgtttattgtttccttcaccttaaaaaggctttctgacttgctttaatcccatttgtccatgtttgttttggttgtctgtgcttatggggcattatttaagaaatttttgcccaaaccaatgccctaaagagtttcyccaatgttttcttgtaaaaatttgatagtttgagatgttatgtttaagtctttatttcattttaatttgatttttgtatgtggcaagaaataggattctcgttttattcttctgcctatggcttgccagttttcccagccctattgattacaaaacctgtcttattttttattgtatgttcttggcacttttgttgaaagtaagttcagtttagctgtatgagtttgtttctaaggtctctatttcattccatctgtctttatgtctgtttttatgctagtgtcatgctgttttaattaccataacttagtggtataatttawacaattcaatatgagatttgggtggggacacaaagcctaatcatatcaggtagctattaattgcttttcagatggataatttacaaatattttctcccattctgtggattttctcttcactttgtttattgtttccttcaccttaaaaaggctttctgacttgctttaatcccatttgtccatgtttgttttggttgtctgtgcttatggggcattatttaagaaatttttgcccaaaccaatgccctaaagagtttctccaatgttttcttgtaaaaatttgatagtttgagatgttatgtttaagtctttatttcattttaatttgatttttgwatgtggcaagaaataggattctcgttttattcttctgcctatggcttgccagttttcccagccctattgattacaaaacctgtcttattttttattgtatgttcttggcacttttgttgaaagtaagttcagtttagctgtatgagtttgtttctaaggtctctatttcattccatctgtctttatgtctgtttttatgctagtgtcatgctgttttaattaccataacttagtggtataatttawtaaatcatcaatttcaaattcaaactcttatatatccctagggcatgacagaaattcagccaaccactttgctaagacaacatgcgtgacctttgttttggtcctaattagtttctaattttcatctgagacctcctcagcccagccttcactgtccagatcactatcagcattttggtcacagccattcaaccagtctctaagaaaatctcaactttctctcatttttctgtcttcttctgaatcctacaaactcttccaacctctgcctatttacccaattacaaagctgattccacattttcaggtattcttataacaattttccactccttggtgccaattttawgtattaagctatttttgcatcactataagagtgggactggataatttatttttaaaaaaggaggtttaagtggctcctggttctacaggctgtagagaagacatagcactggcatatgcttctggggtggcctgtggaagtttacagtcatggcagaagttgaagcagaatcttgcacatcacacagcaaaaagcaggagtgaaaaacagaggtgcaagttgttacacwtaggttttttgcaaatttttgcatcaatattctcagatatgggcctgtagtttgcttttttaatgtgtctctgtctggttttgatatcagggtaatactagcctcaaagaatgagtttggaaatgttctttccttttctatttttcagtctggtcctacagacttttttwattaaggctttaattttgttaattgttattggtctgttcaggttttagattttttcctagttcaatcttggtaagttgtgtttgtctaagaattaatttcctgtaggttttctaatttgttggcacacaattgctgatagtaaccactaatgatcctttgattttctgaagcatttcttgtaatgtctcctttttcacctctgattttactaatttgtatcttctctgtttttcagttagcctgtctaaatattggtcaattgttttacttttcaaaaaatcaactttttgtttattagtcttttgcattgttttcttcattttaactttatttacttccgctctaatctttattatttcttctaattttggatttggcttggcctttttcttctaattaattaagatgtattgttaggttatttatttgaagcttttctgttttttatgttggcacttaca

SEQ ID NO: 280323 - DNA, 511 bp, Homo sapiens
tcagttaagtgccttgaggtggtcttctttgggttaaatctgctttatgttttgtaagtttctgttactcgagtgttgatttcaaatgttgaggaattgtttaatattatttaatattatttatttaaataaatgttcaactcatctctttttstacctcctctttaaggccaataactcttagatttgctattttgaggctattttttagattctgtaggcatgctttattttttattcttttttgtctcctctgactttgtatttttaaatagtctgacttcaagttcactaaatctatcttctccttgatcaattcttttaagtaattctgatccattcttcagtatgacaatatcattttaacttcagaatttctgctttattctttttatttcaatctcattgttaaatttatctgatagaattttgaattccttctctgtgttatattgcatttctttgaattacctcaaccagctattttggatttcctgtatgaaaggtcaca

SEQ ID NO: 280324 - DNA, 598 bp, Homo sapiens
tggctaccatataagtttattcaaagccttggtactctgtgattaataggtggcaaagccagccaggtttgtgtctctgcctgtagggtggcaagttcccctagccatgagtcggtccacagatgctacctgggagccagagattaaagcatagaatcttmaaaatttacctgctcttctattttactgtagctaacctggcacttagggaataagagaaagtattttctactcttccttcccctgtctgcaggcagaagagcctcttctatgactgccaacactactggcccatgggagggttccacaaaatcatcatcactttctcacttaaagcccaaagactctttagttagcttgtgataaattctgcaatgcctgggactcaacctttggcccagggcaagtgcagaaatgctgaccaagaccctaggcctggagtcagggactctaagaatctgcttggtgctctaccccactgtggttgagctggcatatcaggtgcaacgcagagttccctttactttccccactgcttttctcaaacataagaagtctttcaccatagctaccacagctagaaatgcactgggtctca

SEQ ID NO: 280325 - DNA, 598 bp, Homo sapiens
tggctaccatataagtttattcaaagccttggtactctgtgattaataggtggcaaagccagccaggtttgtgtctctgcctgtagggtggcaagttcccctagccatgagtcggtccacagatgctacctgggagccagagattaaagcatagaatcttcaaaatttacctgctcttctattttactgtagctaacctggcacttagggaataagagaaagtattttctactcttccttcccctgtctgcaggcagaagagcctcttctatgactgccaacactactggcccatgggagggttccacaaaatcatcatcactttctcacttaaagcccaaagactctttagttagcttgtgataaattctgcaatgcctgggactcaacctttggcccagggcaagtgcagaaatgctgaccaagaccctaggcctggrgtcagggactctaagaatctgcttggtgctctaccccactgtggttgagctggcatatcaggtgcaacgcagagttccctttactttccccactgcttttctcaaacataagaagtctttcaccatagctaccacagctagaaatgcactgggtctca

SEQ ID NO: 280326 - DNA, 598 bp, Homo sapiens
tggctaccatataagtttattcaaagccttggtactctgtgattaataggtggcaaagccagccaggtttgtgtctctgcctgtagggtggcaagttcccctagccatgagtcggtccacagatgctacctgggagccagagattaaagcatagaatcttcaaaatttacctgctcttctattttactgtagctaacctggcacttagggaataagagaaagtattttctactcttccttcccctgtctgcaggcagaagagcctcttctatgactgccaacactactggcccatgggagggttccacaaaatcatcatcactttctcacttaaagcccaaagactctttagttagcttgtgataaattctgcaatgcctgggactcaacctttggcccagggcaagtgcagaaatgctgaccaagaccctaggcctggagtcagggactctaagaatctgcttggtgctctaccccactgtggttgagctggyatatcaggtgcaacgcagagttccctttactttccccactgcttttctcaaacataagaagtctttcaccatagctaccacagctagaaatgcactgggtctca

SEQ ID NO: 280327 - DNA, 1140 bp, Homo sapiens
tgtgttacgtgtatgtgataatattttgtaaataagctygttcttaaatcgttagtaaaatagaaatggctttacaattatccattaaatataattagatatttgcttgatttaactgtgagcttatgtcttttgttgagagtttctggattcagggggtcttgatagaggaccatgatgaagtatggagacatgttctcagtgcctagaccagcagctaaaagccagaatcaagcccaatcggccccttctttctgtgctttccctgttttgccttctggctattttaggaggggttggatcctccaggtatagccttcacagctctgtctttagtcctaatggactcaggcaggccctgatcttcacagttttcctgggtgccatgtggctacttgggacctaaaattactgagggaagacattacggatgctacctgtgtcatggtttcaaaattctgttcagtaatttaaaatcttaaagtcacgttaaattaagtaatagatagccataaaatatcttgagtcatttgtaagctaaaatagtgaaatattaaccattaaaaattagtttagttcwaaacatcaaaatcaaatatttgagtccttggagatgccaagaaataaaagataccacccttgttactcagtaagaacattcaaagawgggatatattcattcctttatttcagaaatttttattcagcactactctgtgcctgacagtggagcttaacagtgaacaagataggcccctaccgtaatgaagattacatttgaaaaaggggccagacatatgtaagcagatatccatgcatcaaaaactaaagtgatgcaaatgtatatgtgtacctatatacacatacattgtatacagatatagacatatacattacatcttagtgatacgttatatattttaactgttattgaatattcagatcatagtccttttataatgccattgattgttttaaagacacggcccttttccaggcaggtctggaatccatggcttcactgtaagcatgaacacaccagttctcccaaggcctccaacagcatgtctggcctctcaaggccaaatgacttgaatttgtcccaagggcctggagctgtatttggtcaagtatctattt

SEQ ID NO: 280328 - DNA, 560 bp, Homo sapiens
aaacatcaaaatcaaatatttgagtccttggagatgccaagaaataaaagataccacccttgttactcagtaagaacattcaaagatgggatatattcattcctttattycagaaatttttattcagcactactctgtgcctgacagtggagcttaacagtgaacaagataggcccctaccgtaatgaagattacatttgaaaaaggggccagacatatgtaagcagatatccatgcatcaaaaactaaagtgatgcaaatgtatatgtgtacctatatacacatacattgtatacagatatagacatatacattacatcttagtgatacgttatatattttaactgttattgaatattcagatcatagtccttttataatgccattgattgttttaaagacacggcccttttccaggcaggtctggaatccatggcttcactgtaagcatgaacacaccagttctcccaaggcctccaacagcatgtctggcctctcaaggccaaatgacttgaatttgtcccaagggcctggagctgtatttggtcaagtatctattt

SEQ ID NO: 280329 - DNA, 512 bp, Homo sapiens
ctattagggaaatatcagggaaaagaactaatcaacaaagaagattaacaatgaagtaaaatttaacatacgtacagaaaagatacttttgaagtgatagggaaattcaaaataaaacttagttagaacatagacttattttaaatgttttattactttgtgcctagtttcaatacaatacagaatgcaatttggttggcataaaatagagaaaactttttgttacatgcactgtaattaaaagtagaaaaggtaactcaatattaacaatttgaaatttaaaagatatatttgtagtccaggagtggtggctcacacctgtratcccagcactttgggaggccaaggtgggcagatcacttgagtccaggagttcaagaccagcccagctaacatggctaaactccatctctaaaaaaataaaaaaattagtgggacgtggcagcatgtgcctgtggtcccaactactcgagaggctgaagtgggaggatcacttgagcccagagaggtca

SEQ ID NO: 280330 - DNA, 611 bp, Homo sapiens
tgtttgcccttaagtttgtagggaaaagagggtaaacaaccagagaacagttcaaaagaggagatatataattaaatgctaaaattatagatatagataattcataacaagttttagccattgtttaagaagatttaaaattatgtcaatccatactaaaaatataagatcagcatttctcttcttaaaaatacccttgtaagtaatttctagagatctgcttatgtgtgttaaattatacacaataagttagaggctgaatataataaatatttactgcttctaaaacttctacratcacttaaatttaaaattcaggtagttttccactcaaaggaagatatccagaaaatatattattacgagaaagtgggaaataaagaaaaaaaaattctaatgtaggcaaaagagaggaaaaattttaaaaatggaaacaaacactgaaagcaaaaatattagctaactattcatatgtgtgatttaaccatctcccactaatcaaatgccaacaatcccaggtggaaaaaattcactacaagctttaatggaagcactcatgaataaattttggcataagcagttttgtaaatagaagaggttaaataggaatc

SEQ ID NO: 280331 - DNA, 684 bp, Homo sapiens
tctaatacttgcagtttaaccaaaaacatatgtaccaataaaaaaacaaaacaaaacaaaacaacacctttgccagcaaaacaaccrttacagttgcatacctaacaagaacctacttttgtagtagaatcaacacatttgcctaaggacaggtaaaagaaaattgagacatgggttaggagtagtaggtggcttcaactggaggtcagagggcacagatgaagtggtactaccagcaacctggaaataactgaaaagaagttgatatttgctggcaagttgattgaataaagtgttttaaaacactgaaggtgctatggtttaaatattagccccctccaaaactcatgttgaaatttaactgcctctgtaacagtactaagatgtgggaactttcagagttgactagaccatgaggggtctgccctcatgaatggattaatgccattattgtaggagtgggttcattactaaaggatgatttcggaccctcccactcttattggcccttcagccattgggtaacacagcaagaaggcccttccctgttgcagccccttactcttggacttcccagcctccagaactgtgagccaataaacttctgttcattataaagtacctagtctcagaaattctgttacagcagcaaaaacagactgagagaaggtaagtgtaatcttt

SEQ ID NO: 280332 - DNA, 1241 bp, Homo sapiens
tctaatacttgcagtttaaccaaaaacatatgtaccaataaaaaaacaaaacaaaacaaaacaacacctttgccagcaaaacaaccgttacagttgcatacctaacaagaacctacttttgtagtagaatcaacacatttgcctaaggacaggtaaaagaaaattgagacatgggttaggagtagtaggtggcttcaactggaggtcagagggcacagatgaagtggtactaccagcaacctggaaataactgaaaagaagttgatatttgctggcaagttgattgaataaagtgttttaaaacactgaaggtgctatggtttaaatattagccccctccaaaactcatgttgaaatttaactgcctctgtaacagtaytaagatgtgggaactttcagagttgactagaccatgaggggtctgccctcatgaatggattaatgccattattgtaggagtgggttcattactaaaggatgatttcggaccctcccactcttattggcccttcagccattgggtaacacagcaagaaggcccttccctgttgcagccccttactcttggacttcccagcctccagaactgtgagccaataaacttctgttcattataaagtacctagtctcagaaattctgttacagcagcaaaaacagactgagagaaggtaagtgtaatctttwctgttagcatgctaggcgtataatgagcagggaggacagctagacattgctttcatccccatcttgattctggctggtttctgccagtttctttaccacatcctgttatatcagtgtcgtctttgtgacctcttcttgagaaacaagtcctaacaaactcctatctcagtttgtatgtgactatgtatacatttgatgtttcaggcattaataactctaaaattaatgtataggctcagtatggctatatwtcattttacttgatttcgtatggttcaacatcaactgcatgctgatttttagtaaatattggtctcaaattttgcctcggtatatgttttgggtatatagataaaatgcttcttccaactgtccttttagttctggctaccacaagtacattgcctctgaccagcagcacaatgatgttggaacttgtgtcagaagaatcatatccttcttttagcttccatctactttttgcacttttataacctaaaccatgtcccactttgtcaatgtacaattcaggataaagtcattgatgtcacactga

SEQ ID NO: 280333 - DNA, 556 bp, Homo sapiens
ctgttagcatgctaggcgtataatgagcagggaggacagctagacattgctttcatccccatcttgattctggctggtttctgccagtttctttaccacatcctgttatatcagtgtcgtctttgtgacctcttcttgagaaacaagtcctaacaaactcctatctcagtttgtatgtgactatgtatacatttgatgtttcaggcattaataactctaaaattaatgtataggctcagtatggctatatatcattttacttgatttcgtatggttcaacatcaactgcatgctgatttttagtaaatattggtctcaaattttgcytcggtatatgttttgggtatatagataaaatgcttcttccaactgtccttttagttctggctaccacaagtacattgcctctgaccagcagcacaatgatgttggaacttgtgtcagaagaatcatatccttcttttagcttccatctactttttgcacttttataacctaaaccatgtcccactttgtcaatgtacaattcaggataaagtcattgatgtcacactga

SEQ ID NO: 280334 - DNA, 520 bp, Homo sapiens
cccctcactaacaatttcatcactggctagacacctaacttctctgaacttccactgtctcatttgaaaattaggataagagccgttttgccaactttgtgtgatccttgaaacgtartatgttctattaaagtggttttctcgattaattaaaagggttcctttttgtatttaaaacttttttttttttgagacggagtttcgctctttgttgcccaggctagagtgcaatggcgcaatcttggctcactgcaacctccgcctctcaggttcaagtgattctcctgccttagcctcctgagtagccgagattacagacatgtgccaccacgcccggctaattttgtatttttagtggagatggggtttctctatgttggtcaggctagtcttgaactcctgttctctggtgatcctcctgcctcagcctcccaaagtgttcagattacaggtgtgagccactgtgcccagccttaaaactttacattaaaaaaatcttgctttccatcatgtcttctca

SEQ ID NO: 280335 - DNA, 520 bp, Homo sapiens
cccctcactaacaatttcatcactggctagacacctaacttctctgaacttccactgtctcatttgaaaattaggataagagccgttttgccaactttgtgtgatccttgaaacgtaatatgttctattaaagtggttttctcgattaattaaaagkgttcctttttgtatttaaaacttttttttttttgagacggagtttcgctctttgttgcccaggctagagtgcaatggcgcaatcttggctcactgcaacctccgcctctcaggttcaagtgattctcctgccttagcctcctgagtagccgagattacagacatgtgccaccacgcccggctaattttgtatttttagtggagatggggtttctctatgttggtcaggctagtcttgaactcctgttctctggtgatcctcctgcctcagcctcccaaagtgttcagattacaggtgtgagccactgtgcccagccttaaaactttacattaaaaaaatcttgctttccatcatgtcttctca

SEQ ID NO: 280336 - DNA, 520 bp, Homo sapiens
cccctcactaacaatttcatcactggctagacacctaacttctctgaacttccactgtctcatttgaaaattaggataagagccgttttgccaactttgtgtgatccttgaaacgtaatatgttctattaaagtggttttctcgattaattaaaagggttcctttttgtatttaaaacttttttttttttgagacggagtttcgctctttgttgcccaggctagagtgcaatggcgcaatcttggctcactgcaacctccgcctctcaggttcaagtgattctcctgccttagcctcctgagtagccgagattacagacatgtgccaccacgcccggctaattttgtatttttagtggagatggggtttctctatgttggtcaggctagtcttgaactcctgttctcyggtgatcctcctgcctcagcctcccaaagtgttcagattacaggtgtgagccactgtgcccagccttaaaactttacattaaaaaaatcttgctttccatcatgtcttctca

SEQ ID NO: 280337 - DNA, 589 bp, Homo sapiens
ttaaacctatagtttttttttttcacagtgtttagcacccatcacacaataastaattcatttttattagacatagtaagccaaactatgaagctgaaagctgaagccatcaaaaggatttggctctaatagttgtatttgtctttataaatgtacagttttgtcagtctttttttttttttttggtaaaacagcttaacataaacatttttatcaagacatttacattttaaaataataaatttgtttaacattgtgctctatgtcaccataacaaaatatctatattcattcctgaatcattttatttacttactagaaaagagaatctctaattgtgtaataaaatgctaattttgagtgtaagtaaatgatagtaatttttaaatgatgctatttattctactttaaaaatctgcctacttctacatatttttgctcattaaaaacatttatttctcctctatgaaactggaccatgtactattctaagatttatcatttatagactacttttaatgagatttacttaagtctttatacttataatatgtggtgatttgtttatagcagctggttcttgtaacta

SEQ ID NO: 280338 - DNA, 626 bp, Homo sapiens
gtggtgttggagataaagcaatttagctttgttagaaaaagtaggaaaaaattacaggcctgtgaaagccattctgtaattaagttaatagtcatagatttctcacttactctccacatttttccaaccacagttaactctttagggtactatgtttggtgaatcatatagcctttttaatatgaagtgcatatttgacaaaatgaatgataatgtagtgagttacattaaagctaaaacagcatayttgatcttggcatttgcagatttttgatacttacttttgactatttgttgggagtgagcttgaagatttatgacgtggaatttgtcattacattaggtacccctttatatcatctacactgataacatacgaggtaattgtgtatagtgctatattccactaacgtttttatcatataaaatcactttaaatatcttaggcctcttgttataaatccctttttatagagctgcagttgtgttgaggtattgagtaatagtgcaaatgccagataaactagctttttgtctttcagggagaaatagaaacagcattttaaatgctagtgtaaatcaaattttgtgctttttagtatgcagtttaaaaaacttcaccatgt

SEQ ID NO: 280339 - DNA, 626 bp, Homo sapiens
gtggtgttggagataaagcaatttagctttgttagaaaaagtaggaaaaaattacaggcctgtgaaagccattctgtaattaagttaatagtcatagatttctcacttactctccacatttttccaaccacagttaactctttagggtactatgtttggtgaatcatatagcctttttaatatgaagtgcatatttgacaaaatgaatgataatgtagtgagttacattaaagctaaaacagcatatttgatcttggcatttgcagatttttgatacttacttttgactatttgttgggagtgagcttgaagatttatgacgtggaatttgtcattacattaggtacccctttatatcatctacactgataacatacgaggtaattgtgtatagtgctatattccactaacgtttttatcatataaaatcactttaaatatcttaggcctcttgttataaatccctttttatagagctgcagttgtgttgaggtattgagtaatastgcaaatgccagataaactagctttttgtctttcagggagaaatagaaacagcattttaaatgctagtgtaaatcaaattttgtgctttttagtatgcagtttaaaaaacttcaccatgt

SEQ ID NO: 280340 - DNA, 444 bp, Homo sapiens
ttttagttaaaaactgcacatattacttcaatacaaagttttaaaatcaggttattctatagtaaacttcattgtagctaaatctgcatattatgtctgtcattgttttttcagttacagttctaggaattgaatttctgtgtgaaaggcatattcaatattaaacattttcacactattaccaaaatgcttttctgaagatttaaacatctttccatgagctttcttcacagctttcccattcagctaytgttcataaagtttttgcagttatggctagatgataaactagaaatattttcattgtatatgaacaagtctaataaagataaagaactacttcatagaaaaataattcatgaatacatacatcagtttacaaaaaagatgagttcatgaataccataaaatatagcttttttgtctatttgggttattgatttt

SEQ ID NO: 280341 - DNA, 668 bp, Homo sapiens
acacaattgactttggagactcaagggtaagggtgggaagagggcaagagataaaagactacaaattgggtgccgtgtatattgcttgggtgacaggtgcaccaaaatcttacaaatcaccactaaagaacttactcatgtaaccaaacaccacctgttccccaataacctatggaaatgataaaattttttaaaaaagaaataccacagaaaagatgctgctctttrtgaagcatcatatctaagaacattccaacacatccccccagtagtggtggtaaccttgatcacctaatcaagttgatgcctgacagatctctgcaatgtaaagtcataattttctttcccctgtgttttggattgctgttttgtgggaagatattcagacatttcactaacatcctgttcttcatcataccttcagcctacagctttagcattcaatctacatccatagcatccattgactgtttgtcactgcttgtattaactgactctgtgatagttgcccaagagtaaatatccatttccatcctaacttctacatactggaaattggcattttgctgtaagaaagatccttccttttccctcatttatatatttacccaattatttatatcagtgcatagtcatggatttccattgtatatgatgggctgtattct

SEQ ID NO: 280342 - DNA, 608 bp, Homo sapiens
ttctattattgagcattttcttactttctgacaaaacaaaatatttcaaggtcatcttgaatttttctgacagcagtcctggtacaaccaccatgtcaaggaactctagcttcttttattggaagactgtgagatggtgtttggattgcttgacatcttattattgaactgtaagggttctccacatattccggatataaaaatttttggaaatatatatgacaatttctcccagtctgttgattgcctttccattttcttattggtgtacttgaagagtacaagttttaattttggtgatatagaatttatcatttttttctgttttggggaataagggaattggttttttatgatcctgtgtatgtaatctctgcctacccaaagattatagagattgtattctatgctttcttctgagttttatagaatcagcttttttttacaytgaggcctgggattaatttcaaaatatttttttgtattgtatgaggtagatgtagagactatgttttattacatggctatttagtggatcaaaccatcttagttctaaaagtttatgctcttaattttattttgctccactcctacaacacaacttgttt

SEQ ID NO: 280343 - DNA, 546 bp, Homo sapiens
atggaatacaatctgtgagattattcctgttgtttttctactactatgtcaattatcattctttgaagggaaaaattaacagggcctctgttgggcattgaggaaaaaactctggactctgggtcagaagaaaggaaacaagccataaccacttggagcctcacttctcatatgtataaaataatagcaatagtggttagtatttattgagcagatggaacttctacttctaatcctcacaatagcccacttgagtttmtggaataatttatttagtcaaatttatgtgaaaatgcctgccatactatatactattgttctgaaaatcaaatggggcaattcatataaaactatctgaaaattaaagttacaattttcaataggaaggactcttgtctatctttcttgaaatcatttttatagctgttttgcataactcagttgctgtcagagaaaaagaagttgtatacaaattccaaataataatttgacactaataagcaatgtcaaaataagaacatagagttaaacactttttcccttgag

SEQ ID NO: 280344 - DNA, 576 bp, Homo sapiens
aggtaactggataaaattggtttagaaagctcccagggagtaagaacagtggttgtaagaatratttagattatatatgaatgttttaggtttttctctcagtggctggctgttctgtttcctgaacctgaatgatagagctggctttggcttaggaagaaaaaggcagcctgtaaggagtgaccaggcggtaggtggggaggactggtaatgtcatccacggttccctactgctgctttgtgggtttcaggaggtgcaccgtgtcaggaggctggggctcctctattcctgcagaggaacagctgcccagtcactcagcctggggttcacaccttccgcagtgcttgttgcaggaggttcagtgtagtgtgtgcatgtccacctccagctgccaaacttctcaacaggatgtagatgaacctgggctgacaaattggataaggtgggctggcaggccaaagcttcaattaccagtaccacatcctttcccttctaggatacacaaaagtaactggcctcattccttcctctcccaaatagagaagccttggcttgaaaattccagggagtggcca

SEQ ID NO: 280345 - DNA, 683 bp, Homo sapiens
agaaaaccaggatgagaagaaaaagtactcctcaccccaaccctgctgttctcccaggttctatatctttctaagtgacaccaccaactgttcatccaagaacctaagccaaagtctggaaactgtccttcatcatttcctttatcccacagaaccatcaacaaggaaaagctctccattgtttgaatgatccacccctctcaagctcctctatccccagcccaagccaccaacatctccggaggaggacactggtctcctagacccatctctctgcctgcactgccccagtgactctaaaatctgagtcaatccctatgatgacttctcyatgctcttgcaagaaaattcagcaccctctctccataggctctgagtcggcctgtctggtctggatttggcttccttttccacagacaggaggccccctcaactgcaggaaatacgttctaagaccctcagtggatgcctgaaaccatggaaaatttggaaccctatatacactatgtttttttcctgttcataagtacctatgataaagttgaatttataaattaggcatagtaagagatgaacaataacaatagtacaataataaaaatatattgttttttatatattatacatatggataatatactgtaataaaagttattggaatgtgatgtctctctcaaaacatc

SEQ ID NO: 280346 - DNA, 683 bp, Homo sapiens
agaaaaccaggatgagaagaaaaagtactcctcaccccaaccctgctgttctcccaggttctatatctttctaagtgacaccaccaactgttcatccaagaacctaagccaaagtctggaaactgtccttcatcatttcctttatcccacagaaccatcaacaaggaaaagctctccattgtttgaatgatccacccctctcaagctcctctatccccagcccaagccaccaacatctccggaggaggacactggtctcctagacccatctctctgcctgcactgccccagtgactctaaaatctgagtcaatccctatgatgacttctccatgctcttgcaagaaaattcagcrccctctctccataggctctgagtcggcctgtctggtctggatttggcttccttttccacagacaggaggccccctcaactgcaggaaatacgttctaagaccctcagtggatgcctgaaaccatggaaaatttggaaccctatatacactatgtttttttcctgttcataagtacctatgataaagttgaatttataaattaggcatagtaagagatgaacaataacaatagtacaataataaaaatatattgttttttatatattatacatatggataatatactgtaataaaagttattggaatgtgatgtctctctcaaaacatc

SEQ ID NO: 280347 - DNA, 576 bp, Homo sapiens
cacggggaggggtgacgtgtgtgtacactgcacatgtgccacagagggctggggtggtgactgccagcaaggcctttttgagcctgagtcttgaaaaaggagaaatcagccagacaatgaacacaggaggagaaagggaattccaggcagaggtacagaaggagcaaaggcagaaaagcactgggcggtaccagtgcagtttacgggaggttcagttttgcaagaaaagaatgtttcaggcaggggacaaggcarggagatgggaagggagtgaagaaagctttgactctgttgggtcattacaaatggccagcagcctggtgagcccatggagcactgtggaaagttccctggctgcatgctgacaggaactgagttctgggtcaagactctgccctaaggtgtctaaatgacctcaggaacacactgtatgactctggataccacatgtaaaacaaggttccccatgttccaagggtgggggactccctgggatggcctatgcctccatatttacagactccccactgctgtttgggatatagaatcgaccctgccctatctccacccaggggg

SEQ ID NO: 280348 - DNA, 626 bp, Homo sapiens
gagagaaatgcacaaaattactattttgaagagtttcagtctcttgtcttgaaggagccaatgtttttcaagaaaaaacaacaacaagccttttttgctttcccaattagagtgtaaatagggtccaaattcttcatctatgaaagacgttagaagtccttaggacttacctctttgggttacactttaatgactgacatttacttccccattctttcctgtagtgtygaaggaacattttgagcaatactgtacgtgacttgtcaattctgaaatcacagtggatgcagtgctaactaatatgctaaagtaagcctagacactaatgttcccttctctctcgctagacatgcgatgaggccaacgatgaggtctcccaaaggaaagtgattgaagacaaagacccattctgccagtgggatatgctgggaataccaactatacttgttactgagtgtgcatggctggtgttggccagccttcctgatgccagcaagaggagacagaagtaatgacccaagctacactttccatgacactcaaatggccaggctctttgacacccaccgtgaggggctgttccaaagatgttgtgttcctacctcagttggtccccacaagcagca

SEQ ID NO: 280349 - DNA, 626 bp, Homo sapiens
gagagaaatgcacaaaattactattttgaagagtttcagtctcttgtcttgaaggagccaatgtttttcaagaaaaaacaacaacaagccttttttgctttcccaattagagtgtaaatagggtccaaattcttcatctatgaaagacgttagaagtccttaggacttacctctttgggttacactttaatgactgacatttacttccccattctttcctgtagtgtcgaaggaacattttgagcaatactgtacgtgacttgtcaattctgaaatcacagtggatgcagtgctaactaatatgctaaagtaagcctagacactaatgttcccttctctctcgctagacatgcgatgaggccaacgatgaggtctcccaaaggaaagtgattsaagacaaagacccattctgccagtgggatatgctgggaataccaactatacttgttactgagtgtgcatggctggtgttggccagccttcctgatgccagcaagaggagacagaagtaatgacccaagctacactttccatgacactcaaatggccaggctctttgacacccaccgtgaggggctgttccaaagatgttgtgttcctacctcagttggtccccacaagcagca

SEQ ID NO: 280350 - DNA, 528 bp, Homo sapiens
ctccgcctcccaggttaaagggattcacctgtctcagcttcccgagtagctgggattacaagcacctaccaccatgcctggctaattttgtatttttactagagacagggtttcaccatgttgaccaggctggtctcaaacttctgccctcaaatcatctgcccacctcagcctcccaaaatgctgggattacgggcaggagccaccattgtactaatactttctcatgatgaagttattaacaaacattcatgaatttatttattcctatattcaacagacatatatcgcacacttactatatgctgttgctgatgagattaataagacatggttyttgtgaggctgtacagtgtaatgactagacacgctactgaacaactttgtttaatcaaccaacatctcccaagtgcctgctgtgagccaggtgccattctaaatgcagcagtgctcaagagagacaaaaatccctctgctgttagaacttacatcccagtgaaggaaacagatagtaaactaaattatata

SEQ ID NO: 280351 - DNA, 404 bp, Homo sapiens
atacaaggattagaaaaatatttacctaaattttaatctagctatcttaaatattcaatatttacatttaacactttaatcttaacatctgagattaatttggggcaagtcaactttttactaacaaaactaaaaagctctcaacatgggttgatttacacattttgatggataactaaggcccttccttttccagttctaggctcagttgaagctactgacaagaatggattaaggttgaatctctaacaygaacaagtcaacatttgtacttctacacagaaaaatttaagataacacactgaaagtctatagcaaatagttggctgacaaaagctattagcaaaactcagattcttcctaagcataactagcgggaagggaagtagtaaataataaccatg

SEQ ID NO: 280352 - DNA, 584 bp, Homo sapiens
ttaggtgaggaggagtacagttgaccgtactttttaaagtgctgtcggctttagaaagtgtggtattttttaataccactttttactgcccagctgtaagaagcctgtcattttcagcatgttgtagaagtcctaaaagccaacagttttcttaagcatcagcaaaaacaaaacaaaaacagcaacaaacaaacaaaaaccccacatacaactcagcttgaacatttctgatatcatcctctaaaatattctcttaacaaatctatcctacactgaaagttccataggaaaagttacaaagggaagggggatttctaaaatctgactcttcaccstagctttccatttccctgaaaagatttctaagatgtgcacagaaaatgaacttccaataattgtctccacagtattaatgtgtatcttctgttgggagaaaatctgtaacctcatcaaggaatagcattcaaataaattttcattgtcccactgcacaaagctaagcttaggcgaatcctaatttgttattcattcttcttgtttaattcataatttgatggtaaatgtggtgacacagcagtgcccta

SEQ ID NO: 280353 - DNA, 498 bp, Homo sapiens
cccttatgacctaatcacattccccattaatttcaacacctgaattttggaggggatatattcaaaccataccagtctgtaaatctttataatggttatatcttctttctgtattgagtcttttattaatatataatgttcttttctgtctcttgtgaccttttagggttaaagtctatatttttctaatattagtatagccacatcacctctctttttggttactatttacatggaataattttttctatcctttcactttcaacctacttgtgtctttgaatctaaagtgagtctcatagttggatcatggtaggttttttaaaaatcmatttttctctcttttgattggaggatttaattcatttatatttaaagtaattactgataagaagggacttacttctgccattttgctatttgttttccatatgacctctagttttacattcctcatttcctccattactgccttctttgtgtttagttgattttttt

SEQ ID NO: 280354 - DNA, 549 bp, Homo sapiens
tctagtggtaacaaactcatcttttgtttatctgagaatattgtaatttcgcacttatttttaagaacagttttgctgaatattgaattctyagttgacaggttttttttctttaagcacttcgaatatatcaactcactgacttctggccttctagattgctgatgagaaatcagctgaaaacttttttttagagatgggttttgttatgttgcctaggctgtacttgaactcctgggctcaagtcattttcctgcttcagcctcttgaatagctgggactacaggtgcacaccaccatgcctggcttgctgaaatctcattgagagcccttctatgtaattagtcacttctctcttgctgcttttaagattctctccttgtcttttgattataatgtgcatcactgtgcatctctttgagtctaccctacttcttagtttatcaagcttcttggatttgtaaattgatgtctttcatcaaatttggagcattatcaggcattaattcttcaaatattatttctgccctttcctctcttttctccttc

SEQ ID NO: 280355 - DNA, 603 bp, Homo sapiens
aattcttcaaatattatttctgccctttcctctcttttctccttctgagattaccacaatatgtaagttgttctgtttgatgatgccccacgggatctgtggggctatgttcacttttccttgttttttttctttctgttcatcactcagtaatctcaatggttgtatcttcaagtttgctggttctttcttcagcttgatcaaacctgcttttgaacccctctaatgtatttttttttcatttcagtgattatatttttcagctccagaatttctttttggccctcttttatactttctacctcttcattgatattctcattttatctatgcattgttttcctgtctttgttcatgtcttccttcagttttttgagcatctttaagacagtcattttaaagtctttatctaggaagtccaatatttgggctccttcaaatatgttttccatttatttattttgctcctttgaatgagtcatactttctatgtcttgttattttgttgttgttgagagatgracatttgaatcttataacatggtaactctggaaattgggttttctcccttcctcaaagtttgtgttgcttttgtttttttg

SEQ ID NO: 280356 - DNA, 566 bp, Homo sapiens
atactagtctgggaggagggcccactgagaaaggagggagggaaagcgggaaaaccaggagaggattgaactgttggtgtgtgcctcaaaagcctgcacctctgcccacctgcttccacacccaagtcttctggcatttacttgctgggtcctgccttggatatggtagcttgctgaaccaagttaagtccctgtcaggcctgttcatctctaaaactgtctggaaagaaggatctttgccggcatctccaaacctagctacagagaggaaggctgggcagcctactcctggggcaggcaggaggctggggtaaccagctgtcctatgacaamgagtccaggcctagcatactgcagcgactcagatctgggtcgaggctcatcccctcctcccccaactgcccaagcaggagaaggagctggtcccctacctacccaggcccataagaaggaaagtggccaagaacaaagccaaggccctctccagagcagaactggggttttgattcgtaattagctgagcggggagaaatagcccaagaaatgcacacagccccaaaaaggcc

SEQ ID NO: 280357 - DNA, 1216 bp, Homo sapiens
  misc_feature (1)...(1216): n = A,T,C or G
agcggggagaaatagcccaagaaatgcacacagccccaaaaaggccccactgcccgttctgcatccgggacatgttgaagtgttgttgtatgtgtgtgcagaggcacggactcttgtaataaaatcgttcctagtctcccggccagcccgagccgtgcagcctgacagctcaatcactctatccatcaggcgagtcaatcaaagcagcttttcggaggttcagggagcccgacgtgtcaataacggggctcgagatggcgggagctgatagtgcgcatcgatccgcgcccggccggcagctgtggggcggcgagagaccagccagaggaaagcggcgctnggctacgttgttcccggccccctgccggaccgggtgyctggagtgctgatcttgggccaaagcttctgccgctctcccagacactgcgggccggggcgtcaggcaggccttggccttctctcccggagcccagctcaggtctcctcctcgggttcgccaagcgcgaggggcacacggaaaagtggtggaaggaaagccgagaaaaacaggcctacggatgccagaagtctgctggatgtgcgggtgaaaaaaggaaagcgccgcgcggggagwttcctttacaattaaagtttcaaaacttgcttaaaccttcaaaacaaaatttttttaaccttttaatgtaggtagaaatccacattcttatgcctccttataatccttttaccaaaagtttattttgctttccttacataccttgcatataaactgtttcttcaatagttttacattcaggaggcctaattwcttttaagttatacaacatttcttgcataaattcccttttataattttgtttttcacaacttttacagacaattcttcgacatgcctcaactttctgagttgttgctaacatcgctttctttaaacaaccagttaatttattttaggacaagaatttaccatataacattcctttttacataaattctcccctcccccctttttttttcctcaaagatgatagccattcttttccaaagtgaacttccttcatgtctgtggactggactgttaaaggccacaagattagaagttaggataatacatatgacactgttaatatttagcaaattttacttttgttgaaaaccttgtaagtttgggatttcaattatcctttgctattaataagacctaatttagtccaaattt

SEQ ID NO: 280358 - DNA, 603 bp, Homo sapiens
ttcctttacaattaaagtttcaaaacttgcttaaaccttcaaaacaaaatttttttaaccttttaatgtaggtagaaatccacattcttatgcctccttataatccttttaccaaaagtttattttgctttccttacataccttgcatataaactgtttcttcaatagttttacattcaggaggcctaattacttttaarttatacaacatttcttgcataaattcccttttataattttgtttttcacaacttttacagacaattcttcgacatgcctcaactttctgagttgttgctaacatcgctttctttaaacaaccagttaatttattttaggacaagaatttaccatataacattcctttttacataaattctcccctcccccctttttttttcctcaaagatgatagccattcttttccaaagtgaacttccttcatgtctgtggactggactgttaaaggccacaagattagaagttaggataatacatatgacactgttaatatttagcaaattttacttttgttgaaaaccttgtaagtttgggatttcaattatcctttgctattaataagacctaatttagtccaaattt

SEQ ID NO: 280359 - DNA, 1114 bp, Homo sapiens
tatcttctgcctcctcaagcaaaacaattatcagccaagaattttgtatccagcaaaactaagcatcatatatgaaggaaagacacagtcattttctgccaagcaaatgctgagataattcaccatggccaagccaccayaacaagaactgctaaaaacttgaactgtttaaatctgtttaaatcttgaaacaaatcccagaaatacatcaaaacagaatctctttaagtcatatatcacacaggacctataaaacaaaaatataagttaaaaagcaaaatcaaaaaaccaaaatgaaacaaagtacaggcaacaaaaagcatgatgaatgcaatggtacctcacatttcaatactagcattaaatataaatggcctaaatgctccacttaaaagatacagaactgcagaatggataagaactcaacaaccaactacctgctaacttcaggagactcacctaacacataaggactcacwtatttatttttgccttataataggagaaaagcattcagtctttcatcattaaatataatacttaatttaaggacttttataataccttttatcaggttaaaaaattcctttctgttacagatttgttgagggcctttatcagtaattgatgttggattatgtcgcatgttttttgttgcatctgagacaaccatatagtttttcctttaaatttttttctcttttaacaatctcaagagaatgaaaaaaacaaatcaagggctagacacggtggtgcatggctgtaataccagcccttwggggtgctgaggctgatggatcacttgagaccaagagttcaagaccagcctgggcaacatggcaaaaccccatctctactaaaaattagctggatgtggtgatgtgcccctgtaatgccagctactcaggaggctgagatgggagaatcacaagactctgtctcacaaaagaaaaaaaaagcaagccaagtctgagagaaaaatctttgcaaactgtgtatctgataagggacttgtagtaataaaatacaagtaactatacataaataaataaatattattagtcattaagaaaatgcaaactaaagctataaagaaataacattgcatacctaa

SEQ ID NO: 280360 - DNA, 635 bp, Homo sapiens
tatttatttttgccttataataggagaaaagcattcagtctttcatcattaaatataatacttaatttaaggacttttataataccttttatcaggttaaaaaattcctttctgttacagatttgttgagggcctttatcagtaattgatgttggattatgtcgcatgttttttgttgcatctgagacaaccatatagtttttcctttaaatttttttctcttttaacaatctcaagagaatgaaaaaaacaaatcaagggctagacacggtggtgcatggctgtaataccagcccttagggrtgctgaggctgatggatcacttgagaccaagagttcaagaccagcctgggcaacatggcaaaaccccatctctactaaaaattagctggatgtggtgatgtgcccctgtaatgccagctactcaggaggctgagatgggagaatcacaagactctgtctcacaaaagaaaaaaaaagcaagccaagtctgagagaaaaatctttgcaaactgtgtatctgataagggacttgtagtaataaaatacaagtaactatacataaataaataaatattattagtcattaagaaaatgcaaactaaagctataaagaaataacattgcatacctaa

SEQ ID NO: 280361 - DNA, 591 bp, Homo sapiens
tctcccccacatggaaacattccaagcctgtaataagctctctcaccctaaatccaataaatactattagtctgtaagagagagtgctcctgaccgaaatcagccagaagcccctcacaggtttactctccaaaataagcctatctttgactgttgagccacttttcatgtttctttcctctttaactcttacagtctgtttataaaatcgaagacagacttctaagacaaaaaccgttgctaatgaggcagatgactctggaggaaacattttaaaaagccatctagcacaatgyctcttcatccctcaaggacccacttcctggcctctcaactgtttctaatattttcctcacctaaagagtaaaatacactgtacagtaatctttcaattgaagcacagcattgtaaatggagactgaaaacctgccattgtttgttgtggctgttgttttgcagctgatccaggtatctggtgatgctattgtgctgcctagttaccatgaacacattattttttcactctattaatgatgtaagatttttttactcttaaatacttatgtgtgagtagtgttggaaaaggattgc

SEQ ID NO: 280362 - DNA, 591 bp, Homo sapiens
tctcccccacatggaaacattccaagcctgtaataagctctctcaccctaaatccaataaatactattagtctgtaagagagagtgctcctgaccgaaatcagccagaagcccctcacaggtttactctccaaaataagcctatctttgactgttgagccacttttcatgtttctttcctctttaactcttacagtctgtttataaaatcgaagacagacttctaagacaaaaaccgttgctaatgaggcagatgactctggaggaaacattttaaaaagccatctagcacaatgcctcttcatccctcaaggacccacttcctggcckctcaactgtttctaatattttcctcacctaaagagtaaaatacactgtacagtaatctttcaattgaagcacagcattgtaaatggagactgaaaacctgccattgtttgttgtggctgttgttttgcagctgatccaggtatctggtgatgctattgtgctgcctagttaccatgaacacattattttttcactctattaatgatgtaagatttttttactcttaaatacttatgtgtgagtagtgttggaaaaggattgc

SEQ ID NO: 280363 - DNA, 574 bp, Homo sapiens
ttgctttttcaatagtaaaatgatgaatatgtgatgacacattgtatgatcygccacaattcattttactattgatggacattttggttgtttccaggttggggccattataaataaggctgctatgaacttcagtgaatatgtgttttggtgcacatgtgtgctcctgtatgttgagtataaacctaggagctgaatctctagattatgataggcattggattttctttcttctttgttttgaaaaaaaaagcagcttaattaaggtataatttatatataagaaatcaaccaattttaactttataatttttgacaaatgtattcagtgtctaagcatgatgatcatcaagatagagaactgttccatcccatcccaaaattcctttgtgcttctttgcaatcactttccccttccctcagcccctcacaacctctgatttaatttctttcggtacagttttgccttttcttgtgcccagttgatgatgagtcactcctgaatctctactgccagttttgatctctctcctgagctacaaactttcatctccacctgcctcctaagtgtccc

SEQ ID NO: 280364 - DNA, 574 bp, Homo sapiens
ttgctttttcaatagtaaaatgatgaatatgtgatgacacattgtatgatccgccacaattcattttactattgatggacattttggttgtttccaggttggggccattataaataaggctgctatgaacttcagtgaatatgtgttttggtgcacatgtgtgctcctgtatgttgagtataaacctaggagctgaatctctagattatgataggcattggattttctttcttctttgttttgaaaaaaaaagcagcttaattaaggtataatttatatataakaaatcaaccaattttaactttataatttttgacaaatgtattcagtgtctaagcatgatgatcatcaagatagagaactgttccatcccatcccaaaattcctttgtgcttctttgcaatcactttccccttccctcagcccctcacaacctctgatttaatttctttcggtacagttttgccttttcttgtgcccagttgatgatgagtcactcctgaatctctactgccagttttgatctctctcctgagctacaaactttcatctccacctgcctcctaagtgtccc

SEQ ID NO: 280365 - DNA, 574 bp, Homo sapiens
ttgctttttcaatagtaaaatgatgaatatgtgatgacacattgtatgatccgccacaattcattttactattgatggacattttggttgtttccaggttggggccattataaataaggctgctatgaacttcagtgaatatgtgttttggtgcacatgtgtgctcctgtatgttgagtataaacctaggagctgaatctctagattatgataggcattggattttctttcttctttgttttgaaaaaaaaagcagcttaattaaggtataatttatatataagaaatcaaccaattttaactttataatttttgacaaatgtattcagtgtctaagcatkatgatcatcaagatagagaactgttccatcccatcccaaaattcctttgtgcttctttgcaatcactttccccttccctcagcccctcacaacctctgatttaatttctttcggtacagttttgccttttcttgtgcccagttgatgatgagtcactcctgaatctctactgccagttttgatctctctcctgagctacaaactttcatctccacctgcctcctaagtgtccc

SEQ ID NO: 280366 - DNA, 555 bp, Homo sapiens
tgtcctcttcaactgaaagccatgtgaagacagagtccatgtctgtctagttcactgtcatgcctggaaacaaatatttgctgaaaaataaagaatactggtacataacctattctattcattcagtatatctatcatcaaatactttaaaggaaatctataatttttttgagaaaatttttgcaatctatgcatctaacatttttcattataaagaaaacaagataagttaaaaagcaratgtccaactgggagaaaatgtttctaaatatatcacttataaaggactagtatttctaatacatgtagaactcttttttaaaaaaattttattattattatactttaagttttagggtacatgtgcacaatgtgcatgtttgttacatatgtatacatgtgccatgttggtgtgctgcacccattaactcgtcatttagcattaggtatatggaaatctataattttaaaggaaatctattatattactgcataaatgtacaatcatttatttaagtaattgtcaggcattaagatagctatctttttttctga

SEQ ID NO: 280367 - DNA, 482 bp, Homo sapiens
tatgtctgtggtccagtagtccactcagataggcatcattcccttacaaagctatgaaaactcaatcctcacccttgttttttgttaaatcacaagaaacccacatttgcgacttactcatcccctcctgtgagagcagaccctgaggtggctcctgggattcccacctcctgggacccacgcactgtgtaattccctcccctgtgggtaagctggtgtttggaactcacttctagggaaaagaaaaacaggagccttggggtttaactttgatgttcatytgtatgaatcatctcattctggagtcctggagcaatcatattagagtctgattgaaagctatacaccctctcccaacacaaacgcacattatgcacagtgaatttgcaactactttcaagaggttcatgagccctttcctaaagccccatcttggagacccttaatttatggtctccaagtaaaggccccatttcctgaat

SEQ ID NO: 280368 - DNA, 648 bp, Homo sapiens
tacacttttgcatctggcttctttcactcagcataatttctgtaagattcatccatgtggttgtacatatttggaaatttgtcccctttaattactgaatagaaatttatcgtatgaatgtactatagtttgttyattcattctcctttgactgacacaaggacatctctaatttggtggtatgatgaataaagctgctacaaatattttgaagtcttttgtgggcatatatagattcatttctctcgggtaaagacctagggatgaaactgctgagccaaaggataggtgtgtgtttacatttgttagaaactttcagacagttttctaaagtggttgtgtcatgttatctttcatttaaccttcaatattagatgtattttaagctgccgtaaatatcttttggaagtaggtgagttttaagtgaaggaatgaatgaatgatggatggatgacccaacaattcagctatcctctaacccagtatgtggccaacacagagcctgtgctcactgtcctcatcctgctgggtttcttgaactcagggtggctccatctgcacagcaaaccacaccaccaaggctggcccctcctagcttttcaaccccattgccactgtagatgccttggcaggaaatccagccaggct

SEQ ID NO: 280369 - DNA, 630 bp, Homo sapiens
gggctgaggaatttgggtcttgactctcccttctgggaactgagggagacactccctcagagatctagaaatagtgatgacatgatttatcatcaaaacagggtcactcttgagagtaaaagaggacactattaatcatcacactggaacaacaggcacaatgacaggtataaactgggactgtcctttctacaaagcatgtgaaatctacttctcagggccacctcttcagccgtctctcagctcctgttcagttcatctcccattttcttcaacacaagtttgctaaagtctggggaggagctgaacagtggtcagaggggcaggactcaataaggccatccctaaggcccttatgggcacaatcaggaagccctcagatcctgcacctgctggggaaagtgtattcccagcctttgcagaacccctagtctgatagsagagccacgggccttaaccttggtgagtgcctagtccgatgggggcaatgcagacccttctcttggggagctcacacagtactgtgagcgtgcctggacattctcacatcctcaatcccttaagccttttttctggggaataaccactgccatcagtttcttgtgtctcttgtgtgagcaggcaatgcaa

SEQ ID NO: 280370 - DNA, 542 bp, Homo sapiens
cacactgcagggggaagggcttctctgctggtgtctctgtgctctgmttccttcttgctcccgcggggttcgggacacccagttgcagcctccctcaaggacttgcagtggcatcccctgtgtgcagctttctagcgagttctgctggcacctcgcccagcttccagtgagttcaaaagcaccccttgagggcttcgccgtcccaccagtcccccagccgatttttcagaaagttcagcagcgtttcctccaggcagcttcccggaaagggttgctgtcacccccgggggcagtttcctgttggacagtctccacctgtcacctgggcaaacttcattctccagtggggacagccccatgctctcccgcaaagtctgattctcatccttggtggtgagaggggaagcgggtggggtgtcccacatttgttttctcctcgggcacttcgcttagcctttagtgcctgccccatatatctgccacctctgtaaagtgctccctttaccctcagtagccaataccctgatactcccctgttatta

SEQ ID NO: 280371 - DNA, 542 bp, Homo sapiens
cacactgcagggggaagggcttctctgctggtgtctctgtgctctgattccttcttgctcccgcggggttcgggacacccagttgcagcctccctcaaggacttgcagtggcatcccctgtgtgcagctttctagcgagttctgctggcacctcgcccagcttccagtgagttcaaaagcaccccttgagggcttcgcsgtcccaccagtcccccagccgatttttcagaaagttcagcagcgtttcctccaggcagcttcccggaaagggttgctgtcacccccgggggcagtttcctgttggacagtctccacctgtcacctgggcaaacttcattctccagtggggacagccccatgctctcccgcaaagtctgattctcatccttggtggtgagaggggaagcgggtggggtgtcccacatttgttttctcctcgggcacttcgcttagcctttagtgcctgccccatatatctgccacctctgtaaagtgctccctttaccctcagtagccaataccctgatactcccctgttatta

SEQ ID NO: 280372 - DNA, 1136 bp, Homo sapiens
cacactgcagggggaagggcttctctgctggtgtctctgtgctctgattccttcttgctcccgcggggttcgggacacccagttgcagcctccctcaaggacttgcagtggcatcccctgtgtgcagctttctagcgagttctgctggcacctcgcccagcttccagtgagttcaaaagcaccccttgagggcttcgccgtcccaccagtcccccagccgatttttcagaaagttcagcagcgtttcctccaggcagcttcccggaaagggttgctgtcacccccgggggcagtttcctgttggacagtctccacctgtcacctgggcaaacttcattctccagtggggacagccccatgctctcccrcaaagtctgattctcatccttggtggtgagaggggaagcgggtggggtgtcccacatttgttttctcctcgggcacttcgcttagcctttagtgcctgccccatatatctgccacctctgtaaagtgctccctttaccctcagtagccaataccctgatactcccctgttattawtgctgcgctgcaggacccacagcccgggacaacccgcttctctctgcacacctgcaccccccttacagccaggttctggcacctcctctctcttctccagggaattcccttcaccggggtgcgttggaccaacggaaacccctccagtgcagcaccagctgcaggttcgggaatcagaggagttccctgccgccctgcaggtgaactggggtcaaggtggaaccatgggactggggactagtggaactatgcctcctggcgatgctggccctcagtcacctccttctctctagcaggctwcccggcctttcctccctaccccacccccaccctcttccttgcgagccaggggcccagttccagggcttagggcagggtgctccatgcgaggtggtgacaggaaggccaacaggctgccggagtccgggagtggagcgacccggagaggcgactgcctcagcgcggttagaaaacgctgggtcatcctggttttgtcacgggcctcgactgctcccggatcaccaccacttgcaccctgacagttgaggtgcggctccggggaaggctgggccttgtcctcaaggtgggacccg

SEQ ID NO: 280373 - DNA, 593 bp, Homo sapiens
tgctgcgctgcaggacccacagcccgggacaacccgcttctctctgcacacctgcaccccccttacagccaggttctggcacctcctctctcttctccagggaattcccttcaccggggtgcgttggaccaacggaaacccctccagtgcagcaccagctgcaggttcgggaatcagaggagttccctgccgccctgcaggtgaactggggtcaaggtggaaccatgggactggggactagtggaactatgcctcctggcgatgctggccctcagtcacctccttctctctagcaggcttcccggcctttcctccctaccccacccccaccctcttccttgcgagccaggggcccarttccagggcttagggcagggtgctccatgcgaggtggtgacaggaaggccaacaggctgccggagtccgggagtggagcgacccggagaggcgactgcctcagcgcggttagaaaacgctgggtcatcctggttttgtcacgggcctcgactgctcccggatcaccaccacttgcaccctgacagttgaggtgcggctccggggaaggctgggccttgtcctcaaggtgggacccg

SEQ ID NO: 280374 - DNA, 569 bp, Homo sapiens
gtgtgcatgcacacacacaatacatttctgcttttctattgggtcacacatacctagagtcttccattactatagcctgaaatcttcccaaatgtcctcaaaacaccccacccccatacctgtggggagaattccagagtggaggggcccactccatctccagagtggcacccaggtggagaaggctgtattcgaagcaaattcaaggagcaaattttaatggcccatgacttaccaagcctctgagaaatctgtttgggatgtttacctcctcttgccctgggtctgctccggtcccaagagctacagctggsagagcactgagtgtacttgctggtgggagagggttgtagcattgggtctgtgtctgagcacaggcacctggactggaccagctgcctccaggggagagagaaggggctgcctctccttttggtggcttccacagaaaggagagggcacacaggtctgtcctgagccctggaaacaatgtcttttccctcccctggctaggggtgaagcccaccagctggggcatgcaggtgcatcttggacaccagtatgtgtat

SEQ ID NO: 280375 - DNA, 579 bp, Homo sapiens
tgtgtacatgtgtgcattgtgactgcatgcatgttgacattacccacttgacggcacagtgaggagaggcctggactgataggaaatctgaggactttgcctctcatttgccttgtgctttctcttggggcactttctctctcaggattttgtaattcaagaatctctgaggacccttccaacactgacattgcattaaaagactggcctaaagcatttggggaggcgtggaggctggcagagtccctagcccttcccctttccacaggttgccaaagaagagaaaccctctyctcagagttcaaagtgagagaggacaatggaggtttctggtgggagtgaggagggatgaagatactctgccacctcccacagacggggatgagcatagtcttccatttgaacccactgtgacatccagactaaaagggtccaggctctgaggtgaagctggggaggacacctggatgcctctctgcccttctctgccctgctcccctgtatggtggaagcagaggatagtgggttgactagatcgccagaagaacggcctgtctcattcacacaaaggaaaaacca

SEQ ID NO: 280376 - DNA, 520 bp, Homo sapiens
agcttgctaaaaaatatgagtgcctgtgccccagtcctagagatgctgactcagtaggtctgggttgggcctgggcaactgtgtttttaaaaagcctcccaggtgggccagatgctcatgaaattctgtgcatcactgattaaggagactgcatctttctatctccarggtcgctgctgatacagttgcttaagaggtgaggtgcacccatgggcctggtgcaaggctagagagccctttgatgaaacgataacatccttgtcttcaattggtcataaatatgaaagacacactttatggatgttagtgaaggtgctggtttcagaagtaaaggcaccagaaatgcttcagagattttaccagaaaatcgtctgccaacttcctcgtggtacctagaatgcttaagggactgactccaatggtgcaacggtgtctacctgcttctgccacagaggttttggtaatggcctcttctgacaatagaggaaaattgtcctttgaattgataaccctacttggg

SEQ ID NO: 280377 - DNA, 520 bp, Homo sapiens
agcttgctaaaaaatatgagtgcctgtgccccagtcctagagatgctgactcagtaggtctgggttgggcctgggcaactgtgtttttaaaaagcctcccaggtgggccagatgctcatgaaattctgtgcatcactgattaaggagactgcatctttctatctccagggtcgctgctgatacagttgcttaagaggtgaggtgcacccatgggcctggtgcaaggctagagagccctttgatgaaacgataayatccttgtcttcaattggtcataaatatgaaagacacactttatggatgttagtgaaggtgctggtttcagaagtaaaggcaccagaaatgcttcagagattttaccagaaaatcgtctgccaacttcctcgtggtacctagaatgcttaagggactgactccaatggtgcaacggtgtctacctgcttctgccacagaggttttggtaatggcctcttctgacaatagaggaaaattgtcctttgaattgataaccctacttggg

SEQ ID NO: 280378 - DNA, 545 bp, Homo sapiens
agttcaagcagaagctgactgacccttggtcagaggcagacagaggttatgattgagctggatgggagttgcctctgttcggctctgcaattctataatattaagaaacatgtttggctacatcagggtttctcaaccttggcactatggacattttggatcagataactctttgtggtaggaggatgtcctgtgcattttaggatgtttagcagcatctttgacatctacttactaaatgccaacaggcaccctccccagttgggacaatcaaaaatgcttcagactttgtcaaatgtcctttgagggacaaagttggccccagttgagagccgttggattagatcaaacaaaagacaagtgaagagcttgcttactgtaccagacgtgtgaggtatttggccttaacaaaaacmtccttaaagtgctttggtttaaggaaatgcatgaagctaatttgcattcaccatcagccagaagaataacttatcttcagaatccctagtccttccttcaaaatctccttgtatttttctcctgtgaac

SEQ ID NO: 280379 - DNA, 555 bp, Homo sapiens
ccttacccatagatcatcaatggacccagtgctctgcctctggagttgctgtttatatctacgctgcatattttggaagatcacccaggcaaaatacttataatcatgtagaaagacacccacttttgttttcaattaacgagggaatataagcaatgcagatttgggagcacaggggggtggtaacgggctccaaaggacctggccaacggcggacaaccatgctgaacttaagcatcaccctcatggtctttggrcaaatgctgatttcctcagacagtccgtatcctcccctgggaaatttctgtttcttcctggcttccagcctactaccacggagacaaagaactccttccctggccttaagaatggcttgttttagtcaaaggattcctctctagcctctcaaagaaggtcctggtctgggcgtaggaagcccctttcccttcccgcccctacccacagcataaaatgacattttctggcaccaaaaacccctgtcccatcaaagcagcaaaacctttcctctgacctcaagcccacagtggctgatga

SEQ ID NO: 280380 - DNA, 544 bp, Homo sapiens
gtggggataataagagtaagtatctcatagattttctctgagcattagtcaaacgaaatactggccaagtgcttagcccaggcccagcacacagaagactgtcttctatgcttgttaaataagcaagtggattactttgtcttaaatattttgtattctgttgtcacttgtaactagagaattgatatatccctggattggtgatgttagaaagtgtttgttttttgttttgttttgtttgtttgttttttgtaggatcacttcccttctctcatctgtttacagtacatctcggtatacctctttatcaccttgtggtcatacatttggggaatcygattcttttgtttctagatttctcttcttgaattttctttaatatgattgggaaatagtgaggggtgcaataggctttctgttctgggaacttatcaatttaatgtgattctttttgacagttttatattcttctattcttctactctctaccagttaacctatctgcaaggtgaaattcttgaacaaattgtctacccaaagcact

SEQ ID NO: 280381 - DNA, 516 bp, Homo sapiens
ttcatctagtaaattttctttactagatgaaaactattcctacaaaaatggaaattagatgttaagtgtataaatgataggcagcttcttaaggaggaaaaaaaggtgaaaacgaatttttaaaggaaaaaatggcattactcttacctttatgattattgttactattatctgtggccttttgtttataatttaatgtttttcccattcctastttatttttatttattttatttatttttatttttattttattgagatggaatctcgctcttgtttcacaggctggaatgcagtggtgtgatcttggctcactgcaacccctgcccccggggttcaagcaattctcctgcctcagtctctggagtagctgggattacaggtgcccgccaccacactcagctaatttttgtgtttgtagtagagacagggttttgccatgttggccaggctggtctcaaactcctgacctcaggtgatctgcccgcctcagcctcctaaagtgctgagattaca

SEQ ID NO: 280382 - DNA, 526 bp, Homo sapiens
attgttctgctagatgactgtaataccttcctcatgggtggttgtgagaatgacaaaaatatatttaacatacttggaatgtatttaaagtgccttacaaaaattaattaaaggcacagtgcctgggacaaatgaggaagtccctgtcaattgtaggaggagaaacacaatgagaggagatccatcaggaagtgagcacctgatctagccaaggggtgaagaggtcctagttatagtgaaagctgtggaaataggattaagttactttttacaagaattacttattgtacaagcaatattacagcaacaatatgagaaatcaaagtcaaacaaaaattactccaatacaaacatttctyagattctaacagtcctttaaaatttgctcatgttcttatctactccttgtttacatgcacacatgtgatgcaactataatacaggcacaattttacattctctgctttttttcccttatgtaattaaattacttgtttacctgatattggacactaagttgtttctg

SEQ ID NO: 280383 - DNA, 541 bp, Homo sapiens
cattgcgtgaaatgctggagttacagtcagtaaaaggatttattaataaaataattttaggagtgatattcattttaaaatatgattaagacataatttctcagctgggtgcggtggctcatacctgtaatcctagcactttaggaggccgaggttggcagatcatttgaggtcaggagttcgagaccagcttgacctacagagtgaaaccctatctctactaaaatacaaaaattagctgggtgtggtgatgggcacctgtaatcccagctacttgggaagctgaggcaggagaatcgcttgaacccaggaggcggaggttgcagtgagctgagatcgcaccactgtactccagcactccaacctgggcgacagagcaagactccctctcaaaaacaacaacaacaacaacaacaacaacaaaacataatttctcagtctagcagacctatgttgatcttattcrctgatatttattctcccaagcatgctgaaggcagggctatctcagattgcttctctctgggatttgcatgttgta

SEQ ID NO: 280384 - DNA, 535 bp, Homo sapiens
actccacctctgtcttcacagagctttccagccaatggagaacacataggactacaaatagatcaagaaagagaatagaaactggggaagaggaatgtggagagtggcggtgcgtaggctgagcgtggacacagccagcctcaagtttccaaaccagagtgtaggagcatgggtatcaagcagacagtgtgggtgacccygccttcctcctcctcccaggggatgagaatgctggaagctcagctgctgcagaatataaaacatacggattgcccagagttactgacttgcctaaagccataaaaaaattgtgtgtgtgtgagttatttttcacttctttttctgccaggatcaagtatcagcattgttatattgagaaacatgccattttcaacacactaaagaagagctggcccaacccggtcgggtaggcatcaaacagttgtcagaggcaggaagtctcccagactccagccccaagctacagcagagtaaatttgagacattcaacagatttctaatgcgctgagatgcc

SEQ ID NO: 280385 - DNA, 535 bp, Homo sapiens
actccacctctgtcttcacagagctttccagccaatggagaacacataggactacaaatagatcaagaaagagaatagaaactggggaagaggaatgtggagagtggcggtgcgtaggctgagcgtggacacagccagcctcaagtttccaaaccagagtgtaggagcatgggtatcaagcagacagtgtgggtgaccctgccttcctcctcctcccaggggatgagaatgctggaagctcagctgctgcagaatataaaacatacggattgcccagagttactgacttgcctaaagccataaaaaaattgtgtgtgtgtgrgttatttttcacttctttttctgccaggatcaagtatcagcattgttatattgagaaacatgccattttcaacacactaaagaagagctggcccaacccggtcgggtaggcatcaaacagttgtcagaggcaggaagtctcccagactccagccccaagctacagcagagtaaatttgagacattcaacagatttctaatgcgctgagatgcc

SEQ ID NO: 280386 - DNA, 459 bp, Homo sapiens
tgaaccacataaatttattttgtgtgtgtgacagggtcttgctccttcacctaggctgcagtgcagtggtgggatcatggttcactgcacccttaacctctcaggctcaagcgatcctcccatctcagcctcttgagtaggtggggccacaggcrtgcaccaccacacctggctaattagaaaaactttttttttagtagaagacaaggtcttgtcatgttgcccaggctggtcttgaactcctggccttaagtgatcctcctgcttcagcctctcaaatgttgggcttacaggcatgagccatcatgcctggccaaaattagattccttaggtcaaaaaatagttgaatataagcaaattcatattattcaaattaaatatagaaaagtttaagaaatagccttgaagtaatcacaccaaattcctgtggggaagatgggcctaaactaatgagaata

SEQ ID NO: 280387 - DNA, 488 bp, Homo sapiens
agaatcttcagtaagcctctgtcctttactcactccgccctrtgtcaaactggtccaagtaagttgccttttgtaatgtatctgaaggaccttttcttattactcattaatctctgtcttcttggtttagcactgagatagtttacttgttctccaattaattcagtcattcatttatttaatatacattgactagtatatgaggtacaattaaaaataaatcttgtcctctagaagtttttcatctactgaaggagataaggcacatcctcagatagtcttaaggcagagtggaatgagaagtgctgtatcaactaagagctaaaggagttcagagaagggagatgttcagatggtggtgtgtggtagaaggccctggaggaggagataattgagagcattgcagaagaaacagggcagagctgtaagtgctctgaccagtttgtgatttggtgttccttcagactgatggcctttgccatcaaatc

SEQ ID NO: 280388 - DNA, 523 bp, Homo sapiens
ggacaaacggctctcataagttataatgattctttagagtggagattctccatctggggttcatggatagaactcaggaattctgtgtaattggattaaaaagagactacggctttattttcatgaatcactaatgaaatttagtattttctttcactatgaatataggcaactaattatagtagtattagcagtactgtgacttagtcattactagaaatcacagatttttttgtatcacattgtatttgtttcctatatcatgagatattgtttatgttcaacaatactgcaagaatatgatattagacctgaaactagatcttrttatttaatgcattaattaaaagtatattaatatatcagtgatttgtttttaaaatattttgatattagtatttaaatatgattcatttcctttgtatgcctatgtgttttgttttatgcttttaaaaacacaattatgagaagccatcacagacttcacctgactgtaaagaggtctgtgtgcaaaaggttaggg

SEQ ID NO: 280389 - DNA, 1242 bp, Homo sapiens
ccttttaaatttatttttatattttgcattacttctgcttattttaaagttgcttgttctcatgcactcagctctgagaatgaaaataagcttttcagataagattttgttgctcaaactgggaaagtacacagggcgcaaaggaaaaatgtatgacatttgaagtataagctcctggtttattgggtatgattgtgataacgcatagtctcaagctacatctcagtttattacaagttgcctcataaaatagacccccttacccatgggaaatatgttctaagacccccagtaaatgcctgcaactacatataatatctagccttatatatagtatcttttttttctgtacatacatacaatgctaaagttaaatgtataagttaggcacaatcccagcgactcgggaggctgaggcaggaggatggcttgaacctgggaggcggaggttgcaatgagcagagattgcaccactgcactccagcctgggcaacagagcaagactctgtctcaaaaaaaaaaaaaaaaagaaaagaaaaattaggcacrgtaagacattaccaacaataactaacaattgtaacaatatactgtaatgaaagttatgtgaatgtggtctctgtctctctctaaatatcttgwaacttcggaataagacagttcatgaaaaggaaataagaaagtgaagcaaactatataatttctaggatttgttcttttatccctttagaggcagcaatgggggataagaggattcttttctggttgttagtacatgtaattccaatgaacattgatgggatttctggactataacactttaatcacgagatctggacccggagtgatatgagatttgtttattattttattttacttgggaatctacaggaatattattcacagccctgaattttcttttttttccatccatgtatcatctctttcaggctcattatcttatatctgtaacwagatgaatcataaaataaaatgcaaaatgttcttgtttatacctgtggacagagaaatcagagcgccgttcagtgataagaggcagtcagccttattcttttgtgcaaaatgtacaaaagtatatacttgtaaatacttgcaagagtatgtacaccatacttgaagccttaggtctggtggtttaatggaattaagttcaccaacaatgtgaagagaggcacgtgacacaaaaattaagctgaatagttgcaactgtgtctaacagag

SEQ ID NO: 280390 - DNA, 570 bp, Homo sapiens
gccaaaaagtgagttggagagacaatcattccaagcatatggaagcacaagtgagaaggctatggagaggggaagaacagggagcactagtggaatgaaaaggtgaccaggatggctggaacatggtatatgtgtgagagtgaggggtatgggatatgtctagaactataggcaggggccagattatgagaagaatgataagtgacatggttgataatatgtgtcaacttgactgagctaagggatacccagatggctgttgaaacattatttctggatgtgtctgtggaggtgttttcagaagagattagcatttgaaacagtagactgagtaaagatctgccctcaccactgtgggtgggcataatctaatccattgatagaattcctggatagaataaaaaaggcaaggaagagctaattttctgtcttcttgagctggaacattcatcttctcttgccctcagacatcagagctcctgattcttggtgttttggacttagaccaggacttgcagcattggctctcctagttcttagcygttggagttggactgaattatatcacca

SEQ ID NO: 280391 - DNA, 525 bp, Homo sapiens
gatttatgaacctagctaacaatttgcatattattgtattgggtggaaagtagttaaaggtttccttctagtcttcatatatttctgttaagcaattactttctgccttagccaaaattgtgctccagaatggacactactacaatttcagatgcctcgacttgcagtgcagatgctgccaacctccttgtcctcactgtcccttcagcccctgctgcctgagagcatggaccttctggccagagctgtgccacctacccccagaatgattctccactgtctctgctttttttgaggcaaaattccgagtgagtgagtttgatgggccagggctgaccatgcaactgcacccaagctgcaagggagtcaggtatgacaaatgttctgcatttccagtttccataatgagaggcaagctgtgtcttgtgccaagattcataaagtaagaggttctccaaacatgaaaagagcttcaaataatggttagctaaaaaccagratgatgacaacaaatgttcactagcc

SEQ ID NO: 280392 - DNA, 484 bp, Homo sapiens
caacagctggcacacatgagggggtgtaagggttagcctgctttgtcaaagtgctctttcaggaagttcagcctcctcactgaagctgatcactccagaaaaacrcaaggtgaaattatgtctctatctggaagtgagacattttgccaccaaacaaaatccatgtgacttgactccactgtatatgatctcttccatacttctaaaagctatctatctatctatccatccatccatccattcgtccatttgtctgcctgcctacccgcccgcccatccatccatccattcatccatccatccatctatctatctagtccatccactcatccatccatccatctctattatctataattaattatcgttattaatggtggttatattttataaagttgctgtgaatactgaactagtgaataccaaaccattgttctcaggggaaatacagaattaggttcctgtgagtcacaatatttttgtc

SEQ ID NO: 280393 - DNA, 572 bp, Homo sapiens
gctgttaaggacctaaatgtttccagacatgtgtcattggcattaaattgatgtaaaaaaatcaaccaataactattagagtgtaayttttttttagagatgggtcttcccctgttgcccaggctggagagcagtggtgcagtcatagctcactgcagtcttaaactcctgagttcaagtgatcctcccacctcagcctcccaagtagctaggtctacaggtatgtgccacctcacctggctaatttttttttttttttttgtagagacggagtctctctatgttgcctaggctggtcttgaactcctggactcaagcagtcctcctacctcagcttcccaaaatgctgggattatagacatgaaccactgcgcccagccataacatttttttagctagaaattctacatttctcctataagatctcctacaagtaattaacattgttaaataaggtaaattattctttattcaagcaataaataaaataatatctggcctatatgtgtgtatgtgttttaatagaattctaataccacttaactattatatttagcattattcttacaatg

SEQ ID NO: 280394 - DNA, 543 bp, Homo sapiens
tgtgacctctggcattatgattctgagcttttcttgctacctggtctgtcatggatgtactaacaggttagtcaggttaacayactataatgcatcagcacagtggaatattatgcagactttaccaattatagttaggaagagtatacagaaacttatgaactgttttcaaaatacttaaaagttacgttgcaaattaatatagataccatgacagccatgtaaagcatgtgtagaaactggaaggtaacataaaaaattaaaatagaggtaaaggttatttatttggggattaattttttttcaaaaagttatatactgtaggtctaccatttcttcaatatgtgatttttatacaaaccgcccattgatgcttgttataatttgggaaactatcaagaagatttctaaaatgtgtatgcttgggaataacatcaaggttaaaagacttaaattgggctgaactcataaagttaacttgattgaggtgattatatcttatgtacatggctataataaatcatttttaggaataaaactgga

SEQ ID NO: 280395 - DNA, 498 bp, Homo sapiens
gtctcatcatcattttccatgcttgctgcttgagactccctgttctctctatggcccaacattttctctgtaggagtgaaaatacaaatgcagtttggctgctttctcatactttaacaaaacatggacatctgttaaaaaggaggcgtgtctgtgagtgtgtgcctgtatgtacttaccactcatgcatacctgtatctcaggaagaaaatttatattgaaaatactcttttagacagcaattggtctttttaggagtgaaaaccatgacttttaggtaaattacagatcttgccagggactgttctcaattgtacttgcactgaataaataatgagttaccctgrgaaaattgtttattcttagtgtgcaagaaatcctttccacttctgtgaggcaagagggttgtcaggggagctgtcgccatcattttagacttgaccttaaaagccatgttgagtctcccaaccatttccccttttcccttccccttaaacg

SEQ ID NO: 280396 - DNA, 546 bp, Homo sapiens
ctctagtgtggatcacaataaaaactctatttaatggctactcaatagaataatttagactaaaatgtctatctacacagttcttttatgaaaaggtaaaatcaaatctcatcccaccttgttttctgaattctgtcctgttggggccagggtggcaggcatatttatgcccagatagtaaactgggatatgggatgtagggagagtcaggcagctgagagcagtagaagtcttgattttctgatgcccagcttgttcatgcttttttactttgccgcttgaagtgtgagcaatttattcctgggtaggtaggatgtatgagagtgccttagggttgttctccctgcctgaaacttcctcccagccctcttctccctgtgagtaactcccaaggcagcctggacactatcaagcaatcctaccattcttccagcatttatgagtcccaccccaggggcagatgatggggagcaggcatgggagggaagctaagaactgattgggcagaagcagttaragaaactgggaataaaagaagaaaaatga

SEQ ID NO: 280397 - DNA, 609 bp, Homo sapiens
accccagagagctctcttatcccttccacaacatgaggacacagcaagaagatggctgtctacaaaccaggaagcaggcccttaccagacaccaattctgccactgccttgatcgtgggcttcccagcctccagaactgtgagaaataaatgttggttatttataagccaaccgaggctgtggcattctgttacagcagcctgaatggactaagaaacttagtgacagtgctctctcatctctyattctgcctctgcaaattgctccacaaatatagttattgtcctccctcttccattctgaatttctctctctccatgtcttatttatgcactcatccatttgcaaatattttcagccataacctgcaaaagagacttccctctgcccactctcagtttccttgcgtgaaaaatgatgaatttggtctaggtggagtctcaggtttctggcagcactaacgttctttaactccatggagatcttccctccataagcctgtcaggatgaagagccgatccaatccttcaccctctgtgcatttgttctgcctacaggtgcactgtttttcctggtatgctttctcagatggcagcagagcaaagaatg

SEQ ID NO: 280398 - DNA, 568 bp, Homo sapiens
tgacttcctgtctgcctggcgctagtacattagcccttatcaaagttagaagagctggtacaacacagccattgtaggtattggatcaatacctggcaagcagcctgaaggtcagataaagtacttaggcaggcagtttgccaggctaaagagatgtcaagaaaatcaattagactctaaagaaagagtagcaagctaactaaaaaatcccatcttgaaaggctcgctgtatttcaaaggtagtttatatgcattcacaatatctttatcttgttcgtaaaagtacatttgctaagcaattaaaactatccttgggtcacctgaggtcaactcacaaaagattgtaaacacctgcaggatcctagattagaaatcgctacaaaggatggagatttaatcaagttcttttcagggtataagattacataactttcaattaatttgttctttttctatattgattactttatgtgcatttgsaatgccaaagatgcccttgctttttgagtggtgagagacaccatggactttgagtactacagtgatgccaggtagtttacttggtaag

SEQ ID NO: 280399 - DNA, 473 bp, Homo sapiens
actttttttccacatctttacttctcacagaaaagacaaccagaaaacttttttttttaaaagatggactgttacatgtagcactggaattgttgagagtagcatttccgcctagatttcttgaatgtaaacttctttttacactgattgaagaactgttgattttttctgctgtgggatgtaagcaaggagcatattgccctgaagggagacttaggtgatgagctaactcgtttcccagaattccgtagactatatcatcatatcccactctcaaattctctcatcgtcttcttcagagggagaggctggggagagatgactctagcctaggatgtggattgagtccctgagatttatartaatcaaaatattaatgaagtagtcgatacaaatgctgtttgtgtagaatgcctaagtaactggttgtgtaatatatcaggaagagatccagatatgagcagaggcagagc

SEQ ID NO: 280400 - DNA, 614 bp, Homo sapiens
gggaggcacattgctggcactagggatatattagcccattttcacactactgataaagacatatctgagaaygggtaatttataaaggaaaagaggtttaagggactcacagttccacgtggctgaggaggcctcacaatcatggcagaaggcagaaggcacttgttacgtggcagcgacaagagagaatgaaagagccaagcaaaaagcaaaaccccttataaaattgtcatatctcataagactcattcactacctcaagaacagtatggaggaaatcacccccattattcaattatctccacaagtccctcccacaacacgtgggaattatgggagctacaattcaagatgagatgaccaattctccactaaatactttttatcaaagaaaaaaaaactatattaaagcacttaagtctaatggtattaaagaacactttaagaaaacaatacatgactagaaaaacatacaaggaaatacactagaacagattattacttttcgcactaatacttgtctgttaaatagaaagcaacagaaacgtatatagagatacgtaagtggctttagtagagacctgtgaccaagaaaacaaaaagttagacaaggt

SEQ ID NO: 280401 - DNA, 614 bp, Homo sapiens
gggaggcacattgctggcactagggatatattagcccattttcacactactgataaagacatatctgagaatgggtaatttataaaggaaaagaggtttaagggactcacagttccacgtggctgaggaggcctcacaatcatggcagaaggcagaaggcacttgttacgtggcagcgacaagagagaatgaaagagccaagcaaaaagcaaaaccccttataaaattgtcayatctcataagactcattcactacctcaagaacagtatggaggaaatcacccccattattcaattatctccacaagtccctcccacaacacgtgggaattatgggagctacaattcaagatgagatgaccaattctccactaaatactttttatcaaagaaaaaaaaactatattaaagcacttaagtctaatggtattaaagaacactttaagaaaacaatacatgactagaaaaacatacaaggaaatacactagaacagattattacttttcgcactaatacttgtctgttaaatagaaagcaacagaaacgtatatagagatacgtaagtggctttagtagagacctgtgaccaagaaaacaaaaagttagacaaggt

SEQ ID NO: 280402 - DNA, 341 bp, Homo sapiens
agagacacttgcacactaaaattggatttgacatgaagcagggagggaataattgaaagatggatgaagaatcatgattaaataaaattcctacaggccaggacatggaccaagttgaaaacacactccctcttaaaaggggttcacccaccttggatagctcagatactccagctagtgatctgtagtcattctttcacatatgcttttcttcaaaaataggtattaagtggttattctgtgacaggtaggtatttgtgctaggtcctagaattacaatggtgcaygagtgagctattgctccataacgagccattttaaaacttggggacttaaaacaa

SEQ ID NO: 280403 - DNA, 533 bp, Homo sapiens
ggagtacatgatattaatctaagttatcttctgtccacaagatttagggaaaatgactaaaacgtaagaggtttgaggtcattcaaataaagagctgaacatyagaatcagagtaagtaagagtaggaaaaaaataggtttaatgtgggagaaaattagtcaaatttctgtggggattgtaccacctattagtaggaatagtcagagataatggcatatagtttttatcaaccagggaaaattaataccaccctattttaagtaatagacagcaatgaaacactgagtttccagcatgaccagaaaaccaatcacaaaattctcaagtaggaagccctatgagccccttgaaataaaaaacagtcaaaaagatacttccatgtcacaaatatagatgatattaaatttgtttctctggtatccatggcattatttggaggaaaattcatccataaagccagattgactatcagatttagtgtggaaatacttgaaggatttgagtgtctgctctttggaagggaatgaacagt

SEQ ID NO: 280404 - DNA, 562 bp, Homo sapiens
tcccacagtctggatctttctcactggatgctcatggtgcagttcatcatgtccctctgtcctgggtattttctggaaatcgaaagctggatgcagaggcctgatcagattgctttggttttctaaaactgaatttgtttatgaacaaacttcagaaagcaaatggaatcaaacaggccactttaataaacacatgaaaaaaatcataaccaccaagaaaaaggtaggactaagcagtgtcataagcgctccccctttcatctggtcctcacaatacattttagggtgaatgtgtaactgtttaggactctattttacaaatgagaaaaggggggctctagagagtaaggggcttgttcaatattcttcagccaggatgagcagacaggccttctgcctttcaggcatctgcatccattcyaccactccacagtcttcctgtgtgtctgttcccagtctggcagtttgctcaacttcttaaatgtgatacacattaatttagcacctacaaggtgctaggtactgtgccaggcactgagggcacagatagacatggtcccta

SEQ ID NO: 280405 - DNA, 582 bp, Homo sapiens
taagtttgacagaataaaagggaggtaagaaaatgtcctaacttggtggagggaaaaattaaatgagcttctgggagagccactgatacactttctctaccatctagctttttggyacagttgaaagaccacagaccttagtggttaacttcgtggactctggggccagactgccttgattcgcatctttgctctgctgcttactaattatatactctttggtaagtttcttattttttttatatgcctcattttcatcatttgtaaagtggggataataagagtaagtatctcatagattttctctgagcattagtcaaacgaaatactggccaagtgcttagcccaggcccagcacacagaagactgtcttctatgcttgttaaataagcaagtggattactttgtcttaaatattttgtattctgttgtcacttgtaactagagaattgatatatccctggattggtgatgttagaaagtgtttgttttttgttttgttttgtttgtttgttttttgtaggatcacttcccttctctcatctgtttacagtacatctcggtatacctctttatcacctt

SEQ ID NO: 280406 - DNA, 582 bp, Homo sapiens
taagtttgacagaataaaagggaggtaagaaaatgtcctaacttggtggagggaaaaattaaatgagcttctgggagagccactgatacactttctctaccatctagctttttggtayagttgaaagaccacagaccttagtggttaacttcgtggactctggggccagactgccttgattcgcatctttgctctgctgcttactaattatatactctttggtaagtttcttattttttttatatgcctcattttcatcatttgtaaagtggggataataagagtaagtatctcatagattttctctgagcattagtcaaacgaaatactggccaagtgcttagcccaggcccagcacacagaagactgtcttctatgcttgttaaataagcaagtggattactttgtcttaaatattttgtattctgttgtcacttgtaactagagaattgatatatccctggattggtgatgttagaaagtgtttgttttttgttttgttttgtttgtttgttttttgtaggatcacttcccttctctcatctgtttacagtacatctcggtatacctctttatcacctt

SEQ ID NO: 280407 - DNA, 572 bp, Homo sapiens
atttacttgcattcagtctttaataaattaaatatccctgtttcttattcataaaggcacaaatgtggccactgacatatggaacaattattgccttttgattacagataaattttcacttctgacaaggctaagaactttttagcctagaaacccagactgctttattcttaatattttctagaaaaggaaattctatctttcrttaactttaaagtctgcacagatttattcttaatgataaagtatcctcatctgctacatcaaccaccagtgattattagcatggagatattgttttaaatctaaacacacatagtcaccagccatcctttctggattgcttagaaatcaaataagagatgagctaagtgtagaggagaaattggacacaaacctgtcttcctttgccccacccattttccaatttcctggaaatgcaaatattgaccttgagaatttcaaaggtctctcacaattttgtacctttttatatcaacaaatcagtgtgggcaagctcataaaactcttgtcagtatactcaaaagagttgaaaataaacaaatgcggtt

SEQ ID NO: 280408 - DNA, 605 bp, Homo sapiens
tggcaaatcaataacagcacttctttgatacagacctaaagatctcaaagctctatctcagaaattgtacgtagtgttttgctgaacacccaaccatctattaaaatctgccttcctcmctgcatatttcatcttaattcttatcctggtaccattcccaaactttctatccccattgggctaaagctactccagaaatccttccacacgagatgcaatcattatactgctctctgccacgttgtcccaagccaaatagaactggctgcctcaaatgcctggaggtggcttattgttactaatacatgttttacagcataaagaatggctgagtatcctacagtcctgaggtttggctctatttggtgggctgactctgcctgtgaccaagaaaacagctgagtagcagggtggtaagtatacataaggcaactagactcttagaaaaaagcagttagaaaatgtattcaataaatattcacatccaattgtggtctcttcctttaactgtgacaaagggaatacaaacaaatcatcagcacacaattagcgctctatccatggaacagaatttctcaaaatttccacgtgtgacccaccctaag

SEQ ID NO: 280409 - DNA, 608 bp, Homo sapiens
gtggcatcaaaaacaaatgacatagttgaacccaaaacagttttattaattgtttatttgtaacctgctgtcttacaattgcactccctactagatcttctttttattattagtgaaactgattatttggtgaatcaggcagaaaggaacgattctcaattacctgagggtcccagggggctgatttctayggaagttcattacatatacaataggtatgttacaaaaataattaaatgaagggcggcatgctggtcttttgagctacagtgttgtgctctcttcgacctaactattggctaatatctgccttagctggaattgtcttgtttacacattttccaacaagttaattgtttagcaaagtgtttacacattgattatagattgattaatggccattgacaaacacattgctcttgaatttcactcaatcagcattttcataggctttaccccctgtggtgaaaggatgatgatttacgtaaaaaactaaccattaaccctagaattggaacacaaacaaaagataattggaaatcttgccaatttaactcttagtataagaaataagatccaggggttaggagtcatgtggatttgagttc

SEQ ID NO: 280410 - DNA, 568 bp, Homo sapiens
tgacgtctaatccaccatgactgatgtctttatgaaaggggaaatttggacacagagacaggaaggcagagagagaagatgatgtaaagattcagggagaatgccagtgaagatgaaggtttggagtgatgcttctaccagctgaggaaaacctgaggcacccagcagctgggacaatacaaggaatgattctccaataggctggagtcagcatgaccctgtcagcaccttgattttgagcttctagcccctagaactgtgagacaatcaatttctttctttttttctctctctctttcttccgctttctttctttctttttctttccttttcttyctttttttatttcttttttttctttctttttttatttctttttttaacacatggtctcactcttttgcccaggctggagtacagtggcatgatctcagctcactgcaacctctgccccctgggctcaagtgatcctctcacctcagtctcctgactagctgagactataggtgcttgccagcacacccagctgatttttgtattttttttgtagagacagggttttgctatg

SEQ ID NO: 280411 - DNA, 586 bp, Homo sapiens
taccttgtaagaaaatggacctgaaaaatgtatttctaaaaccaaggttcaagtccccactcggatagttgaaaattactgttttgggagaccactgggagaaatttggaatgggcacttcacaatattctgaaactctctattcttacaagatcaaccacttggtaagaagatgggttttatatgagcctctcatgaagggagacatctattatggaaagggagatttccagtttgggccacttaaaaactcaacaaagagtgaggcatattaataagaaataatgaggcattttgggttctttggaactgtgagtttttgaggaatgagttatttgtcttttgatggtggtggtgtgggcagtgaggtgtattccatccagcttttacgtaggacttgtttgggggaataaggatttagatatttattttggggaaaatagcatatgtatatcctgtgaaggttaaagaagaaggcttttttttttggctgctgtgatattaattattktgatgataattctctgtagcgggggtgtgtctccttttccaccttttaaaaagccctcagctgtgctgacagaaa

SEQ ID NO: 280412 - DNA, 560 bp, Homo sapiens
ttagctggctgccacagcatattggcaacagcatgtgtttgaactagagcagataattcaaatggctcgttatccacttacattctaatcatctgtgaggtggcttctctctgggcaggctcagcatgctctcaggggagattttacagcttctgaacttctgactgctgtgactcagcccatcctacccagtttctgggagtgctgtagctatctctctttatgggcaaagcccaacttttctttgggttttaattctcatgtttgcaggcagtggctcctgagcccgtttcctggctgtttcagttactartgctgcataacaaatcatcccaaaatttaatgacctaagacaataacaagcattttattgtctgtcattgttctgagggttgattggatccatttagatggttctctcttacagtgtctcatataattggagtcagaatgtggctggaactggagttatcctgaaggcttccttgtttgtatggctggtagttgaagctagctgtcagctgagaccttggctaaggatatgggccagaacacctata

SEQ ID NO: 280413 - DNA, 578 bp, Homo sapiens
ggttctctcttacagtgtctcatataattggagtcagaatgtggctggaactggagttatcctgaaggcttccttgtttgtatggctggtagttgaagctagctgtcagctgrgaccttggctaaggatatgggccagaacacctatatgtggcatctctgtttccctgcttggcttcctcagcctggtttcaagtgtaaatgtcctagatacaccagacagaagtagtatcacccttatgacctagccttgggagttacacagtttcacttttattgtagtctcaggcctgcctagatttaaggggaggaaacacaggctcactttttgatgggaagagcatcagtgtcatattatgagaagaacatgtggaatgggagatcatgttgtaccatcttggaaaatacaatctgccttactggagatttttctatagacatatccctaggggagtctgtgaagctgcaaagcacttttccattttagatgcctctttgcttttagcaagcttttcctcttaacttgtaggtttcctagggagccaagatttcatcttgccctgggcctgcaacttggta

SEQ ID NO: 280414 - DNA, 605 bp, Homo sapiens
tactagtgctgcataacaaatcatcccaaaatttaatgacctaagacaataacaagcattttattgtctgtcattgttctgagggttgattggatccatttagatggttctctcttacagtgtctcatataattggagtcagaatgtggctggaactggagttatcctgaaggcttccttgtttgtatggctggtagttgaagctagctgtcagctgagaccttggctaaggatatgggccagaacacctatatgtggcatctctgtttccctgcttggcttcctcagcctggtttcaagtgtaaatgtcctagatacaccagacagaagtagtatcacccttatgacctagccttgggagttacacagtttcacttttattgtagtctcaggcctgcctagatttaaggggaggaaacacaggctcactttttgatgggaagagcatcagtgtcatattaygagaagaacatgtggaatgggagatcatgttgtaccatcttggaaaatacaatctgccttactggagatttttctatagacatatccctaggggagtctgtgaagctgcaaagcacttttccattttagatgcctctttgctt

SEQ ID NO: 280415 - DNA, 599 bp, Homo sapiens
tttaatgcacatatacacctggtgcacaagactgaaaatcaattgaggaagctcatctcctcaatatatcaagaaatttggacatttttcaaaaagacaatagtcttttcccgggaaactctctgtttcccggagagaggaaagggaaatacgtttcttaaaaagtctgttcaggttgggtgagactttagaagagctttctgtctgccaaaatgggttcccaaaaaggtttataaaaattgttcttctagaagttatgtttgtattttgttttgtctgatgttggtttttaatayagtagaatgctacagaactagaatgcttggtgaattcctaaaaagagactaatggtctctatcatttcatgaaggcaattctgtctttggaatagggtaagaacttaattcagcagataacaaagtcacactgttttttcactcactcaggatagcttttggaatattcacaatgccactaaacaaattccaaacctctttatgtaccatcttcccctttcctgcacggattgtatcttcactgtagatttcaggtggaagtttccaaaacgagaatggcaatttcagactaaaatggctaac

SEQ ID NO: 280416 - DNA, 599 bp, Homo sapiens
tttaatgcacatatacacctggtgcacaagactgaaaatcaattgaggaagctcatctcctcaatatatcaagaaatttggacatttttcaaaaagacaatagtcttttcccgggaaactctctgtttcccggagagaggaaagggaaatacgtttcttaaaaagtctgttcaggttgggtgagactttagaagagctttctgtctgccaaaatgggttcccaaaaaggtttataaaaattgttcttctagaagttatgtttgtattttgttttgtctgatgttggtttttaatacagtagaatgctacagaactagaatgcttggtgaattcctaaaaagagactaatggtctctatcatttcatgaaggcaattctgtctttggaatagggtaagaacttaattcagcagataacaaagtcacactgttttttcactcactcaggatagcttttggaatattcacaatgccactaaacaaattccaaacctctttatgtaccatcttcccctttcctgcacggattgtatcttcactgtagatttcasgtggaagtttccaaaacgagaatggcaatttcagactaaaatggctaac

SEQ ID NO: 280417 - DNA, 521 bp, Homo sapiens
atttcagccactcaaaatatcaatcaaattaagagctcagaaatgaaaacaacgtgctgtaaaattaccagtggtgaggactgagatcagtgaaatatgcatgtgcctacagaagtattgaaaacataacacattaaaggcgaataaataaaatccaatttgaagttagctaaaaattatcagaaatatctattagttatggcattatggctgatttttattttttcccatgttcttttatatttaccaaatagtctataaaaatatgtaatatttttataattgaagaattacatatttttctatagaagaatatacagtgaaaattggggactaagcacagtagtgcatacctgtaatcccagcactttgggaggctgagataagaggattgcttgagcccaggagttacagaccagyctgatcaacatagtgagaccctttctctatgcaatttaagtaaaataaaatttttaagtaaaaagaaattagaaaaaaagaaaacttgggggaggggaaga

SEQ ID NO: 280418 - DNA, 369 bp, Homo sapiens
ctcaagaaacaacatggtgataagttccctgggttttctttatgcctcatatattccagagttggacctaagaaactgacaacctcaaagaagtaatagctgaaaatttcccaaattttgcaagagacatagcctacagatttaagaagctaagcaaacccaaagcaggagaaatactatgaaatcacactacaaaacatmatagtcaaaattctataaacaaagacaaagaaatcctaaaagtaatgagatagagacaaaagcttacctatattaaaaaataataaatcagagacaatggatttcttatcaaaaactatgaaagccagaaggaagtggcacagtttttcgaatactgaaagaaaacaa

SEQ ID NO: 280419 - DNA, 378 bp, Homo sapiens
tacaacccaggaatttcagccacttgcatttataacagagaaatgaaaacttatgttcatgcaaaacctttatacaactgttcatagtagcttgtttgtaatagccaaaacttggaaacaactcagatgtcctttcactgggtgcataataattaaaagaactgatgcacacctatcatacactgctattaagcaataaaaaggaacaaattattgataaacacagtaacctgtaggaatctccrgaaaattatcctgagtaaaaaagccaatcctagacatagacaatgtggtacatttacaccatggaatactatgcagacattaaaaagaacgaaaccatgtctttgcagcaacacagatggagctggaggccat

SEQ ID NO: 280420 - DNA, 582 bp, Homo sapiens
taagtttgacagaataaaagggaggtaagaaaatgtcctaacttggtggagggaaaaattaaatgagcttctgggagagccactgatacactttctctaccatctagctttttggtacagttgaaagaccacagaccttagtggttaacttcgtggactctggggccagactgccttgattcgcatctttgctctgctgcttactaattatatactctttggtaagtttcttattttttttatatgcctcattttcatcatttgtaaagtggggataataagagtaagtatctcatagattttctctgagcattagtcaaacgaaatactggccaagtgcttagcccaggcccagcacacagaagactgtcttctatgcttgttaaataagcaagtggattactttgtcttaaatattttgtattctgttgtcacttgtaactagagaattgatatatccctggattggtgatgtyagaaagtgtttgttttttgttttgttttgtttgtttgttttttgtaggatcacttcccttctctcatctgtttacagtacatctcggtatacctctttatcacctt

SEQ ID NO: 280421 - DNA, 591 bp, Homo sapiens
atcaaaagtttatatactctatgatgccagttataaaacattcttaaaatgacaaagttatagaaatggagaatggattagttgttattagggattaagaaggaagtgggggcaagagggaagtggggacaggtgggaagtgggtatggccacaaaagtgcaacacaagggatctttgtggtactggagatgttctttaccttggctgtaacaatgtcaatatactggtttttatattgcagtatagttttgcaaaatgttaacgttagagaaactgaaaaatgagtgcatggattcattgcacgtaaatgtacaagtatttcaaaataaaaagtttacttaaaaaatacatatatgtaaaactttccataataaaccctgataacaatmtctaacaaaaagcaatgaataagaaaattcattcatgaatataaatacaatcctaggttaaaataccatcaaatctaattcaaaagaacattaaagtaattctttctcatcttagcaaaggatttcttttatgactatgaagagtttgatattaggatatgtagtaagcaggatcataatattaataagctttaaaatgtt

SEQ ID NO: 280422 - DNA, 594 bp, Homo sapiens
agatatatttaagcaataaatataaaatgaattaatagcgttttaaaatagcattgaattcctgaaaaattcatatattgctggattaagaaagtgggatataaaattatacatatagtatagggcaggtcaacatacacatatactcacacccagacaaagaaatacaccaaaatattaatagtagttatctctggaggccagaatcagaggtaatmtttcattttattcttcatactttttaatattttaatcagaaatattaaacattatttttaaaagaaatatagaaaaagaacagtttcttacaaaatgtctgctttgtctttcagctagcaccttattattaaaatgctgattgaggagtaataatctctttcagcaagtaacatctcatattcatgcaaaaataatcttaatactatttttaataagaaaaatgtgctcaagttgaacagtttttatcaaatacttgatgtgagtatgtaaaggagaacttgacttcgtaaaaactgtactataaaacaaaatgttataatcgctgataagatttggataggaaaagagagtctgggggctggcagccagaagagt

SEQ ID NO: 280423 - DNA, 455 bp, Homo sapiens
ctataaatatacagaaaattctgtttagatgaaactgccactggtgaactccataaccagcagacaatcacaaaaactctttgtggacagcactctttgaaaaacttatttatttaaatgttagaaattttgtgttttaccaaactgcactatatgcaacagtatctgacagccttaaactaaccataattgataatattaataacaacaatgtgacagtcaggataggctaggttatgctgcaataagaagaaccccctcccacacacacaccaagtcttagtggctcaaaacaacaaagttttatttcttgctcacaayacatgtccactatcatcagctaggggctctgctctgggttttcttaatctggagccaagctgatggactctccattgtctgaagatttgctgatcacgatggtagggagaagaaagcctccaaagcaatacaca

SEQ ID NO: 280424 - DNA, 565 bp, Homo sapiens
actctttgaaaaacttatttatttaaatgttagaaattttgtgttttaccaaactgcactatatgcaacagtatctgacagccttaaactaaccataattgataatattaataacaacaatgtgacagtcaggataggctaggttatgctgcaataagaagaaccccctcccacacacacaccaagtcttagtggctcaaaacaacaaagttttatttcttgctcacaatacatgtccactatcatcagctrggggctctgctctgggttttcttaatctggagccaagctgatggactctccattgtctgaagatttgctgatcacgatggtagggagaagaaagcctccaaagcaatacacattatttttggacacattccatttaaggcaggagaatagggtctggaggcagaaaacctaaggtggattcatgctgacttcctagaactaaatagaaaggaaaaccccaactttccacacccaagtaacaagaggaacagaggctactccctttgcaaatcaccccccaccatacgtttgcataaaagtgtaacctttgtaa

SEQ ID NO: 280425 - DNA, 565 bp, Homo sapiens
actctttgaaaaacttatttatttaaatgttagaaattttgtgttttaccaaactgcactatatgcaacagtatctgacagccttaaactaaccataattgataatattaataacaacaatgtgacagtcaggataggctaggttatgctgcaataagaagaaccccctcccacacacacaccaagtcttagtggctcaaaacaacaaagttttatttcttgctcacaatacatgtccactatcatcagctaggggctctgctctgggttttcttaatctggagccaagctgatggactctccattgtctgaagatttgctgatcacgatggtagggagaagaaagcctccaargcaatacacattatttttggacacattccatttaaggcaggagaatagggtctggaggcagaaaacctaaggtggattcatgctgacttcctagaactaaatagaaaggaaaaccccaactttccacacccaagtaacaagaggaacagaggctactccctttgcaaatcaccccccaccatacgtttgcataaaagtgtaacctttgtaa

SEQ ID NO: 280426 - DNA, 593 bp, Homo sapiens
aagcaaatggaaggaattgcccctacaccagaaacagcaaatcactcagagaatccttactgagtgactaaccctcccaagtacctccgaaggtgcttcatcttagtctctttagctggttcccctcatttgtttgatctctaaacggaggaggtttcagttcttaaaaatttctttataatctataattaacttcatttgatacttattcagtcccagagttttcagtattgtctgttcataggataaaaatttttcaaattttgtatagctctaagctcttsatttaaatacaaacttacctacttaacatctccaccaaatatcaaataagcatctcaaacttatcatatctcaaacttatttccccttcccagcctatccattctgtagtctaacttattttagtaatcagcacatccattctgctgttaactaagcccaaagtccttgaagtcatctttgcgtttccctcttttcttaacaaatccttcagtaaatgtgtcagtgctttgcataggtccaaaatccaaccacttctcaatgcttccacaaacttcatccaagcacaaccatctcttgcttaaacagtt

SEQ ID NO: 280427 - DNA, 548 bp, Homo sapiens
tgaatggaacaggtctgtgtcccttcccacttctgagaagatcatgatcttcccaggtctgggaagagactccccaggtctctcttgagccagcattggcatcagcctgtattcttcgagtgtgatgaacaaaacagccctgctgaatcttgattgacatataacaggagcaaaaaataatctttgtggtttaagtcaccatgactttggggttgcttgttattgcagcataacctagtccacccaattgttacaggaagaaggtcctgatccagaccccgagagagggttcttggatctcgtgcaagaaagaattcaggacaagtccatagagtaaagtgaaagcaagtttattaagaaagtagaagaataaaagaataacccttgagggttgctggttgcccatttttgtggttattttgtgatgatatgctaaacagggggtggattattagtgcctcccctttttagaccatatagagtaacttcctgacaatgccagggcatctgtcaactgtgatggygctggtgggagtatagcagtgagg

SEQ ID NO: 280428 - DNA, 564 bp, Homo sapiens
atcacctgggggctgcaagtgtatctgaaaggtctattgtgtgtgttggtgtagaggggctacttccaagcttactgatgtggtccctcaggttcttcacaatgtgagcctctccagtgggctacctcrcaacatggcaattggcttcctcaaactgagtgatccaagagaaggtgtgagaggaagcctcacccaagatcatggcctttttaggacattctgtgactgagacacattctgtgactgagtaagccctggctagaaaggcccagacacttcactctggcatgggtcactctgaccaataataccttgaagctccatgacaggttggcccaagcatcgtcaggcatacatgacactcaaattcttcctctggccaatcctgcttcctcttttctttgtctcacaagaattgagccctaattttgtatttcaaagtctatctctgtgtctgcccatggaaaacccaatccttttccttcctggatagtaaaattcactaggggaggggagtattttattaatttcctaccctggctgattgttttccttctgggaatc

SEQ ID NO: 280429 - DNA, 564 bp, Homo sapiens
atcacctgggggctgcaagtgtatctgaaaggtctattgtgtgtgttggtgtagaggggctacttccaagcttactgatgtggtccctcaggttcttcacaatgtgagcctctccagtgggctacctcacaacatggcaattggcttcctcaaactgagtgatccaagagaaggtgtgagaggaagcctcacccaagatcatggcctttttaggacattctgtgactgagacacattctgtgactgagtaagccctggctagaaaggcccagacacttcactctggcatgggtcactctgaccaataataccttgaagctccatgacaggttggcccaagcatcgtcaggcatacatgacactcaaattcttcctctggccaatcctgcttcctcttttctttgtctcacaagaattgagccctaattttgtatttcaaagtctatctctgtgtctgcccatggaaaacccaatccttttccttcctggatagtaaaattcactaggggaggggagtattttattaatttcctrccctggctgattgttttccttctgggaatc

SEQ ID NO: 280430 - DNA, 605 bp, Homo sapiens
acagccttcccataaacttctacttcttttttatttgcaattgtaagtagttttgtaatgttgttctagatattctaaacgtaattgattttaacaaagaattggcaataaagctcatttcagagtcttttagttttaagtggaaattcataaaaagagaactaagagatgtgaaaaattgatggaatcttataaaacaatatatgagctaaaataaaaatttcatatcacaaaacaattacttccagtaatttaagagggaaaatttaaaagtctgatcattttattcctggctaggtggaaaaaatgtgagcacaccacaatgatagtgtttaaaatagaaaacatattcaacatctgtttaacctcaactgaaggagatttgtttgaaagtatttttaatgccttttaggttgcttcatattattgaggggggctccatttccactatatacaactgcctatttaaagtgccttatagctttacatagggattgggctatagttgracatacaaaaaaaaatcaatagatgttaaaacttggcttagttttcactccattataatggagcaatgctagatgttttaggttagtagagcaaac

SEQ ID NO: 280431 - DNA, 482 bp, Homo sapiens
ttttattttctccaagacttctgggtcttttaagtgactaaatctgtccacactcagcctttaaaaactcaacacaaggtcatttcttctcttttcacacctgtggcagctgccttcccctcccmttgctctaacaaggatgggtgcaatcatgaatctcttctttcctaggaggagctcattactttctgaatttcaatctattagtttccatcacaacctcatatctcttttaaaagataaactttaaaaaatacataattttgtagattatccagtgtgttctctctttcaatttgggaatgatgctttcttgagattttctatatctgaagcagaagtttaagtggtttcaattgtttttaagaaaatctgtgaccaacctaaaatataagtaatttattatatttattgcatacaatgtgaaaagcagcttaaatttattttatatgctcaatacacattataaatatttaacaaat

SEQ ID NO: 280432 - DNA, 578 bp, Homo sapiens
aacgggcttttgccaggaagatcagtggggagatttgacaaaattctaaataaatggtgcagtatttgaaaaggcacactggatatgatgacaaaaattgacaaaacccatatccctaaaacataaaataaattagctgttaaaatatgtggtagttcttactccataaagagtgaattaccactccaaaaattttatcaacatcaccttaatactgctattgcttgaaactatgatcccatagaattttatattatcactattagacctccattctaatttaatcagtatgtcccacttatcagcataagataaagaattaagtcactttcctttcattcaaatcaagtgattctgaggttctagtctatctcttcagaatcttctccttattgattgctttaagcccctcagggacagtttgcttttcttttgtttaattttctttctttttctatatatatatatgtctatcttatatatgtaaatacacatacataaatataaatatatatakagagagagagacagagacagagagagagagagagagcgagacagagagagagagagagaga

SEQ ID NO: 280433 - DNA, 576 bp, Homo sapiens
tattactatttcaaaaataataataaatatttattaaacatttagcatgtgctatattttgaatgattgtcccctccaaactcatgttaaaattttaaaattgccattgatagtatctggagatggcacctttaagaggtggttaggtcataaagtctccactctcatgaagtgactrccaccattatcaggggagtaggatctcccactcttgctctctctctcacctctcttggccattcttccatatgatgatgccttcagccttcaacacaccttcagatgttaagacgcagcaaaaaggccctcaacagattctggcatctggatattgtacttgccagcctccagaaatgtgagaaatacatttctgtttactttaatttatccagtttcagatattctgctattgcagcacaaaatggttaggcgttgttctgatattttaaatatattaactaatataatctacaaaaaatcccgtagtagatattagttttatgtcaattttacagacaagaaaactgaccacaaagaaacgaaattacaagtacactgggagaagaatgtaagaag

SEQ ID NO: 280434 - DNA, 614 bp, Homo sapiens
accagtaggaaagttcaagatatcatctcaccatcacctctactcttggcagaagaccagaagatcagaagaaaacccctagttcccagcttctccctggggagggaaataattggactgcatatgcaatgcctcaaaattttcaggggtttcccaaggcacttgctcttatctctstcatgtcaaagcacttacaggatatagcatattctaaatgcctgggggagaatgagaataaacatgatgtttggactagcacatagtcaccataacccatcccccacaggctcagcaaagggaaagtataaaggccatacatcaaaagcccactgctagcatcatactcaatggtgaaaagctgaaagcttttcctccaagatcaggaacaagataaactgtccactcttgcttctattcaacatagtcatagaagtcctagccagagcaattatgcaagaaaaataaataaaaggcatccaaattagaaaagaagaaaattatctgttttcagatgacataatcttacgtgtagtaaaccctaaaatacttaggaatagacttagcagagacagtgaaggcttttacactaaaagctataaaatattgataaaaga

SEQ ID NO: 280435 - DNA, 418 bp, Homo sapiens
attttttatttttaattaatatatttatttaaatttttatctttgaaacagagtcttgctctgtcccccaggctggagtgcagtggtatgatcttggctcactacaacctctgcctcctgggttcaagagactcttctgccacagcctccygagtagctaggactgcaggtgcacaccaccacactgggctaatttttatttatttatttttttaataaaaacgggttttcaccatgttggctaggctggtcttgaactcctgacctcaaatcatctctccatctcggcctcccagagtgctggggttacaggcatgagctaccatgccaagcccaatggcaacttttatcacgacctgaaaattgtcacactgtggactggctttgtgaaaaattaagaagatagtgaatgaactgg

SEQ ID NO: 280436 - DNA, 418 bp, Homo sapiens
attttttatttttaattaatatatttatttaaatttttatctttgaaacagagtcttgctctgtcccccaggctggagtgcagtggtatgatcttggctcactacaacctctgcctcctgggttcaagagactcttctgccacagcctcctgagtagctaggactgcaggtgcacaccaccacactgggctaatttttatttatttatttttttaataaaaacgggttttcaccatgttggctaggctggtcttgaactcctgacctcaaatcatctctccayctcggcctcccagagtgctggggttacaggcatgagctaccatgccaagcccaatggcaacttttatcacgacctgaaaattgtcacactgtggactggctttgtgaaaaattaagaagatagtgaatgaactgg

SEQ ID NO: 280437 - DNA, 465 bp, Homo sapiens
attctaattctcaaaaggtggtattattgtccctaattttacagatgagaaagttgaggctaaagagcactgctttccagacccagatctgtgaaatcacaaagttcayactcctcctatttccctctgcttacatgaagaacactttaaaaagtccattagacctttaaagaaaggaaagtaggatggtgccaaagattacatttccccaggcttatctaaagagaccttaagagttcaccatagtttttttttttttcatatattttgccaacttgagcccagttgaattctgtgcagcaaacaggtgagaccattaacgtagacataaatacacacattccaacacatatgtctagaaataaatttgcagaagtactaaataactgaatagccaatgtgatagcatcaaaaatcaaaatctgagtttcgagtgcataataagtattcaggactgtgctaggc

SEQ ID NO: 280438 - DNA, 536 bp, Homo sapiens
tccacaacaacaacaacaaaaagtaactgtaaaatttatctcagtgaaaatcaaacacttattgaattctgtctggtgcctaaggaaggctcagagcctgagtcctgttctctcattctttttttttttttttttaaaggaatggttagaaggcagctaaatatccacagttatagacatgctaacaccaaatagagaattcttcctttcattaatcggaaagagtgaaagacaactgaagagacattaactttctgcccaagtgatacattatcatttaaagtaatatttatatcacaaaatcacctcatattcaatgttggtacacatgcaaaatttgggagaacattggtaaagtggaaaaatatactactctaggcagcagatattgattctggaaaagattttgtcaacctcatttgcaamcacagtcaagtgctgcaatttctctgtgccttaaataactatttgacaatggggaatgtggattttgtatcaaacagggtgatctaagttaggctgtggttacaatcacc

SEQ ID NO: 280439 - DNA, 488 bp, Homo sapiens
tgtgcctatcagagattcaaagaagtatagtaataagtttcaaggatatctattgcatcctctttgccatgtgggagttggtaagtctaaaaaatctatttatctttgtgtattggtatctgtctgtctctctctctctctctctctctcttccctcccccccaccttgtgtctcggagaatataggtggaggtcacatccttctctctgtatctcattttctgcattacctagtagarctagcaaagttctcatctttgtctttatatttgttaatctctttgtgttttactctgagtattttcttgttgttctttagctgtctctttcactcaattggccattctgaataactaaacaggtatttttctggctttagtaattgaattattttacatttcatgttaaatgttcatgcattcaattaattacttaaaatacaaatactgaatacttactgtattcctggatcatgttaggtactaaga

SEQ ID NO: 280440 - DNA, 509 bp, Homo sapiens
tgacttgagttttcaaggaagagaaagagtacccctgaggaacagaagaaaggaagtcatgccagcagagatgcaccaacccaactgccaaaatgctaatctaagtctttgcttctgtttgctttttcaataacccctattttcttcagttttaggttttttattaagcyaaattttgtcgccagccaccttctaaatctcttaacaacataactttaacaccaggagtcatctcaacgtacctccatgtgctacaatgggaaccatgaacaggttctaaggcatccatttaaaatatctattattacaactcttactgaattctctgcctttaaactgcatataatggctaacaaattgcttggttaaattcgtaccaaaaaatagtgaaatagaaatccagctcattacagtttggatctaaaaagcctcaaaccttgttcttgagagaagaaggtagctctaatatctcagaagctggaagtggtttgttttcttcagtgtaggtg

SEQ ID NO: 280441 - DNA, 586 bp, Homo sapiens
aatgtatgtattacttttgtcaagtcttgctgagttccgagggcaatcctttgaaattgaggataggatcagacattcctctgcccacctcgagatggtttcccagccttgcctgaggcccttggctggtcatgggagccagatgaagaaccaacagtctgacttccatcccaaaatagatcccctggatcaaaaataggcctttctccaccctcttcaaccacgattctttctttattctcaaaagtgtgctgcaagctcagaaaacagcaatataaaacatttgcgcggagcagaacagatgttaccagaggttgaggtgaggaggatggggagaggttggtcaacaggtacaaagttagataggaggaataagttctggtgttctattgcacagtarggtgacattggttaacataaaggtattgtgtatttaaaaattgctagaagagaggcttttgaatgttctcgccaccaagaaatggtaaatgcatggggtgatggatacactaaatactctgattggtcattaagcaacatgtatgtatcaaaacatcagactgtaccccataaataggtgcaatta

SEQ ID NO: 280442 - DNA, 580 bp, Homo sapiens
caaaaaatgtttatctttgaatacttggtgccacactaggatatccaagaatttcatttaaggaatgtagaactggaatccatgtattatttcaacacttcaggggtcttcacaaagcttgtgactattgacaacaccaaacatgtatctgttttcctagttgaatatggttttattgtcttaaatgcmgatatgagattgtttacaaatataacaaattatttatttaaatatttggaacatgaaagaagattttaatcttgtaacggttataggttttagtgagattcttactaatactttgattagttacctgtgtatacatcctccagaaatgtagagaacaaacttttaaaaaattttactcagatttaattatttagtttggctgtattttaaaattcatattaatgtagcaaatctccacttatctcgtttctatatagatactacccaaatccaaatcagtgtagcattagaaaaacctatcatgatatagtaattaaggaaatactagtccagttttttttttttttaattcagggcaagaagtgtctctcatatccaaacactgaacaaa

SEQ ID NO: 280443 - DNA, 426 bp, Homo sapiens
ttgataaacatttataaatgaactgctgtattagtttgctttttatttatttatttatttatttttttgagattaggtctcactctgtcacccaggctggagtgcagtggtgtgatctctgctcactgcaacctttgcttcccagcctcaaacgatcctcccacctcagcctccagagtatctgggaccactggcatgctccaccatagccagctaatttttttgtatttttggtagagatggggtttgccatgttgcccaggatggtctcgaactcctgagctcagatgatccacctgccttggcctcccaaagtactgggattacaggcatgagctgccgtgcttggcctgctgtgttaattgattatgtatattataaaaggyatggcaaaagttgagaatttttgaaagatgatattaaact

SEQ ID NO: 280444 - DNA, 503 bp, Homo sapiens
cttatttgattctacaaacaaccctataaattagatactagtatttattctacagataagaaaacagagcagtaagkgtaaaaagcaaatcattcaaaagaaacagaaaaaagtgaaacaaagtgttgcttgggtcagagataaaaagcaccagaaattaaatcctccttcaaatgttgacatattaatttaacactttcaccagaaatcacaaccagcaacgtgcttactttaggaatgtgcgtgcatgtttgcacatgtatacacatttccattggatgataaaactaaatccccctttggaaaaatataatgaacgaatccagaaaattgtttcaccaaaacctcctataaatgatctcaggtctgttttggaagaaactactctccaaggagaaatgaaataagctttactttcaacattcactgtcttttggtgctgttcatgaataaattgggctaattgttgaatgtgagaagtgatgattttatgatatatatat

SEQ ID NO: 280445 - DNA, 629 bp, Homo sapiens
caccaattctaccaccctaatccaagccaccactgtgccacatgtagaggcccgtgatagtacattatctgttctagtttcacccccccaccccaacccttctccaattcattttccatgcagcgggcagrtggctatgatcttgtcaccacccactacctatctctatcccttgctattgctcttaggatgtttctcactgttgtacctattccatttagctatgatggaattaaatttattttaattgctgtgctcagatgggaagaaagactgataaataatgagataaatgagggaactggaaatattcagagattggtcattttgcttttatgccctgaagcaatgatatttcacattaaataaatttttttaaaaaaggcagtttcttctccagggcaacattatctttgtttttttatagagttcccatgattactcattggtttggtattctggagtttgtggactttattcagaatatgagaaacctaattctttataagtcaaaagcaagtactgaaaatttaattcataaagaaaagagttttccacatattttcacaggcttccttaaaaatcttccccattttgctcgtcacagtacttccagaagggatcgtgtt

SEQ ID NO: 280446 - DNA, 629 bp, Homo sapiens
caccaattctaccaccctaatccaagccaccactgtgccacatgtagaggcccgtgatagtacattatctgttctagtttcacccccccaccccaacccttctccaattcattttccatgcagcgggcagatggctatgatcttgtcaccacccactacctatctctatcccttgctattgctcttaggatgtttctcactgttgtacctattccatttagctatgayggaattaaatttattttaattgctgtgctcagatgggaagaaagactgataaataatgagataaatgagggaactggaaatattcagagattggtcattttgcttttatgccctgaagcaatgatatttcacattaaataaatttttttaaaaaaggcagtttcttctccagggcaacattatctttgtttttttatagagttcccatgattactcattggtttggtattctggagtttgtggactttattcagaatatgagaaacctaattctttataagtcaaaagcaagtactgaaaatttaattcataaagaaaagagttttccacatattttcacaggcttccttaaaaatcttccccattttgctcgtcacagtacttccagaagggatcgtgtt

SEQ ID NO: 280447 - DNA, 557 bp, Homo sapiens
aaaaattagctggacgtggtggtgggcacctgtaatcccagctacttgggaggctgaaggaggctgaggcgggggaattgcttaagcccgggaggcagaggttgcagtgagctgggatcgtgccactgcactccagcctgggcgactgagcaagactctgtctcaaaaaacaaaacaaaacaaaacaaaacaaaacaaaaaaacgcttatcgtccagaacaggatcacatcttttgacataaagctgttggatggcacaggcggggccaccatgtgcatggatgtcatcatggttagtgtgttaggccattcttgcattgttgtaaggaaatacctgaggctagtaacttgtaataaaaagaagtttaattggctcacggtctrcaggcagtacaagaaggctggtgccagcattcatttctggtgagggcctcaggaagcttacttcttgaagtattatgtggtgcaaaagtaattgctgtttttgccattacttttaatggcaagtaaaagtattacttttgcacccacctaataagtacttactggctgaaggt

SEQ ID NO: 280448 - DNA, 566 bp, Homo sapiens
ctgttgcccaggctggagtgcagtgttgcagtcttggctaactgcatcactgcaacctccgcctcgtgggttcgagcaattctcccttggcatcctaagtatctgggactagggcgcatgccaccacgcccggctaatttttgtatttttagtagagatagggttttgccatgttggtcaggctggtctcgaactcctgactgccagtgattcacacgcctcggcctcccaaagtgctgagattacaggggtgagccaccgcgcccggcccgtttatttctaatagatgaacagttctgttacttagattaaattgaatttcagtgcagcaaaaaayctactacagaaagaaatgtgctttgaggcctcatgcctcaaggagagctctgcatcctggggtgtggtcctcagggggactgcatgcagcccatcatttccaaggaaatagctggaaacctgcctctaactagaccagggtttctcaatcatcagcagtactgatatttggggctggataattctctgttgtagaggttctgtgtataataggacatttagcagcgcat

SEQ ID NO: 280449 - DNA, 569 bp, Homo sapiens
cttccaagagtatatgccatttgtcttcagctaccagggtggatagggaaggcccatcaggtgagggcasggctgggcgtgtctgagctcagactttccttgggtgggtcttgctgtggctgctgtgggggatgggaggtgaggttcccaggtgaatggagttgtgtacataggaggattatggctgcctctgctgagtcatgcaggttgtcatggaagtggagaaaagccagcagtcacaggcctcacacagctcccacgcaaaccaaagggctggtctcactcccacatgaccctcctaatagccccgagtctgtttccaggcagtgggcgagcagggcttgagaacttgccccaggctacccacttcccagctgcaaaagctaagggcttggttcttcccccacctgtggagtctgcacaccagattcatgccctcccaagttctggccaggaggttgccaggttcaaattgttacaaagttcagctggagactttcttctccctgtggcattttcccctgcacctctggctgccctcctgaaggatccctgtgttgccaggctgg

SEQ ID NO: 280450 - DNA, 569 bp, Homo sapiens
cttccaagagtatatgccatttgtcttcagctaccagggtggatagggaaggcccatcaggtgagggcacggctgggcgtgtctgagctcagactttccttgggtgggtcttgctgtggctgctgtgggggatgggaggtgaggttcccaggtgaatggagttgtgtacataggaggattatggctgcctctgctgagtcatgcaggttgtcatggaagtggagaaaagccagcartcacaggcctcacacagctcccacgcaaaccaaagggctggtctcactcccacatgaccctcctaatagccccgagtctgtttccaggcagtgggcgagcagggcttgagaacttgccccaggctacccacttcccagctgcaaaagctaagggcttggttcttcccccacctgtggagtctgcacaccagattcatgccctcccaagttctggccaggaggttgccaggttcaaattgttacaaagttcagctggagactttcttctccctgtggcattttcccctgcacctctggctgccctcctgaaggatccctgtgttgccaggctgg

SEQ ID NO: 280451 - DNA, 1145 bp, Homo sapiens
gtaatgttgttattagtatatggttaaagtcctgttcaagtaaatatcattaaaataaaactgtatctttaaaaaaagttcaagctctaactgatgtatatttattcaaagcaatatcttcaaagtgtagtaattaagaaaaaccttgagaaattgctacagsataattttctttttgcaatagtcaattatgttatttctcttataagatacagagatatttgaagaaataagtgttcctgatcacctcaaaatgtcacattagctagtatattgggcctcagaaatttttttactaagacacctcaaaaagcaaaagaaagaggttttaatattattattattacatactaatacatatgtataataataatgtataactaggtacagttttattatacataaaaattaacatcattattatcattgcttaccattatcctctttgtgaatagaagtaaataatgaaatggtcctaagttaggcaatggcaaagagaaaaatttttaaagcatgctgatttataaactgaataattggtcgtatgagtctgtaataatgaagaagcaccatatgtcagaagagtgattgaagaacttaagtwcagctaatacataggaataagaattataaatcttattgttttagcaggttttcctttagtctgctttcwttctgtcttaatttgcaacctctgcaggcattctggctgaaatcaaacgacgctgaagtcatatctgagctttggttcacaaaaagaaactaagaaagcaaaatcttgacaaaactcttgaagcatgaacatttaattgagtcaagacattacatttatgaattaatattcctttaatctttaaacatatacagtaaaatctaacatcattgacaggtttatctaatgtatcttttggttaactgacattatgttttaaatttggtttcataattgagccttcagttttttattattcagggacccacagtatctcaggattatcattttcagttttccctttctgtttgcctacaaaaaccctgtcttctagctcagcagcgcctgaatatgttttgggcattgctacctctgtgcctgttcatgttcttggaacagcccaccccaccctggcttgaccactgctcattca

SEQ ID NO: 280452 - DNA, 589 bp, Homo sapiens
gggattgaaagactatttttaaaacagaaatacttctcaaactaatctacagattcagcacaatgcctgtcacaatcccagctggctaatttactgaaattgacaaacggatcctaaaactcgtatgaaaatttaacggaccctgtctagccaaaacaatctcacaaaagaatgcagttacaggactcaaacctcctgacctcaaaacttactacaaagctaaagtaataaagacaatgcagtactggaataasaacagataagtacataaatcaaatagactgagtccagaaaaaaccctcacattacagtcaactgatttgacaagaatgccaagacaattcaatggggaaaaaatagtcttttccacaaatggtgctcaaacaacttcataactacatgcaaaagaattaaaatgcagaccccctcctcacattatgtacaaaaattaactcaaaatagatcaagacctaaatataagaaaaaaactataaaactcttagaacaaaagaggataaatcttcatgacactggagctagcaatgtttcttaaatatgacaacggctgggtacagtggctcatacctgt

SEQ ID NO: 280453 - DNA, 589 bp, Homo sapiens
gggattgaaagactatttttaaaacagaaatacttctcaaactaatctacagattcagcacaatgcctgtcacaatcccagctggctaatttactgaaattgacaaacggatcctaaaactcgtatgaaaatttaacggaccctgtctagccaaaacaatctcacaaaagaatgcagttacaggactcaaacctcctgacctcaaaacttactacaaagctaaagtaataaagacaatgcagtactggaataagaacagataagtacataaatcaaatagactgagtccagaaaaaaccctcacattayagtcaactgatttgacaagaatgccaagacaattcaatggggaaaaaatagtcttttccacaaatggtgctcaaacaacttcataactacatgcaaaagaattaaaatgcagaccccctcctcacattatgtacaaaaattaactcaaaatagatcaagacctaaatataagaaaaaaactataaaactcttagaacaaaagaggataaatcttcatgacactggagctagcaatgtttcttaaatatgacaacggctgggtacagtggctcatacctgt

SEQ ID NO: 280454 - DNA, 589 bp, Homo sapiens
gggattgaaagactatttttaaaacagaaatacttctcaaactaatctacagattcagcacaatgcctgtcacaatcccagctggctaatttactgaaattgacaaacggatcctaaaactcgtatgaaaatttaacggaccctgtctagccaaaacaatctcacaaaagaatgcagttacaggactcaaacctcctgacctcaaaacttactacaaagctaaagtaataaagacaatgcagtactggaataagaacagataagtacataaatcaaatagactgagtccagaaaaaaccctcacattacagtcaactgatttgacaagaatgccaagacaattcaatggggaaaaaatagtcttttccacaaatggtgctcaaacaacttcataactacatgcaaaagaattaaaatgcagaccccctcctcacattatgtacaaaaattaactcaaaatagatcaagacctaaatatragaaaaaaactataaaactcttagaacaaaagaggataaatcttcatgacactggagctagcaatgtttcttaaatatgacaacggctgggtacagtggctcatacctgt

SEQ ID NO: 280455 - DNA, 589 bp, Homo sapiens
gggattgaaagactatttttaaaacagaaatacttctcaaactaatctacagattcagcacaatgcctgtcacaatcccagctggctaatttactgaaattgacaaacggatcctaaaactcgtatgaaaatttaacggaccctgtctagccaaaacaatctcacaaaagaatgcagttacaggactcaaacctcctgacctcaaaacttactacaaagctaaagtaataaagacaatgcagtactggaataagaacagataagtacataaatcaaatagactgagtccagaaaaaaccctcacattacagtcaactgatttgacaagaatgccaagacaattcaatggggaaaaaatagtcttttccacaaatggtgctcaaacaacttcataactacatgcaaaagaattaaaatgcagaccccctcctcacattatgtacaaaaattaactcaaaatagatcaagacctaaatataagaaaaaaactataaaactcttagaacaaaagaggataaatcttcatgacactggagctagcaatgtttcttaaatatgacaacggcygggtacagtggctcatacctgt

SEQ ID NO: 280456 - DNA, 523 bp, Homo sapiens
ccaggctaaagtacagtgtgcaattacagctcactgcatccatgaacccctgagctcaagtgaacctccaacttcagtctcccaaaatgctgggattacacatgtgagccaccatgcctagcccattaaaccagtttggaactggttctggtggttacttgttgccataactgcagcacgtttaatcttttcccaggagtgtcggaatttttttattttcaagtctctgccttcaagaaaatcattatctatgtgggggatagccatgcaaactatacatasagacagcataacagagaagttaaaagcacagttttcttgctaaacataaaagattggtgacttgcatttccttctgttccttcctgaattttcacctagatgacactaaagggattttaaaaggcataaatctaagagaaagaacatgaagggagacaacaggagagggtagaagaacagctgagagatgccaattaaattttggaagcctccaaatcagtttgcaattgctaactgatct

SEQ ID NO: 280457 - DNA, 590 bp, Homo sapiens
accaagccatgaggcatctgcccccatgacccaaacacctcccaccaggccctggctccagcattggggattacatttcaacatgagatttgggtggggacaaatatccagattatattggtgtacttgatacattatgattttattgaaccctcttaggaactctaaagtagacaggacaggccaattcatttttatctaaactaaatgatctgacagtggctgacattcagctcagcagcaagagtcaatctgaatctaagtcttgagaactccaaagtctgttttctttgttcgytctgcaatttcttctctctggcatgaaaagaaacatataacacaagacagagacccagaagtcgaggcccagtgtctgatgtataaaatggcttttcaggattacaagagacatgcccagttactttcagtgcaaggatatctcacaaaaattcaagagcatattaagtctcaagtcatccatctcccttctggctagacagtcactgatatggtctgactgtgtccccaccaatataaatttgaattgtaccgcccagaactcccacatgttgtgggagggacccaggggg

SEQ ID NO: 280458 - DNA, 585 bp, Homo sapiens
gcacctgtgctcctgggagggtgaggcagttagcctcttttccctccagtaacctccttccaaaacatggggaggggggcagcgaaagggaggcaggaagctcttacctggatggtactatcrtaagatggctttgaactgtctggccttggcagatgtctaaaactgattcttatgggtgtcttcctggtttttctggttacaactgtcccaatacaacttttttggcatgggtgatgtgttcactttcttttccacaattctcttccttggccttcatttttctgacaggttcttccgcacagatgttcactgtcggattcccattgtcctcttaggcagtagtcaaagtgactccaggtcacccacttcctcatggtttgcatctggtccctgggaagcattcttgcatcccttgccctgaccaatttcgaggcatcaggctgctttccacatagccctccattctggtatgccaggccactttggctgtccctcttgtgagtcaggcacagtcccttttgccctcaccactgcaaggaacataggaagttctccaagtgatcctgttgaagcttttagccc

SEQ ID NO: 280459 - DNA, 585 bp, Homo sapiens
gcacctgtgctcctgggagggtgaggcagttagcctcttttccctccagtaacctccttccaaaacatggggaggggggcagcgaaagggaggcaggaagctcttacctggatggtactatcgtaagatggctttgaactgtctggccttggcagatgtctaaaactgattcttatgggtgtcttcctggtttttytggttacaactgtcccaatacaacttttttggcatgggtgatgtgttcactttcttttccacaattctcttccttggccttcatttttctgacaggttcttccgcacagatgttcactgtcggattcccattgtcctcttaggcagtagtcaaagtgactccaggtcacccacttcctcatggtttgcatctggtccctgggaagcattcttgcatcccttgccctgaccaatttcgaggcatcaggctgctttccacatagccctccattctggtatgccaggccactttggctgtccctcttgtgagtcaggcacagtcccttttgccctcaccactgcaaggaacataggaagttctccaagtgatcctgttgaagcttttagccc

SEQ ID NO: 280460 - DNA, 507 bp, Homo sapiens
gtaaccatattcacaataagatctttaaacaagtgattaagttaaaattacacaattgcaattggagtaggccctaatccaatctgattgatgctcttacaagaaaaggaaatttggacacacagagaaacatcagatgcatgcaagcagaggaaagaccaggtgaggatgcagcraaatgctggccatctagaagccaagcagagaggcctcaggagaaaccagccctgccaacatctcgatcttggactttcagcctccagaactataagaaaatccattctgttgtttaagccatctattctgtggcattttgttatggcagctctaaaaaactaatacagggtataaatgttattctcctacatatttttgagaaaaggatacttcgtttttcaaagtccaaagagggtggcaatttattcagcaagcatttgatgattccctgatatggaagaggatcacttgagatggaagttgtcctagggctccaagtaacttgatgta

SEQ ID NO: 280461 - DNA, 627 bp, Homo sapiens
ttaagttctttggtgtgggtttctttgcatttgcccccttaccatgctaaactctggtgaaatgtataagcagccttggcttttcctctcctgggtgctctgtgcttcaacattttatatctttcctcccatcagaaatcctgtgtctttgtgtggcagtastagttggctagactttaagagaaaagcattttctactaaggtatgaatgaagatagtgggaaaagtgtcattaaatttcttttttaaaaaagtatgtttattaagaatgaatctttaatatctaacatttcagacaatatgaccgcatttcagataccatgggaagcagtacatttagtgaattagctggtactgtctgagggtacttccagtttcctttaggctgttgtgacttttcacagcttcctctcctctaattctgaacttagagattttcttctcatttctaatttttagtagcttattgttctatccagtagagcattataaaagtcacatctgcatcttccaacttatggtacagtgatgggaatttggaagcacccctggagcaaagaggctagggatagcattaacatctcccaagacaagtggtataggggaaatgaaggaaagactgtggcc

SEQ ID NO: 280462 - DNA, 1762 bp, Homo sapiens
gttctcttcacacccactcctaaacaaaataagaatctgctgtaggttatktacatttattgattgattaaatatacctaaaagagaatgttgatcacattacttacacagaatgtgtattttagacctgtttctgatgttaatagcaaacagataacttagaaggcagaagacaatgttctaagtggttcatacatattaaccaatttaatccttccaacaactccatgagataagtaccattattattctcactttgcagctgaggaaactgatgcagagatgttaagtaacttgccaaggaccatacagctaataaatggcagagctgggataaaaaccttggcagtcaggctcacagttacaatgctgtactgtttctcattattgcagttagcacatctacagagattagggataaaaaagcagatctgaaatcattcttgaccatactttaaggctaattttgatgttaaagatgacttagacctatcgggttgcctaaaacaagaatgtcagaagacagaactgtatcatcttcccaggaggtaactwgttctcttcacacccactcctaaacaaaataagaatctgctgtaggttatgtacatttattgattgattaaatatacctaaaagagaatgttgatcacattacttacacagaatgtgtattttagacctgtttctgatgttaatagcaaacagataacttagaaggcagaagacaatgttctaagtggttcatacatattaaccaatttaatccttccaacaactccatgagataagtaccattattattctcactttgcagctgaggaaactgatgcagagatgttaagtaacttgccaaggaccatacagctaataaatggcagagctgggataaaaaccttggcagtcaggctcacagttacaatgctgtactgtttctcattawtgcagttagcacatctacagagattagggataaaaaagcagatctgaaatcattcttgaccatactttaaggctaattttgatgttaaagatgacttagacctatcgggttgcctaaaacaagaatgtcagaagacagaactgtatcatcttcccaggaggtaactwctgtgataccaggatattttacatttcccctcttttatttcctcagggaggaactgacctgataattaatagctatggtcctataattaaaaacaactctaagaaaaagtggttttttttccaagactcaaagaagwtacaagttgagcaggtaacctatctaaatgagaaaaatttttggcaatgcgtgatatatgaaatgatgatttaaaaagaggaaaatgtgaattcatgctttattttaattttctgtgttcttcatggctgtgattttattaatttggggcatggctctgtggagagcgaggtgaatgataacagaagttggaatagtcatcagagctgtggttttcagtggggagtagggtcagtgaggtaagggataggagcaggagcgtgcatcagaagcactgaagaagcttttgacacttcgcttgccacgggtaattctgatgtgctcccacctgtctgtggggacctgatgagcttttgctcgtggattcgatcagtctggtatctcattgccatcttatctttttttgcctagcctcaaagaagatttactccagcggtctgcttttaccagccagggcaccactgtattaatcagtgatgaagactcccctagctccccaggtcagacaaccagctt

SEQ ID NO: 280463 - DNA, 1260 bp, Homo sapiens
ctgtgataccaggatattttacatttcccctcttttatttcctcagggaggaactgacctgataattaatagctatggtcctataattaaaaacaactctaagaaaaagtggttttttttccaagactcaaagaagatacaagttgagcaggtaacctatctaaatgagaaaaatttttggcaatgcgtgatatatgaaatgatgatttaaaaagaggaaaatgtgaattcatgctttattttaattttctgtgttcttcatggctgtgattttattaatttggggcatggctctgtggagagcgaggtgaatgataacagaagttggaatagtcatcagagctgtggttttcagtggggagtagggtcagtgaggtaagggataggagcaggagcgtgcatcagaagcactgaagaagcttttgacacttcgcttgccacgggtaattctgatgtgctcccacctgtctgtggggacctgatragcttttgctcgtggattcgatcagtctggtatctcattgccatcttatctttttttgcctagcctcaaagaagatttactccagcggtctgcttttaccagccagggcaccactgtattaatcagtgatgaagactcccctagctccccaggtcagacaaccagcttwatcctcttgcaggtttgaaatcagcaaattgtttactcagctacataacataggccttttctccgtcatgagacagttacctaggtgccgagcagtgggagaggataaagaactaaacgcgtgtagagaaggggtcccatatccttttaaaagtattttttcaaattttctggaagtgacttttgattctcattttaaaaggaatcataatgggtttacacttgaaatgctttgttcctagaggaggcagggtcatgttcactgatgttctaaaatcaaaggaatattagcagataatagtcccagcatcatctgctagtctaatgactgtagatataacattttwaatttttttaaatctgtaattttgtgccaaactggatgtgattaagactaaagttcaatgcccagcaaccacttctgaactaaactcagagtcccccagttagttatctaagtacggaattcatcgcaaaacaaacaaaaaagcagagctttaggtgaacagtctgcagcaaggaaaaatgctgctcctgcctttatagctcctgttttatactacctccttttaaagttattctagtgttattttttttcctgtactcag

SEQ ID NO: 280464 - DNA, 575 bp, Homo sapiens
  misc_feature (1)...(575): n = A,T,C or G
tagcctgtatagttctcttcctgctataagcattacctggttagctcagacggctngaggcagtcccttaataatagggatgcttttcatctctaaggatgtaagaagcaaaccaatcatgtcattctttaagtgggctatgctttgatgaagtgctctttaaaggtgtgagattggaattaaagttgcttacattgaaatgtttgcattgcaccaaaggagctcagttttcaaactttaatggaaccttgggtaaagggaaaaaatttttaatgaaatctggggttttatattttgattagcctaaaagtaaaaatacagctttatccattaagtgacttttaaaaatcagttttgccataccaaagaaattagattcttagtgtcacatgctatacttttgtctgtgcttgaaacgagcaatgccaacattgggarcaatgacagaggtttgcatcagtttgtcttggctttgttaaggacttctgccagaaatgtgctcgtggttgacaacccaggatcattgttcaagttcttatgcagacacctttgaaaacaattcagatcgtgtcaca

SEQ ID NO: 280465 - DNA, 1187 bp, Homo sapiens
ttcagcttcaccaagccactgaatgcttttcagttttattaaccctcacattccccatccttctcagcaagagcctctccttatgccatcagcatgtatatacrtttcctaggaaatttgatctttcttgtcattcttttttggttccaatcggccttttcctggttctcaaagctctagtttcttctaatttctggatcatcgcaagtctggccctctttgaactttaaaacataatgtctaattccaccccaattttcagcatttcttcaactaaatcgataaagctgtctccattatgagaaaggccagaataatactccgagtaagcataagaaagctggtcattttacaacttctcccgactctaggaagtaatatgatgccatttgttgagcatctacagtgtgccaagcacatggttcatctctgcaaactgctgctacattctgtaaagcaagtattatccgcattttagggattaggaacagcttcctgatctcttgccaaaagtcacagctagtgagtggtttaggcaagatacaaaccctagttagttaatccwgtatcattacttttaattgaggttcaawcattcatttatttatataattatctaaaatttatttaatttacctaaaattaaagcatagcattaaatacataacttcagcctcttaatgtttttctaaatttcttcttttttcagccttaaaggatatgttagaaaccagtatctcttgtgaagaataaacatttatgtgaagttcaacaatgtcttcagtccaggttttcttctactacatttaaacaaacttaacctttgaaataaaaactatcatctattgcattttaatgaaatatctatttctttatatgcatctctctagtttcccttctacctatattaatgtatggcaaaatatataaaattgtgctcgcttaatattaacaatgataatttttgcattaagattgaggatattttttaacttttatttttgtgtttttaaaaattgtttaatatagaagctttatattttctattttcataaacattgctttttataaaatgcatgtatcatttttacaaatgcaaatcgtggtatttctttaaacgacaagcaaaagaatacgactagaaacaagcatatctttttccacaacagacaattctggtagaaacg

SEQ ID NO: 280466 - DNA, 483 bp, Homo sapiens
ctcttgtactgacaatttttagtctgtagtatctccaaattagataatggttttacaatgattaggcactgaaaggttaaaacaacagcacttctgaagtaattgcttataaaaaaattctctaggaatgtggggatatttaaaagttgtatcagtcagtatatactataagtttgcctcttaagaaattaaggcacagaacatcagtttcttatactgtccagagcccgcctgttcatactgtccaaagtttatactgtctaaagttcatactgtccaaagttctgtcttattcttactgtccaaagcccacttgaggaactaaaggctgtttctgtaactgagtgcataatataaaaatattctgaactgaaattatttccttaaacaactgaataactcattcatgaaatgtttgtaaactgatrtttataataatatatttcagattgaatataagaaacctagatctgttgaatgttt

SEQ ID NO: 280467 - DNA, 448 bp, Homo sapiens
tagaagcttcctactcagcgagctttttagcttttgccttgggtcttgaagtgtaagagtaaagcaatgatcaaaaggcagcaggattggaattcttgaatgtgttctccttaaagtaaaattaatttactacctaaygtttatatatctgattattctgcttttgttctactggacatttgcgtaggttgaatgtatgtattcatatctcccatttattcagggcctgtttcagagataacttaaccaagaagttgtgggggcggggggaaaggtttcaagccactttgtaggagtggatgccattctttggaaggtactcttttacacatactcttactatttgctatctgatttctcaaacattagtgatatagggcccctgttttacaaaataggcccaaaagcacagacttggaactgaaggacaaccctctgccaagcatgt

SEQ ID NO: 280468 - DNA, 411 bp, Homo sapiens
gcaggccaagttgaaattgctgtacgggcagtggggagacagcctgagcagaagtggggattggaaatgtgggcttgggtgggagctgcctatgaagcgtgaccattgaggctgttaragagggtgctttcttctaagagaacatatattgacagtaaagaggattgaaccttctcaaaggaagaaaagaaagcagaaaggactgccacatggggcaagctgtccccagagggctttctgaggcctctttcctctctgaagggctccccaacacttcccaactttatcctctcccctacacctggccacacctcccttcttgtgtcttgatcttccctggatccttgctagccttctattaataagtaatttaatatcatgctcattaaactttgattggttaggtaattt

SEQ ID NO: 280469 - DNA, 1047 bp, Homo sapiens
tcttatttgtgatattttggggagaaaatcaacttttatgttgctaataaggtctcatgggggtagagaggtgattgataaggtattgggcttctttctgagataatgaaaatgttcaaaagttgcctgtggttagggttgcacatattaatgaatactcatacactgacagggattcattctgagaaatgcgtcattaggtgatttgattgttgtgcaaacatcatagagtgtacttacaaaaacctagatggtgtagcttaccacacacctaggatatatggtagagcctattgctcctaggctacaaacttgtactgcatgttactgaactrtatactgtaggcgactgtaacacaatggtaagtatttatgtatctaaaatacctaaacatagaaaaggtacagtaaaaatacagtagaaaacataaaaagtggtacacctgtatggggcacttaaccatgaatggagcttgcaggactggaagtttccctgagtgagtcagtgagtgagtgttgagtgwtcttatttgtgatattttggggagaaaatcaacttttatgttgctaataaggtctcatgggggtagagaggtgattgataaggtattgggcttctttctgagataatgaaaatgttcaaaagttgcctgtggttagggttgcacatattaatgaatactcatacactgacagggattcattctgagaaatgcgtcattaggtgatttgattgttgtgcaaacatcatagagtgtacttacaaaaacctagatggtgtagcttaccacacacctaggatatatggtagagcctattgctcctaggctacaaacttgtactgcatgttactgaactawatactgtaggcgactgtaacacaatggtaagtatttatgtatctaaaatacctaaacatagaaaaggtacagtaaaaatacagtagaaaacataaaaagtggtacacctgtatggggcacttaaccatgaatggagcttgcaggactggaagtttccctgagtgagtcagtgagtgagtgttgagtg

SEQ ID NO: 280470 - DNA, 586 bp, Homo sapiens
caataatacagactagaaagtcaaaccaaatacatatgggaatttagtataygatataaactacacccttagggaaaatgcggactattcatttaatgatattgagacaagtggatcatcttattaaaaaaaagctggatctcaggtcttacaccaaaataaattttaggtagattaaatatataaacatgaaaaggaaatcatacaagtagtatataaaaatgggagatttaactaataatatcagaatggggaaggctcttctaagaaaccacgcccacacacaaattagtaaattcgacaaaacagaaacaacaaaaaattttgtgttaaaagtaacactaaatcaaaatgaaaagataaaaggcaaacacaaaattgacaaggatgcttgcaacttgtgtaactgataaagggctattttcctgaatatatttctctattctataattactttctttaatatattttaaaaacttctgtaagtaagtatgaaatagacaaatgataagaacagttatcagaaaatgaaatacaaatgattcaaacatgaaaagatgctcgagctcagtctataataatagac

SEQ ID NO: 280471 - DNA, 586 bp, Homo sapiens
caataatacagactagaaagtcaaaccaaatacatatgggaatttagtatacgatataaactacacccttagggaaaatgcggactattcatttaatgayattgagacaagtggatcatcttattaaaaaaaagctggatctcaggtcttacaccaaaataaattttaggtagattaaatatataaacatgaaaaggaaatcatacaagtagtatataaaaatgggagatttaactaataatatcagaatggggaaggctcttctaagaaaccacgcccacacacaaattagtaaattcgacaaaacagaaacaacaaaaaattttgtgttaaaagtaacactaaatcaaaatgaaaagataaaaggcaaacacaaaattgacaaggatgcttgcaacttgtgtaactgataaagggctattttcctgaatatatttctctattctataattactttctttaatatattttaaaaacttctgtaagtaagtatgaaatagacaaatgataagaacagttatcagaaaatgaaatacaaatgattcaaacatgaaaagatgctcgagctcagtctataataatagac

SEQ ID NO: 280472 - DNA, 596 bp, Homo sapiens
catttctcactgagcatcttcttaggttcttgtgaaataagatatcctaaactcatcttgtgtttccacaccccagtcctggaatccaagacttttcttcaaggactcttcgttcgttttagtggagaatggtatttagaaaccaagatctaagtgctagatgtactcactgctgcaggtgtgttattgctcccagacacttttggtggacagagctaggaaatatatttatctattcatctatgtatcaaaaaacayaagttcatactggtacctctaattccaatccataaactcagagaacactctaattttcccctttttacatatttgtaactcttttttctgacagtaagaaacatggctcctattttcctcaatgtatttattcatttgctcaagcataagatacacagaaattaatttcagaattgctaacccacactgctgagaaaagcaagcctactagtagagtacaaaatttatatatagtaaaatacacaaatcttaaatatataatctggtatgttaaaaaatttttaagttgacaaataataatttcatttatttctagggtacataggaatgttttgata

SEQ ID NO: 280473 - DNA, 596 bp, Homo sapiens
catttctcactgagcatcttcttaggttcttgtgaaataagatatcctaaactcatcttgtgtttccacaccccagtcctggaatccaagacttttcttcaaggactcttcgttcgttttagtggagaatggtatttagaaaccaagatctaagtgctagatgtactcactgctgcaggtgtgttattgctcccagacacttttggtggacagagctaggaaatatatttatctattcatctatgtatcaaaaaacacaagttcatactggtacctctaattccaatccataaactcagagaacactctaattttcccctttttacatatttgtaactcttttttctgacagtaagaaacatggctcctattttcctcaatgtatttattcatttgctcaagcataagatacacagaaattaatttcagaattgctaacccacactgctgagaaaagcaagcctactagtagagtacaaaatttatatatagtaaaatacacaaatcttaaatrtataatctggtatgttaaaaaatttttaagttgacaaataataatttcatttatttctagggtacataggaatgttttgata

SEQ ID NO: 280474 - DNA, 596 bp, Homo sapiens
catttctcactgagcatcttcttaggttcttgtgaaataagatatcctaaactcatcttgtgtttccacaccccagtcctggaatccaagacttttcttcaaggactcttcgttcgttttagtggagaatggtatttagaaaccaagatctaagtgctagatgtactcactgctgcaggtgtgttattgctcccagacacttttggtggacagagctaggaaatatatttatctattcatctatgtatcaaaaaacacaagttcatactggtacctctaattccaatccataaactcagagaacactctaattttcccctttttacatatttgtaactcttttttctgacagtaagaaacatggctcctattttcctcaatgtatttattcatttgctcaagcataagatacacagaaattaatttcagaattgctaacccacactgctgagaaaagcaagcctactagtagagtacaaaatttatatatagtaaaatacacaaatcttaaatatataatctgrtatgttaaaaaatttttaagttgacaaataataatttcatttatttctagggtacataggaatgttttgata

SEQ ID NO: 280475 - DNA, 572 bp, Homo sapiens
gacctaagaagtccggagggacagggtggggcagtctcaggcctggggcttcgatagggagagagagggagcagagctattgtggaagtcagcattctgggcagacaggcctgggtacaaataccagtgtggggaccctagcacagtatgggagctctggagcttgggggctagtgaaggaagcctggaagcaggagctgggacagggaggcctgtctcacctctctcccgctcctcctttccttcctcctctggagctggttgtttaaacatcacagggaaatttgcacagcctggtgggttctccctacaaagtttccagcttacagacttagtacagacagaaacagctccatgatgttgagcctgttgcttgtcacagaatgggacttagtacactggtgactaygattaaaagggaaagagctttaaaaggaaccctgtaagagggtttgttctgtcctgggcagtgtcgtctctgtgaccccagcgtgggtgttgggaaacatgccattcaaaatgaatagcggtgagctacttagcgggattacaatcaatacacacagggctgt

SEQ ID NO: 280476 - DNA, 612 bp, Homo sapiens
ggttttctttaatttctgtctatgatgttttgtagttaaccttagcttctttggttaaatttattcctaggtattttattcttttgggtggtaatgtaacaattaagaaattgttttcttaatttcatttttggactactcattgctagtagatagaaattcaactgatttttatttattcatcttgtatcctggaactttgctgaaataattagctgtagtagtatttttgtagattctttagagttctctatatgtgagatcatgccttctgcaaayagaggtagttttatttctttctttccaatctggatgccttttttctttttcttgcctaattgccctgactagaacctgtaatacaatgttgaatagaagtagttaaaaatgaacatagcaagtctatcaccagtaggtatatgttaactatggaaagtttccttctattagtttgttgagtatgtttaccatgaaatagtattgggtcttgtgaaatccttcttatgtatctattgataaccacactttgataaaagcttcaaaaattaaagtttttggcactctgaggacgccctgattaaaaacttccagctgattttcaaccaagtacaa

SEQ ID NO: 280477 - DNA, 392 bp, Homo sapiens
tctcattcattcataaagtagaaaataacagcaaaataaattgggtctggttttcctaagctgcttcaccttcagagtactactcatctctagcatctttgatttggagttactgatgtctgtgttcccacagtacaactctctatgccatcaagagtattcaggaggcaacatttcttacaaaaatttctcttgactttctcccaaatctctgacaacttttgtgtaaattgatgtgcacacaggtaataacaaccacagcacaacagctacctggcaacagtaactgaaagacccatccaattttcaatatttcaaaagcaaaagaatacctcttagamccaatgatatgtgggttctgagactcagtcaaaatgactgtcatgatcaac

SEQ ID NO: 280478 - DNA, 593 bp, Homo sapiens
ccatggcttcatccttgaagtcagcgagaccaagaacccactggaaggaaccacctccggacacatgtgagtcaagaagaagggcaatagaacttttgagcaaatagcgatgcacctgaaattttttaaaagttagctttcagaggctaaaagaggcctttgagtctcccagacacaggaagtgtattacagggagactagttctaaccatcaggttcaagagcaaggggttgcacatgtaaggaaggagttgccaggggtcctggtttctgatcctagcttgaatgcactctgcttgtggagtcctgagaggccaggtggcttctctgggctcagtttccctacttgggaataggtatagaccagaggatctctgcaagcttctttccagataggacatgctatggctgcttaatatttttaaacaggacagaactgcatcatctcaaatgctcatggcaagtcaactccactgtatgcattttatcacttcatgatataatttaattttgcttgtgarctcatcgtacatatcaaaccacatgcaaaaaaaaaaaaaagccaagccagagagaacataaaaaaagacaatg

SEQ ID NO: 280479 - DNA, 579 bp, Homo sapiens
atctctgcccatggactgcctttatgtctccctagatgatcagctgcctttccaaacgagctggactgcttcatttaaacaagtcgtgggtccaarctgagtgccttcttcaaagacgtttaagaacgagacacttaaacaggatgcaatatcataaatatgccaatgaaaaagatgcaggcatttttttagagacgcattagctgacatgggtcaattagggccgcctatgggtacccagggagtgctgtcttgttaatggagatccttgctgagtctctttctgaagttcctttccagaagtgaaattaaaatcgcgcaattaaaatgttcacagttggggctggatgttcttgaactgattgaaagatgaagaagtggacacaccaacattttgaaacagcaattgtctctgtaattaaatgcaattaactgacataactgtttgctttactccgtgtaaaactgattgaaatggcaagactttaaagaatatgcccccgtctgttttctctttccatcctgaacaaaattctcaccaacatatgaagaccaacaaaggtaatgatcggcacaccc

SEQ ID NO: 280480 - DNA, 599 bp, Homo sapiens
gccaatgaaaaagatgcaggcatttttttagagacgcattagctgacatgggtcaattagggccgcctatgggtacccagggagtgctgtcttgttaatggagatccttgctgagtctctttctgaagttcctttccagaagtgaaattaaaatcgcgcaattaaaatgttcacagttggggctggatgttcttgaactgattgaaagatgaagaagtggacacaccaacattttgaaacagcaattgtctctgtaattaaatgcaattaactgacataactgtttgctttactccgtgtaaaactgattgaaatggcaagactttaaagaatatgcccccgtctgttttctctttccatcctraacaaaattctcaccaacatatgaagaccaacaaaggtaatgatcggcacacccactctaatattgatgttatgggttaaatatatccaggaaagtggggagaaatacattggaaaaaatagagctctaggctgtccaatgtacatcatttcttctaatccacacacctttgcatttccacaataaaaagattaaatctgacaattattccataactgttctctggggaaggagc

SEQ ID NO: 280481 - DNA, 598 bp, Homo sapiens
tgggcaggtatgttgaatctttttttaaacgtaacattttacatagagcctcttcccgcatgatttgttgactgtctgagcattttatcttgaatcaggaaatctctcccttgagctgtgatttctactttcatggccaaaactttttcaatgctgagaactgaaattgctagcttcccctgtctgcatttggagtgggaacttcatctccaaacacagtggaatcctgtctcctctagccctgcaaccccggcattaaactggtaacaagtgcttccctcggcagccccatgccctcctccagcatccgcctcaaccccgcaggttrtatttgtgccttcagagtagcactacaagtgaagaagacctgccctccttggcttcatgaccagagctgaagggcaggtaaggcgagacagtacacggattctaagaaataccggagaagcttctgggagatgcctgtgcccagagccctatgtttcagtttggatcagaggcaaatgatgtctgaatcagcattgctgggaaaaatcaccgaggtttcctctgagcagtgggattggggggtgtggggggcaggtgaggtagagggagg

SEQ ID NO: 280482 - DNA, 611 bp, Homo sapiens
agaaagatgaaaatattagtacctagagttaaaaactagagaccaaccaggacatggtaatgataaagatgtaggaaagaaggaaagaaaacggaaaagagaccaaacaaaactggtataaagtctacaggcccaaaatgaggcccaggaaagaaatggtatccaggggaatagtctggcacaaactgaygtataagattttacacttaagtaagatctttggcttcaatatcaattttagaaggcccaagcagatagacagttacgtaccgcatagtgatgttgcagtcaacaacgaagcacaaacgtgacgatggtcccataagattattataccattattttcatagcacctgccctatgtttaagacacaaatacctaccgttgcgtcacagctgcctatagtattcagtatagtaacacactcgactggtttgtagtctaggagcaataggccataccatctagcctaggtgagtagcaggctataccacttaggttgtgtaaagtgacatgtgcacagtgactacttcacagaacatatctccatctttaagtgatgcatgattttacttaaaagatgtctttcattatcatgtaaatacattat

SEQ ID NO: 280483 - DNA, 611 bp, Homo sapiens
agaaagatgaaaatattagtacctagagttaaaaactagagaccaaccaggacatggtaatgataaagatgtaggaaagaaggaaagaaaacggaaaagagaccaaacaaaactggtataaagtctacaggcccaaaatgaggcccaggaaagaaatggtatccaggggaatagtctggcacaaactgacgtataagattttacacttaagtaagatctttggcttcaatatcaattttagaaggcccaagcagatagacagttacgtrccgcatagtgatgttgcagtcaacaacgaagcacaaacgtgacgatggtcccataagattattataccattattttcatagcacctgccctatgtttaagacacaaatacctaccgttgcgtcacagctgcctatagtattcagtatagtaacacactcgactggtttgtagtctaggagcaataggccataccatctagcctaggtgagtagcaggctataccacttaggttgtgtaaagtgacatgtgcacagtgactacttcacagaacatatctccatctttaagtgatgcatgattttacttaaaagatgtctttcattatcatgtaaatacattat

SEQ ID NO: 280484 - DNA, 1155 bp, Homo sapiens
actcaggatttgaaatttaggccattttaactctaagcacaatgtgtatccactatgtcatgccaatagggaccagtgctacttaatcttctttcataactctgtggagttggttatttgttttatgacatggatttcaaacctttacatgattaggatttaagcataagaaccacttgagaagacccaaacccaacatggctactgggccctcactcagatgtctgagaactycagaagagcctatcatcacctgagttttaattcctaatcaggcccatgaaccattcgtttctagattttgtctctcatgtggacatattgttagacaacaactgtcttccttaatgtcaacctcaaatggtagaatcaccctccaagttgtagaattcctaagttcttatcgattccaatgagcaggaattctctcatctatgaaaagaggccatgcttctacagtatgaatatctctagtgttcctactccatgaggtagctcatccctttgggcagctctagttatgaactgtttattttttaaatgctgttgtattccctagtaatccatcacatctatgtcatccatgcatttatttcwgaagatctggaaagcagaatattttgttattcctacataacatcttaaaaaaataagttacctatattttaaaatggagatatttcacataaaatgtggattactactgactgtttaaaaacagggagcactgtagcaccggaggaacaccctggaaagtggtgcatgctctcagggcaactgtgagcaggaaccatctagctgccgcctgccttggatgggacatcggccctccagtttgccatgataacaaacacgcttacagctgtttagtttactcattttagctatctgctgtattagttagcttctgctatggcwaatagctccaaaattttaatggcttgcaacagcaaacatttatttcttgctcatatcacgtgaaggctggagctcagctgggactcttcataggcatgtgaccaggatggtcacataggaccctgtgttaaggagagtactgcatttgttttaatgttctgctgtcactgtcttaaaacacttttgaacaagaggccctatgtttttatttttcactgggtctcataaattatgtag

SEQ ID NO: 280485 - DNA, 635 bp, Homo sapiens
tgaccttgtgagattttgaggaaaatccacatgatccataaacatagagcaaggcagaaagccagactaaaaaaaaaaaaaaaattctttctgaaacagtagctgcccttgaggatagtarcaagctcagctgtaggttctagcagctaggcagtaggctctgccctgaatccgcacctggtagatatttggaaaaggtacccccaccccaatcattacctagttaagtaatactctcaatgggaagttggctacaagtccttgcttttctaagacagtcctagtttgtgcctgctgtctgcataattactaagatcacctgcttccctctcagaactacctagatttagacaatgaattacattatcactctactcaggggctacttagtaaaaagatagcacccagaagctaagagaggaaaaatgtggcatggctatgttagctttagatagtggtaaaagagatgtaaaaaattgatttaaaaaacatgtcctctaaaaattaataactaaagctgtgcccttcctcagcattggggtcagaaagtcacatatatgcattgcatttaaaacttgggaaatttaaaaggagaagaaaaatcactcattctttctttcatcaaataaaagcaa

SEQ ID NO: 280486 - DNA, 635 bp, Homo sapiens
tgaccttgtgagattttgaggaaaatccacatgatccataaacatagagcaaggcagaaagccagactaaaaaaaaaaaaaaaattctttctgaaacagtagctgcccttgaggatagtaacaagctcagctgtaggttctagcagctaggcagtaggctctgccctgaatccgcacctggtagatatttggaaaaggtacccccaccccaatcattacctagttaagtaatactctcaatgggaagttggctacaagtccttgcttttctaagacagtcctagtttgtgcctgctgtctgcataattactaagatcacctgcttccctctcagaactacctagatttagacaatgaattacattatcactctactcaggggctacttagtaaaaagatagcacccagaagctaagagaggaaaaatgtggcatggctatgttagctttagataktggtaaaagagatgtaaaaaattgatttaaaaaacatgtcctctaaaaattaataactaaagctgtgcccttcctcagcattggggtcagaaagtcacatatatgcattgcatttaaaacttgggaaatttaaaaggagaagaaaaatcactcattctttctttcatcaaataaaagcaa

SEQ ID NO: 280487 - DNA, 632 bp, Homo sapiens
aaacaagtggacacatcctgtcagctccctaaataacatgctgtaaagactcttgctaagcttttgaaaaaactcaaactttttcttgtctcttatgactttacccttcacaagttactctgaagccatgggttgcatgacacatccaccccttacccacagacctctatgcagtgttttcttctaggtagattattacttaggctccatgtccaccatgcctctcaattttgtttatccttctagtatctagttagacagctgtcttatatttttcttggytccctaaaacttgatttgatgttccttttttaagataagcccatataactcactttctctattgttattctcatgacacattactatacttgcttgttcaccctactaggcagtgacttatctgagcaccataattttttgcactctgcattgtatcaccaaagtctagttctcttcctgacatatagcatcagctcaatttgctgaactagctaattaataagatgggaccctgtctttcttcttccacacaagggattcttgtgattacactgggcctaccctgataatccaggataatctccttagtttaaaccagctaattagcaacttccatctatcattttaat

SEQ ID NO: 280488 - DNA, 465 bp, Homo sapiens
gctcttttattatgcaatttatcaattttacaacatatgtttattgaatgcctactatgtgccacacaacattttatacattcaatatacttcacttgtattaactcatttaattttcatggtacctttgaagtaattattattatacctatttttgagataagaaaactgacaaaggttatattagttgcccaagataatacagaactagaatttatgacaaatacatacttataatcacgtactgcataaaatcataatttctaaataatgctttttttacttgtatatttaaagaaacaaattaatttycaattcaaacatcttggacatcagttttgtggtcatgcctggagccactttttgaatcacctaacataatatcccacgcttcatttctgcctaagctgttctttttgaatctgtgttttattctgacttatatagaatttgaaaatgttacca

SEQ ID NO: 280489 - DNA, 368 bp, Homo sapiens
acttttggttaaatagccagagtttttgtcaatgtgaataagtatatattgtttcctgctgagaaattatgaatgatgacattttcttttatatgaatttcctagggttaataatttacttattttttcttttgttacttctatgtgcacctattgttatccctctcaaacactctgactttgtataatatamtttcagcatagtcaactgcattgggtacttatttatttcattttctgaaagactgaacacctagacccatccatcctcctacttatgtatttaagttggtgctttccaggaatgctgaacattttttgtgctaggacattcttttgctacctttcaaggaaattctttacctcac

SEQ ID NO: 280490 - DNA, 577 bp, Homo sapiens
cttctcaattagatctcctgttttttggataccatgtcttccttctttccaattgctaccacatttcattgaacacatcttccatggcttcccaagatgttatgggtaaactccctgtgcaactttgtgtatatactayacacttgattgacgatttagctaggtataaaaatctagattgaaaatattttgccttcaaattttttaaaatgcttttctaattttatctaacatctagtttattgtttctgttcctgatttctctactccctcccccccttcttggctatgcactataagctctttttatcttattgtgttgaaactttataataatgatgcagggggtgaggttagaactttcaaactagaaacatcttatacaggcctaggaatctttttttctgtattatctctttgtcctttattcttccttttatgtgggatggtgatcattcagaagtggttcgttaattttattctctgattttccaactctttgtcttttattctactttatgtttccttaactttgtcttccagttgtcttctgagttatttacccccccaccaagac

SEQ ID NO: 280491 - DNA, 571 bp, Homo sapiens
taagcatgatgataaagctttatccaaaggtatttattktctgcctacaatgcctcagacattgttcctgacccttcagatacattggtgaaaaaaacagacaagccatgtcccatcgaagcttgctttctattgaagcttgccttctattggagcttgctttctattgatatgacagactataaatataagaaataagcagactacagagtaagttagagattgatatgatgattaattttatgtaccagcttggttgggtcatggggcttagatagttggtcaaatattattctggatattttcgtaagggtgtttttgaatgagataaacatttgaatctatgggttttgagtaaagcacattgctctccataatgtggatgggcctcaaccactaaatgcagaccttaatagagcaaagactgacctacacacagacacacacacacacacgtgtgtgtatgtatgtatatatatacatatatacatatataccattgatatatatcagtgacttattctttttctctggagaaccctaatacaggtcataaacattgtgagagtcc

SEQ ID NO: 280492 - DNA, 571 bp, Homo sapiens
taagcatgatgataaagctttatccaaaggtatttattgtctgcctacaatgcctcagacattgttcctgacccttcagatacattggtgaaaaaaacagacaagccatgtcccatcgaagcttgctttctattkaagcttgccttctattggagcttgctttctattgatatgacagactataaatataagaaataagcagactacagagtaagttagagattgatatgatgattaattttatgtaccagcttggttgggtcatggggcttagatagttggtcaaatattattctggatattttcgtaagggtgtttttgaatgagataaacatttgaatctatgggttttgagtaaagcacattgctctccataatgtggatgggcctcaaccactaaatgcagaccttaatagagcaaagactgacctacacacagacacacacacacacacgtgtgtgtatgtatgtatatatatacatatatacatatataccattgatatatatcagtgacttattctttttctctggagaaccctaatacaggtcataaacattgtgagagtcc

SEQ ID NO: 280493 - DNA, 571 bp, Homo sapiens
taagcatgatgataaagctttatccaaaggtatttattgtctgcctacaatgcctcagacattgttcctgacccttcagatacattggtgaaaaaaacagacaagccatgtcccatcgaagcttgctttctattgaagcttgccttctattggagcttrctttctattgatatgacagactataaatataagaaataagcagactacagagtaagttagagattgatatgatgattaattttatgtaccagcttggttgggtcatggggcttagatagttggtcaaatattattctggatattttcgtaagggtgtttttgaatgagataaacatttgaatctatgggttttgagtaaagcacattgctctccataatgtggatgggcctcaaccactaaatgcagaccttaatagagcaaagactgacctacacacagacacacacacacacacgtgtgtgtatgtatgtatatatatacatatatacatatataccattgatatatatcagtgacttattctttttctctggagaaccctaatacaggtcataaacattgtgagagtcc

SEQ ID NO: 280494 - DNA, 588 bp, Homo sapiens
tagcatggaaaacaattcaacaggtaatcaacaatgttctaagtactctgacagggatagcaggtgccctgaaggcacctaggaagggttgcttagtggaactggaatgagcattgtcacaaaaggctttgccaaggttttacttaaacagagacgtttatgagttagctggtagaaagaaagagcattacccgagaaatcacaaatataatcaacaacgtcatatgcctggagcatagagacaaaggtagacagaggcaagagttgaagctaaaatgatactcagagtttaagtaatgaagktcttctcaggccatgctaatgaattggcattttaccctaatggcaataggaagactttgaagggttttaagtctgagaacaataagatgagacttaccacctccccacagtctcccatcctaaatatattcatttattattcattcaacaaatattatcagcacttcttatatttgatagtactgctataggaagagatacagtgctgaaacagaaaagacctatgttctcatggagcaggagaaacaaacccacacatttagaagataatgtctgatggtggta

SEQ ID NO: 280495 - DNA, 604 bp, Homo sapiens
gacctcccttcgtggtatgaacaaactgtgttgctaatatactcacccattccatcaacattcattggccaccagatgtataggaggacatagccaagaagaaaaagccacagttaccaagatttgagactttgcagctgcttagcttggaacacatgctgatgaactttgcctatctcattacaaagaactcatgaaacggttggagtcagaagatgagttatggcctcctcctgaaataactcaaagataagacagatatctaacaacttcccaaaagtacaaagtgcttgaggtaggagtgtttgaaaatgcaaaaagaatacctgaggtggagtgaataggagggtggagaagttcagaaagatagccaagacccagatttgcaaggcctataatagagattaggactttggatatattctagtgcatagaagataycagagcatttcaagcatagggaaaatgtaatctgaattcttttaaaaggatcactttgcttgttactgctgctccacaatcagccagagggatatgtctgaaatgctgtcttaggtattcacatctcccgcctcacttcaaccagctcttcattcaaatgtca

SEQ ID NO: 280496 - DNA, 543 bp, Homo sapiens
catatgaaaacagataacttagcatgttgtctggaaagctattttaaaagcaattcttaaacactatttgtcatcagcaggaaagactttcaagtttaattggcaatakctatcatttgcttgggagaaaaatatagtgacctgcctcctgtttatatttctcctatgcaaaggtgtttaatttcaccttgcatatgactcatcgacctatgatttgtattttaataatgtgtgcctgtgctttatcttctcgcttagcaggcagctttttaaagccaggaattacatatctgtgccttggtttcttcatcagcaaaacagatttgataataatatcttcttcatattttaatacaagaattatagaagataatacattctaatcactgaggataggacaaggtccacagaatcttcccgaaaatgctagttgcttttgttacaataaaatcagtaatgattataaatacatattcttaacacctagcacgaaatacaaagcctcgcaagcaacagaaatctgaaacagctattaaataaaag

SEQ ID NO: 280497 - DNA, 567 bp, Homo sapiens
aataattcaacagagccctttgagaacctgtgcaaagaggccctgctggctaacagccttcactctgccaactccttgaaccgtggaaccagatccactgaccttcagggataagtaccaaatgtctattttctctttcggtcagaaacaccataggcataacactacatctgccttcactcctgtgttgcagagtaaaagctgtttcacctctcttttcaccaccagtctccagctggttacagccttgggttaattaaatcagagacctcactccccttaagcctttgaggtaccacctgtaattattccagtatttagagatgtcaaatatttgtatttaggatatttaaagtgcattcaatccctgtggataggggatacggttttataataaaaccataggcaactccatttggagaaagaagtcgtgtgtggcactaaaacacayagtaaagaattccttcacgccagtgaagcaatgctcaaaataatgacattcatcttccactctgtgctaagcataatgataggcagcctgtgagcaataaaaagaaatgagacatg

SEQ ID NO: 280498 - DNA, 490 bp, Homo sapiens
aaatgatactgttggggcactcaagcttgtttggggtaggctctaccagaaagtccactttacagcacagaagtgtagatatctacatgggtcaattctacaacctaaagtgtaattcaaggcacctggctggttctcattaaacattggttgcatatgagaatgaatcaaatgtctcagatgaatttttccataaaattaagaaggtcttctttcctccctttactgaaaattacagaraattaaagacctactgtaggcaaagtaaaagctaagactagaaccaggtttctcatgactcctaagtcctagtgtgatttttttttccaccaaaatgttcgcggcatactcagatctggagtgcccacctgccagtccacaccaaactgaaagtacgaagagatggctctctttcctggccatcagcaaatcctcagccaagcctcaggtcttcagtcatcgaacctgatcctaattaatcaccatatga

SEQ ID NO: 280499 - DNA, 490 bp, Homo sapiens
aaatgatactgttggggcactcaagcttgtttggggtaggctctaccagaaagtccactttacagcacagaagtgtagatatctacatgggtcaattctacaacctaaagtgtaattcaaggcacctggctggttctcattaaacattggttgcatatgagaatgaatcaaatgtctcagatgaatttttccataaaattaagaaggtcttctttcctccctttactgaaaattacagagaattaaagacctacygtaggcaaagtaaaagctaagactagaaccaggtttctcatgactcctaagtcctagtgtgatttttttttccaccaaaatgttcgcggcatactcagatctggagtgcccacctgccagtccacaccaaactgaaagtacgaagagatggctctctttcctggccatcagcaaatcctcagccaagcctcaggtcttcagtcatcgaacctgatcctaattaatcaccatatga

SEQ ID NO: 280500 - DNA, 472 bp, Homo sapiens
tggttctcattaaacattggttgcatatgagaatgaatcaaatgtctcagatgaatttttccataaaattaagaaggtcttctttcctccctttactgaaaattacagagaattaaagacctactgtaggcaaagtaaaagctaagactagaaccaggtttctcatgactcctaagtcctagtgtgatttttttttccaccaaaatgttcgcggcatactcagatctggagtgcccacctgccagtccacaccaaactgaaagtacgaagagatggctctctttcctggccatcagcaaatcctcagccaagcctcaggtcttcagtcatygaacctgatcctaattaatcaccatatgacatgcctgctggatgctggacctctctctcaattacccacaattctattgagttctggaaggacacatgagaaggttcatgggtatttgttaataatcagtcctacccagca

SEQ ID NO: 280501 - DNA, 641 bp, Homo sapiens
atttgggccttggatttttgaatgtgaaagacagaaatcctttcttacttgagaaagtgggcaatgagtgacctagtcctatggttctcaaagagatgttcctgaaagaatagcatcagcatcacctgagaacatgctagatgctttcaaaatgaaaattctcaagttactgaatcagaacctctataggcagagctcagaaatctgtgttttacctaactttccaggtgagtctgatgcatgacaaagtgtgataaccactgattcagttaaatcttgttttactgaaggaagtaaaacctagagaataaaatgtaatattgctgaggtacaagaacaggcaagaacaaagttctgacttsatgcagtgtactttcctcctttttaataatactcagaaattctatattaacatgggaactacaaagtttgctgtgtgcctgcttaattatcacttctattttatgaatagcttttatctccattttatagatgagaaatgctcagaggaagtcaggtacaaagtctcatttagtagggggttgagcctggattcaactttattttttcaaactcagggctgcattcatttaactaaagcatctgatccacccaacccatctatacattttcagaaggca

SEQ ID NO: 280502 - DNA, 571 bp, Homo sapiens
ggttaaattgtggcctctcccaaaacatatgtccatgtcctaatccctggaacctatgtatattagtcagttcaggctgctataacaaaatactataaactgggtaacttatagacaatggaaatttacttstcattgttctggaggctgagaagaccaagatcaaggctccagcagatttggcatctggtgaggccctgatttctggttcatatatgatatgttctcattgggtttccacatgatggaaggaagaggctagctctctgggatctctctcataagaacactaatcccacttgtgaagtctataatcaacctaaacacatcctaaaagtccttcctcctaatactacttggggttttgggagtacacaaacatttagtccattacactgtgaaaattacttcatatgataagaataaatgttatcttatatgccaatgatttagttaaggattttgagagaaggatcttatactatatcatctggataaacataaatacaatcacaagcttattatcaaagtgacagagagatttggtggaaaaggaggaggtaatggtgcc

SEQ ID NO: 280503 - DNA, 642 bp, Homo sapiens
attaccactacacctgccttacaagaactactaaaggaagttcttcaagctgaaatgaacagatgcttactagtaacaacaaaacatataaaagtataaaatgtactggtaaaagaaagtatctggtcacattcagaatacactaatactgtaatgatggtatatatgtcattcatatctctggtacaaaggttagaagacaaaactatgaaaataattatagctgcaatcatttgttaagtaatacataatataaaaagagataaatggtaacatcaagaacataaaatgaggggcgcaaataaaactgtagtgaattttatgcaatcaaagttaagttgtcatcascttaaaagagtcttttacaactacaggataattgtgttaccttcatggtaaacacagagcaaaagcttctagcttataaagaaaacaaagaaaaaggaatcaacataccagtatataaacttatcaaatcataagggaagtagcaggagaggaagaaagaataaagaatctacataacaaacaataaaatggctgtagtctgtccttacctatcaacaattaccttgaatgcaaatagattaaattattcaatcaaaaatagaatggaggccaggcacagtggctcacgcctgt

SEQ ID NO: 280504 - DNA, 554 bp, Homo sapiens
ttcaatcaaaaatagaatggaggccaggcacagtggctcacgcctgtaatcccagtgggaggccaaggcaggcaaattgcttgagcttaggagttcaagaccagcctgggcaacatggcaaaacctcatctataaaaagtacaaaaattagccacgtgtggtggcacgtgcctgtagtcccagctacttgggaggctgaggtgggaggatcacttgagcccaggaggttgaggctgcagggagccactgccctctagcctaggcaacaaggtgaaaccccrtctcaaaacaaaacccagagtggctaggtatagaaaaaataagacccaaccatatgctgcctacgaaagactcctttcatctttagggacatatacgtgcttgaatatgaagagatgaataaaatatgttctatggaaacagaaaccaaaaaataacttatatcagacaaaagagactaagtcaaaaactaaaatgacacaaagatggtcattacgtaatgataaagcagtgaattcaccaagagtatataatacatacacacaaacccccca

SEQ ID NO: 280505 - DNA, 554 bp, Homo sapiens
ttcaatcaaaaatagaatggaggccaggcacagtggctcacgcctgtaatcccagtgggaggccaaggcaggcaaattgcttgagcttaggagttcaagaccagcctgggcaacatggcaaaacctcatctataaaaagtacaaaaattagccacgtgtggtggcacgtgcctgtagtcccagctacttgggaggctgaggtgggaggatcacttgagcccaggaggttgaggctgcagggagccactgccctctagcctaggcaacaaggtgaaaccccatctcaaaacaaaacccagagtggctaggtatagaaaaaataagacccaaccatatgctgcctacraaagactcctttcatctttagggacatatacgtgcttgaatatgaagagatgaataaaatatgttctatggaaacagaaaccaaaaaataacttatatcagacaaaagagactaagtcaaaaactaaaatgacacaaagatggtcattacgtaatgataaagcagtgaattcaccaagagtatataatacatacacacaaacccccca

SEQ ID NO: 280506 - DNA, 506 bp, Homo sapiens
gtacttcccaaactcttcaggaaaaaaaaaatggaagaggagggaatactttcaaattcatttcacaatgccagtattaccctgatgttaaagctagacaccacaagaaaagaacattttaggscaatttcgttgataaacacagatgcaaaatcataaatgcaataatgacaaacaaaattaaattgtacattaaaaagattattcactatgatcaagtggaatttttcactggatgcaaaactgattgaacacatggaaatcaataaatgtggcacattacggtagcagaatgaaggacaaatatgatacaattgtctccataaatacagaaaaatcatttgacaagattcaacatcctttgataataaatgctctcaacaaattaaaggtatttaagaaatatatctaaacccagtaaagactatctatgaaaacacaaagctaatattatactcaatggtgaaaagttgaaagctgtcagataaggaaaagacaaagatgtc

SEQ ID NO: 280507 - DNA, 1039 bp, Homo sapiens
gtacttcccaaactcttcaggaaaaaaaaaatggaagaggagggaatactttcaaattcatttcacaatgccagtattaccctgatgttaaagctagacaccacaagaaaagaacattttaggccaatttcsttgataaacacagatgcaaaatcataaatgcaataatgacaaacaaaattaaattgtacattaaaaagattattcactatgatcaagtggaatttttcactggatgcaaaactgattgaacacatggaaatcaataaatgtggcacattacggtagcagaatgaaggacaaatatgatacaattgtctccataaatacagaaaaatcatttgacaagattcaacatcctttgataataaatgctctcaacaaattaaaggtatttaagaaatatatctaaacccagtaaagactatctatgaaaacacaaagctaatattatactcaatggtgaaaagttgaaagctgtcagataaggaaaagacaaagatgtcwtgaacttgagagagataatttagtgcatctggtggaagaaatttctaagcaacaaagcattcaaaaggaagcagagcatagaagttcagaaaatttgcagcttgatggatatgacagacaagagaaacccattttctggggagaaattcaagaaatttacataaataawgaggagccaaatgttaatcaccaagacaatgggttatgcagccttatgacctagtgtcttgtgtcccagcttcttcagctccagccatggctaagagaggtcaaggtacaaccttggtacagtctctagtatttcctcatggctgtatgagaacagactaatatgccagggaatctgcacttctaaacaagttcctcagaaatttgttgtagattgtcaatgtagcatatttttagacttatgaccttagcttctctccagacagttgtctgattggacccagaaaagagagattagtgtccaagtggaagacatcatttatattacatcccccactatcctgtccaactaggaaaaatgacc

SEQ ID NO: 280508 - DNA, 559 bp, Homo sapiens
cacaatacaaaatttaattataaaccattttggcttgtttrccaatcacctcatgtgcatacatctgttcttaccaaatcagtggtaagcaactctagaatacatttagtattgactacttacacagctggatactggggagcgtgtgtgaccctactgaaggtcaccagctaataactgttgcttggtttgaataatttgcacttctgtgtgtataatcaattgcctgtggactgtgatatgaatatgtttgtaatataatgcttaaaagcagaaagatcagaaacaaagagcattgattcctccataaaggaaataaactttggagaaagacagaaaaatgtcacctattctaactaggaaatcactttcaaagtgactcaaagataatacttaagagaaacatgcttctggcctagcattagagcacacctgaatttcccccaataattgtcttatgttcctggaatagacactgttgagttagaccatgtttatactctatgcaatagttattggtgagtttgttcttccagtggtgtctcttgcacaatggcat

SEQ ID NO: 280509 - DNA, 1285 bp, Homo sapiens
tatcatttgtgtgtttgctctatgtatgtgaatatatatacacaatttttctctaaaccacttaaggatatattacttatatcacgaccctttacaggcaaatacttaagtatgtatttcctgcgaatagggatattctcttaaataacagagcagttatcaactttagtaaatatgacactgctgtggaattttcatatagtgtctatatttcatttttgtcagttgagccaatgtccttatarcattttcttccccatttcgtgcaaaatccaatctaaggtaaggtttgtcatttcattgtcatgtctcctttaatttggcacatttatatagcctttgatttttatgacactgactttttgaagaattaaatctgtacccctttcccttttttgatgggatttttctcattttggatttatctcttgtttcttcagaattggttttaaattccccattgtcagttggaaaactacaaagatgcatgccattttcaggatgtacctgggagctacattttagtgtcatcaattttcatcacttaatcaaggtttgattcatttctccactgtataattatgttttcccttagaaccagatactttaagactgttggggctaccctgaataaacaggatgwtatcatttgtgtgtttgctctatgtatgtgaatatatatacacaatttttctctaaaccacttaaggatatattacttatatcacgaccctttacaggcaaatacttaagtatgtatttcctgcgaatagggatattctcttaaataacagagcagttatcaactttagtaaatatgacactgctgtggaattttcatatagtgtctatatttcatttttgtcagttgagccaatgtccttatagcattttcttccccatttcgtgcaaaatccaatctaaggtaaggtttgtcatttcattgtcatgtctcctttaatttggcacatttatatagcctttgatttttatgacactgactttttgaagaattaaatctgtacccctttcccttttttgatgggatttttctcattttggatttatctcttgtttcttcagaattggttttaaattccccattgtcagttggaaaactacawagatgcatgccattttcaggatgtacctgggagctacattttagtgtcatcaattttcatcacttaatcaaggtttgattcatttctccactgtataattatgttttcccttagaaccagatactttaagactgttggggctaccctgaataaacaggatg

SEQ ID NO: 280510 - DNA, 557 bp, Homo sapiens
actgttggggctaccctgaataaacaggatggaatccaaccgaaaagttcatttggatgttgagattcatgatgccacacatcatgaggttaaaaaaaatacattctactgacataattagagactttttcgggggaaagcaggaaagacttcccaaactagtccaaaaatggattgcaaagaagtgagaaaaagagaccgccatgggcattttattatggttagggggcggacagggacttgtttgatttcagactcctgccagtgctaaagggagcaccygggctttcttatcagcttgcccagatatggggcaaaatggggagagagaggggtgaggcttaaaatatatcattagtcaaacaccaagtaataaagacaggctctttagtataaatatcatactatcctgattcctgttataattttcccttttaatgattcttgcatgaatcagtctgtgttacgatggctgcaaaatactgatttttttccccccaaatccctatgcccttcccatttatcagtcagccctctgtattttactacaaacaaaa

SEQ ID NO: 280511 - DNA, 557 bp, Homo sapiens
actgttggggctaccctgaataaacaggatggaatccaaccgaaaagttcatttggatgttgagattcatgatgccacacatcatgaggttaaaaaaaatacattctactgacataattagagactttttcgggggaaagcaggaaagacttcccaaactagtccaaaaatggattgcaaagaagtgagaaaaagagaccgccatgggcattttattatggttagggggcggacagggacttgtttgatttcagactcctgccagtgctaaagggagcacccgggctttcttatcagcttgcccagatatggggcaaaatggggagagagaggggtgaggcttaaaatatatcattagtcaaacaccaagtaataaagacaggctctttagtayaaatatcatactatcctgattcctgttataattttcccttttaatgattcttgcatgaatcagtctgtgttacgatggctgcaaaatactgatttttttccccccaaatccctatgcccttcccatttatcagtcagccctctgtattttactacaaacaaaa

SEQ ID NO: 280512 - DNA, 606 bp, Homo sapiens
tctgtaaaatggggataatagctaccataaaacatttagcactgcacctagtacaatactattatgtaaaatattgctacaaaataagcatatgtgtggatagagcccttaatcttgtaaccaatgcacattaaagggaacataggaaaagagaagaattttatctcttctagagccctctctgagttctgataatagtatctctctttgatgcttttttccattcactccacccaaccacccagctccatagcatgttacagtgaaaagaacactgattaggagtctccagccttagattccagaatagggtagttaaaaggatgggcacagacatcaggatggagttcaagttccaattttatcatctactatctttgtaaccttgagtaaattatcaaaactttccaaaccaagacttatagatgagaataacaagacttttaaatgataatccacataaggarttttgcacagtaacaagaatatagctaaggaattcccaggcactaagtttgaatcccagcaattcacatgtaacttgctttctctgtgccaaatttcctcacgagcatcctgttagtaacaatgaggtgggtaaagttt

SEQ ID NO: 280513 - DNA, 607 bp, Homo sapiens
atgtatatgctgtgacttgaaattatgtaataaagtataaaaccttcttaaattaacaaaatgtttgcctaatagactgaaaatggctgcccaaaagatatccatgtcctattcagggaagctatgaatattacttyatatgtaaaagtatctttgcaaatgtgattaaagattttgagatgaggagagtatcctggattatcggtgggttctaaattcaatcacatgtctttttataggagggaggcatagggagacttcacagacacagagaaggcaatgtaaagatgaaacagatttgaagatgacgactttgaatataggagtgacgtagccacaagccaatgagtgccaacagccaccataagctgaagagtcaagaaatggattctttccaagagcatctagagaaagcatagccctgttgacatctgatatcagcctaataaaattgattttggacttctatcctctagaaccatgagaaaataatttgttattttaaaccaccaagtctggaaatttgttacggcagccacaagaaactaatacagcttgtttatctaactttcttttggactctaacataacttacatttatatcagt

SEQ ID NO: 280514 - DNA, 576 bp, Homo sapiens
agaatttattaaagtctgaatagagccccaaatgcatgatttttagtacctaggccaaagcttctgtatcattcagaacgtttttaactggaaagaacagaaagattacagtgcttcattgaggaggattttctgaattcttatcagtggaaatctagaggttgggaaggctactggggaccttctctcaggcgtctggagggagaagagggggaagaaaaggtggcagagatgacaagggtaaaaagaagagggaaacagaaaaagagggggcagaggagggagaggagaaagggtagaggagaggagaaaaatgcaaaatgagggagattgctaagaatacatgaaggcctgcctggaatgggcatgagacatactagtgtaagtacaagagaaagcgctgtttggaggacagtccctggtaggtgcgaagcccaggaagsagggagtcacactgcttgggaggctctatgacagagggtcagtgagaacttcaggggtttagtggacagaaccacaaaatgctctccctgattctgcatggtaatggcacatttctcttaggatcacccaagc

SEQ ID NO: 280515 - DNA, 561 bp, Homo sapiens
ggagcctgacttctcccccagggtatttttagcttcctattcttagagatgatcacagcattctggtcttctcagtacttccatatgaggaaaaaccagagacaaaaggaaaaatcagagcaaagggcaccaggaaggaactgggtgtcccaagagaaaatctggtgacagcttctccacmgggtaatctttctaggcaaactcagtagtgagctgagtttactaatactaatacaaactctagtagtatataatggttttgagttgtaattgtatagcatatttaaaacatcatctattttcaattagacagtaaatttgttgaagatggaaactctagaggacagtctttcttttggcattcaatgtctaaatctccttatattagggaatcctgtactgtaccaaatcaacctgtgtccctccataggggctaaaaggccagatggtctgcttctcagcctgtctcttggctaggatgtggggatgagacccaggctctgccaaacagaaccatcagcaccaaatgttaaactaaacattagtgatgagaaaaagtgg

SEQ ID NO: 280516 - DNA, 637 bp, Homo sapiens
atactgcaaaacaataataattaaaacagtatgatatctgcatagaaaaatagacacatcatccaatggaatagaatagagggcctagaaaagaaccactgcatctatggtcaagtgatcaacaaacatgccaaaaatataggctaagaaagatagtctcttaaataagtattgggaaaactggatatccacatgcaaaataatgaaagtggacscttgtctcacaccgcatacaaaaatcaacaaaaaatggattaaagacttaaacataagacctgaaactgtaagtctactagaagaaaacataggaaaaacactatacaacattcatctgagcaatgacttttagttttgaccacaaaagcacagacaacaaaaacagacaaataggattacatcaaaatgaaaagcttctgcaaatcaaaggaaataattaacagtgaagaacaacctatggattggaagaacatatttgtaagccatacatctgataattgtgtcagcataaaaaaatacataaggaattcaaacaactctgtataaggaaaaataatctaattaaggaatggccaagagatctgaataaagatctgaatggccaaagagatctgtttctcaaaagaagacacataagtgg

SEQ ID NO: 280517 - DNA, 616 bp, Homo sapiens
atgattcagtatttccacttttaggtatatacccaaaagactaaagagcaaggttctgagcagatatacatccccatttatatcagcctattcacaatagccaaaaggtggaacaccttctgtttcacaatagccaaaaggtggaacaacccaaatgtctattgatggataaataggtatagtatatacatacaatcagatattactcaaccttgtaaagaaatggaattctgtaacatgcagcaagatggatggattttaaaacattatgctaactgaaataagccagacacaaaaggacataagtcgtttgagttcacttatacaatatatctaatgtagtctaattcatagaraagtagaatagtggttaccaggagcttaggagttactttttaatgggtacagggtttcaatttggaatgacaaaaaattatagagattgacaatggtgatgggtgcgtaactatgtaaatatactttactgccactgaatggtactaaaaatagataaaatgatatattttataatatgtatattctaccacaagtaaaaaatctgaaaaagtaatatcttgtgttttcatattttaatgctaaaagttacagataaaat

SEQ ID NO: 280518 - DNA, 624 bp, Homo sapiens
acatttttagtatgatttctagataataaggctggggtgatgaataaagatggtccatgcaattttttttttttttttttgaaacaggatctcgcttctgtccaggctggagttcagtgatgcaattatagctcactgcagccttgacctcccaggctcaagcggtctcccaccttagcctccttgagtagctaggactgcaagtatgcgccaccacccagctaattttgtttgtttgtttgtttttgttttttaraaacaaggcctctctgtgttgcctgccaaggctggtcttgaacacttggtctcaagcgatcctcctgttttggcctcccaaagtactgggattacagatgtgagccagggtgcccagctccatgcttttttaaaggttttaactttccccattccccttcctacccaactttatgtgcttggctgcttttagccttcattattcttccttaaaacccagcacatgaagaggttgacacggacattttgaatcaaagtaaaaatatacctaacaaagcaattttagagtctaattttttttctttggggggcattccacctcttacttaactgtatgtcttattatttgtatatctaggaaataaaagc

SEQ ID NO: 280519 - DNA, 612 bp, Homo sapiens
attattcagatctctggtagattcagcagtgcgatagagcttccaaaactattactcccaagtaataaccttcactgttaaataagaacgatgccgtcacaggtttgtttatagtttaacaagtactttgatgtaagttattcctctaatcctcatgacaattcttttgaagccattaggaatcagcactctcatttaatagtttatgaatctgagttcttagagaaattaagtggcttgttccttgtttcactgcgggtaaaaatgagagtagctcttattttcagcttttctgactcctattccgctgagattttggggatagtatttagtgctttactttttcttgattataaaagtaacattcattgtagaaaataaagaggaaataggaaaatataaacatggaaattaaaagtgcttttattctcaccatccgttttagtgtattttcttgcaggttcatacatacmtgtttgtgtttatgtgcaattcgtgttttcatgtatgtgaattatcaaaaaattgggaccatactgctttgcaactaaatgaaaacagatgtgtgacagcgataatgagagtcacagtgagtggataatgtaacctggg

SEQ ID NO: 280520 - DNA, 593 bp, Homo sapiens
gttgttgccttctaaggaaaggcatggacagtaggctcatctgaggacctgcgcatactctacaggacaacaggacaaggtcactaataattcctgactctgtctcttgtccacccagttgctttgctctttttttctctcaccctcatatttttgtataagccagattttggaattacaacagtgaagacagttcagattctgccctcatggagtttccagcctaccattagatacagaagaatagtgcggttgaaaagagtcaaactctgtaaaatttttacagagcctcattctgagccaaatatgagtgaccaaagcccatgacacgctccaggaaatcctgaacacgtgcccaaggtgcttggaatacagcttgatttttgcacatattagagggacagagctatcggcagatatcaatacatgtaaggtggatgttggtttagtctgggaagatgggacaacttgargcagggtcttccaggtcatagatagattcaaagattttctgattggcaactgattgaaagttattatctgaagacttggaatcaatagaaagaagtgtctgggttaagaccaaggttctt

SEQ ID NO: 280521 - DNA, 575 bp, Homo sapiens
taaaataaaaagcaaatttattaacttttttgtaaaagcttttcaatggtttcactaactatttaaaaacaaaaataaataacctttgagattgctatatcattgagattattttaaaagtctcttgaaagtacttataccttatttggtattataaagaggtttctataaaaagttacttgtattttgtgtcccaaataattcaacaacatatttattcattctgcaaacaaacgatagctgttccctaaagcaatatttattagaaaacttaggaaacctgagcaaaatattgactgaagacaaacacatttataatcaattaaagataaaaaagttaactttttacaagatggactaaagatttaaatgtaagacctcaaactataaaaatytgagaagaaaactgagtaaatacccttctcggtgtgagctttggcaaaaaaaaaaaaaaaaaaaattatggctaagaacccaaaagcaattgaaacaaaaccaaaaattgacaagggagcctaattcaactaaagagcttcagcatagcaaaaagaattatgaacagaataaacaggcag

SEQ ID NO: 280522 - DNA, 579 bp, Homo sapiens
cagtgggccctttgcctctttgcatggggcgactgccctctgccagtgagggcaaagggtcagtgtgacagcctttttgggtacctgcatttggtgggtcccaaattcttgtctcgtgcccaagaagaatgaggtcacacggacaaattgaaggatggtgaatgcagagaatattattgagtgatgaaagtggctgtcagtggagaaaggagctggaaagtggatgggaagggcaaatggctctctcctgaagtcaaatcgtctctctgcctctctctcctccaaaatcaagttgcctctctctgatgcccagccatcacctctgaagtcaggtcacctctccccaacatccagccacttctcccctctaccagatgagtctggggtctttataggcacaggatgggggatggggtgggccataggtagttttggaaaasgcagcattcgattggtaaaaagatattattcggaaagaaccaatcaggagacagtgggcaaaccaggataaaagttctcactttgggccatgggtttcagactttttggtttgaaggtggggttttgccagggacctac

SEQ ID NO: 280523 - DNA, 604 bp, Homo sapiens
aagccactctaatttacatcaacaaatgattggattaaaaaaatggctgacattgttggtataccagtgatggtatrcaaatatatagggatattactttgtaataaaaataaaaatactaatgatacacatgacatgaataaatatgcagaattttaaaaaggcagacacaaaagagtccctatactatgagtccacacatatgaaattgtggaagaggccaaagtgatctattgtgaccaagagcagattggtggttgcctggggctgtgagaggttagaggttaactgaacagggacctgagggaagcttggggtgatgaaaatgtcttatattttgatggtaaaagatatgcaaaataaaagtataaaataaatattttttaatcaagaaaatcacaccatgcccagaagcatgaatgaagttaaataaaaactttatttaacaatatcatgtgctagagagtatttagagtgactgaaactcatgcacattgctgatgaatatagatcggtaatgcactttgaaaaattctttgacagtatttactaaaaatggacatttgtatacctatgacctgtctcagctatatacccaagataa

SEQ ID NO: 280524 - DNA, 604 bp, Homo sapiens
aagccactctaatttacatcaacaaatgattggattaaaaaaatggctgacattgttggtataccagtgatggtatacaaatatatagggatattactttgtaataaaaataaaaatactaatgatacacatgacatgaataaatatgcagaattttaaaaaggcagacacaaaagagtccctatactatgagtccacacatatgaaattgtggaakaggccaaagtgatctattgtgaccaagagcagattggtggttgcctggggctgtgagaggttagaggttaactgaacagggacctgagggaagcttggggtgatgaaaatgtcttatattttgatggtaaaagatatgcaaaataaaagtataaaataaatattttttaatcaagaaaatcacaccatgcccagaagcatgaatgaagttaaataaaaactttatttaacaatatcatgtgctagagagtatttagagtgactgaaactcatgcacattgctgatgaatatagatcggtaatgcactttgaaaaattctttgacagtatttactaaaaatggacatttgtatacctatgacctgtctcagctatatacccaagataa

SEQ ID NO: 280525 - DNA, 596 bp, Homo sapiens
tgatattttccatcacctgaagaggcaagctctacctaaacaaatcattagttccagacctgttggcagtgagttttcttgtcaaagagcccagctttataccccagggctatacgatacctatcttatctatcctaaggccttaaaaatttcctggcctcaggcttcaatattgttatagatcagtacyttattgctaatttacttcttttagtacaagacccttgccaaagagttgagattcattcatcgagactcctttatctagtacggacctgtgttgcatacggtcccagtttctgaaatattaacactgctcatcttcactgaagccagttccactaacacaaaatcaaaatttcttctgctagaactgcatcaagatgttttaaaactcagagttccttcctcagcagatagaaatatttttctgttgaacatcaattaactttaacattacctctgaaactaagaaaagatttaagggattttggagatcttaactgacgacaggtgagtaatataaaccttttatctccctttatcccactgctaaaatggtcagttttataaatggctatattcaatcctaaatt

SEQ ID NO: 280526 - DNA, 545 bp, Homo sapiens
caacgagcaaccctctgtcacttaggcctgtcaggggacatgtcactgtgtcccagagccacctcctgccacgtcagccaaagggacttctccagggtcccagcagaggtcacctgtgcagccagctattgacacaccttgtagagcatccactcagctctcaggaaggggctcagacagaggctccactttgtacattctgaagtatatctggcgcagagcccctgtccttcaccaagggaggtgaggctgtggaaggcaagctcatttgacrttgtgaattagagactcacttggccacaaacactctggatgcagaagcagagtctcttggctgcttcagccccaggtccatctgcttctctgtggcgaggttcccaagtacaaggtcagatgccaacatcccaagggtagaggtgccagcctcaagccagcatgcaccttcagccagctccaggcccttttcccactaactttctctgtgatgaccacagagctgtaagtaggtgtggtgttccttggcacctaatggtacgtttggactt

SEQ ID NO: 280527 - DNA, 537 bp, Homo sapiens
actgtgttccctttgctagcaaaggagaaatcctctttcatcaaggaaattgtattagttcattttcatactgctatgaagaaatacctgagactaggtaatttataaaggaaagaggcttaatggactcaattccacatggctggggaggcctcacaatcatggcagaagctgaaggaggagtaaagtcacgtgttacatggcggcagacaagagagcacgtgygggggaactgctctttagaaccatcagatcttgtgagacttattcactatcatgagaacagcatgggaaaaacccgcccccgtgattcagttacctcccacgatacatgggaattatgagagctaaaattcaggatgagatttgggtggggacgcagccaaaccatacagaaattatcaaaagagtagaaggctgaagccaggatcactgagattctaggtcacaaacctccctacaaaccttgagcaccatgacttgcttgtaagtcctaccccttgggaagcttcgtcccatcagtgggtcttttatttt

SEQ ID NO: 280528 - DNA, 558 bp, Homo sapiens
aattatttttcttaatttcctttcagatgattcattgctattcatttatttttgtgttgatcttaataaagtcattaagtagttctaatagcttgtgtgtctgggttccttagggtttttacataaaattatatcatctgtaatttgagatagttttattttttcctctccaatttgggtgtcttttaatttctttttcttgcctatcttctctggacagaattccagaacaatgctggaaagatggtgaaagtgggcacccttgttttgtccataatcttaggggaaagctgtcagtctttcaccattgagtatgaatgagctttgatttttcatgaatggcctttatcaagttgagagagttcctttctagttcaagtttgtgtttgtttttatttttccttgacagggtgttgaatttcatcaaatatttttcttgtttttgcatctattgagatgatcttttttttctccctccttctcctactaatgtggtaycttacacattgattgagttggatatgttgaaccaccccttgtgtttctgaaatgattccc

SEQ ID NO: 280529 - DNA, 579 bp, Homo sapiens
tggttcttaccagtccctctcatgcagtttctgattttataattttataattttcttagtagccgaatactagggcatgttttcagctaaaatataactattttgaaaatgtattttatacctttggctgcaataaaatttgtgagaaatccaattccaatacagaaggccaattttctaccaaaaaaacccaaaacaaaacaaaacaaaaaaccattcacctcgctaccyagccaattattcaaaaaaaagatgttttccatcaaagcaaaatgaaactaaagacacgatcctcaaatagacaggagagataatacatttggaagtatagagattaaaatggtgggctccccatggcccacttcctagctgtagaatgatggccagtcccttgaattttctcagactcagttgatttctgtgtaaaataggtatcacaatagaaccagccatattagattgtggagaggattaaatgagaaaagccgggtaagtcagttcgctctgtatgtggcatgtggtaaacagtcaatacataactggtagaaataatatcagcaatagcagcagtaagaacct

SEQ ID NO: 280530 - DNA, 579 bp, Homo sapiens
tggttcttaccagtccctctcatgcagtttctgattttataattttataattttcttagtagccgaatactagggcatgttttcagctaaaatataactattttgaaaatgtattttatacctttggctgcaataaaatttgtgagaaatccaattccaatacagaaggccaattttctaccaaaaaaacccaaaacaaaacaaaacaaaaaaccattcacctcgctacctagccaattattcaaaaaaaagatkttttccatcaaagcaaaatgaaactaaagacacgatcctcaaatagacaggagagataatacatttggaagtatagagattaaaatggtgggctccccatggcccacttcctagctgtagaatgatggccagtcccttgaattttctcagactcagttgatttctgtgtaaaataggtatcacaatagaaccagccatattagattgtggagaggattaaatgagaaaagccgggtaagtcagttcgctctgtatgtggcatgtggtaaacagtcaatacataactggtagaaataatatcagcaatagcagcagtaagaacct

SEQ ID NO: 280531 - DNA, 579 bp, Homo sapiens
tggttcttaccagtccctctcatgcagtttctgattttataattttataattttcttagtagccgaatactagggcatgttttcagctaaaatataactattttgaaaatgtattttatacctttggctgcaataaaatttgtgagaaatccaattccaatacagaaggccaattttctaccaaaaaaacccaaaacaaaacaaaacaaaaaaccattcacctcgctacctagccaattattcaaaaaaaagatgttttccatcaaagcaaaatgaaactaaagacacgatcctcaaatagacaggagagataatacatttggaagyatagagattaaaatggtgggctccccatggcccacttcctagctgtagaatgatggccagtcccttgaattttctcagactcagttgatttctgtgtaaaataggtatcacaatagaaccagccatattagattgtggagaggattaaatgagaaaagccgggtaagtcagttcgctctgtatgtggcatgtggtaaacagtcaatacataactggtagaaataatatcagcaatagcagcagtaagaacct

SEQ ID NO: 280532 - DNA, 579 bp, Homo sapiens
tggttcttaccagtccctctcatgcagtttctgattttataattttataattttcttagtagccgaatactagggcatgttttcagctaaaatataactattttgaaaatgtattttatacctttggctgcaataaaatttgtgagaaatccaattccaatacagaaggccaattttctaccaaaaaaacccaaaacaaaacaaaacaaaaaaccattcacctcgctacctagccaattattcaaaaaaaagatgttttccatcaaagcaaaatgaaactaaagacacgatcctcaaatagacaggagagataatacatttggaagtatagagattaaaatggtgggctccccatggcccacttcctagctgtagaatgatggccagtcccttgaattttctcagactcagttgatttctgtgtaaaataggtatcacaatagaaccagccatattagattgtggagaggattaaatgagaaaagccrggtaagtcagttcgctctgtatgtggcatgtggtaaacagtcaatacataactggtagaaataatatcagcaatagcagcagtaagaacct

SEQ ID NO: 280533 - DNA, 500 bp, Homo sapiens
taccttgtctgcagtggaggaaagggtggagcagacaaagaagatgggggcagactcccggtcagaatgccttaggctgcaaatcctaggctccagaatagaattttactattatgtatggtttacgtccagtcatgtcagagtcattgaaatctaaaactaaataaaacaaagaccaaatgttctatgagcccagaggtgaacatggtatatgatatattacttaggaatmtttattaatattaatacgcatttttaggtacattgttttagtgaccttcacatgtggtgatgttagaatgtcacaaagacaactataaatgaaaatatttgcaaatcccatacaaataattgtcttattacagttcaaattatgtactgtacagaacattcagaagaactggagtgctttgcagcagactatagaataggggcttcacatttcatagtaaatacatcagcatacacttcccaaggcatagagccacttccctacgtac

SEQ ID NO: 280534 - DNA, 632 bp, Homo sapiens
atggatacactaattagcctgatttgatatttccacaatatgtacatgcattgaatcatccccaaaatatacacaattgttatttgttgattaaaaatataaaacttatttgaaaggaactgggaaaaaaggagaaacaaaatctgaatggtcttgctattgtttatctagggtaatgagttccatatcttaatttggttgttatacatttgtcaaagctcatgtaattacacatttaagatacatttcactgtatgtaaatcttacttcagttttataaaaatagcatatagtgaaggcaacacacccaacataaagcctsgtgcattgtatcagctctatgaatacaatgcagctcttcctattattaatagtatcaaggcctaggatacaaaacaaaggcttagagacttctccaggcccctgggatactggaaaatttcagcaaatatgtgagacattcagagttttgaaattgtaacagctcaacatttttcagtgagaagattagtttgctggcagatagattagacaagtgaatgaagagcaaactgtctatcgcggagataaataggcttccactggagagagggggtagaaagaccttgtctcttctcgatgattgcatttct

SEQ ID NO: 280535 - DNA, 632 bp, Homo sapiens
atggatacactaattagcctgatttgatatttccacaatatgtacatgcattgaatcatccccaaaatatacacaattgttatttgttgattaaaaatataaaacttatttgaaaggaactgggaaaaaaggagaaacaaaatctgaatggtcttgctattgtttatctagggtaatgagttccatatcttaatttggttgttatacatttgtcaaagctcatgtaattacacatttaagatacatttcactgtatgtaaatcttacttcagttttataaaaatagcatatagtgaaggcaacacacccaacataaagcctcgtgcattgtatcagctctatgaatacaatgcagctcttcctattattaatagtatcaaggcctaggatacaaaacaaaggcttagagacttctccaggcccctgggatactggaaaatttcagcaaatatgtgagacattcagagttttgaaattgtaacagctcaacatttttcagtgagaagattagtttgctggsagatagattagacaagtgaatgaagagcaaactgtctatcgcggagataaataggcttccactggagagagggggtagaaagaccttgtctcttctcgatgattgcatttct

SEQ ID NO: 280536 - DNA, 609 bp, Homo sapiens
aatgctttgtctctcagtccagaatcaaccattattacaagcttagtgtaattgcagttaatccatattcagatattatttttcactggttcacatacacctacctcagatccagaaaacaaagacagctaaaactccagaaggctgctggtgcccsactgaggtaccatcctgtcttcgatcaccatagctgacttttccttgtttgtggatttcatgccagggaagcacagagcagacactctttgtaacattcacccaagctattgcgtgtgctgtaagtgtgtacctattcattattgtgtaggactccctaatatcaacagtatccatttatttattctacttttgatatacatttgggctgcatccatattttgtctattgccaataaaactgcgacaaacatttttgacatatttttagtgcacagaagtatgcatttctgctaagtatatccctgaaagttgaattgtttggtcatagatattcaagtattctgcttcgaaatccccaaagagattttcaaagtattgtaacatctattcacccaccagcagttcatgactgttcaagttgttccacaccctcaccaatattttgtatttt

SEQ ID NO: 280537 - DNA, 609 bp, Homo sapiens
aatgctttgtctctcagtccagaatcaaccattattacaagcttagtgtaattgcagttaatccatattcagatattatttttcactggttcacatacacctacctcagatccagaaaacaaagacagctaaaactccagaaggctgctggtgcccgactgaggtaccatcctgtcttcgatcaccatagctgacttttccttgtttgtggatttcatgccagggaagcacagagcagacactctttgtaacattcacccaagctattgcgtgtgctgtaagtgtgtacctattcattattgtgtaggactccctaatatcaacagtatccatttatttattctacttttgatatacatttgggctgcatccatattttgtctattgccaataaaactgcgacaaacatttttgacatatttttagtgcacagaagtatgcatttctgctaartatatccctgaaagttgaattgtttggtcatagatattcaagtattctgcttcgaaatccccaaagagattttcaaagtattgtaacatctattcacccaccagcagttcatgactgttcaagttgttccacaccctcaccaatattttgtatttt

SEQ ID NO: 280538 - DNA, 502 bp, Homo sapiens
tttccaccaaatagacttttccatttttcagttcacatggcacaaaatggccattaacaatattccccaagtttgtaattcctgtgatcaaactaacagtgggactgtggctggaaactcttagcccaacattgaatgtctggaaattggcctacgttgcattcagtgaccacacactcctccctgggctctgggctcccataacaaaccgccacaaactgggtggcttaaaacaacatgaatttattcgttcacagttctcaaggctggacgtctgaaatctaggtgttggcagggccacactcctaccagaggctctaagggagaacctatttcttgcctcttccagtttccagagactccaggcagtacctggctggggccccggcmccccagtctctgcctccaccttcatgtggccttctcttcttcctgtctcaagtctccctctgtttctattttataagaacatttgtcatcgaatttagggtccacctggata

SEQ ID NO: 280539 - DNA, 568 bp, Homo sapiens
ctttggtcaacagtggatcacatatacaacaatggccctgtaagattataatatcatatttttactatacatttttatatttacatacacaaacacttaccattgtgttacaattgcctacaacattcagtacagtaacattctgcacagagttttrgcacaggtgtaataggctataccatacagcaaaggtgtgtagtaggctatgcaatctaggtttgtgtaagtatattatatgatgtttacacaatggcaagaccacctaatgacacatttctcagcatgtaacctcattatttagtggtacatgactgtattttgttgaggatttgtgccctaatatttataagacatattggtctatagttgtctgttattgttgttgttattttgttttttcttgtaatttctttgtctggctttagtatcaggctaatactagcctcgtataatgaattaggaagtgttttctccgcttcaatattttagaaaggtttgataaagactgatgttagttcttctttaaatgtttgataaaatttaccagtgaagtcagaaaatttgggat

SEQ ID NO: 280540 - DNA, 569 bp, Homo sapiens
actttggtcaacagtggatcacatatacaacaatggccctgtaagattataatatcatatttttactatacatttttatatttacatacacaaacacttaccattgtgttacaattgcctacaacattcagtacagtaacattctgcacagagttttagcacaggtgtaataggctataccatacagcaaaggtgtgtagtaggctatgcaatctaggtttgtgtaagtatattatatgatgtttacacaatggcaagaccacctaatgacacatttctcagcatgtaacctcattatttagtggtacatgackgtattttgttgaggatttgtgccctaatatttataagacatattggtctatagttgtctgttattgttgttgttattttgttttttcttgtaatttctttgtctggctttagtatcaggctaatactagcctcgtataatgaattaggaagtgttttctccgcttcaatattttagaaaggtttgataaagactgatgttagttcttctttaaatgtttgataaaatttaccagtgaagtcagaaaatttgggat

SEQ ID NO: 280541 - DNA, 583 bp, Homo sapiens
taataggctataccatacagcaaaggtgtgtagtaggctatgcaatctaggtttgtgtaagtatattatatgatgtttacacaatggcaagaccacctaatgacacatttctcagcatgtaacctcattatttagtggtacatgactgtattttgttgaggatttgtgccctaatatttataagacatattggtctatagttgtctgttattgttgttgttattttgttttttcttgtaatttctttgtctggctttagtatcaggctaatactagcctcgtataatgaattaggaagtgttttctcckcttcaatattttagaaaggtttgataaagactgatgttagttcttctttaaatgtttgataaaatttaccagtgaagtcagaaaatttgggattactgattcagtctctttactacgtataggtctgttcagattttctatttcttcataatttagtcttggcaagttttgtgtttctaggaatttgtccatttcatgtatgttaccaatttcttggcatacaattttccatataagtactttgttataatcctttttatttctggaaaattgg

SEQ ID NO: 280542 - DNA, 576 bp, Homo sapiens
ccaaactactcatgaggataacttggaacctccattcatcattcagataatcagattcaaccccagccccaccaaaacagaagcgtaggtaagggagtctgaggcctgggggagaaatgtctacttattgtgatcacacagacttgcagtgtatctgggtggggaaaagcttccgggatgagaacatttctrtctacgagcagccttggttattttaatgatgatttttgctttccgctgtgcaaagtcaggctttttagatgaagtttctaagaaagtgagagtacacatcggttttaaaatgttaattaatcactacatttaacatgcattgccagtcagaaccagtaaccactgggatgtgatagttgcttccaggacagaaaataagttggcagacccaactccatttattctatggatttaaaatggctgataagggctacctgcttcgaatggagaaactttaatacaaccggctcattcctccgcctggactatttacagaaggcagattctgagcaatgttttcctcactttcctgaagaattgcttttgccctgagaattatatttc

SEQ ID NO: 280543 - DNA, 571 bp, Homo sapiens
ttaatttttcgtagttctggagcttgaaagctgagatcaaggtatctccagggcaggtgcctctgaagccttgctccttggcttgcagagaccgtctcttccctatgtcatcacatggtcttttctctgtatatgtttctgttctaatctgctcttcttacaagaacaccagtgataattggaatagggcctaacctaatgacctcatttaacccttatcacctccttcaaggtcctttctgcaactacagccacactctgagggactaggggttaggacttcaacatatgaatttgggggaacacagttcagcccatagagtccctccattctgtttcactgatgagctgaagtgaaaagagaatacagtaattcagccgacttatgaatagctgacgggcatcttcggagcaragtattgtgcaggtgtggaggctgggcagtcgtgaggcctagctctgggagcttcctggttagcagacagcagatgcattagatggaaggaaatcaaagcaggaaatctgagtcaagaccacctttaaatacaggttttcattttcatgaagcttt

SEQ ID NO: 280544 - DNA, 571 bp, Homo sapiens
ttaatttttcgtagttctggagcttgaaagctgagatcaaggtatctccagggcaggtgcctctgaagccttgctccttggcttgcagagaccgtctcttccctatgtcatcacatggtcttttctctgtatatgtttctgttctaatctgctcttcttacaagaacaccagtgataattggaatagggcctaacctaatgacctcatttaacccttatcacctccttcaaggtcctttctgcaactacagccacactctgagggactaggggttaggacttcaacatatgaatttgggggaacacagttcagcccatagagtccctccattctgtttcactgatgagctgaagtgaaaagagaatacagtaattcagccgacttatgaatagctgacgggcatcttcggagcagagtattgtgcakgtgtggaggctgggcagtcgtgaggcctagctctgggagcttcctggttagcagacagcagatgcattagatggaaggaaatcaaagcaggaaatctgagtcaagaccacctttaaatacaggttttcattttcatgaagcttt

SEQ ID NO: 280545 - DNA, 619 bp, Homo sapiens
aaatgacagctgaagcatgaaagcaaatactagcagataaatgtgtgtgtaattttagagttaataattatgttgcataattttctttggaagaagagtttataataacatttttaaaaagtgccaagcaaagtaattacacacttggcaagcgataaaactaaacaatttggcaaatccctcattaaccaagttgtcaggtcaatgcaagtttttattttaaagtagtagattaatttttttaaatagagcttactttttaattctatgatttcatcatttttcttataattacaattttacttactratatgatgttttaaaatgagatccttaaaagtcaacacagtaaaagtgagacggacgcctcattcatggacatcaaatggaattgattctacaaagtaaaacaaaacaccacttccgttcctagttccaaagagctagagtcattattttcatctccatggaagcaggccttcaacatttcattataactttttggcagccatttagctaacagctacagaaatcattctgaggcaaggacgtaattttgttgactttgtccatatttttggaaagtcaatcagtcctgcttattagaattatattactg

SEQ ID NO: 280546 - DNA, 584 bp, Homo sapiens
gaagggagtggtctcttttaaaacaacgtttgctattatattttaacttatcactgccttacctatcttttagtcactgcatgtccaatatgaatgacaggctcttcctattataatctcaaaaaaaaaaccccaccaacaggtgacctctgaaaatcgtgtttgaaaacagataagtgcatttaagtataattgattgcacaagtaataacgcctaacgtgattacacagtctggtacttacaaaagtaattacacttcagaaaatcaaaattaatttgtacacttctgatgcacttttaaggctgttgacattttattgtagtgcttmtaatgaaatgaaaattattaataattgttcctacttgagtgtgacaaatgtcatttggctggaaaggcagaagtgccactgagcactgccaaattataatgttgccgaaagttggggtggatattaatattcaaaatggtattaggcatctgcattattttagccaccagcagctgatcggccatatatcctgagatggatgtgtctgggtgtctacataattttctcatcctctttaatggccaggcaattag

SEQ ID NO: 280547 - DNA, 565 bp, Homo sapiens
ggaaagattcatcatctgctgacaagagaacccttgggccctaaataatcagcagtgatacccaggtagtactcactgtgagccttgggtaagactcagagacatgctgggttaaatgtgatccacacgttcccatgctatggttgctgtgagaagaggcttcttctgcctgagaaaaggagagcaaagagtaaagkggactttgtcatgcagcttaggtaccaactcagccacagtagggtagaggactaagcagggacatgggggttcctgattcaaggccttggcttgtaggtgacatttctgaacctactcaaggccaggattgagcccactgccctaaaggaagagactcaggcctggcagcattcatcacaagctgactgaagagtccttgggccttgagtgaacatcagtgtagccaggcagtgtttgccataggcctgggctggtggtggccatagggagagacttctcaacttgtggaaagaggaggaaagagtaggaaagaagttgtattgtggcttatgtgccagctcagccttagtataatacagcaagttag

SEQ ID NO: 280548 - DNA, 509 bp, Homo sapiens
gggccctcgctgatctggcctgaccctggtatctccaccttctgctcctttacccattgccgcggactctctaacccagccctttaggtgtgttcaccctcccatcgtatgatccccgccmctgccccgtgctccctccaggaacgctgctgactgcaggaccctccccaggaagccccctctgatggaccctgcaggcattgctctccctgagtacagcttagagctttgctgtctccctgtccatcctgttgccttggcacccagctgggcctcagggcagctgccctggttctgtccatttgctactctggtagcagtggcctgagttcatcaagctcttactaagttccatctgctaccacattcagtgctcacaacagcacctgcaaatgcccatttcacggatgagatagctgagactcaggggggataagggagagtcagaggcaggcagctgtctcagaagcatcccttgcaaccaccaaacagtgccaccatagcacctt

SEQ ID NO: 280549 - DNA, 509 bp, Homo sapiens
gggccctcgctgatctggcctgaccctggtatctccaccttctgctcctttacccattgccgcggactctctaacccagccctttaggtgtgttcaccctcccatcgtatgatccccgcccctgccccgtgctccctccaggaacgctgctgactgcaggaccctccccaggaagcccyctctgatggaccctgcaggcattgctctccctgagtacagcttagagctttgctgtctccctgtccatcctgttgccttggcacccagctgggcctcagggcagctgccctggttctgtccatttgctactctggtagcagtggcctgagttcatcaagctcttactaagttccatctgctaccacattcagtgctcacaacagcacctgcaaatgcccatttcacggatgagatagctgagactcaggggggataagggagagtcagaggcaggcagctgtctcagaagcatcccttgcaaccaccaaacagtgccaccatagcacctt

SEQ ID NO: 280550 - DNA, 528 bp, Homo sapiens
cttgaaagagctcccgctacatccggcagtccactgatttaacaagtcagaggcacgtccgggagagagcttcttatggtaaccagtgcatccargagccaaaagcgggagtccaaccgtttcaataaaaatagacaccaaggccaggaggcttaaatatggtgcaatgtttgctcgggtgatgggtgcaccaacatctcacaaatcaccgctaaagaactgactcatgtaaccaaacgccacctgtaccccagtaacttatggagaaaaactagacacaaagggcactgggcaagcttccagccatgattgactttcacctggaaggtgagagacctggcacgagatgggccccactgcctcctctggactctcagccacagccccacccccagctgcctctgctggatctcccatgaccggcaggagttcctactccccctgggaaaatcagtctgcctctctgtttattctgacaactcccatttttacagaaaagacaatcatatgaccaaaaaacctcaaatt

SEQ ID NO: 280551 - DNA, 570 bp, Homo sapiens
aataactcaggaatatcctgagtatgcacccaacatcagagcacccagatttataaaacaaatactactagactttaaaaaaagagataagcatacaataatagttgaggacttcaacaccctactgacagcactagacggatcattaaggcagaaaactaataaactgaggacataaattgtactcttgaccaaatggacataatagacacctatggaacattccacctaccaatgcagactatacatatttctcagctgtgcatggaacattctctaaaatagaccatatgcttggtcagaaagcaagtcttaataatgtcaaaacattgaaatcatatcaagcatcgtctcagaccacagtagaataaaattagaaatcaacaccaagaggaactctcaaaaccacacaagtacatggaaattaaacagtttgctcctgaataacgtttgagtaaacaaaaattatggcagaaatcaamattttttaaaaaccaatggaaacagagacacaacataccaaaacctctggaatacagcaaaagtagctaagaggagattacagcacta

SEQ ID NO: 280552 - DNA, 570 bp, Homo sapiens
aataactcaggaatatcctgagtatgcacccaacatcagagcacccagatttataaaacaaatactactagactttaaaaaaagagataagcatacaataatagttgaggacttcaacaccctactgacagcactagacggatcattaaggcagaaaactaataaactgaggacataaattgtactcttgaccaaatggacataatagacacctatggaacattccacctaccaatgcagactatacatatttctcagctgtgcatggaacattctctaaaatagaccatatgcttggtcagaaagcaagtcttaataatgtcaaaacattgaaatcatatcaagcatcgtctcagaccacagtagaataaaattagaaatcaacaccaagaggaactctcaaaaccacacaagtacatggaaattaaacagtttgctcctgaataacgtttgagtaaacaaaaattatggcagaaatcaacattttttaaaaaccaatggaaayagagacacaacataccaaaacctctggaatacagcaaaagtagctaagaggagattacagcacta

SEQ ID NO: 280553 - DNA, 603 bp, Homo sapiens
tcttttcacagtattaaagaaatataaaatttttacaaaaattccgtgactttcacaccttacaatttagtragttagcaaaaacatcagttcaaaatgttgaactaaatgacaactaggagattggtttctgttctcaagttataagtagttcctattttctacctgaagcattagaaaaaagcttacttcaagtgagtaaaaaatactcatattgtgaagcaatttggacttcagaagttttatcaccactggattgagacattggggataagccatacaaatatgttgctaaactaataaaatcttgaagatttagaaatatatagatttctttaattcttatgttttaaagtttatgtttggaactatttaataaaaaagcaacattaggaaaaaatttttttctaatgaaagcagataaagtgggagctggtcagaaatctgttcaattcaggccttttgcaacctcatcaaaagtcaaattattttacaatgaatagttttgaattattatatttcttgcaaggtgattttctctctcttgttaggaagagtgacttccattcttaacaaagtaacgggaaaagaagaggtaagaaa

SEQ ID NO: 280554 - DNA, 666 bp, Homo sapiens
tggcttcatgctgtatggacaaagagaaaattaaccatatattaattataaatacttccctttggatttttttatgaagcttggtttttctttggtgggaagttttttatttattatttcttcctcctcccctcctagcattttggtctcatattctaggctctatattgccagcaatttaaggaagaatggtaaaaagtagtatattatgttgaaagagtacttgaccttgtcccagctaagcctctagttgattgtttaattggggcaaaacctctcacctctgtttcttcacctataaattaaagagactcaatcgtttgttcactcaacaaacttttagtgagtgtcaattgttggcaaagcactgggttatgtgctgttgatataaaaatttgtaaccgagtcactggctcttgagagtcttgtagcattgtatgaggagatatgtcaaagattataatgtagaaaatacasatagataaacagtcatgcatgacttaacaaaggggatacattctgagatatgtgtcattagaagtttcattattgtacaaatatgggagagtataattaaacacaaacctagatggtatggcctactacacaacttggctatatggtataagcctaccgctcctgggctacaagcctgtacagcatgtg

SEQ ID NO: 280555 - DNA, 630 bp, Homo sapiens
attcctacaaatgtttcagtaagtccagttcatacatgaaatgaactggatgaaacagcgaagcattgccagcggatttaaagagtagatcttttcttgtgatrtcataaacagagcagtgatttagagtactctatttaagttttatcttcagcacttagtagggcattgttttataggagatattaaatgctttttttgcaagtccaaatttatcatattattcagctatcttaaatctatgagagatatgatagttatatacttcttaaagattacaatttaatttatactcaatttctgtgaaataatagaaatgtgatactaaaataatcttcagatctggatcattggtagaaagtcaagaccacctctgggcacttctctcttaggttaagcttctcatggcacaaggaatgaagtggcctctgcatcttggccagcatggctgtaggaggtctaattcctgctgacttcttcaatttaatttcacatcatttctccttcacccacttcatgctagtcacagggcccatctttcagtttctcattttcctgaggtctttgcatatagtcttccttccgcaagaaagctctttcccttccaggatttttgtcttcttctcattc

SEQ ID NO: 280556 - DNA, 339 bp, Homo sapiens
ttattacaaaaccgctaattctcccagcaaccagagattgtctaaataaactggagcagacgcagaattatataacargggcaaattatttttttttcctggagagggggtgacataaaaaaaacaggtttattaagatatcattcttaagctacacaagtcatacgcttgaagtgtacaacacagtggtttttagtatagtcacagatatgtgatgtcactatccccacagtcaatttgtagaacattttcatcacctcaataagaaactgtacactttaataatcacccctgctatggtttgaatgtgtctcctccaaaattcaggtattgtcaatg

SEQ ID NO: 280557 - DNA, 541 bp, Homo sapiens
cccaatggaggtgataaacacaacatgagaactttgtgaaacatatacaggtatcaatagctgattcaatcaagcggaagaaaagatatcagagattgaagatcaacttaatgaaataaagcatgaagacaagattagagaaaaaaaaggccaggctcagtggcttacatgagtaatcctagcactttgggaggctgaggtgggcgaatcacaaggtcaggatttcaagaccagcctggccaacatggtgaaaccccatctctactaaaaataaaaacaaaaataaaattagctgggtgtggtggcaggtgcctgtgatcccagctactcgggaggctgaagcaggaaaatcccttgaacccaggaagtggaggttgcagagagctgagatcacgccactgcactccagcccaggtgacagtgcaagactccatctcataaaaaaaaaaaaaaaaaaaagaagaaraagaaaaaggaaaaaagagaaaaggaatgaacaagctgccaagaaatatgggactatgtgaaaagaccaaaccta

SEQ ID NO: 280558 - DNA, 561 bp, Homo sapiens
atttggtgagtagtttgatgttcttgtctatggtagcattctcacagttttctttgcatttgggacagtgaattgtttaataatcagatttttagaatttgttctgacttagcaactctgagctgtttaagggagccacagacagatctattcacaaaaaagcagggcaaacaaatgaaaattaaatgtggggaaaatggcttttaggaaatgaggaggaagaatgaaagaagtagaaagaccaaaagaaaaaaatggaacagtgcacttgaataggataaaagtccacctggaactgcttttgatttttctcagtagcaatagttctaaagattaactactttggatctggcacatcaaatacagctttggaagattcttggctctgcctaggctctctgcatggggtaaggaatggctatctgcttcaccattgcaggtctaatccagcagacccttggccraactaatcagctctgttccatcagtgtgaggacagaaagttgattgagtatgagtattgctgaacttgtactgaggaattatcctgaaaattttagt

SEQ ID NO: 280559 - DNA, 494 bp, Homo sapiens
atttattcttcacagataaatatacagagaagaaaaacatgacctaaaaatgttaatccaaatgataaagggtattttttgttaccaaaattctatttagtatttactattgcaatactaaaacactctccgaaactcaaagatcaatgaaatctgaaattaaccagcatttcaaggagtaatttaaataacaaaataatctaacctatcaaatattttgtcatagacccaacctttacaaagttgagtagaaattttcactttccttgctttgaagaatctgagtccttcaaaattgtatcagatgtttttagttttactgtgtaagctttcctggaaagcttcaagtcaagcatttttaagggagtcttttaaaatgyaagagggatactagaaataaaatcaccaataaattctttatggtatgagcaagtctctatgttacgtgtgttatgggatcaacatttcttgtgtcagattttcataaagtagga

SEQ ID NO: 280560 - DNA, 551 bp, Homo sapiens
caggcccttagcagatatttgttgaatgaattaattactacaaaatgagmgcttgtggaagtaggctgaattgaatgagagaagtaatgacagtaggagaaataatagcacacccttggaaaagaaattggtgaggaaagaaatcacacaacgaaaagtaaaactttaagagattctggatgttaggttttaataagtttggatcatgcacccctttacaaatgttatgacattgtatgacccacattttcaaggtgttccttggatactctgaatctcaatcaagatcctctcagcaagggtcatggatgccagtataataatttctagaaggtgatcactgacagctttaccttctgggggaacacttcattctgaagattagcccccattttacattgccacttttttgacatgtcaaccattatctcaaattcccccctttagatagacaaaaacgagagtacccacctggtgctgaattaaccttgagaaattttaggttaggtaaggctgtgtaggataaaatataaaacaaaaaaattacctta

SEQ ID NO: 280561 - DNA, 551 bp, Homo sapiens
caggcccttagcagatatttgttgaatgaattaattactacaaaatgagagcttgtggaagtaggctgaattgaatgagagaagtaatgacagtaggagaaataatagcacacccttggaaaagaaattggtgaggaaagaaatcacacaacgaaaagtaaaactttaagagattctggatgttaggttttaataagtttggatcatgcacccctttacaaatgttatgacattgtatgacccacattttcaaggtgttccttggatactctgaatctcaatcaagatcctctcagcaagggtcatggatgccagtataataatttctagaaggtgatcactgacagctttaccttctgggggaacacttcattctgaagattagccyccattttacattgccacttttttgacatgtcaaccattatctcaaattcccccctttagatagacaaaaacgagagtacccacctggtgctgaattaaccttgagaaattttaggttaggtaaggctgtgtaggataaaatataaaacaaaaaaattacctta

SEQ ID NO: 280562 - DNA, 431 bp, Homo sapiens
gaagctataacgtttttctttcctgctaacaaaacactatctccagtattgaatatcctaaattaatttttaatctctgccaattggataagtaaaaatttagatcttgttttaatgtgcattttgttgtttactaataaatttttttcatgttggctgatgaaatatattttctcttatatgcatttgactttcaattctgttcattttcaattgagatatttacatttatttatgaaaaatatgaacacrcatttctgagaattaataaaataaaataaaacctagaaacataaaacatcttagctggtctgggagaaccaagtgttataggtatagaataacttatgctttccaattttcaccttttggagcccagacagttcagtattgtgtttgagaaagataattccaaagtaaaacaatcataa

SEQ ID NO: 280563 - DNA, 475 bp, Homo sapiens
ctctttttgctaactatattcaaaataaatgcctcatggtttaatactttgttgaaataaaattcccatggtgactaaaaagttgtaccagaagaacacttcatacaaactaaaattttgtatgaaacaagcttttggtaggaatggatgactaaaagacttacatttgatcttccaaattgccttctgttaatagtgtcaaaatctatatttgttcttcaaaggtagcaacagtaggcaaaacaaaaacaaacaaaaaactatatttgttagtccttttcttggttccttaataggcctgtctcatccagatagcaatagcgatgacgactttcctattattaaactcttgcactgtggcaggcactctgtgaargccttacctcatttatgtgagaacttatgaggtagttccattctacctacaaggaaactgaggcttgtagagattacacaacttgctgcagatggtgaa

SEQ ID NO: 280564 - DNA, 552 bp, Homo sapiens
gaataagttgcttaaaatacataaagcactagaatggtgactggcccatagtaagcaccacatatgtgtagttagcattaacttactaatgtaatattactagactctgtcaacttgtattgcaggttrcagtctgatactagactgattagctcacacctgagtttacttcttttgtagtctctgctgaagcaccaagaagcaactaacataagacaacttcttgaattgtttctacaattttccctgatgctatgaccatagcatgtggtttgctttccaagtgatcctagtaatagtttcatcatatggttttccacagtagaatgagagttgctaggtttttgccttctattacctgcacctgcagcaccaatctttcaggttttgccatggccaacactccgcttttaggcatcaaattccgtattcattagggcttatatttgttcataacagagatccaaaatacctaaagtataagcatgatgaatcttcatttctttttgcatgaaagtctggattgaggtagtttggagacggtgtgatgat

SEQ ID NO: 280565 - DNA, 552 bp, Homo sapiens
gaataagttgcttaaaatacataaagcactagaatggtgactggcccatagtaagcaccacatatgtgtagttagcattaacttactaatgtaatattactagactctgtcaacttgtattgcaggttacagtctgatactagactgattagctcacacctgagtttacttcttttgtagtctctgctgaagcaccaagaagcaactaacataagacaacttcttgaattgtttctacaattttccctgatgctatgaccatagcatgtggtytgctttccaagtgatcctagtaatagtttcatcatatggttttccacagtagaatgagagttgctaggtttttgccttctattacctgcacctgcagcaccaatctttcaggttttgccatggccaacactccgcttttaggcatcaaattccgtattcattagggcttatatttgttcataacagagatccaaaatacctaaagtataagcatgatgaatcttcatttctttttgcatgaaagtctggattgaggtagtttggagacggtgtgatgat

SEQ ID NO: 280566 - DNA, 579 bp, Homo sapiens
ctgaaacgaaagacaggattttctatcatatttgaacatagagagggagtatgaaagactgcatatctttcattaaaaaatatttgtcagtctctcttcatgaagcaaagagggaattaaataagcataaactcgatatttggggttttatacctgacacaaagtttcaaccttagaaaaaattaccagcgagctaaagaagaataagcaatatatacatggtttgtttaattcttcatcaaacaacattgctgtatctgtgcctaagttttattttacttttttggttggttagttttgtttggttttgttttgggtgatgttcagcattttgtgtcctgatgggaattttaatgaatgtaaaacaaaagcactggtaccaagctgagcccagtggatgaatcaggtaggcktgtatattcatagcactgattactgacaattttcttgtgtcactctgtcccaactgttggtcaatcagacatattgccagagaggcatatttttttaaaaaccctggccacctaaaaaatacatacacagacacatgtttcagggctagagattaagcaaatttta

SEQ ID NO: 280567 - DNA, 426 bp, Homo sapiens
tccccatactgaaccttttcttgagactagactgtcttcttctgttcttatactcttatacataattctcttctgtgatacttatcacatttaattgtataattaaatgtgcaattaattatttagtctctgtttcctaaattaccacaygagcccttaagggcaagaacacatctgtttactaccatatccctggcaccagacactaaacattggttgaaacaatctcttttttcttcaggcatattctctgatgacatgtatgcttcttttgtgaaacattcaataaataagagtcaacttgactttacacatgacctttcctgccactatagtcaaatgggcaaaaataggcattaattttcttgcttcacaaatgagaaactgaggcccaaagagtttaactaacctgctcatttttgttcc

SEQ ID NO: 280568 - DNA, 419 bp, Homo sapiens
ttcacctccaaaaattcccccatacccctttcaggtaaaccccctccctccttcattgccaggcaaccactgatctattttctgtctttatagtttttctttttccagagtgccatataaatggaatcatatggtatggagccttatgagtttggtttcacttagcataatgcatttgagattcatccatgttattatgtgtrtcactactatttgtttttattgctgaacagtattgcattgtacgatgatatagtttgagtgtcccctccaaatctcatgttggaatgtaatccccagtattggaggtggggcctggtaggaggtgactggattgtgggggcagatccctcatgaatggcttacaaccattcccttggtgataagtgagttctcatgagatctgtttgtttcataat

SEQ ID NO: 280569 - DNA, 621 bp, Homo sapiens
gatcctatcaatcaactgagaagaatccaggaataaagatgggattatccaggaatgatccgtgaaggaacctttgttctaatattgtctaatgtgtggatcctcgtggcatgtatgggaaagccgcaagggtttgagaatgctatcccaccaaaaacactttcagcttagaatgaaggggacagagacaggatgaaaagaaggagggctgttggatatctggaattctataggcaggaaataggctgacagtcctcctcagtttcaaacgtgggttatccttcaataaaacagaagaataacacagaggcaggactgccattggcgagggaagcttccatgggccyagagggcagaataaaccccttttgccacaagggggtactgcgtggctactgctagtatcttgaactcagagccccaggcctctggggagacagcaacaatcagttggtgctgagatccaaaaagggaatggttaagctagtgtgttagttttttattgctgtataacaaaatgactacaaacatagcagcttaaaacagcacccatttattagcttaaagttctgtaggtcagaatggaagagtctgctcaaaaggctaagattgaagtattga

SEQ ID NO: 280570 - DNA, 411 bp, Homo sapiens
aatatacgtttacatttcaattgatcatagaccatattttaggaaaggctggctattttacctcaatgattgcaagtctgtgactaaaataattaaataaagccagaaatgctgtcagtatgctcagatatttttactttgtagcatttatcctaaggttatcaattctatttcttagtcaactagtcagttgctttcatgttgaattcattgcttctaggtttatctaaaaagaatattaaaaaaaggctatttgaaatagcataaaattcattctttatttcttatataatagtgggagaaattttaatgyagttaaaaataatataaacaaaagttagacaatatctgacaaataagttgctgcatagcatatttttatatccaatatatctcaaaacataaaaacta

SEQ ID NO: 280571 - DNA, 584 bp, Homo sapiens
tcccagtgctggctgctgcccttccctcaaggagttcaaagggcctagacagcacgcagctgcagctgtggtgctggttgacactccccacgtgagctcagtaggcttaagcagattccagctgagagactgttgagaatctgcatggctctggggttgggaagctaggccacaggggcatgggctcacaaatgggattttctgatctgtggtttgcacagttatgtggaaaaagcacagtttccccgacttgatagcctgctcactcaccgcctcccttggtttaggggtgggggcccccctgccccgtgtggttctcagatgggctgcctcaccacactgctcttccttcctctctgtggatcaygccagcctcctaatcagttctgatgagagaacctggataccttgcttgccggtgaagcagtcatacacttattatagttcttttccatgggtgcctctgatcacagctgtttctagttggccatcttggccctgcccccactaaacatttacaattaaaggtctccttgttaagccttctttgatgccaagcttcaattccattgcattgtttgcca

SEQ ID NO: 280572 - DNA, 592 bp, Homo sapiens
gctttttgaccttggacaagctctgcaatttagtttcctctatatttcctctaaagcagaaataatagtagtaactaacacattgtaagaaataatgattaaattaaatactacatttaaaatgcctagcataggacctaccacataataaggtcatagtaaatggtagtagagggagaaaagaagtactatcttgttctcacccatcacaaggttcaggctgagccccctataacaaatggcagattaacaaggaaaagtatacaaatttatttaatgtaaattttaggcaacacaatagccttcactaggaaacaaagacccaaagaaacagggaaacctgggtatttttatgctaaggttaatgaggtcgacagttgtgggaagtatgattggacaaaggaggtatgatctaatggtaataaacyggggactttaacaatgtctttttttcagattcttcttggcacctctgtggcttcaaggataagaatacttcttttcattgggtacagggggcaactctagaatgaaggttttatgacctgcttcagggtgttagtggcagtgaatctgtacggttctgcagcaa

SEQ ID NO: 280573 - DNA, 592 bp, Homo sapiens
gctttttgaccttggacaagctctgcaatttagtttcctctatatttcctctaaagcagaaataatagtagtaactaacacattgtaagaaataatgattaaattaaatactacatttaaaatgcctagcataggacctaccacataataaggtcatagtaaatggtagtagagggagaaaagaagtactatcttgttctcacccatcacaaggttcaggctgagccccctataacaaatggcagattaacaaggaaaagtatacaaatttatttaatgtaaattttaggcaacacaatagccttcactaggaaacaaagacccaaagaaacagggaaacctgggtatttttatgctaaggttaatgaggtcgacagttgtgggaagtatgattggacaaaggaggtatgatctaatggtaataaaccggggactttaacaatgtctktttttcagattcttcttggcacctctgtggcttcaaggataagaatacttcttttcattgggtacagggggcaactctagaatgaaggttttatgacctgcttcagggtgttagtggcagtgaatctgtacggttctgcagcaa

SEQ ID NO: 280574 - DNA, 616 bp, Homo sapiens
agggcaccatttccggacttttctcacggttttttttgtttttttttttaactacgtttttcaaacacagctcaaatcatgtggcgttacgtcatctgggctatgaagaatccaaatggtgatgggtgccgttttcctgttgtccaggattgtagaaaagatgaaatctctagaaaaggaatcccaaacaacaacaacaacaacaacaacaaaggcaaaagaaatttgagtccatttaatgcataacccaagtgttgcagatcctctcagttcatggaaacatcaaycttctgccgaattgtataatatggtattagaatatagtcaaaagtcttgtttaacagtttaagagtacatgagatgatagttatactgatatgcctgaataagctcctatcttacttgaccccactgaaggtagcatgtgaaactctaagtaaaatatttcttaaagcattatttgaatgcatgagaataaaaaaataggcagattctggagggaatttgaaagttgaaagaatggattgcaagaaatgagctgatggtttttataacatgcagcactaaaatgccataaaaatgccaatagaaaatctgtagtttttctgacttgaag

SEQ ID NO: 280575 - DNA, 509 bp, Homo sapiens
tatttgaatgcatgagaataaaaaaataggcagattctggagggaatttgaaagttgaaagaatggattgcaagaaatkagctgatggtttttataacatgcagcactaaaatgccataaaaatgccaatagaaaatctgtagtttttctgacttgaagatttagataaatcaatttatcaaaaggaaaatgatgaggaaatcccagaaagaagagtcgtagagagttggaatttcaaattttgtgtgtaaatcttcccaattatctgaccaataagccatgcatgcatagaacagattcaaaacagtccaggtaaagatttttaaaaatgaactatgatctgagctcccacctacaaaataaaatttgtagtttgattcctaaaaagttacttgcccagtaagacaagaacaaaagtactctgaagaaacacatagtataacagaatccatagtcttcataatatagcatcaaaatacctatgatgcaacccaaaattatttgacata

SEQ ID NO: 280576 - DNA, 316 bp, Homo sapiens
cctatgatgcaacccaaaattatttgacatatgaagatccagaaaaatgtgacaaattccamaatctgagttgtttcatgaggaaagacaatcaagactactatgagataactcaaattttagaattacaaggcaagaagttttaagaatttcttatacttattgaggtaaatgagaaatgcttaaaatgaagaaacctctgtagagaaatataaactatattaaaagtggaaattctagaattgcaaaacacaaaagataaaagaaatattagctcgatgggattaataacataatgaggatgacataggaaata

SEQ ID NO: 280577 - DNA, 316 bp, Homo sapiens
cctatgatgcaacccaaaattatttgacatatgaagatccagaaaaatgtgacaaattccaaaatctgagttgtttcatgaggaaagacaatcaagactactatgagataactcaaattttagaattacaaggcaagaagttttaagaatttcttatacttattgaggtaaatgagaaatgcttaaaatgaagaaacctctgtagagaaatataaactatattaaaagtggaaattctagaattgcaaaacacaaaagataaaagaaatattagctmgatgggattaataacataatgaggatgacataggaaata

SEQ ID NO: 280578 - DNA, 607 bp, Homo sapiens
gaattacaaggcaagaagttttaagaatttcttatacttattgaggtaaatgagaaatgcttaaaatgaagaaacctctgtagagaaatataaactatattaaaagtggaaattctagaattgcaaaacacaaaagataaaagaaatattagctcgatgggattaataacataatgaggatgacataggaaataattcctaaatagaaaaataaattaatagaaaatattcaacctgaagaatgcagagaaaaaaagagagaaaattagaaagctctagtgccctcttggacaataacagaaagtcaaatagaaatgaacacttcaattaaaaggtggagattattagaatagattaaaaagcattaacaaatactgtcartaagagatgcattttaaatataaagacagataggtctagagtaggtacctggcaaaagatatactatgaaaataaacctaagatggatgattggtccaaaataatatcagacaatgtaagctttaagatacataatattaccagaggattactagaacatctaggagaaaacactatagttcaacagagaagtctgggaaacacctaaagcacaggaagagaaaaa

SEQ ID NO: 280579 - DNA, 456 bp, Homo sapiens
acagaatagaaaacccagaaataaatccatatatttacagtcaactgatcttcaacaaatcaagaacatacattagggaaaaactggataacctcatgaagaagaatgaaactggacccctatctctcctcatatataaaaaycaactcaagatggattaaagacttaaatgtaagacctgaaactataaaaacactagaaaaattataaagaaaactcttcaggacattaggcaattattgtacaggtaagacttcaagagcaaaatcaacaagagcaaaaaacatagacaaattggactatattaaactaaaacagcttctgcacagcaaaagtggcaatcaacagagtgaagagtccatctgtcaaatacgagaaaatatttttaagtagctgctctgacaggagattatatccagaatatacaaggaactcaaatatctcaacagaaaaaaa

SEQ ID NO: 280580 - DNA, 456 bp, Homo sapiens
acagaatagaaaacccagaaataaatccatatatttacagtcaactgatcttcaacaaatcaagaacatacattagggaaaaactggataacctcatgaagaagaatgaaactggacccctatctctcctcatatataaaaaccaactcaagatggattaaagacttaaatgtaagacctgaaactataaaaacactagaaaaattataragaaaactcttcaggacattaggcaattattgtacaggtaagacttcaagagcaaaatcaacaagagcaaaaaacatagacaaattggactatattaaactaaaacagcttctgcacagcaaaagtggcaatcaacagagtgaagagtccatctgtcaaatacgagaaaatatttttaagtagctgctctgacaggagattatatccagaatatacaaggaactcaaatatctcaacagaaaaaaa

SEQ ID NO: 280581 - DNA, 581 bp, Homo sapiens
actgtacttcagtctggtgacagagcgagactccatatcaaaaaaaaaaaaaaaaaaaaaaaaatctgctctgattgtaagctttctgaggtcttcaccaaaasctgatgccagtgctgtgcttcatgtatagcctccagaaccatgagccaaatacatctcttttctttataaattacccaatctcaggtattccttttagagcaacacaaatggagtaacaaatagtataaacaatttttacccaacaacatcctgcttttactttcaagcaagctatgaaaacattgatgaatatatacagaatgaatgaattattcatataaattttaggctcatatattaccttgcagatttcccaaaaatttcagaaattggttatttacctttcaatctttgctttaagcaagatgaatcccatttatggatgaagaaacaggttcaagactgttgcatgttttgcataaggctacaaaattaataaatgcttgggatgagaataaaaatggtgtcttttgtactaatgtcttttatctgactgacaaataaaaattatactatctttggtgagagataatata

SEQ ID NO: 280582 - DNA, 581 bp, Homo sapiens
actgtacttcagtctggtgacagagcgagactccatatcaaaaaaaaaaaaaaaaaaaaaaaaatctgctctgattgtaagctttctgaggtcttcaccaaaacctgatgccagtgctgtgcttcatgtatagcctccagaaccatgagccaaatacatctcttttctttataaattacccaatctcaggtattccttttagagcaacacaaatggagtaacaaatagtataaacaatttttacccaacaacatcctgcttttactttcaagcaagctatgaaaacattgatgaatatatacagaatgaatgaattattcatataaattttaggctcatatattaccttgcasatttcccaaaaatttcagaaattggttatttacctttcaatctttgctttaagcaagatgaatcccatttatggatgaagaaacaggttcaagactgttgcatgttttgcataaggctacaaaattaataaatgcttgggatgagaataaaaatggtgtcttttgtactaatgtcttttatctgactgacaaataaaaattatactatctttggtgagagataatata

SEQ ID NO: 280583 - DNA, 433 bp, Homo sapiens
aacatggtagatactcatccaattatattaataatcaatttgaatgtgaatcgtataaatacatcagttaaaaaacagagattttcagagtggataaaaacaagacctaaacatatgtggtctataagaaaccagatttaaatgtaaagatgcagataggttaaaagtaaagaatgaagatctatgtcaaactaactttaaccccacccccscaaaaaaaatggaacagctgtattaattctaaaaagctgatgtcagaacaagcaaaatttttagatataaaaaggagcattacataatgataaattaatcaattatccaagaacacataataattctaaacaaaaatgttaaaaggaaagaataaagttggaggagacatacttcccaatttcaaaacttaatacaaagctaagcaggaaagtggagtacc

SEQ ID NO: 280584 - DNA, 553 bp, Homo sapiens
accacactcttgataccaatatactttattagtccattctcacactgctaataaaaacatacctgagactgggtaattcataaagggaagaggtttaattgactcacagttcagcatggcttgagaggyctcaggaaacttacaatcacggcagaagaggaaacaagcatatctttcacatggtgacaggaaggagaagaatgagagccaagtgaagggggaagccccttataaaaccatcagatcttgtgagaaattactcactgtcatgagaatagcatgggggaaaccacctccatgactcaattacctcccacaggagtctctcccaccacatgtgggaattatgggaaccacaattcaagatgagatttgggtgggaacacagtcaaaccatatcatgcatcttctattgcaagaacaaagcctggtgccaagtaggtctctttgggttctcatgacaacacatctaggaatactcctctggctcacagactgggtgacataaaaagctgccaattttatgcagaaccttgagtacaaaagggctctg

SEQ ID NO: 280585 - DNA, 553 bp, Homo sapiens
accacactcttgataccaatatactttattagtccattctcacactgctaataaaaacatacctgagactgggtaattcataaagggaagaggtttaattgactcacagttcagcatggcttgagaggtctcaggaaacttacaatcacggcagaagaggaaacaagcatatctttcacatggtgacaggaaggagaagaatgagagccaagtgaagggggaagccccttataaaaccatcagatcttgtgagaaattactcactgtcatgakaatagcatgggggaaaccacctccatgactcaattacctcccacaggagtctctcccaccacatgtgggaattatgggaaccacaattcaagatgagatttgggtgggaacacagtcaaaccatatcatgcatcttctattgcaagaacaaagcctggtgccaagtaggtctctttgggttctcatgacaacacatctaggaatactcctctggctcacagactgggtgacataaaaagctgccaattttatgcagaaccttgagtacaaaagggctctg

SEQ ID NO: 280586 - DNA, 572 bp, Homo sapiens
aagtaggtctctttgggttctcatgacaacacatctaggaatactcctctggctcacagactgggtgacataaaaagctgccaattttatgcagaaccttgagtacaaaagggctctgcagcagatccagaatgtaatataatcaatcacacaattaggtcaggtagtctgaaagacctgatggtgctattgtcatcagtggtagaaaagatgcagtgtagaatttatcccaagccatagaggargtatcataatgacctaccaagtcattaaattgaggaaatctagctgcatccattataaagtagaaatggtacaatcaggataaaacatgagcagtaagtagtagagatgatgagttaagttttatgagcagataggcccccatgtgactcacaatagtttcttcagcactcccctgtcatttcacatctatagccatatgcagctatgactcgctgaaaaaggaggaaagaggtcagcttagtacatggttgaaatacagtagtaaccttgaaatacagtagctcaaaaataatctcccagtaggcagaactttacatggtgtacca

SEQ ID NO: 280587 - DNA, 577 bp, Homo sapiens
aggtgtgtgatggcaaatcttatgtgtcaacttgattgggccgtgagtgcccacagagtttgtcaaatgttattctaaatatttctgggagggtgtttggatgagattaacaaattgatagactaagtaaagtagattgccctccataacgtggataggcctcctacaatgagttggaggcctgartagaataaacaaaagaaccagactcttccataaataaggagaattcatcctagatgactgcatttgagctgggatatatgtttttccagcttttggcctcagattgaagcatcacctcttcatgggtcttgaacctgctggccttcagactggaactacatcattgcctctcctgggtgtccagcttgcttgctagaagaagaaattgggacttgtcagcttccataatcatgtaaattgattctttacttatctatttatatctcttgttggctttgtttttttgaggaaccctaatacaagtgacagagcttctgctacctaagcctcatactcacatatgtaatctctcaaatacaaagacagggcaggaaaaaaagaaggcagcagt

SEQ ID NO: 280588 - DNA, 409 bp, Homo sapiens
taccacagggggaaaaggggagcacacaaaaactcttggaagtgatggatgtatatattaccttcttgtggtgatagtttcatgggtatatgcatatatgtccaaatttatcaacttgtatacattaaatatgtgcagttttcctatattgattacacctcaataaagctgttaaaaaaagaaaaaacagaaattaacaaaaacatattttaaaggtcttgctaatataaatagctatcattaatgttttgctaatattattaactattatttcaaagggcagtgtacacttagggtaaagttcatcatgatggtagttgatgtaaatatgtatcttttagtagatcttaaattcaactttttcrgcctatttcttgttagatcctattagactgttagtgtttttaac

SEQ ID NO: 280589 - DNA, 1107 bp, Homo sapiens
tagacaccccaatctttgtgatcaccagaaactgtaggggagaaaaaatatctttttccttctaccctttttggttctctgtcgggactctgtaacaaaagatagattaacgggagaaaaccatacacatttatttttcatagactcaacagccttcataaggaaattgatgacccaaggaaatagttagatgagtatttttatgctaggtttgatgaagtacagaaagttttgcaaaaggtgataagacaaaaacagctatgagctaagagtagtgaaccgagggaaactttacaagacctattcattctgatcctattagcrtttctccatttttggagataaagatgttcatttcctctgtgtatagggagggtgcttctcacataagggtcttatggcctacttcagcgaggtccaaaccctgtcactccttttgaactttacatgagtagtaaaatatttgttgtaagaggttgtataaaacwccacatttttttaatccggtctatcacagacaacttacagtatgggagaaaatttttgcaaactatgtatctgacaaaggtctatccagcatctataaggtacttaagcaaacttacaagaaaaaaaaatccttattaggaagtttttaggcaaatactatgaacagataattctcagaagaagacatacatgcagccaacaagcatgtgaaaaatagctcaacatcactgatcattagagaactgcatatcaaaatcacaatgagawaccatctcataccagtcagaatgactattattaaaataaaaaaataacagatgctggcaagattgtagagacaaaggaatgctcatacactgttggtgggagtgtaaattagttcaaccactgtggaaggcaatttggcgattcctcaaagacctaaagaccaaaataccatttgacccagcaattccattactggatatatacccaaaggaacataaatcattctattttaaagacacatgcatgtgtatgccacttttttaacttcatcactttcaaccttttgtacttcatgaaataattattccctaattgaagaagttctttaatgtaaaagagctatgaattaag

SEQ ID NO: 280590 - DNA, 563 bp, Homo sapiens
atgtttcctttgaacatacattgttatgtcattacattttcacagaaagccatcttttggttttgtgactttaataaaattatttaatattgcctgaagagtccatttcctcatctgtcaaatggggataatagtatctgctttgtgcatctgttgcatgaagtgtcttaatgaatattaattggtatgatcctgccacacagttaagcacaggtatcttagcttccatcatcatgagtcctcaattgtaccaaaaactacctctgcagcctgacaaactttccaatgtcttgcctattatgtatttctacatatgctccatgtgttcacatcttactgtcttagcccatgctgctctgactagagaatgcctttcctgccatctctacgtccatacttgtaaattctcctcactcttataggtatcaattacatgaacatattctgagatttcacatctagtagtatttgctcacctccctcatgccaaagcatcttatatrttgccaccttataacactttgctttatcttaaattctatttttatacacatttgtttgca

SEQ ID NO: 280591 - DNA, 587 bp, Homo sapiens
ctcaggagtacatatgcaggaagtacaggtttgttacataggtaaatgtgtgccatggaggaataaaagtaggaataaaaaagtaggaataaaaccatagtttcacaaaaaaatcctatgaaaaaatataatttgcaaatagaaaaggaatttgcatcttcgaatgctaaaaataaattaggtctctgaatcagtcyacatttaataaatcaaaatgttatcttgtctgaaaaaaaaggaagaaaagaaaaaaagtagtttgaaatgagggtgtttcaattacttcataaagtgcagttactgcacatatgagattttcctcaatttcagaaaaaaaaattaatgattgaacctatgaaaggtaagatttttaaaaacaaagtaggtgagattgtgctttcagaaaactagtgagaccatagagaagttaatgtctagagggagcactctattgaggccacatgcccaataaagaattaagccttggtcacaagttgagagcagaacatgctgaaggagtgagccttcatgactcattgctattcagacaaaccaaataatgagagaggagaaggtaggaattccaa

SEQ ID NO: 280592 - DNA, 576 bp, Homo sapiens
catattttgagttaatgcaaatattctcagaagggataatactttaggttatattaatcatttctacattatgatgaataattttatctgctctatttataaaagcaaaaagtaataattggaagtatataataatggaaaaattataacttattagatagcagattgtattatgaagtaacaatgatcagaagggtgagacaccagtgccaaaatagaaataaaatacaaatagaaatcaacacataaatcatacaactgataagagtttagtgaatgataagtgaagcatttttaaatcagaaaaaaaagtagcgaaaaattttggctaactacaatgtgacaaatttagattcttagcttgtacttctgttgttgctgttaggtagagactgcattttgctatgttgctcaggctggtcttaaactcctgggctcatgcagtcttcctgcttcagcctcccraagtactgggattacaagtgtgagccaacacatctggctgaccttgcaccttaagtcaaattaaattccaaatgaattaatgatttaaatggaaaaagtagaagggtaaaa

SEQ ID NO: 280593 - DNA, 991 bp, Homo sapiens
agagcatagcactgcagattgtcaaatggtgcatggcaggcatcagaaatgtggtgcagatggagaagctgtgaatacatttcaggtactgcagcaattagagcaagcagaaatccacaccggttctccttggatattggaatatactgttagtgttctcaaaaatacagatggtgttttaatacacataatagccttaactctcaccatctggacccaaaagagacttttctgcttggattccctaatcagtgaccatgttttactgcattaggagcaattagaagtgacatttctttatttctgtttttttctcagctgataaccttagcattcccattttytctctgatttttttccctctgcaccctgttacttattgccctctctgctctgagttgattaggacatctgattccaggcaattctactctgtctctcattcatcatacacaagcaaatttatagatgggtagtttgagcagaactcattctwagagcatagcactgcagattgtcaaatggtgcatggcaggcatcagaaatgtggtgcagatggagaagctgtgaatacatttcaggtactgcagcaattagagcaagcagaaatccacaccggttctccttggatattggaatatactgttagtgttctcaaaaatacagatggtgttttaatacacataatagccttaactctcaccatctggacccaaaagagacttttctgcttggattccctaatcagtgaccatgttttactgcattaggagcaattagaagtgacatttctttatttctgtttttttctcagctgataaccttagcattcccattttttctctgatttttttccctcwgcaccctgttacttattgccctctctgctctgagttgattaggacatctgattccaggcaattctactctgtctctcattcatcatacacaagcaaatttatagatgggtagtttgagcagaactcattct

SEQ ID NO: 280594 - DNA, 444 bp, Homo sapiens
ctttatagcacctacacacagaaagaaatctacatcttgaaaaaatacagcaaagctgtcaatttgaacatgcaattgcgtaatcaacgctattaaaaacttattttgggaagcaggactgtacactaagaactttcccttgatgtttttctattagaccattttaacaagtcaattttttccaaagatatctaagtggatatrtatagcatttaatatttctaggcatgtacctagtatatgtgcccaatgattataggaaatttgatgtttagaaaaatgttttatgggaggaagagactgcaactcttagaactgttaaggatgtgatacatttctgacctaaagaaaggcacaatttaatcaggaaaggtaagcacaaatggcaaataacaccacaacaaaacatctactgagcttgtttaaagtcattctgatatttca

SEQ ID NO: 280595 - DNA, 444 bp, Homo sapiens
ctttatagcacctacacacagaaagaaatctacatcttgaaaaaatacagcaaagctgtcaatttgaacatgcaattgcgtaatcaacgctattaaaaacttattttgggaagcaggactgtacactaagaactttcccttgatgtttttctattagaccattttaacaagtcaattttttccaaagatatctaagtggatatatatagcatttaatatttctaggcatgtacctagtatatgtgcccaatgattataggaaatttgatgtttagaaaaatgttttatgggaggaagagactgcaactcttagaactgttaaggatgtgatacatttctgacctaaagaaaggcacaatttaatcaggaaaggtaagcacaaatggcaaataacaccacaacaraacatctactgagcttgtttaaagtcattctgatatttca

SEQ ID NO: 280596 - DNA, 531 bp, Homo sapiens
tttgttcataattctttatcatttaccacagttcttcctgaacatatactatgtgtggggcactgtgctaaattctggggatacgaagagtttaaaatcacgcaatgctggttaagaaaggatgctattcttgaatgtggagttggttagtactgcctgccactctagaatatctcttctcttttaatttttgaaattacttccttaatttggttgggcaggaattaaaatacagagaacaatacctagtttactgactctggttagtaactacatatgctaatagactcaggaaaacagggttatcacctaccataacrgtccttaatcatggctacacgttagaatcatctgcgagatgttgggggaaaagcacaatgcccaagacatgccccagagcaattgcttcagaatcactggggtgtgtgacctagacatcagcgctttttaaagctcctaagatgatttcaatatgcagccaaattgagaagcaccaacctagaaagtgaaggtgcattgagttaccacctt

SEQ ID NO: 280597 - DNA, 615 bp, Homo sapiens
tcctttttttcttctttctttttttgctccctgaaccttgaaagacttctggaaaaactataggcttccaatttgttataagtttaaagagttgcaaagaatataatttctggcttattattgacatttaaaaattgttaaatattttttaagtatatccgtttggaatctaaatactataatgagttgagtctcactattgtcaatttaacaatataaaaacaaattctttattcattgaaaattgtgcaccattcctttctctmtaagtcatatttcattcatttgtctcacagaattttatcaatgtaatatgcttgaaatattttatgcatcatcatatagtctcagaacattaaattttttaaaaaaattttgaatttataatcctctacatttcaaaaattacatctggattgagcttttatcactattattagcacaagattgatcaaaacaaaaaatatgtatttcttatattttttatatattaacaattattaaatataaaagttaaaattattgaaacctcacctaataatgagattgtcagggctttttttgattttttaattcattcctatatcaagtcaaatattatttgtttcaaaacaa

SEQ ID NO: 280598 - DNA, 615 bp, Homo sapiens
tcctttttttcttctttctttttttgctccctgaaccttgaaagacttctggaaaaactataggcttccaatttgttataagtttaaagagttgcaaagaatataatttctggcttattattgacatttaaaaattgttaaatattttttaagtatatccgtttggaatctaaatactataatgagttgagtctcactattgtcaatttaacaatataaaaacaaattctttattcattgaaaattgtgcaccattcctttctctataastcatatttcattcatttgtctcacagaattttatcaatgtaatatgcttgaaatattttatgcatcatcatatagtctcagaacattaaattttttaaaaaaattttgaatttataatcctctacatttcaaaaattacatctggattgagcttttatcactattattagcacaagattgatcaaaacaaaaaatatgtatttcttatattttttatatattaacaattattaaatataaaagttaaaattattgaaacctcacctaataatgagattgtcagggctttttttgattttttaattcattcctatatcaagtcaaatattatttgtttcaaaacaa

SEQ ID NO: 280599 - DNA, 543 bp, Homo sapiens
agattctatttcattttattaaatacttttatttactcattgtcttctgaaattactctgggttctcattaataaggagaaactgattctatcttcaggaaggaggggaaaaaacactttcagtcacttgttccaaaggtctttcaaaataatgttgtagtataatttggtttgaaagcaaggtccaacattttattacctccaaatttattcagaaaagctgaaggcccgtgataaggctcattaagtcgctgaaaggcctrtcttcacgtgcctttcacacaaaaggtctcaacttaatgccaggtaattactgttcattttcccctggttatctctatttcctgaagattcccagagtagttggcctcagtggacactacccgcagtctgagatgtgagcagagcaagaaggacccatgttcactggaggatctttttggagctgtaacgaaagacaatcctaacactggggtctagaatttaaacttagatcatctacaagttaccctctatccagaattaaagccaagagggaaaagt

SEQ ID NO: 280600 - DNA, 571 bp, Homo sapiens
atcttactggggttctctgtatttcctaaatttcaatgttggcctgtctagctaagttggggacattctcatgaatgatatcctgaaatatgttttccaaattggttccattctccccatctctttcagagataccaaagaatcacagatttggtctcttcacataatcccatatttctcagaggttttgttcattctttctcattcttttttctctattatctgactgtcktgtttcagaaagccagtcttcaaactctgaaattgtttcctctgcttggtctattctactattaatacttgtgattgcattatgaaattactatagtgtatttttcagctctatgaggtcaattacattcttttctatattgactattttttctgtcacctactgaattgttttatcatgatttttagcttccttgtattgagtttcaatgtactcctgtagctcaatgattttcattcctatccgtattttgaactctgtttctgttatttcagccatctcaacctggttcagaacccttactggagaagtgatgtgattgtctggagaaaagaaggc

SEQ ID NO: 280601 - DNA, 571 bp, Homo sapiens
atcttactggggttctctgtatttcctaaatttcaatgttggcctgtctagctaagttggggacattctcatgaatgatatcctgaaatatgttttccaaattggttccattctccccatctctttcagagataccaaagaatcacagatttggtctcttcacataatcccatatttctcagaggttttgttcattctttctcattcttttttctctattatctgactgtcttgtttcagaaagccagtcttcaarctctgaaattgtttcctctgcttggtctattctactattaatacttgtgattgcattatgaaattactatagtgtatttttcagctctatgaggtcaattacattcttttctatattgactattttttctgtcacctactgaattgttttatcatgatttttagcttccttgtattgagtttcaatgtactcctgtagctcaatgattttcattcctatccgtattttgaactctgtttctgttatttcagccatctcaacctggttcagaacccttactggagaagtgatgtgattgtctggagaaaagaaggc

SEQ ID NO: 280602 - DNA, 603 bp, Homo sapiens
cagcacagttctctgggcaagcaactttagtgattaaagttagcctaaaagactaaatctatgtgccatcatagagtgcaaagttaggtttaaatgtaaatatatctagcaaaggtatcatactgacttaaaatcacactaagtcctaaatgactggtcttcttccaagtgaacattttattgaaaggtagggaatggctaagaagaaatgctgttaastgtatagaggggaggggcagaaggcatgtatgaagaaaaggacaggttttataatcccacccacatttgtatctgaacatgtgtgtatggcaaacacacctgatagcaataacttaagcataccctaagaataaccctgtatggcagatgcacttgaatgtggttaggtgtcccaagctaagaatccaagaatggccaacccagagagttgttcctaatctataaggaacatctgagcccctggcctgtccaatggaacatggctgtatagggaatcaaggccctttgtttggggttaagtgaaggttgccaggtagagactgtcacagggagagtgctaagtaaatatgccatataaactgcatgttttttgcaagttgcctg

SEQ ID NO: 280603 - DNA, 519 bp, Homo sapiens
aaacatttaaagacatggttttcctattaccaagttttgagtctaacaaggaactagacaaacactctaatgaaaataataatgattataaatacaaacagcaataatacaatagcttaataacagctgtcctttactgagtgcttccaatgtggtaagaattgtgttgagcactttacattattattcgtttaatccctcataagtgccctatgaccaagttactaatatcttcattttacagagaagggaagtaagctatagactaaatgattacctaaggttataaaggtagcagatgaaagatctgagatttaaacactacctgttctctgcacaccaggccaacagataatctgcgatatcaacccctaccagctaygatggaggcatgccaaaaacaagcgatgcagaggggagacccttaaacccttttgaatttgcaaagcacttccccatagagaaaataagcctccagaattcatcagccccaagaggtggtactggtagaaaatataa

SEQ ID NO: 280604 - DNA, 521 bp, Homo sapiens
gcctcccagctcacaagcctgcttcttcatttcaaggcggcctggagagaagcatctgacaaagatctatctcccactgcccagaaaagattaaaagaatatgggccctagcaaatctcctagtacttggaattgagaaatagaaagggaaatgtagctaatttgcagtagccctgcttccttgttcagatttcccgaagcataataaaatagagaggctgtgtctccagggttccacttccagctgtgccccacaacttggaaaaaacaagamgggacatgttacctactcacaccaacctgcctctcctgctgcccctcctgctgccattctttcaattcattctaagggaggttgtcagccctctctgaaatgctttaaaaagaagctatattcctaactggtcaaggagatttaggtgaattcctggctgaaagcagaatgaggaaaaaactgttccctcaaagtgcccaatctttgatgcattatgttctactgtctgctaaaaccatcatcgtag

SEQ ID NO: 280605 - DNA, 1170 bp, Homo sapiens
gcctcccagctcacaagcctgcttcttcatttcaaggcggcctggagagaagcatctgacaaagatctatctcccactgcccagaaaagattaaaagaatatgggccctagcaaatctcctagtacttggaattgagaaatagaaagggaaatgtagctaatttgcagtagccctgcttccttgttcagatttcccgaagcataataaaatagagaggctgtgtctccagggttccacttccagctgtgccccacaacttggaaaaaacaagaagggacatgttacctactcacaccaacctgcctctcctgctgcccctcctgctgccattcttycaattcattctaagggaggttgtcagccctctctgaaatgctttaaaaagaagctatattcctaactggtcaaggagatttaggtgaattcctggctgaaagcagaatgaggaaaaaactgttccctcaaagtgcccaatctttgatgcattatgttctactgtctgctaaaaccatcatcgtagwtggaaggaaacacaaaaagtaagacttttcaagacaacctcattcacactgtttacttgaattatttactcttgttttattattaatttttatgctgttcaattgactacaattcaaaacccagtgtattcataccatgtgctaagatatgctccttcctatatgtgttcctctaaagaaccatctggatcttgtgggggatattttcctttgtggtatcaaagccaggagctcgtggttttcctttattttttaagggaacactatcatgtagcatctgggaccagaaagaaatcttgatgttatatattttacagatattttctttttggattttttttcctctaagagaaaagcttttgttaatgtgtcatgtaaaaatacattaactagtaacttgtcaagaagtgctagattccattcttgtgcgggtccatttatatatgttcctgaacagctaatatttcatttagtttccaattaaacttgctcaaatacatttttgaagtgcattgcttaaaatttacattcaaggcaagaaaacgagtttgtcagtaaatgtwgtaattaaggaagtcccaagtctgtatttttaagatactagaggtaattgtaactaatcactttaacttaaagaaatagaattgg

SEQ ID NO: 280606 - DNA, 604 bp, Homo sapiens
atcccagtaataattgtgtctttcctcattcctatgggggaattactgcttgcagtgatgtatagcttgttggcatatgtctgcatgttactaaaaactttctgagttcacatatactgtataatgtcctggtggaaaaagtgtgaaagtgtgtgtttgtatacatgtgctgtggaaggtgttacatagtctacttgagtagtaacaagttcctatttattacaaatattcctgagaggacctataagaatctttcaaaacctgatgcccactgttttaaaagctctacaccttgggaggctgacgcaggcaaatcacgaggtcaggagttmcagaccagcctggccaacatggtgaaactctgtctctactaaaaatacaaaaaaataactggatatggtggcgggcacctgtaatcccagctactagggaggctgcagcaagattgtcgcttgaacccaggaggcagaggttgcggtgagccaagattgcgccacggcactccagcccgggcaatagtgtgagactctatctaaaaaaaaaaaaaaaagaaaaaagaaaaaaagctctacatcaagctaggctaagccaatcacctatctgt

SEQ ID NO: 280607 - DNA, 631 bp, Homo sapiens
ttttcttcatttttcagccttagttctagacagctgataccgcagctaaatatttatcttacagatcctcatagtgataataactacctaagtaaaatactaatttcctcactggaaacatctactttgagtctcactcaagtgaacgcacttgaatgtgcattcagatcacccaggggattttcctaaaacacagttttaagtatgagatggggccaaagcgtttgcatttctaacaagttccctttgacatccaagctcctcatccagccactacattctgagtagcaaggttttatgtgatcctgyctgacattgctttgtatgccaatttaaaaatgctatagctgcttctgtccaggactaacatgcctgaagggtttaggaaacttgaattgtgacatacatgtgccaggcactgtttagagtgctttttatggattagttcatggcacatggttaaacccacaggcttggagaagagacagaactgggttcaaaggtcagctagggccacttacaagctgtataactaagatacattgccaaacttgtcttgcgttaatgtttctatcaaataatccttatatgacaatatagctgtgagaatgtgttcttgtatgtaaagtgt

SEQ ID NO: 280608 - DNA, 612 bp, Homo sapiens
actccccaccaggaaagcaatgaatagccccaaaaagtttgtcttcatctgggatacctcctggtaaatctcttgctacctcagtgaataatttgaaggagctcgtccaatgattgactttagtgtttttgtgaacacaaaaacagaccactgaagtttccataagatatgaccccttgttagtttcattgcttagacatggggacacctattctttgccatcccatgcacacacaaaaatgtagcatgggagtgcactcatcttatgtgtggcattttgggatgattgggtaatattaatataagggtctattgcatgtctccaaccccacacattcttacatattggtaacagccgttcctttctagggtcaaaggctttgcataaatttaaaggtrggcttaactgttgatcctaggtgggtatttcacattttaaaaagcagagtaggagttggagttgtcctggaagatgtacgaatttgacccaatatgtaacctgagatgttgtggtggtgtgggaattggaggctctggagcccccaaagcggttatagactagaaaaatataaaacataagttaggagactttcagcccagaaggaatacaag

SEQ ID NO: 280609 - DNA, 612 bp, Homo sapiens
actccccaccaggaaagcaatgaatagccccaaaaagtttgtcttcatctgggatacctcctggtaaatctcttgctacctcagtgaataatttgaaggagctcgtccaatgattgactttagtgtttttgtgaacacaaaaacagaccactgaagtttccataagatatgaccccttgttagtttcattgcttagacatggggacacctattctttgccatcccatgcacacacaaaaatgtagcatgggagtgcactcatcttatgtgtggcattttgggatgattgggtaatattaatataagggtctattgcatgtctccaaccccacacattcttacatattggtaacagccgttcctttctagggtcaaaggctttgcataaatttaaaggtaggcttaactgttgatcctaggtgggtatttcacattttaaaaagcagagtaggagttggagttgtcctggaagatgtacgaatttgacccaatatgtaacctgagatgttgtggtgktgtgggaattggaggctctggagcccccaaagcggttatagactagaaaaatataaaacataagttaggagactttcagcccagaaggaatacaag

SEQ ID NO: 280610 - DNA, 605 bp, Homo sapiens
aaataggtatactatagtttttttgaatttttcttgaaacataatttttctgtctccagtctctcatttttaccaaagacaaatcatggtaggaccaatttatttgcaaaattagttttagtcttattatatttggcctgattatttgtctatagtgccacaatttgtatatatagtgccacatttgtatatagtgctcttttttttaaattggctttgctgaaactttgttccataaggaatcttggaccttttttttcccataaggaatctcagtttgtttgtttgtttgtttgtttktttgtttgagacagagtgtcgctttgttatccaggctagagtgcagtgtgcgatcttggctcactgcaacctccgcctcctgggttcaagtgattctcctgcctcagcatcctgggattacaggtgtgaaccaccacacccagctaatttttgtatttttagtagagacagggtttcaccatgttggccaggctagtcttgaactcctgacctcaagtgattcacttgcctcagcctcccaaagtgctgagattacaagcgtgatccaccttgcctggcctcagttagactttttaaaagccatg

SEQ ID NO: 280611 - DNA, 521 bp, Homo sapiens
taaagaaaaaaatcacatcaatactaygtaacttcttccaaaaaacagaagaggagagaacaactcccaattcattatataaaactagtattactctgataccaaaactagacaaagagtataaaacgaagaaaaaagtaaactatataaaatatctgtaacacaaaacctcttaacaaaatattagccaataaaattcagctatatataagaagagttaccgtggccacatggggtttgttactgggactcaggctgattcaatgttcaaaaatccacttatgtaatgatgatgttaacagtctaaaaaaagaaaatcacatgattatactattgattcagtaaaaccatttgagaaaatacaatatgcattcatgataaaaacacttagaaaaaataagaacaaagggtaactttctcaacttgataaaaagcatctattaaaaacttataacttaaattatactcattggtgaaagactaaatgattttcctttaagactgggaacaaggcaaaaacg

SEQ ID NO: 280612 - DNA, 521 bp, Homo sapiens
taaagaaaaaaatcacatcaatactatgtaacttcttccraaaaacagaagaggagagaacaactcccaattcattatataaaactagtattactctgataccaaaactagacaaagagtataaaacgaagaaaaaagtaaactatataaaatatctgtaacacaaaacctcttaacaaaatattagccaataaaattcagctatatataagaagagttaccgtggccacatggggtttgttactgggactcaggctgattcaatgttcaaaaatccacttatgtaatgatgatgttaacagtctaaaaaaagaaaatcacatgattatactattgattcagtaaaaccatttgagaaaatacaatatgcattcatgataaaaacacttagaaaaaataagaacaaagggtaactttctcaacttgataaaaagcatctattaaaaacttataacttaaattatactcattggtgaaagactaaatgattttcctttaagactgggaacaaggcaaaaacg

SEQ ID NO: 280613 - DNA, 521 bp, Homo sapiens
taaagaaaaaaatcacatcaatactatgtaacttcttccaaaaaacagaagaggagagaacaactcccaattcattatataaaactagtattactctgataccaaaactagacaaagagtataaaacgaagaaaaaagtaaactatataaaatatctgtaacacaaaacctcttaacaaaatattagccaataaaattcagctatatataagaagagttaccgtggccacatggggtttgttactgggactcaggctgattcaatgttcaaaaatccacttatgtaatgatgatgttaacagtctaaaaaaagaaaatcacatgattatactattgattcagtaaaaccatttgagaaaatacaatatgcattcatgataaaaacacttagaaaaaataagaacaaagggtaactttctcaacttgataaaaagcatctattaaaaacttayaacttaaattatactcattggtgaaagactaaatgattttcctttaagactgggaacaaggcaaaaacg

SEQ ID NO: 280614 - DNA, 1152 bp, Homo sapiens
tattttcagtattgaagtctaaaacgtgatttttttcagatagcagcagaataatagatgcactctcattattcaaaaatagtaagatttactcattacagaaagcagaggagataagagacacatagtgyaactttgactaatttactgctcaatccaatgttacaaattgcaaaattatgcaatttctgctgtaacttcaaacgtattcttggttatttaagaaaacatagaaatttaattaaattagacccttgatgaaagttcctacccaaatatatttgaatcggaattttagcccccaaatcagaggcaatattaactaacatttataaagtgcttacgtgtgagtctttttctgtagctagagcgatacatacctacatgcctacatgcatatatacatgtttcataataatgtaatgttcaaaacatcatctgttagatactattatcataatgcccattttacaaataagtaaactgaagtctaataggttgcagaaagtcatacaagttattaagtgaaaggtacacattgttaagtgaaagtatacccgwacctactactaaacattatwtgagtaaattcatgtaaagcccttagaaaggccctttgcatgtaggactcaataaaagctatgaaaacagtatgaacaattctgcgtgtgggtgcttatatatttgtaatatatataaaacaactattttttaacaaaagatttcataactgacttttataagtttatgcaaatgcaggaaattatgctttttatttctatgatgagctcattcctgcattttgcctccatagatggaaaaataatttgatctttaaaaataaaatgacgaagctgctggactggctggtctccatttgctcctccagatccattcgcttctgtgctgtgccttgttatgctgtagaaggttgacttctactttatccagccccaagtcttccttgccctcttgtttctgttgggtttgtccaatgggaaacactgctaggagatggtagagtaggaggctaaaaggatcaaagttttttttctgctcattccctccctcccagttcaagcgttggctgtgaatgtattcctccatggaagggatagccccttcaaaaggccaaggctcttactttgttcc

SEQ ID NO: 280615 - DNA, 594 bp, Homo sapiens
ctaggaagaatcatgtgtgtactcacatgatatcaacaacaaaaaagcctgaatggaactgctcaattatgagcaatgtgaatggaaataccgcacaaatatacaaacatatcacagtaaartaaaataaaatgtgcaagaaagaagaagaaattaagaaaaaaatataaatttcaaaagaaggataaatatcccaatatagacgaaaacatacttcaaagcataagaaaattcatcacaatgtcaccttagagaataataagaacttgaattcaagaactccaagctaacatgatgaacaataaaaatcagggcagttatagatttaaaaaaacaaaagaaggctataaacatcatcacagaaataaaaaggtaaagtagaaaatagacttcactaaaaattgacacacatacacacaatagggaatggttttcacctaaaggaaatggtgactggctacttaatggtaaaatttgagatgatttttaaatatttatatcatcttcacttttctaatatttaaatggtttgtggtaaacatgtttaagttttacaagtaaaagactgatttacctaaaaaattaggtggtata

SEQ ID NO: 280616 - DNA, 556 bp, Homo sapiens
acttttctaatatttaaatggtttgtggtaaacatgtttaagttttacaagtaaaagactgatttacctaaaaaattaggtggtatattatagcagacattgttagtgccccacccacatccctccagcccttctgtgggctccagctgactctcaaccccaaggttctcatttctctgctcaggctccctggcaacccgccccactcttggaaatctgctgtaccccactacacactgacaatggtccagaaatgctggaaggttaacacccaccccagcagccttaaatccacctgccttgaacttcaggtgggaagtttctccatgagattaactccagttacccacccccagtttcatgggcccaccaccatgcttatgtcccctgatcatttcaaattatttgcattcaagtccttgtcttggaatatgcttttagaaaaattaatatatacatcatataaaaataatacaatrtagtaatgaaaataataaacactaaaattttgaaagtttgtcaaaacaattttgagcaattaatatgattattttat

SEQ ID NO: 280617 - DNA, 678 bp, Homo sapiens
aaataattcaatgctatttgagattgaccagggttgttgggggaaggatgaataggtacagcacagtgaatttttagagtattgaaaatactctgtgtgatactatggatacacgtcattatacatttgtctaaaccaacagagtgtacaacaccaagagtgaaccctaatgtaaacaatggactttgggtaattatgatgtgccaatgtagatttatcagtgataacaaatgcaccagtttggtgggagatgttaatgatgggagatgctacatatatgtgggggcaagaggcatgtggaaaatctctgtaccttctcaattcagtggtgaacctaaaactgctccaaaaagtaaagtctgaagaaaaggaagatattatgaatacatgcctatttgcttgatatggggtatgtatgtatgtggaagtaggctgtacaccctttttactttttgagttttatactatataaatttattagtaaaactaaaacataccaggaaaggaagaggaaaggaaaaaaaggaaaaaataaataaaaataaattttaaaatgcgacttcaaagatyagctttattaataaactcaatcctccatgctggaataagccacaccatctgatggcacacaatgcatggcgtctgttttctttgtgtttctcttgagtttgtttgaat

SEQ ID NO: 280618 - DNA, 1627 bp, Homo sapiens
tataatgtgcaaaataactactattataatactgtaaatgaaatctcaacctgaaccaaattcactttgttatagttgtttttctttacttttatggcatattcagttatttatgactgatataatgctgaatttacagttgagaacgcacaccttcaattacagcattatgccaatggcaaaatacaattcactctacagtaattctctcaattctagtttctagccttcactcaattgtgttgccagagttaaaagaactgcaaaatcaatcctcagaccaaaatattaaaagagaagaaattctagtctttccatcatctaaatgaaaagtaaacaattatttcaggcacctctatatttgacattgtgttgacaacatattgggatgaaagtataacaygttcagtgttcctttggatgttagggattggatagatgctgtcaacattagctaaagactgtggtagaaggtatgtattttgaaacacagctgccaagacaattacccattttcactttatctaacctaatctgtggctttgcctgtcacacaaccataatcactagagaaagtcawcaactgtggcaaatactaatattttaagaattaactgccttgtctccaagtttacaaccaaacctgttatctcttagatttgaattccactatattccaaaaactcagtggctcacagcaataggcatttgtttcttgttcacacatttgcgatttggtgaagtttggttgatctaggacggctgctattgatgccacactgcaggttgggactacaggtctaccctatgggtctctcattcctcttggactagttacatgagcatgttattttcatggcctaaggcaaaagactgcatcttatttcccgagcacatttwaagcctctgctggcttcatgtcaccaacatttcactggccaaaacaagtgacatacccaaacccatcatcgacaaggcagggaagatattcctctcaaagaggtgaggccattgggcagtgagtgaacatttgctgaataataatttcatctgtaaacaagttttagaactactgcaaactatactgatataatagtctcttcwcaactgtggcaaatactaatattttaagaattaactgccttgtctccaagtttacaaccaaacctgttatctcttagatttgaattccactatattccaaaaactcagtggctcacagcaataggcatttgtttcttgttcacacatttgcgatttggtgaagtttggttgatctaggacggctgctattgatgccacactgcaggttgggactacaggtctaccctatgggtctctcattcctcttggactagttacatgagcatgttattttcatggcctaaggcaaaagactgcatcttatttcccgagcacatttaaagcctctgctggcttcwtgtcaccaacatttcactggccaaaacaagtgacatacccaaacccatcatcgacaaggcagggaagatattcctctcaaagaggtgaggccattgggcagtgagtgaacatttgctgaataataatttcatctgtaaacaagttttagaactactgcaaactatactgatataatagtctcttc

SEQ ID NO: 280619 - DNA, 591 bp, Homo sapiens
taataacatgttgtcacctataggcttaaaagggtgatgagaggaaacaattaatgaaacccagaaggacagttgtgacttttactagagggagtagttggtccaaggagatccctcaataatgaaatgaggggaataaataccctacatctatcttcttcctcccacccatctcctactaaggttcttattcctcaagccaattgggtactcattttaccagttagatatctaggttcagattttcactataataaataaagatgcaaagaacatccttgtatatattatctatttctcagataataatactttttttaggctagcctagaaaaagtattattagatgacaacatataaattcttataaagcatttgacacttttcaggggatctctttatcagtgtttaactgtttggttttgttgcactatagaaatggagtataacctgtatatattatctttttctgtgtggcatacracatgtgttgacctacttctatatttaactgatactgatgcttaccaccaatcttttatactctaactttctcactgttaaattctcaaattttagtcatctttcaat

SEQ ID NO: 280620 - DNA, 616 bp, Homo sapiens
attactattgcatagctattcaatttagtattttgtaataggatttatagtttttgcaattatttttgaatagcaaagatgataagataattgattaagaataaaatttatggccaggcacagtggctcatgcttataatcccagcactttgggaggccgaggtgggtggattacaaggtcaggagttcgagaccagcctggccaacacaatgaaatgccgtctctactaaaaatacaaaaattagctgggcatggtggcaagtgcctgtaatcccagctcctcrggaggctgaggcaggagaattgcttgaaccctggaggcagaggttgcagtgagccgagatcacaccacttcactccagcctgggcgacagagctggactccatctcaaaaaaaaagaaaaaaaagagaataaaatttatttagtagtgtaaagaaaataaaagttagttgactgcaaggaaaatgataagtgggaaataagagacagtaaccaatttactgagtcctattatatgccatttgctggggttggtatagtaggggcatatagtatataacagcatggatttcctgccttcatgttcctcattctggtgggaaagaagacatgc

SEQ ID NO: 280621 - DNA, 579 bp, Homo sapiens
aataatcaggctatgggtcagaaggaggcagtggtagtgtggtcactccaggaagatgaaattgtgcaaaggatgaggtataaggctaaagaagatgtgtttgagggactgtaaattcagtcagtggagtgtactgtacgtttctggagaagtagggggaagtgttggagatgtagctagtcaggcttagcagaatatttggtatgtccttgtcrctatgctaagaagcttggcttttatccctgagtgtccattcaaagataataatctggttactgggaagttaccaaattagatttacatatgaaaaggtgcattttggcagcagcttggaaaatgaactggagagaaaggcagacaagactgatggcagggaggacagttagcattctagataaaagataataaggccatccctagggaatggatcacaaaggggcctgatagctattaagaagattaaattgataggatttggaaagtggcgactgtgaaatgtatctctcagatctcctgcactgtaagtaaattaatcagtggatccagcatctattccactagttccaccacttcgttcat

SEQ ID NO: 280622 - DNA, 508 bp, Homo sapiens
caaactgatggtaggagtctcaaacataagtttctgctggaggataagcaaataattgcctgccaacagcagtgggtagctgggagagtacaatcctcttctgcatactttggaaaattcagacattaagaagaaatggcaaagcttccttgagaggattgcaaagaaagttgtgctttttaggcagagccaggtttcagttaataatgattatgataataataacaatgttttttgacacttactttctaggtactgctccaagttttttttgtttgttcatttatgagatggagtcttgctgtgtcrcccaggctggagtgcagtggtgcgatctcgcgtcactgcaacctccgcctcctgggttcaagcaagtctcctgcctcagcctcacaaacagctgggactacagacatgtgccaccttgctttccattataccttctgcagtttacttaattcatccatataaaaatacttggagcatttttatatttattaacttattt

SEQ ID NO: 280623 - DNA, 570 bp, Homo sapiens
tggctcatttttgactaaggtttaaaacccagactaaaaggaaaccaaggccatctacttaagtctttcccttaggcatacactgtcttctctttaaaaatgtattacaaacttggagcccatgagccaaatatgggttgtgttttaatctgtaaactattttttatttgaattaattctcaaacttaagaaacaggggcttttgcatgtgaaagaaaagaaggatagaaagaaggaaagaagttcaaatayagcaaaaattggctatgttgagtaggagctagggtggccaattttcatctcattttttcctgggagttttccagttttagcactgagagtcctacttcctgaaaaacccctcagttataggcaaaccaggatggttggacatcttaggagcaggtactctttttagattgacacattgtgctttggggttcaccagaattgccaccaagccagcattaattatctggctagcccttgtgggtctctgagttttctagattttggcctatcacttgaggggcttattaacaactaatttagtcctcccactccaaggca

SEQ ID NO: 280624 - DNA, 593 bp, Homo sapiens
aaaaaacgagagacacagatgcaattaattggttttccttcgaaaattttccttcaaaatctgagtctgaagaatcagcttgaagagagaggacccagggactatggtgctgaggctgccatagattgcagctcagtatgttgttgctgttggtgttggtctgactgcacagtgctccaagacctgccacaaaagatgccagccttggcttatgagcctcaaaaagaacagaaaatatgatatgttaatrttccaggaacacccagtcctgggtagtccaagaaattcatggaagctacaaactctgtatcttgactgatcagtgatttcgtcccagtcaattaccatttttaaaacatataaataaatactgcacaatgacctattatatagcaaatatcatatatccagaatcgtttgatgtgaaaatctgggctgttattaaatacattaaatgttacagtatttcaattgaacagaggtcctccagggttaagaaatgtgtgatattttaaagatacctcagaactttctctgaagtataagtgtgagtgctacttattaataataaagtcttatcaattttataagta

SEQ ID NO: 280625 - DNA, 462 bp, Homo sapiens
cacactgtacagggttgtagcccaggagcaatgggctataccatatatcctaggtgtgtagtaggctgtgccatctaggtttgtgtaagtacactctataatgttcacacaagatgaaatcacctagtgattcatttcttataatttttctctgttattaagtgacacatgactgtatttaataaatggagagggtaaagtgtttaaatgagagtaaacttttgrtgcttcactagaagtggtaaaattttgataccagtacatcatgataagctatgtatgtatactgtaatatgttcatgaaccactgagaaaactctacaagtgatattctgaaaaacataaataaaacaagaaagaattctaaaacttttaaaaataatccatggtaagacaagaagagagaaacaaaggaacacaaaccagaggaaacagaaaacaaataataaaatgccagattta

SEQ ID NO: 280626 - DNA, 603 bp, Homo sapiens
tatttaatgaagactaatatttagctagcttcttattatgaacattttagttctttccagtttttgtttttgttgtttttataaccatcacactatcctgaacatcattatgactatatcttgaatcagagacaagatgatttctttggttaaattcctagatataaaagttcttctctttctttttttttttaattttttaatkttttttattatactttaagttttagggtacatgtgcacattgtgcaggttagttacatatgtatacatgtgccatgctggtgcgctgcacccactaactcgtcatctagcattaggtatatctttcttatttcaacaaatgctctgaaacgccatagccaaaaccttattttttatatctattgtccttgagattaataattaacttttataagaaaagtaataagttttcattctgccttagagtataggtaccaaataactgaatatgtgttttggatataacctaaggttcagataaaaataaataatatgaccattttcaaaggtatgaaaccagctagttttcacaacacatgatcaacctgttgtctacagtggcttctggggatttttaag

SEQ ID NO: 280627 - DNA, 648 bp, Homo sapiens
tggaaggaaacacaaaaagtaagacttttcaagacaacctcattcacactstttacttgaattatttactcttgttttattattaatttttatgctgttcaattgactacaattcaaaacccagtgtattcataccatgtgctaagatatgctccttcctatatgtgttcctctaaagaaccatctggatcttgtgggggatattttcctttgtggtatcaaagccaggagctcgtggttttcctttattttttaagggaacactatcatgtagcatctgggaccagaaagaaatcttgatgttatatattttacagatattttctttttggattttttttcctctaagagaaaagcttttgttaatgtgtcatgtaaaaatacattaactagtaacttgtcaagaagtgctagattccattcttgtgcgggtccatttatatatgttcctgaacagctaatatttcatttagtttccaattaaacttgctcaaatacatttttgaagtgcattgcttaaaatttacattcaaggcaagaaaacgagtttgtcagtaaatgtagtaattaaggaagtcccaagtctgtatttttaagatactagaggtaattgtaactaatcactttaacttaaagaaatagaattgg

SEQ ID NO: 280628 - DNA, 471 bp, Homo sapiens
gcatgaggccagtgagaaaggcctatgggctgcaacccagccccagagggccagagcccactcgagagtcccaggggaggatggggcccgagtgtggagtggtgcccctgagcagatggctctcgggtgagggcacctccctctgcttcctgggaagcttctcttgctacaacagccctctgcctctaagttctggaaaggccactgctgccttgccttgtcccctggcactgtccagtctrtccaccacagctgagctcagctcctcaagcaggacctgtagctgcatgtgtaactgcattcagggcagcagacggcaggagcatggggggctgcccttctacagacggaactcggtgagcagggcccgtctaggaaagtgcgttggaacctgggagatttctgcaacagacagcagtggcctacagcttccagtggtgccgacctcaactccccaggcagttcctccct

SEQ ID NO: 280629 - DNA, 604 bp, Homo sapiens
atggcatctggcatgggtaggcactcaataaatatttgtgaattaatgaatgataaacgtcatcaccttgcctcctccaatccccatgaaagactgatttgaacagatttctacaggagtctctgccttcacctcccattcccctgctcagccactcaacacccatttggggagcacccattctgtgcccagccctggggtgggcatacaaatcacaratgaatggattaacaatactattcagaaataaaaaagacccaactaccaacacacacagccacaggggcaaatctcaaaagcaataggccaagtaaaagatgccagacacaaagactgcaggctggatgagtccacttatgcgacattctagaaaaggcaaaactataggaacagaaaacagatcagggctcccaaggtgcatgtcaaagaggaagagtcaggtggcagctgagttgcattgttcttgtctttagagacaggcaaggtctcactctgttgcccaggctggagtgcagtggtgcaagcacagctcactgtagcctcaacctcccaggctcaagtgatcctcacacctcaacctctcaagtatttgggactacagcca

SEQ ID NO: 280630 - DNA, 604 bp, Homo sapiens
atggcatctggcatgggtaggcactcaataaatatttgtgaattaatgaatgataaacgtcatcaccttgcctcctccaatccccatgaaagactgatttgaacagatttctacaggagtctctgccttcacctcccattcccctgctcagccactcaacacccatttggggagcacccattctgtgcccagccctggggtgggcatacaaatcacaaatgaatggattaacaatactattcagaaataaaaaagacccaaytaccaacacacacagccacaggggcaaatctcaaaagcaataggccaagtaaaagatgccagacacaaagactgcaggctggatgagtccacttatgcgacattctagaaaaggcaaaactataggaacagaaaacagatcagggctcccaaggtgcatgtcaaagaggaagagtcaggtggcagctgagttgcattgttcttgtctttagagacaggcaaggtctcactctgttgcccaggctggagtgcagtggtgcaagcacagctcactgtagcctcaacctcccaggctcaagtgatcctcacacctcaacctctcaagtatttgggactacagcca

SEQ ID NO: 280631 - DNA, 604 bp, Homo sapiens
atggcatctggcatgggtaggcactcaataaatatttgtgaattaatgaatgataaacgtcatcaccttgcctcctccaatccccatgaaagactgatttgaacagatttctacaggagtctctgccttcacctcccattcccctgctcagccactcaacacccatttggggagcacccattctgtgcccagccctggggtgggcatacaaatcacaaatgaatggattaacaatactattcagaaataaaaaagacccaactaccaacacacacagccacaggggcaaatctcaaaagcaataggccaagtaaaagatgccagacasaaagactgcaggctggatgagtccacttatgcgacattctagaaaaggcaaaactataggaacagaaaacagatcagggctcccaaggtgcatgtcaaagaggaagagtcaggtggcagctgagttgcattgttcttgtctttagagacaggcaaggtctcactctgttgcccaggctggagtgcagtggtgcaagcacagctcactgtagcctcaacctcccaggctcaagtgatcctcacacctcaacctctcaagtatttgggactacagcca

SEQ ID NO: 280632 - DNA, 571 bp, Homo sapiens
ggcatcagcatgttttagggtccccagatgattccaatatgatgcaaacttttcggccactgggctataggacaagttagtgactgtgggcagccagccaagatttgacctcgttcagagtgcgttcttatccctcgccccatctggtcctcatctgtcagctcaggggccacattattacacccactgtacagatgaggaaagtgaaacctaggatgttgccatgtctcctaagacaatcagagatggagctgcaactgttggggaagagagcccaatccctggaccctcaaagttgggctcttcctacactgacacagccacagtaggcccttggagatcatcacaaagagaccaggaccctaacttcccagcctttcctgggagraggctctgatggtggtggggagagcagagaaggagggtgcgtgaggaagacagggaataggggctgcaggctggatataggccagcatgctgggccaattcgcgcctggtcctccgtaggctctggctccaacccagcaacctcttcccctccgacttcatcctgtggtgtgtgagggtctgt

SEQ ID NO: 280633 - DNA, 464 bp, Homo sapiens
atgttggccaggctggtctccaactcctgacatcgggtgattcacccacctcggcctcccaaagtgctgggattacatgagtgagccaccacgcctggcctagggaactgtttttaaaccgtcatagtttccacttgcccttctggcaccatggccacagacgctaacactcacagtgtctacaggtaacagagcatcatggacatctggtggcccaaaggcagctcttttttattrtaagaatataattataataatgttaaaagagtatttgggaagaagagaaaatcagccctcattgccacttattctctgggtgactataagtcatttagcttctctatgcctcagtttttctgatccataaaacagacataattctaattgctaacacatagtgttattgtgagaattaaatgagataattatgtaaaatgctttaaaaaacacagggtaattcctaa

SEQ ID NO: 280634 - DNA, 503 bp, Homo sapiens
agagaggaaggagctaggcagagaaaaagctccagaaatctgcayaggggtcctcttgagcctgtagccaaattataagctgtgcatgcctagggtgagaatcaatgaagccaggcaaaaaccaactatcagaggaaactgactaccggaagttgaagggctacaggagctcatacaaagctgggagacttggagttccaaccaatcagggtaaagaaggctcatggatcaacttaataaagcttgaaaatgagccccaaaaagagcaaccccatctacaggtaaacaggttacctgcctctcaaagcaatatctttaatactctaaaggaaggcaacaaaacccaaacactaggcaatgtccagcatccaaacaaaactaccggatgtgcaagaaagcagtaaaatgtgacccacagccagaagaaaaataattcaacagaaacagaactagatgacagaaattatggaatgagcagctacattaaaatagttattacaatc

SEQ ID NO: 280635 - DNA, 503 bp, Homo sapiens
agagaggaaggagctaggcagagaaaaagctccagaaatctgcacaggggtcctcttgagcctgtagccaaattataagctgtgcatgcctagggtgagaatcaatgaagccaggcaaaaaccaactatcagaggaaactgactaccggaagttgaagggctacaggagctcatacaaagctgggagacttggagttccaaccaatcagggtaaagaaggctcatggatcaacttaataaagcttgaaaatgagccccaaaaagagcaaccccatctacaggtaaacaggttacctgcctctcaaagcaatatctttaatactctaaaggaaggcaacaaaacccaaacactaggcaatgtccagcatccaaacaaaactaccggatgtgcaagaaagcagkaaaatgtgacccacagccagaagaaaaataattcaacagaaacagaactagatgacagaaattatggaatgagcagctacattaaaatagttattacaatc

SEQ ID NO: 280636 - DNA, 559 bp, Homo sapiens
aagttcagcttcctagactctctcttgcttactcctccgccatgtgttctctttgcacacatgaccactcagctcacatttctgcttctctgccacgttttgacccagcatgtggccctcatcagaagccagccagatggggcactaggctcttgaacttcccagccggcagaatagtgmgcgaaaataaatgtcttttctttataaactgcccactctcaggtattttttcatagcaatgctaaacagactaatataactggcatctggaaacctggatttcaggaggttcccatcattccttgataaaagtgccttgctgtgtctagatgatttacataaacaatatggtttatcctgaacaatgttttccttctgggaacctaaaatgttgacatgtgccatgcagagggtgcctatgtggtgaaccctcaatacagatgctggacatggagcctctaatgagcatccctggtagacagcatttcacatgtgttgtcacaactcattgttggaggaattcagcacatcttgtacgactagagtacaccatgagcag

SEQ ID NO: 280637 - DNA, 505 bp, Homo sapiens
gcatgtggccctcatcagaagccagccagatggggcactaggctcttgaacttcccagccggcagaatagtgcgcgaaaataaatgtcttttctttataaactgcccactctcaggtattttttcatagcaatgctaaacagactaatataactggcatctggaaacctggatttcaggaggttcccatcattccttgataaaagtgccttgctgtgtctagatgatttacataaacaatatggtttatcctgaacaatgttttccttctgggaacctaaaatgttgacatgtgccatgcagagggtgcctatgtggtgaaccctcaatacagatgctggacatggagcctctaatgagcatccctggtagacagcatttcacatgtgttgtcacaactcattgttggaggaattcagcacatcttgtacractagagtacaccatgagcagactcttggaagcttatgtctgtttttcttcaaattttaccccatgtgcctttt

SEQ ID NO: 280638 - DNA, 1058 bp, Homo sapiens
ctctgtgggaactagtaccagattacttttacctggtacatcagatctagcttcaacaacaatttataaggcacacaaaaaggaaaaaaatacagcaaaggcataacaagcaccagacctagacacaaatacgacagggatattggaattatcagaccagaactttaaagcaagtatgaagtatgattaatatgctaaggtctctaagggaaaaagtagacaacgtgtaacaacagatgggtgatataagcagagagatacaaattctaataaagaatcaaaaagaaatgctaggaattaaaaacattgtaacagaaattaagaatgcctttgataggctcattagcagactggacacagcagaggaaagaatttgtaagtttgaggatatgacaatagaactktcaaaactagaaagcaaagagcaaaaaaggctgaaagcaattgaacagaatatccaagcaggactacaaaaggtataatatgtgtataatagtaatgtcaaaagaagaagaaagaaaggaacwtacaaaaggtataatatgtgtataatagtaatgtcaaaagaagaagaaagaaaggaacagaagaaatatttgaagtaataatgactgacaatttcccaaaattaaagtcagataccaaaccacagatccaggaagcacagagaacagtgagtaggataaattccaaaaawtccacacctaggactgtctattcaaactgcagaaaatcaaagataaagaaaaattttgaaagaaggcagaagaaaaaaaaaacaaaactcttatctattgaagagcaaagaaggtaagaattacaccagacttctcagaaaccattcacacacacaacaaaaacagagtagattgaaatatttaaactgttgagagagaagcaaaataaacaaaccaaaaaacccatcaacctagaattctatatgctgccaaattatctttcaaaagtaaatactttctcagacaagcaaaatttgagtgaatttgttgccagtatacatgccttgcagaaaatgttaaaataagttctttagagagaag

SEQ ID NO: 280639 - DNA, 519 bp, Homo sapiens
gtctcaccgtgaccccaatagcaagcctctggtgtgtgctttggttcatgaaatgcttcttctggtgggaaaatgccatttttagatagacagacatcagtaaaatatagccatgacctaagctccagctcagactaaggaagccccacaagctccatttcctagcactggggcrtctcattcccctttcctatccaagcagttggggaaagctctgcaggggagtgtgcacaccagccaggcaaaggatggattcaggcagagaagaggtgaggcagagaagagagttcaggaagagaagaggtgagggattaggaccagcccagacacctgaaagagagaaaatctggcccttccctcctgatgggcaaagagagccccacagtggccacaggatctgcagggagtccatggcacaaggagaagagttgggaaagaatagagaaggcagtgggggtagactgaggatgactgggaccccgggctgaggaggccgactgaattcaacagcccctggga

SEQ ID NO: 280640 - DNA, 479 bp, Homo sapiens
cttggtttaatcatattcacccatgttcaccacaagctgaacacagaccgatgtgtccaaagagaaccccgacccctcccagaacgcatcctccgtttgggattcctgatgttggtgaaaggcaccaccaggtatctgctcactgggtgagtcctgttggtcccagaactgcagcttatgtcactgcaatttactcacctgtcytcctgttccccaggaaaatgatcacacctgtatctaggggtcacccttgtcattctttgacactgtctctttcccatgcgctgtgcttagtgggggtggcccatgggccgtgtcagccattgcttgctcaagccaaaggctggatgaacaagtgactatcacaaagccaacaggggcccaatctggaaacttggctgcattcaattccagttgttccaaaagattggattgatttaataggaatgcttcctaacgcgtgaacaattattattgtt

SEQ ID NO: 280641 - DNA, 479 bp, Homo sapiens
cttggtttaatcatattcacccatgttcaccacaagctgaacacagaccgatgtgtccaaagagaaccccgacccctcccagaacgcatcctccgtttgggattcctgatgttggtgaaaggcaccaccaggtatctgctcactgggtgagtcctgttggtcccagaactgcagcttatgtcactgcaatttactcacctgtcttcctgttccccaggaaaatgatcacacctgtatctaggggtcacccttgtcattctttgacactgtctctttcccatgcgctgtgcttagtgggggtggcccatgggccgtgtcagccatygcttgctcaagccaaaggctggatgaacaagtgactatcacaaagccaacaggggcccaatctggaaacttggctgcattcaattccagttgttccaaaagattggattgatttaataggaatgcttcctaacgcgtgaacaattattattgtt

SEQ ID NO: 280642 - DNA, 553 bp, Homo sapiens
ggccatccacactggcaccacctgcctagggaacactaaggaagccctcagcatgagccctggcraggggcaagtacatgtgtacgtgtacatgcaaggtgtgtgaaggtgtgcatgactgtgaatgcatggggcaggtgtgggcagcaggccccacaggtgggtgttgggagacagcgtgtctatgtaggtcacgtgcgactgtgtaggtgggagagctgtgtgggtagaggtgtgccgccaaggggatccagatgcggctatgggtttgtgtgcatgtgagggtgcctgtaggagagaccgtgtgagggtgtatgtatccatgggagaggtgacgtatgtgccctgagatgaacacaccagcatgtgtgagcatggcagtgcacacccatcacaagtgtgctgaccatggggcatgctccagattagggggcggatccccccacgcacctgtctgtctcttggtcgcctcccctcccctggggtttatctggcccaacagccttactcgcagcccaggcagcagataattgattaatagaactggtgcttg

SEQ ID NO: 280643 - DNA, 553 bp, Homo sapiens
ggccatccacactggcaccacctgcctagggaacactaaggaagccctcagcatgagccctggcaaggggcaagtacatgtgtacktgtacatgcaaggtgtgtgaaggtgtgcatgactgtgaatgcatggggcaggtgtgggcagcaggccccacaggtgggtgttgggagacagcgtgtctatgtaggtcacgtgcgactgtgtaggtgggagagctgtgtgggtagaggtgtgccgccaaggggatccagatgcggctatgggtttgtgtgcatgtgagggtgcctgtaggagagaccgtgtgagggtgtatgtatccatgggagaggtgacgtatgtgccctgagatgaacacaccagcatgtgtgagcatggcagtgcacacccatcacaagtgtgctgaccatggggcatgctccagattagggggcggatccccccacgcacctgtctgtctcttggtcgcctcccctcccctggggtttatctggcccaacagccttactcgcagcccaggcagcagataattgattaatagaactggtgcttg

SEQ ID NO: 280644 - DNA, 553 bp, Homo sapiens
ggccatccacactggcaccacctgcctagggaacactaaggaagccctcagcatgagccctggcaaggggcaagtacatgtgtacgtgtacatgcaaggtgtgtgaaggtgtgcatgactgtgaatgcatggggcaggtgtgggcagcaggccccacaggtgggtgttgggagacagcgtgtctatgtaggtcacgtgcgactgtgtaggtgggagagctgtgtgggtagaggtgtgccgccaaggggatccagatgcggctrtgggtttgtgtgcatgtgagggtgcctgtaggagagaccgtgtgagggtgtatgtatccatgggagaggtgacgtatgtgccctgagatgaacacaccagcatgtgtgagcatggcagtgcacacccatcacaagtgtgctgaccatggggcatgctccagattagggggcggatccccccacgcacctgtctgtctcttggtcgcctcccctcccctggggtttatctggcccaacagccttactcgcagcccaggcagcagataattgattaatagaactggtgcttg

SEQ ID NO: 280645 - DNA, 323 bp, Homo sapiens
cggctatgggtttgtgtgcatgtgagggtgcctgtaggagagaccgtgtgagggtgtatgtatccatgggagaggtgacgtatgtgccctgagatgaacacaccagcatgtgtgagcatggcagtgcacacccatcacaagtgtgctgaccayggggcatgctccagattagggggcggatccccccacgcacctgtctgtctcttggtcgcctcccctcccctggggtttatctggcccaacagccttactcgcagcccaggcagcagataattgattaatagaactggtgcttggctcttcaaggtctggctggagataag

SEQ ID NO: 280646 - DNA, 491 bp, Homo sapiens
tctcgttgtgctcctggatgatccctttactgcctgcaactttcctcctcccttctctgctctggtcacaggatctagcaagtcccatggttccccggcccctcacttgaccctcagctcctcatgtggggcaagaaagaggttaagccctaacttgagaagcaggagcatcctgtgctggggctggcacagatgagtggtcgycacagcagctgcgtcctctgaaaagacagcaaagcctggctgttcacaccaggaagggggttgtccaggggctggtttttccatggacatctcaagcccagggcttatggattacagtcttttgaagaatatttgatagccgagaatgaaatgatcaactccacaaaatgactgcaaaatcaaaattaatgtttaattgaatatgtgcataacatcacatcatgtcaacttgttaaattcaactcactccagctcctatgaagttaggtgtaaatgatacttgcgtg

SEQ ID NO: 280647 - DNA, 472 bp, Homo sapiens
ggtagtgggaggggaagatgggttctgcatggagccactccagggacttttcttctgtctcacagcctgacaatcacctctagctgttctcagtcccattctcatcratgacctcgtctcctgattttgtacaatatctaggtgaccttctcttctttccatcttcaaacgcttgatcattgatgctcccttttctcttctctctcctcctgggaaaagagaaggaccaacatccccctttcccttcctcctgtgctgtcccgacccctctgagacctggctctagcagtaagtccctctctcttctgcagcaccagcctctgcccatccctgccctctgcacacaaagctctcacattgtctgcactttaagaacttttgtggcaaaccctggcaaatcctgccacttgtttccactcttctcaaatggctttgaggtcatcattgacctatcccatttgaccctgtcctg

SEQ ID NO: 280648 - DNA, 539 bp, Homo sapiens
gtcacccattggtgagtgcacaaaattgctcctctcctccactttgtaagggaagaagtgaaggatctgagtcgtgaggataagggaaggacctctgaaagtcatagctcacagccgtaagtgcttataatgctctgggcacggtgctaggtacagcaaagtgctacagaactggagagtgagtactggaatcatatccatttcatgaagaggaaacgaggcagtcttagtgaaatcactggctcagcttcacacagtgaggaccagagctggaattcagacccaggagtttggaatacaaagcccaccccttagccacatcactccacagtggtgttaaatcaataagtcgttgttcatctgtttatgttagggktggggaaactgaggccctgcatgtgagcggtttccagcaggagcacttagaagcgaaaggctcaaacagtcaaaaccttggagtgtcaggagatgctgaggacaaggtttcctagtatgggcctttgcctgcctgtgtgtgataagcccttgaccatgtaaac

SEQ ID NO: 280649 - DNA, 548 bp, Homo sapiens
aggagaagaagaaggagaaggcgaagaaggaggagaaaagaagaggaggaggaggagggagggggagaaggagggggagaaggagaaggaggaagagaggaagggaaaaagggaggaaatccaaatatctaaaatgacaatggtatttccaaagcatcatccaaagtttcagcttttggattgactgccagtttctcaattttaacagtgagttctggaggaaattttaaaatattttaagtgactgatgaataaaaagtgggaaagacaccatggcttcttgctgcatggatataaacactaatgtttgatgtttctcatatctgatgctgtggagttgccctctggtcaccctccacttaagttcagaacaaaagtaggccaagaggtaaatcattgaatattttaaataatcttccagagagagtatttgttcaactggaaaactctgagggctgagaactttgasagtaatctgcaaatccactaaactcatctggttttgattccctcatacatctgagttatcataagagtctgagatgatg

SEQ ID NO: 280650 - DNA, 543 bp, Homo sapiens
ataatgggaccttttagataaggtactaataagatcctctaagctccacagttcaatttgccaatgaactatgtggaacatgggtctctcatcagcacctcaaattcaacaaaaccaaaactgcatttgttgtttccataaaactcactttctgcacagttgtaactccattcactcaagccactcaaggtcagaacgttgaagtcatcttggacatttttttctcttctttcaccacacctgaagagttgccaattccattagttatttctttgaaatagctcktgaatttgcctctttatttccaggctactgtcattacttcagctcaggtatttatgacttcaagtctagaccaccaaaagaactttcttactggtttgtcaatcacttttttcccatctatctatggacagattctgttcttatctgccactcacctattttataaatcttttcttgggttcatattcccattcccaaacttaatctcacctaaagactctctaagagtctctggggctaacatctttatagcactat

SEQ ID NO: 280651 - DNA, 486 bp, Homo sapiens
atagttttcatgcctcatttctggctctgattcccaacattataattttttgctgacatattatttaccctactggaaaataaaaatgatcatgtcttattcagtctttttgatytgtgtattatctcaagcccactacaggacctgtgtgatatatagtgcccaggaactgtagtaagcttgcctacattaagataaatttttacaaggtggccccattaacctggttttaccatcaatggtctaatagataggatccacctggaattattaattatagtaaaaaattagccacaacttgaatattccaatttgtggatggttaagccagctataccatctccacatgatacactgttatgcagccattaaaattatgtttataaaacactaaactacacagaaatttagatgctgtattattcagtcaacaaatatttaccattggcataaaaattaaaatgtaaaatacagatatatatatat

SEQ ID NO: 280652 - DNA, 486 bp, Homo sapiens
atagttttcatgcctcatttctggctctgattcccaacattataattttttgctgacatattatttaccctactggaaaataaaaatgatcatgtcttattcagtctttttgatttgtgtattatctcaagcccactacaggacctgtgtgatatatagtgcccaggaactgtagtaagcttgcctacattaagataaatttttacaaggtggccccattaacctggttttaccatcaatggtctaatagataggatccacctggaattattaattatagtaaaaaattagccacaacttgaatattccaatttgtggatggttaagccagctataccatctccacakgatacactgttatgcagccattaaaattatgtttataaaacactaaactacacagaaatttagatgctgtattattcagtcaacaaatatttaccattggcataaaaattaaaatgtaaaatacagatatatatatat

SEQ ID NO: 280653 - DNA, 1124 bp, Homo sapiens
gatgatttgaccaatgaaccaacagattgatgtaaagtcaatgaaatccatgacaatttattttttgaatgataggctaggcagttagatgataaacttaattgtgaaaagggaaaatatgttattgtgtggaacattatcagacactgcaaatccacttgtctctgagccaagaaagtattgcagcaaagatactctcattctttaaatcttttagaaaaggtagagtaaggagaacattttctactccagtaaaggatggctttgggaaaggactggttagcatgatatcaaaattcaggaaaattctaatcactgatggagaatgagcaacacattttcccaacgtttgttgaaattattaaataagaaagttgcaattcaaagtaggtgtttactagaaaatgggcagcaagggatcaaagaggatgaggagatgttgtcatggaaacagccctttcctaacatttgcctttcaaggacttttgaggctttcatgtacattgaatttttaataattttctagataagtgaycctacttatgaacactgttcataawgcagagctgaaatttagaccggattgcctgattctaacacctctgtgtgtgtgtgtccctttctttgaaaatatccttatgagaaaccccaaaatatagaaaagacaaaagagccatggccacctgcttacccattccttcccaactccttggaagaccctaccacttaccctgggaaatgcagaacttcaagagcacactttggtagaaaaacacagacaggaatggtagaaaaacacagacaggaatggtggaaaaacatcttcatgattaggattcagctcagacatcaggttttcttctgtgatggaagggggtaagaaaaattagataaataattttttttwaaaaaaaaggagctcccatatcccttgtagttccagtacctacatagaacaagatatgttgcaggtacttaaatagatatttggtgagtgaataaataaatgaataacaacgagtaattaacttgactagttataataaagggggaaagtttggcttcctgattttatttctccttgcaataataattttcctccaaattctacattggattatttc

SEQ ID NO: 280654 - DNA, 564 bp, Homo sapiens
gcagagctgaaatttagaccggattgcctgattctaacacctctgtgtgtgtgtgtccctttctttgaaaatatccttatgagaaaccccaaaatatagaaaagacaaaagagccatggccacctgcttacccattccttcccaactccttggaagaccctaccacttaccctgggaaatgcagaacttcaagagcacactttggtagaaaaacacagacaggaatggtagaaaaacacagacaggaatggtggaaaaacatcttcatgattaggattcagctcagacatcaggttttcttctgtgatggaagggggtaagaaaaattagataaataattttttttaaaaaaaaaggagctcccatatcccttgtagttccagtacctacatagaacaagatatgttgcaggtacttaaatagatatttggtgagtgaataaataaatgaataacaacgagtaattaacttgactagttataataaagggggaaagtttggcttcctgattttatttctccttgcaataataaytttcctccaaattctacattggattatttc

SEQ ID NO: 280655 - DNA, 568 bp, Homo sapiens
tgtcctgaagtcattgagagttcttcctcactcttttcctggattatccttgcatcctccatgctcacaacaagggcctggaactcaatggggactttattatgatctgcacaaggcactcatctttaactttttgttacttatgccctttcttttcatttttcatcagacatttaatttataaactccccggttttattcaatagaatacaacgaaccagcaaataaaaatggaaggcatagaggagagaaagacaggggtagagatgtcaatggattgcacaaaactatgtgggaaaaaaaagaaaaaaracaatttaaaaataaaaataaattaaaaataaagagatatcaacggagcccggaattcaatttagaaatgcatacactcgttagaaaaaaaaaaaaacacacacataagcttaattctatgctttctagtcaccagtgtccaagaaagaaggagatgaggataaatttggtcaatggtaaattcacagtattcatgagatgaaaatgagccaattaagcaaagcaccactattctgaaatctaagaccagacagga

SEQ ID NO: 280656 - DNA, 447 bp, Homo sapiens
aagggcatgcaaaggttgccataagggaaccagcgccatttacatctgtcctcttagcctcaggctgttcagtgtcatgctcaaggcagagtcttttgcttttcagtcctcccaacctcacagagtagtttcctctgaatcatatttgaagatagctccacacatgcgcacacatataagctaacagcagagtgcgaactgtgtgtcaggcactgctataagcattytacatgcatcagctcactttaacctcacagtaatgcttttctatttttctattattgcccacttttccagatggggaaactgagacatgaaagctttagttactagtccaaagtagcagtggcagaccacacatcctagtggagcccttaacccaccaatgttacaacaggaatcactcccctacacaaactcccaaagaaaatggaaaattaatctatc

SEQ ID NO: 280657 - DNA, 420 bp, Homo sapiens
gaacttttcaggcacagtttttacaatctcaggatcctccaggggtcccagtaaaaaataatagtatttagccacaattagctgattcttgaaacattacatttagacccagaactttcaggggcaataataaaatccatatggggaagagagaaaggaggaagctggtagctaatgacgtttaacaattctcattgactgctggggacagatctatgctttgcttgtgatckgcttgtgtctatgataatatcacaaaacttgatggggaggaatccagtatactctgtccttgttgggaacatgaagcccctgaagagagggtggggcactgaagtgtaggaaccatctgaagagcctggccacccccctacacactcccaggacatatgccctgcacttgccctgatccagagcatc

SEQ ID NO: 280658 - DNA, 420 bp, Homo sapiens
gaacttttcaggcacagtttttacaatctcaggatcctccaggggtcccagtaaaaaataatagtatttagccacaattagctgattcttgaaacattacatttagacccagaactttcaggggcaataataaaatccatatggggaagagagaaaggaggaagctggtagctaatgacgtttaacaattctcattgactgctggggacagatctatgctttgcttgtgatcggcttgtgtctatgataatatcacaaaacttgatggggaggaatccagtatactctgtccttgttgggaacatgragcccctgaagagagggtggggcactgaagtgtaggaaccatctgaagagcctggccacccccctacacactcccaggacatatgccctgcacttgccctgatccagagcatc

SEQ ID NO: 280659 - DNA, 602 bp, Homo sapiens
cttgttttgttttgttttgtttcaccatagttgtgtgtttttttgtcacaccttaccagggaatctaggggctatgatgtcaagctctcttgcccagcaccctccacccctacacatgcatcacacagaggaataagccaagcccagaaaagagaggtcacttgccacacagtgagcaagagtcagacaattcrggcataggcccctctgccacctcacagcaagggactctggggtacatgaagtagaaacaactcttgttacaaagattagcgttgagaagatcctttctttttaaattgcactatattgcagaggttgaaaccaaaattccgatacctttcaattttgtttacattgttcgtttatgttgagaagatatcaaagaatcagaagacagacacagtgggtctctgagtgaccaggtcggctaacagggtcaatgcactaatgctcaagtacttctctcaaagaagacagcccaaccagatcctggccaagggacatccagaatgataaaaacaaaattaaaatagtggtttaggaaagcacattctcaattattcagaaaattttacaactcaagataattaagttgaaca

SEQ ID NO: 280660 - DNA, 602 bp, Homo sapiens
cttgttttgttttgttttgtttcaccatagttgtgtgtttttttgtcacaccttaccagggaatctaggggctatgatgtcaagctctcttgcccagcaccctccacccctacacatgcatcacacagaggaataagccaagcccagaaaagagaggtcacttgccacacagtgagcaagagtcagacaattcgggcataggcccctctgccacctcacagcaagggactctggggtacatgaagtagaaacaactcttgttacaaagattagcgttgagaagatcctttctttttaaattgcactatattgcagaggttgaaaccaaaattccgatacctttcaattttgtttacattgttcgtttatgttgagaagatatcaaagaatcagaagayagacacagtgggtctctgagtgaccaggtcggctaacagggtcaatgcactaatgctcaagtacttctctcaaagaagacagcccaaccagatcctggccaagggacatccagaatgataaaaacaaaattaaaatagtggtttaggaaagcacattctcaattattcagaaaattttacaactcaagataattaagttgaaca

SEQ ID NO: 280661 - DNA, 608 bp, Homo sapiens
ggacatccagaatgataaaaacaaaattaaaatagtggtttaggraagcacattctcaattattcagaaaattttacaactcaagataattaagttgaacaaattacacatggcagagttttatacacagatttatgtattgatgaaaacacggtacacacatacaacattatggtgtgtgtctatgtgtgtgtgtgtagacaattcttgggatatgaagattacaggaaaggatgggatgctaagtagcaatttgtccttatttgacataaaaaaaggaactctaaatggtgtgtgattattaacagttttattttgtacaagaagatgccatattaccaaaggcaaccaaatcatttatctcttcacaatatatatcagactgctcaggagctgaacaggagaagaggataggggtggggaagacagaggatgaagcaccagcccacctccttcccactgcatgaagtttaatctgtgaacatgaattcaaatctctagacctctcctagaattgccttggctctcgaggtcaaatttgggcaccaaggttggagtagacagagccctaaatgagacattagataggatcctacccctaaattatg

SEQ ID NO: 280662 - DNA, 619 bp, Homo sapiens
ttatagacttttttaaaaagagaatatttatcactttcaaacaattaagaaaaaacaaagaacaatgaaagtaaagaaacagaaaaaccctacagaaaaatagacaaaggatataaacaggaaatttactgaagcataaacacagtccaataaacatataagatactcaatagtaatcaggaaaatgcaaactcaaaagccatgacagcagtttttagaaagacaaacactaacaagtttgctaatatcaaggtataccttgttagggtgggcataaatagatacagccattttttcatgtgcaaaccacataaaccaacaatyctgcttctttctgtgtattctagaaaaacctttgcacttgtacatatgtgtaaaaagcatgaataaggatgcttgctgaaacatttttgcagtattgaaaaaatggaaaataagcaaaatgctcgtcaatatggaacacttaattaattaagacacattgtatcatgaatttcacgtaatggttaaaaagaatatgacagatctatgactactgacctgaaatggttaggagaaatggttaggcaagaaaaagacaaacatcatatgtgtaatgtaggaaattacttttgcaaca

SEQ ID NO: 280663 - DNA, 619 bp, Homo sapiens
ttatagacttttttaaaaagagaatatttatcactttcaaacaattaagaaaaaacaaagaacaatgaaagtaaagaaacagaaaaaccctacagaaaaatagacaaaggatataaacaggaaatttactgaagcataaacacagtccaataaacatataagatactcaatagtaatcaggaaaatgcaaactcaaaagccatgacagcagtttttagaaagacaaacactaacaagtttgctaatatcaaggtataccttgttagggtgggcataaatagatacagccattttttcatgtgcaaaccacataaaccaacaatcctgcttctttctgtgtattctagaaaaamctttgcacttgtacatatgtgtaaaaagcatgaataaggatgcttgctgaaacatttttgcagtattgaaaaaatggaaaataagcaaaatgctcgtcaatatggaacacttaattaattaagacacattgtatcatgaatttcacgtaatggttaaaaagaatatgacagatctatgactactgacctgaaatggttaggagaaatggttaggcaagaaaaagacaaacatcatatgtgtaatgtaggaaattacttttgcaaca

SEQ ID NO: 280664 - DNA, 621 bp, Homo sapiens
caagtactttaccctatctcatgtatcttcctttagtttgtcatgcctattcctgtgttagaagcattagtgcttcaacgccctgaattcactttattccaaataattctcaattgccaagactttcaccatataacacccattacacctattaacttgttgtctctccagcagtgacatcttccaatctgcacaatttccttgtgaataaggatggatcttcataaaaagactccacaattcaggcaasatagagtttaagcaaatgccattgcctaatcttcaaaggcctcttcctgggcccacatctgccccacaaagcctctgcattaggatgctttgaggtgccttaccataagaatagcaacagttcatatttgtttaatggggacaatgcaaggaatggagctcacttggaaatcctggctgttagtcatcaacacctttcaatacgttttctatcattttacaacagaagaaaaatgggacttaaaaataaatattgaatgcaataacagatctggaagaaaatctcacaaagatgggtggggagagagaacaactacctctcctccaatgtcccctatccttaagatggacaaaagtgagcagagttttgcc

SEQ ID NO: 280665 - DNA, 552 bp, Homo sapiens
gtcattctgctaaacaccaacactaacatctgtcagatgttaaagggtgaataatagcaaagttcacatctacaggcaacagaagctgaccctggatgacttaagcaggaaaaggagggtatgccaattcgaagtcttgttggaaaatctggagaacaggttgagaaaatgggcaggagccaaaggagaggcaagtggccaraatcacagccaaaatcacaccatggggataggcttgtggggatgccactgccactatttgcagacacctaacacccaacacttcctttgtgccaccaatggctctcacactgagcctgtgcctctgtcatggccatctggatgtatctctcttgtcccgcttctctgccactttcttcagagtcaacgtccaatgaaggagcatccaactggccctgtccagagtgtgtaatgcactaatcccacgaactgaggcagatgacacgctgctctttgaccttctgtggtgacagtaggtcttggctcctggtaacagtcacacaactgaggattccccaaacctaggaagat

SEQ ID NO: 280666 - DNA, 545 bp, Homo sapiens
tatatagggctaagtgttgagaacagggaattaggttagtaatattagtctggctgggtagatgtgagtcctgagacaaagtatgtttctctgctctatctcagctttgtgtgagcccagccagtttgtgccccagtgcctttgtctgtaactcgtatgacaatacttctttggaaagtactccatataattattttgaattctgcttttttgacctaaaaatgacatcagtggatgcgcttgtttcactckcatccttatatgacaccatctatgttctttttcttacatattaatatttgcttgcacagcttttaaattcttgtccagtggataccagctacagttggaaccaaattatacatattttaaaactttgttgttaggcccagtggtattcctaaaataacctgttgtaaagttctggtttagtggtatgtagctgaagttacgtgcgtctattttttaaaaatagaaataatgtggtgaataaactgtgattagcaacacacaacttgctgaaacaacggtttaccatatcattc

SEQ ID NO: 280667 - DNA, 546 bp, Homo sapiens
ggcagctcctgttatttggaaatggttataccacagcagtgttaaaatgaatttaaacgcagtaccaatgtcacatgcaatggaattcaagagtgaagcctgttgttggaattatgtaactggccgtttaaatcccagttgtattaagtgccaaagtgcattgcaaaggacaagttctgtttcacccaagtggtaaaaggcacagtcaaaagaagtcgtgcatttttttagctgtggtaaaaaaaaaaatacataacctaaaatgtaccatcttacagttcagtagtgttctgtgtatccatgttgctgtggaagggcatgcatttttatgttgcacgtgctttatgaagactaatagggatcttttttttgaatttctccagtggtattctctgatttgggggtaatatttgagaacagccttatatttttcctcttagcacaacctaaatagaatttgragcttctcctatgacagactctgtgtgcaatttattgttggcctggttaagcagctgtaatgttgtgtcattaatacattgattt

SEQ ID NO: 280668 - DNA, 606 bp, Homo sapiens
gctcatttttgcaccctttgtggcagacaaccatataatcaaagggttcccatcrctaaatcatttgaaaagacaagtagaaattagctttagctaatttaactagcctttgcccctcctcctgaccctgagggtgaagcacattttatcattcatcctctgggggctggcttatgctggctccctttcctttggcagtgattttaagcaaccaagttcttattacaattctcaaatttaaaattaagttctgatcacatcttctcagggcatacctaagaggcagtgtttatccccagccaaatcaattgtttcctcaagtgactcattcctgaaaatgttattgtttctaataaccagctcaaatatgtattttcattaatcttttcttttacctccatttcacacgtgttgctgcatgtcaggcagtttccacaaggatctgccatgacatcattgtgtgaggtatgaaaaaaaaatttttttttttctaatttaagaattacttttactcagatggtggctgggctgggaaatgttccccattgccctgggagttttaggccaaggcttgtgtgtgtgtgtgtgtgtgtgtgtgtgttggaa

SEQ ID NO: 280669 - DNA, 613 bp, Homo sapiens
gcctgaccctcagcaagctctgagggtaatttgggctttaattgggttcttaatccctgatttccatgtacaaggaaaattccaatgacaaggaaaactccaatatgtgggatcatcctaagcccatcccaaaggcttcacgattcatcatggctaaatggagtttgtacactttaaaataaatgaaaatacttcattacatctgagcaagtggtatttgagtcaggtatatgagggagtaaagagatcatttttcatttgtttttctttttgcctttttttctgaatctgatttttataaaatggctttgaagataagtgatttctaaggactattgccctcatgtgggctacgcaaatgcattaataatttgatcctcagtttcctctctataaaatcgtagaatacgatgagatgagcttgaaatcacttcttgatttagtacagtatgaactttctatgcacatatgaatgcaaagaatggaaacatcttacaaaatacaraaataaagattaatttttttcagaaaaaaataatttgctagagaacaaaagtgacaatgaggctctttggtttaccttttgttctgttttgctttgttttaagatgtc

SEQ ID NO: 280670 - DNA, 561 bp, Homo sapiens
ataagtgatttctaaggactattgccctcatgtgggctacgcaaatgcattaataatttgatcctcagtttcctctctataaaatcgtagaatacgatgagatgagcttgaaatcacttcttgatttagtacagtatgaactttctatgcacatatgaatgcaaagaatggaaacatcttacaaaatacagaaataaagattaatttttttcagaaaaaaataatttgctagagaacaaaagtgacaatgaggctctttggtttaccttttgttctgttttgctttgttttaagatgtcaagcctttttttgtatggagagtgaaaagtcttgttgggatggtgatgtggctgtgactgatactgccgtgatctcgcacacatgagccaaagcctygggatggttttgatgagaaaattgggtgaaggttggggagcgagacccgaggtgcaggaacacaggtgtgctgtggccagaagtgtggcatgaggaaagaagggaaggtggaggaattggagggtgagaacactggtcatttgccaagggcattgagaaattggt

SEQ ID NO: 280671 - DNA, 589 bp, Homo sapiens
ccctgtgtctgctagggtctttgctctatctagatcagagctgaaacatacacgtgagactccagcctacatgtatttagcacagagactcaagactgagcagagccaagttctaaacaaagcaaaacaaaactcaaaaacacttgcatgtattttccatctcttttcttccctcatcactcttcttgattactgtttatttttcaatatttctcagcaacacaagcagttttgtttccgctctgtttcctatcacttctctccagacagccaaaggcagtgaagcagaagtaagactgccatcttgtgctcaagatggttatcatgttatcattttctcaaatcaaataaaaaatgatttgyggggtttgagagaaggtgttggagcccaagtccgacattccctgacctaggttttcccagaagattttgaactctcccaccctttggtattgctctttcttggccttcacgctccaggatgccatgagtcatccttagtcaaaagccaacttttttttaatgactttaagtgtgacttagaataattatagttcagatgctatcacttatgcttttatgactgagc

SEQ ID NO: 280672 - DNA, 1134 bp, Homo sapiens
aaattatccacatgtgcataaaagaatgtggattttagagttaattataaacatattcattttataaaatttaattatagtattcaaatattcyatatgtttattgactttactgtttgatctgttcatttctaaaattggttatgtattaccttttcaccatgacagtggacttgtctttaactcctcatacttttatcaacttttagtttaaatatgttgtggctattttattaaagtatacaagtttagaatcttatgtcttccctggtaaattgaatattttgtttatgtagtgactcatttcctctctgctaaatattgttttaggtctagtttattaatataaatatgtcagcttttttgttgctatttgcctagtacatgtctttttcattcttttgtttccaacatttctttgttctcatttttattaatatacagcataaatatttttaatccagtttgataacctttccattttatcaggattgatttttcatttccattgattgggattactggtatttggattgcttgttttgtgctcwtaaatatttttaatccagtttgataacctttccattttatcaggattgatttttcatttccattgattgggattactggtatttggattgcttgttttgtgctctatatttgttctaatttttctattttctctctttccttcctttcttgacctgttcttatacagactccatttttttctcattccaattttttcctcaagtaaatagaaattacacactatttttttttctttctttttctgggggaagaagaagtggtttctctagaaatttwaacatgaaaacttatcgaagaaatctaaaattgctcaccatgtttacctttgtcagaaagagtctgagaactacagaacaatttgaatttcatcacctctacaatgatttatatgccactcttaatcgatgtttttgttctattttttaatccacaaattagacatctatcatcatcagtgttttatctaatcaatgtgtgtttatattgaatttcatatttaccaatttctatgttttccttccttcctgcatctccgatctttattgggatcattttcattttccctgaaatacacattcccaa

SEQ ID NO: 280673 - DNA, 1085 bp, Homo sapiens
caaagcacggtggtgtccagaccaaaggagaaagcattccttttcctatatatgattttccatttggctggaggtacaagaaaaataatagtggccaatatatagtgagtttttaatgtaagccaatgtgctgatcgtacaatactggctccctcccaaaggtaaccacatcctaatcccaagaacctgagaatatgttatcttacctgggaagaaaaggacactgctgatgtgagtttcagatggggagattatcttggattatctgggtgggcctgatgtaatcagaagaattttataagtgctatctggaggcaggagaatctgaatcatagagagaccttaagatgatatactgctggcttggaatttcagatttccaacctccaaaaccgtaagataccaaatgtatgttgtgttgaaccataaagtttgtggtaattgttayagcaaccacgggaaactaatacagcccagttctgggccaagcaccttacatgtattctgtcactcaatcctctgaggagccccatgacggaagtagcacaattaacatcactttataaawcctgttctttatcatgttatacaacaacaggcagggaagcaatgttcaaactattcttttttttttttttcttgagacagagtctcactttgttgccaggctggactgcagtggtgcagtctcagctcactgcaacctctgcctcctgggttcaagtgattctcctgcctcagcctcccgagtagctgggactacaggtgcgcaccaccacccccagctaatttttgtwtttttaatagagacggggtttcaccatgttggccaggatggtctcgatctcttgacctcgtcatccgcccacctcagcctcccaaagtgctgggattataggcgtgagccattgtgcctgacgtcaaactattcttaaactttaattcccatgtttctaacattttaaaatatggtgttcaaagatattaggtctactttaaaaaatgttctataaatgtataactgacagtgatttaatgttttgataaaaattgtaaaggtcatggaataatcgaaatatttcaca

SEQ ID NO: 280674 - DNA, 590 bp, Homo sapiens
ttattattgctctcgtaggcattacaagagaatgtatccacttgactagaatgatgatattmtattctagactgtacaaaatatttgcatattttcttaactcagagtacttagtcaaatgactgtagccactgctttggagctggtaaagtccctgtggatagcactggctcttgcaattactgtaaaagccaagatggtttcttcactttccattgcattatgtccacatgcatacagtcaaggacagctttggactgatactactttgccttttacttgatcaaaatatgcacacgaaccagaaactcttaatgatataagatggttctcaaaaagcattgctcaaaaatgttaaattacaatattataatacgttgccataaagctggaactttttgtaagaataacaaggtgattcagctaaattagttgtgatgttctcatttatggtaaagtgtcattttttcttaagaggagcaattgctattttttttactgcgtattcaaggccgtttaaaactaccaacatgatgaagccttatttaattaactccagctgaccttgaccatttgtctgcatcccctca

SEQ ID NO: 280675 - DNA, 589 bp, Homo sapiens
cttaccacagtctaccaagtcaaatgcctggtgttgtttcaggatgattatagatttctatgtcctgtcttaaataaaataaggcattctttctgtttgagaaaaaagtcagtgtggacatcaatgcttggggcttgaagctcttcataacctgcctttttagagaggtataaaccctgaatcctgtagggtctttcttggtgctttgttactgtttttttctttcagacaactactttattattgctctcgtaggcattacaagagaatgtatccacttgactagaatgatgatattctattctagactgtacaaaatatttgcatattttcttaactcagagtacttagtcaaatgactgtagccactgctttggagctggtaaagtccctgtggatagcactggctcttgcaattactgtaaaagccaagatggtttcttcactttccattgcaytatgtccacatgcatacagtcaaggacagctttggactgatactactttgccttttacttgatcaaaatatgcacacgaaccagaaactcttaatgatataagatggttctcaaaaagcattgctcaaaaa

SEQ ID NO: 280676 - DNA, 621 bp, Homo sapiens
tagaccttcattttattcagttctggggcttagaatagtgacaccttgcctaaatagaagtcaatcataagcacgctcagctgtctggaacaaagaaaatcctgggggaaaaacaaaataggaacataaccatccaagcagccaaaatgatgtctaggtaccagcatgccattgtaggtttagtaaggcctttggtcaaattcaattaaatttcattaacataaattaaatgagttttctgcttgtctgatactatattgcatgaaataagcacaataaattttggccaacatcagagattatgtctgagagagtrcaattaaaataatagactatgtgttaggtagagtaatgcccccccaccccaaggtagccactcccaaatccccagaaactgtgatagattaccccacaagacaaagtggagtgaaggtaaaagatggaattaaggttgctaattaactaatcatgaattatccaggtgggccaaagtaatcactagcgttcttgaatgggtggggccttaatgggcctttaaaagggaagcagaagcgcatgtcaggtagtcagatagtatgaaggagatttggtggctttaaagatggaagaggcttgtgagcc

SEQ ID NO: 280677 - DNA, 622 bp, Homo sapiens
taattctaacagccacagttcttgatggggaacatggttttggatgactctcaggaataggaaccttgaagagcgaataaatcagggaacagtctctgtgtaacaagattaaggtgaggttgctgctgctactcattatagtgataacaatatcaacaatgatgaaagaatcaaagaagtggaaaactgctatttaatcgttttgagctgagcctttatcaaaagtcatacctgggtaggctatttgctatgtaggagctgtgacccttgtataagccgcctcgctgctctgtcttggttgctgcatctgtaatgtgagaatgatagtaatatatatctattactgatactaaggggacatatagaaaaagctgataaattggaacatrgaacactcacatgttggcagtaatcctgagctgttatattgaacttaagtattaataaagaattctgacttttgtttaaagatgaacactcactttttaatctaaattctctaaaatttatctaggattcaccttttcacagttatttttactcatgtttcgaatacgctgctggcctaggataaggaactccaaatattgcttcttcctaggtcttacgttgccctattcca

SEQ ID NO: 280678 - DNA, 619 bp, Homo sapiens
tgggtaggctatttgctatgtaggagctgtgacccttgtataagccgcctcgctgctctgtcttggttgctgcatctgtaatgtgagaatgatagtaatatatatctattactgatactaaggggacatatagaaaaagctgataaattggaacatggaacactcacatgttggcagtaatcctgagctgttatattgaacttaagtattaataaagaattctgacttttgtttaaagatgaacactcactttttaatctaaattctctaaaatttatctaggattcaccttttcacagttatttttactcatgtttcgaatacgctgctggcctaggataaggaactccaaatattgcttcttcctaggtcttrcgttgccctattccatctgcctgatgaatttcactttgtaaattcagacctgaagctgctcatgccgcctgtcaccacatactctcaataccaagctctgtctatctgattggactatttccaattatttgatgctgggctgcacctacaccaggaaagcacttgactcatttaacccttctgtgcccagctatagaagaagacataacaggagccactttacatattatttgtgagcactcat

SEQ ID NO: 280679 - DNA, 504 bp, Homo sapiens
gctttttatattactttccttcaataggtaagacacactatctaaattgcatacaaagtatagaaataacagaataccttgtgtgtacatggtgtgtatgggtgtgtgagtttgtgcgtgtacattctgaagcccatttgtgtgagtggcatctcttccattgtggctggaagcaatttgtctcctcatgccttctgcttgcgggcaggtggctcagaatcgcattttatactttttttttttttttttcactgttccgatgctccactggttcagatctcatcagaattcatgacttacatttaaraaagtcttctgtaagaacaagttgtttcttggattagctccttacatttaaattttatcagaagattttgaagcaacttctgtacattttaattttaacaaaagggtctaggttgaaaatcaaaattgtgtttactaaatatctagtgtggctcgcttcctatcagggtagggacagaatattagaaaaagtcagtc

SEQ ID NO: 280680 - DNA, 560 bp, Homo sapiens
ttgttatgaacaatagtctagtgcatgagattgacatttccaataaatttctacacgcagcagctgagcggtttgaatgtgtaaatattagtgatcaaaatgttgtcagagctttccagctggacccatcagttcatttggcaattagaaaacgaaaaataaataaaccaagccctctcctaaattgtaatctcctcagtacacacattatactttcttgccatcttttcaatgatctggaggatgctttcttttttttttttttcttttgagacagtcttgctgtgtcatccaagcttgagtacagtggtgctatctcggctcattgcaacctctgcttcccaagttcaagcggttctcatgcctcaractcttgagtagttgggattacaggcatgtgccaccatgcccagctaattttcgtattttttttagtacagatagggtttcaccatgttggccaggctggtcttgaactcctggcatcatgtaatcctcccactttggcctcccaaagtgctggaattacaggcatgagccaccacacctggccatggagg

SEQ ID NO: 280681 - DNA, 559 bp, Homo sapiens
tgacccagtaatcacaaatgctagactatgacctggcacagccattgtctgaccatcttgccctaatcaaacagatcaaatatgtcctctcgatattcacagaaatgatgttagagtgaatggaagggcgtgttaatcataayatctctaaattttaaagagcaatttacaatatttatcagtggatatagagtcacctaagagacagggtatattatgggtcctttttactaaaggttcatgatcctaggtaggagtgtcagagagtagacagtgaacatcaaacagtctagctcatataagggctcagaaaattgatactatgttcctttatctgaaaaaaaataaaaaactgagtcatctaatcctcaggaataaaaaaaaaaaagcttttaagaacatcttagttagacagatactgccctatacagtcacctagtaagtactgtgcctgtgaccagttgagttactacttagaaagcagagccaatggaatcaacagctacattatttggttctaataagctctcctctttcacctgaatgtgagctagttaac

SEQ ID NO: 280682 - DNA, 546 bp, Homo sapiens
tttccttataacatggtacaaagatttcactgcctccttttgtgaccattcacctctttatattttctacatcatacattctttttctgtttttggtaggggatgatcagtaaagctgagaataaaactgaatggggaagccttattcaggtaatttttccttcttccccagtcaagttcttagattacataattttatggggttgtagatattttctaaatttcactaattttcagaactggatgcattataatgttttgagaagtcaataagctcaatatgaacatagttttttacctacatattgtttaatagtaccttatgattctacaacttaacacctgtccttgatctgctacattctcttggcatttgagaacctttgacrtagttaagttccttacctttcagatgaggagaccactgagtcagtcaaccagtattaatagctgcatttgaactcagctctcctgattgctggtctgagtgtctgctggttaacattgcctcttctaataaatagatgccttattttattaacctga

SEQ ID NO: 280683 - DNA, 568 bp, Homo sapiens
ttctgagcatgaaaatcattgtactcgtgtagtatatatgtgtgtgtatatatatttatttatacatacatgaatgacattgttctaatatctaaaaatagaaaaaaacccatagctgtatattcatatattcatataaacccatatattcattcaatgcaatacttctgcactgaaagtaaataaattttatctacaaaaaaaagtgggtaatcttayaatgttaggtgaaaaaagaaagacataaaatatatataatatgaatcaatttgcataaagttaaaaaacacacaaaaccaagctatgtttttaggggtgtttttatagcatccctatgaactaaagcaaggaaatgagatacacaaaaatcagcatagtgattttttaaattgtggcatatacagttctttgtgtttgcagataatgtaacaaacacaaagaaaattataactatggcaaaaatatttcaaggaattgtttttaaagtctagtattaaaggagtatactggaatcttaaaaaatttaaggactttttgatttaaggaattccatacttgggatattagg

SEQ ID NO: 280684 - DNA, 518 bp, Homo sapiens
gcatagtctctacgtgaatgtgggaaaataagagaatatgtatggaacatcgagaagaagtaaaacaaaaaacataaattaataagttgagcgggtaggtcttatgcctagaattcatgttaggkcccacagccgaatgcaaattattccacattctaaagtcaactctaaatgtgacctgtcttctccccctatgctgcgaaagccctgccacagagcatcatcaaagacagtgattacaaaataataataaattccgtagtcagactgcactgagttgaaactgcacaataaatcagtaacagatctgtccaattaacaatgagccaaatatttaatttcatcacccctgtaatttattcttgtttatgaggtcatttcacatccaaaatatagaatctacacacaacatccttagatagctacctattactatggcaagaactgccttaattggttatatttacactgacttaaacaatggaattgtctggctgatgaactgcaaaatgaggatt

SEQ ID NO: 280685 - DNA, 620 bp, Homo sapiens
taaatggtggcaggcaagagagcttgtgcagaggaactcccatttataaaaccatcacatctcctaagattcatttactaccccgagaactgtattggggaaaccagtctgatgattcaattatctccacctggccctgcccttaacacatggggattattacaattcaaggtgagacttgggggtcgtgggggaacagccaaaccatatcacgaaaacatttataaatttaatcaaaagaaaaaaatgaaaattctatataacatcacatgggtgcagctaaagtagtacttcagggtaattttatcttaaatgcttattgggataatcatctaaattaggaagttagaataaggaaaaaacataamaactgcaagaagaaatagaattaaataaagatagtggtaggtattaactaaataaaaaacattcttacagtaaagaggagaaaatggctgtaagtacattatttaaaacaaaaaagtacatagataagcctctggaagattgaccaggaaaaatgagaaaaaccctaatgatcattattagaaaggtcatatttagttagaaaagagaagagttaggcaacataagaggatattatttaaaaaatatttgaa

SEQ ID NO: 280686 - DNA, 620 bp, Homo sapiens
taaatggtggcaggcaagagagcttgtgcagaggaactcccatttataaaaccatcacatctcctaagattcatttactaccccgagaactgtattggggaaaccagtctgatgattcaattatctccacctggccctgcccttaacacatggggattattacaattcaaggtgagacttgggggtcgtgggggaacagccaaaccatatcacgaaaacatttataaatttaatcaaaagaaaaaaatgaaaattctatataacatcacatgggtgcagctaaagtagtacttcagggtaattttatcttaaatgcttattgggataatcatctaaattaggaagttagaataaggaaaaaacataacaactgcaagaagaaatagaattaaataaagatagtggtaggtattaactaaataaaaaacattcttacagtaaagaggagaaaatggctgtaagtacattatttaaaacaaaaaagtacatagataagcctctggaagattgaccaggaaaaatgagaaaaaccctaatgatcattattagaaaggtyatatttagttagaaaagagaagagttaggcaacataagaggatattatttaaaaaatatttgaa

SEQ ID NO: 280687 - DNA, 591 bp, Homo sapiens
tctgacaaacaaaagctaagggatttcatcagcaccacacctgtcctacaagaaatgctaaagggagtttttcaatctggaaggaatgggtgttgatgagcaagaaatcttacagtgcaaaactcattggtaataggagacagaaaaacacagaatattagaacactgtaactgtggtatgtaaactactcttaacctaagtggaaasactaaatgagccaatcaaaaataataactacaatttttaagacatagtacaataacaaatagaaacaatgaaaaggtaagaagtgggggggggtgaagtaaaggcataattttttgttttctttttgttggttaggccaacagtgtggttatcagactaaaataagggttttaatatagtatttgaatgtttcatggtaaccataaaccaaataaaacatagagtggatacacaaaataaaaagcggaaactaaatcatgtcactagagaaaatcaccttaactaaaggaagataggaaggaaagaaaaatatcagaaaacaaataacaaaaatgacaggagtaagtccttatcaatgataacattaaatgtaaatgtaaatg

SEQ ID NO: 280688 - DNA, 588 bp, Homo sapiens
ttggggagtgggaggctgcgggagggatagcattaggagaaatatctaatgtagatgacgagttgaygggtgcagcaaaccaccatggcatgtgtctatctatgtaacaaacctgcaccttctgcatatgtatcctagaacttaaagtataaaaaaagtcactacataatgataaatgagttaattcagccacagagtataacaactttaaatatatatacacctaacactggaacacccagatatgtaaagcaaatatataaaagatagagagataggccccaatgcaataatatctggcgacttcaacactccactttcagcattggagagatcttccagacagcaaatcaataaagaaacatcagatttaatctgtactatatgccaaatggacccaatagatatttacagaaaatttcatccaagggctgcagaatacacattcttctcagctcatggatcactctcaaggatagactatatgttaggtcacaaagcaagccttaaaacactcataaaatctgaaataatatcaagtatcttctctgatcataaaagaataaagctagaaatgaaaaatgggag

SEQ ID NO: 280689 - DNA, 507 bp, Homo sapiens
gattgctgttttttgtttggctgtttttttttttttttgtggggggcatttattacatacagctttgctgtctaagtagattgtaaactattgaggagaaggattacatgttgttaagatctgtacaatagcaccaaataccatctcaaattgatgcctaatcccaggtctaatacttattaagaattcaataaattgctgaataatttatttttggaggagcagctgtagaaattttatgtttttaaaacagaaaagcaatagaaatagacagtaatgccataaatactggtgatagaggtgagagagtagcaaaaccatttcagggaatactgcagaaatcatccataatgccttttttgtatatagagctacctaagagcaaatatgcccagatttaargaaagagcatgttaggctcattttatgagtaatcaagaattctgcctaaggaaaactgaggcttcaattaatttcttttctgaaaagatgatatcaaattaaact

SEQ ID NO: 280690 - DNA, 635 bp, Homo sapiens
attctggacttatctctaatgatcttggaatttagctcccagaactaacaacttaaattgtttagtgtttcatatctaaattccctggaaagtagattagaacatatttattttttcttattttcttactataaattggttttctctaggtcagttaatacctgatctgatcaactatgaatcaaccctttggttatactgtaccaaacattcccaatatayatagcgtgtattgaaccatgaaatttcaaagaaatggaatgtgaactgtgtgggtatgctaacttagatcctttacttatcaaagtcaatgacctcttctcattcttctcaagttctccataaaattagtataaccaagtcccttttctttctaaggtctattaaaatattccataaattttaatttcatgcatcttcctggctctcttccaggcactgctttcttggatttcaacttattccccccctagtaagagcaacatcattgtcagttttaatagctacctcttcagggttgattcttgcttctctactcccactcctaacgctcttaaagttcaagccaactgcccatttatccactgtcaaatatctttgaacatgttctcctgaatgtttatcagtcaattcta

SEQ ID NO: 280691 - DNA, 479 bp, Homo sapiens
ttttacttttgaaccacatgcatgtagtatctaattttacaaaactgaatacaaataatgaaataaagttacttaagaaaatatatgaaaaaagtatgtgtagcatgctaacatttagaacttaaaaacagagggacasacacccacgcccctttgctcaaaaatgcataccatgtgtgtctgaaagaatacaaaagaatctgataacatcaactggctccaagaactaggtagcttgggacacaagggaaagaaggagacttttcacgacacatagttttgtaatttttcaactttgaaacacgttaatgacctattgagaaaattcaattaaaaaaaatttactaaacttacttgataacagtggattacctctggaaagtgggtgggaaatatttacaggcagcatatatcattaaaagaatgttttaatgtaaaagagaaaaataaatagattaagctggaatagaagaaaattg

SEQ ID NO: 280692 - DNA, 551 bp, Homo sapiens
agggtatattataccttatatagtgataattggctacataccttggcaataagctttgtcctttcacgtggggtgcaactttacgcttggtgcttcagctattactgattatatttcatcaatttatattttttctccaaagtaagggcacataattattagcactgatgttggattgtattaaattagttgcagttttgaatttaaaaattgctttccaagcaggatggattgttyacttatttcatcaggcagttgtagcagtgaagattgagaaggctttaatgacttggaattttccttttattatgctattgaacaaattacagagctaatgagatttacactaagtggaaaatctctgcatcacctgctgttttatgggtcttagaaaaaaattattgataattcttctctttctacaattaaacaaagttttgtttttaaacaatattttctctgaatgtaaaatgtaaaataaaagctcacattctttccttgtgggaattaaattttatgtgaaaaatgaaacacagagttcacatcaaggg

SEQ ID NO: 280693 - DNA, 537 bp, Homo sapiens
gagaagacagtcaacctcactaatttctattgaaatgaaataatatgaagagtttgttttgactaccataccggtcaatatgaaaatgttaaattgtcagatatatttctgcctagcaaaccatcccaaaacatggtgacttaaaacaacaactacttatttttttctcatgtctctacttcagagatttgtgcaatcactttttcactccgtgtgccactggtaatcctggctggggccgctcacacagctcagttcaactgggtagctggactgaattgaagttccagaaggctccactcacacatctgattcaycgtactttttcatgtggcctttctctttctcttcatgtcatctcggtatttatttggtaatcttgaccttatttacttcctggtggctggcattcccaaacaaaagtgaaagctgccagtcctcataggggctgggcctccagctggtgtaggtggggttatatctgctgtattatattggtcagagcaagtcaaaatcagtagagattcaaaaggaggg

SEQ ID NO: 280694 - DNA, 483 bp, Homo sapiens
tagaaatagaaacagttgaaaatgtatgagaagacagtcaacctcactaatttctattgaaatgaaataatatgaagagtttgttttgactaccataccggtcaatatgaaaatgttaaattgtcagatatatttctgcctagcaaaccatcccaaaacatggtgacttaaaacaacaactacttatttttttctcatgtctctacttcagagatttgtgcaatcactttttcactccgtgtgccactggtaatcctggctggggccgctcacacagctcagttcaactgggtagctggactgaattgaagttccagaaggctccactcacacatctgattcaccrtactttttcatgtggcctttctctttctcttcatgtcatctcggtatttatttggtaatcttgaccttatttacttcctggtggctggcattcccaaacaaaagtgaaagctgccagtcctcataggggctgggcct

SEQ ID NO: 280695 - DNA, 537 bp, Homo sapiens
gagaagacagtcaacctcactaatttctattgaaatgaaataatatgaagagtttgttttgactaccataccggtcaatatgaaaatgttaaattgtcagatatatttctgcctagcaaaccatcccaaaacatggtgacttaaaacaacaactacttatttttttctcatgtctctacttcagagatttgtgcaatcactttttcactccgtgtgccactggtaatcctggctggggccgctcacacagctcagttcaactgggtagctggactgaattgaagttccagaaggctccactcacacatctgattcaccgtactttttcatgtggcctttctctttctcttcatgtcatctcggyatttatttggtaatcttgaccttatttacttcctggtggctggcattcccaaacaaaagtgaaagctgccagtcctcataggggctgggcctccagctggtgtaggtggggttatatctgctgtattatattggtcagagcaagtcaaaatcagtagagattcaaaaggaggg

SEQ ID NO: 280696 - DNA, 503 bp, Homo sapiens
aagaaattaacaaccacattagtgctctccttaaccgtaaatttattgttctctagacttggggctggtctgttgctagctaacttgacaacccttgaaactgcctggctctcccaatgctagaattcaatcagagattctkccttctagatgcccaggtataaggtaaggctaaggaatgagcagctgtcttgtatccctctatcaatatctcttcactgaataggacaggctcttatgctgagtgattttatggacaaccagaatggcccttggcacttgtgagtaaccttggctcctggccatttcagcccatatctcactggtgattgtggcttattaggcttgggatggtcagaagtctagagagtctctgggatggtgggaggcaggaagaaagtcccaaagatctcaagaaagatatgacttgttatcttttttatgaagtgtggtctaaactagcactcatcccacctgaagaatagggaacagagggaaattct

SEQ ID NO: 280697 - DNA, 591 bp, Homo sapiens
gggcgtggtggcgggcgcctgtagtcccagctactcgggagactgaggtaggagaatggcgtgaacccgggaggcggagcttgcagtgtgtcgagatcacaccactgcactccagtctgggcgacagagctaggctccatctcaaaaaaaatgaaaygaagtgaaataaaataaaataaaacaatgaccttctatgggcttaatgtattgcacactagtaagtcctttactatttgatctcttgcattactttgcaatgcagtttacccactctgttaaaataaaaacaaaacaaaatatagaatcccttttccaaccctagctaggatgtattactcctacctgagtttctaactaccttctccttatggcttcttgctgttgtttgagacatttcttcctaacacagcatcttgagtgctgatgttttccagagtttcatgtttattccttcctttttatcattcagtaaactacatggttaatttactaattaccatgacctcaatttccacaaatgtgaacattttgccaagtcttcaatagttacgtatggccaattcatacaatgtaaatgtgtcagagataact

SEQ ID NO: 280698 - DNA, 553 bp, Homo sapiens
taacactggtgcctttatgcaaattacaacaaacggaaaaatcagtatcttctctaggtggacttgcctccaggaatacactgcttaggaaataactatttcttatttgtatcagttaagaaaaggaccccccatattgtagattgatgaagccctatcctagggagtgtgcttggcaaacagaatgtagtctggattccaatccctacctgctctttcagtttatgccttcatgcagtgaaaaacttgtataactgcatgttggccttgtaagccttgggtscataacgggtagcgaaggcagtcattcaaatagtatgtctagagatcccgaagaacgacatacgagcccaacatatggcttgtataattcaagactgaatcagtattaaattattaagattcacattaataattatttttgttgttaagaattggttttaatatgtttttagccattaccactttagttctaattaaattttcatttcaattgactgaataaataatgcttacaaaaagtaacggttaactatgggagaagaaaattctg

SEQ ID NO: 280699 - DNA, 528 bp, Homo sapiens
aataactatttcttatttgtatcagttaagaaaaggaccccccatattgtagattgatgaagccctatcctagggagtgtgcttggcaaacagaatgtagtctggattccaatccctacctgctctttcagtttatgccttcatgcagtgaaaaacttgtataactgcatgttggccttgtaagccttgggtccataacgggtagygaaggcagtcattcaaatagtatgtctagagatcccgaagaacgacatacgagcccaacatatggcttgtataattcaagactgaatcagtattaaattattaagattcacattaataattatttttgttgttaagaattggttttaatatgtttttagccattaccactttagttctaattaaattttcatttcaattgactgaataaataatgcttacaaaaagtaacggttaactatgggagaagaaaattctggtgcaggaagtaatgactggagctgccagagcaactgctttggagtatatgcgaagtagggacct

SEQ ID NO: 280700 - DNA, 562 bp, Homo sapiens
ggtccataacgggtagcgaaggcagtcattcaaatagtatgtctagagatcccgaagaacgacatacgagcccaacatatggcttgtataattcaagactgaatcagtattaaattattaagattcacattaataattatttttgttgttaagaattggttttaatatgtttttagccattaccactttagttctaattaaattttcatttcaattgactgaataaataatgcttacaaaaagtaacggttaactatgggagaagaaaattctggtgcaggaagtaatgactggagctgccagagcaactgctttggagtatatgcgaagtagggacctagaagagggcagcyctagaatattttggtgcaaaacatcagccaataaggagctgtcctaaaagtacagggagtagagagtagtattgatacttttactttctaaaaacaaatccctcgtgaagtcttaggaatgattgtattagaatcagttataccaatcatgctagaatatgtggaggaaaaacataattgacttacataaagatgcagctcagggacac

SEQ ID NO: 280701 - DNA, 277 bp, Homo sapiens
aattgtctaggtgacacccttcagattgtcacatgagcaaacctcaattgattactgacaagatagcattttgtaacaatcaaagaaggactcaatacactattgatgcctcattattaaactcaatttgaaaaggactggttatttgggttctagaaccctttaaatrttggagtacagtattaaatattgaaatactttaaatactaagagcatctctctttattgccaacttgctaatgacacttccatatttgaaattaaaaaaatagaaggt

SEQ ID NO: 280702 - DNA, 611 bp, Homo sapiens
gcagctgttttaacacattattacaaagattataataatgcctttcaactgaaaatagttctttggtagctgggagttataatttaaacaagtaattaataaatgttgattcccagaaacatttttgttgcacaatataaacacgytcaaggaaagcataaatacttctaatactaatcctgaaaaataatgtatatcctattagaacacagaaaacaaataatgtgtaataaactagaattgaaattttcctggtttagctatcagactatagctagccaccgagaaggagcctccctcctttgttgcaactctattctggcttgtgtacacctatcacatgcaattgtctgatgagaattaattgtaggtgaaagaaatgatagttccttttaactgacatacactggaattcaaaggcaaggattcaacacgaagtagaggacaatcatccttcaccattacttcaaagccccagagtgcatggaacttatacttaccaacaggtaaagcctcctggaattttctcacttcgtcaggagaatcttagtttatcccagaggtaatcatttggtggtggtagcagaaaaagaagagagcagcatgactag

SEQ ID NO: 280703 - DNA, 611 bp, Homo sapiens
gcagctgttttaacacattattacaaagattataataatgcctttcaactgaaaatagttctttggtagctgggagttataatttaaacaagtaattaataaatgttgattcccagaaacatttttgttgcacaatataaacacgttcaaggaaagcataaatacttctaatactaatcctgaaaaataatgtatatcctattagaacacagaaaacaaataatgtgtaataaactagaattgaaattttcctggtttagctatcagactatagctagccaccgagaaggagcctccctcctttgttgcaactctattctggcttgtgtacacctatcacatgcaattgyctgatgagaattaattgtaggtgaaagaaatgatagttccttttaactgacatacactggaattcaaaggcaaggattcaacacgaagtagaggacaatcatccttcaccattacttcaaagccccagagtgcatggaacttatacttaccaacaggtaaagcctcctggaattttctcacttcgtcaggagaatcttagtttatcccagaggtaatcatttggtggtggtagcagaaaaagaagagagcagcatgactag

SEQ ID NO: 280704 - DNA, 560 bp, Homo sapiens
aaggagcctccctcctttgttgcaactctattctggcttgtgtacacctatcacatgcaattgtctgatgagaattaattgtaggtgaaagaaatgatagttccttttaactgacatacactggaattcaaaggcaaggattcaacacgaagtagaggacaatcatccttcaccattacttcaaagccccagagtgcatggaacttatacttaccaacaggtaaagcctcctggaattttctcacttcgtcaggagaatcttagtttatcccagaggtaatcatttggtggtggtagcagaaaaagaagagagcagcatgactagactcttataaaaccctattttgacaaagttaaaaaatgtgtaaatgtakaaatacattttttcctctttaaaagtgatgctttgtgttttattaattatactatccatttgtatgtgtgtgcattcacaatgtgccaaacactgttttaagtattttatttgcaatttttatgcaaccttattagtttgatagcactacactcatttatacagataaggaaactatggcacagat

SEQ ID NO: 280705 - DNA, 1186 bp, Homo sapiens
tactctgactttgtgaaaaaaaaatttttttttaattagtagggtgtaatggcatgcacctgtgttcccagctactcttgggagggtgagttaggggratcacttgaggtcaggagtttgaagttgcagtgaactatgattgcactactgaactccagcctgggcaacaaagtgagaccatgtctcaaaaaaatatgtatacagaacccacactgaaaacttacaggacatgccaaagtctagtggacaacacataaggattagaaaggtaaattaatgcaggagtgactgatactcagtgcaggcagctttgatactttataattataattgtaatacttttcttgaattccataaattaccttaatatatgagaatatgttcaagtagtcttttaaatatttctccttagtcacaattacttactaataaaaaagtgaccataaaaaactcttttttttctttgcctgtcctttcatgtcaagatgttgcttgaaaaattgtgggatatgccaaaatctagcggacaaaacataaggatttgaaaggtaaattaacgcaggagtgctgacactcactgtaggcagctttgatactttgcaattaaaattgtaacwgtaaaaagaaagaaaacttggcttagaaagcaagttgttctaatggcaaggaaaatattcaagttgaaacctcacagtatctgctttgccctcctccctactgggtccaattagttcacagaacattttttattttttcttttttgtagcactgtttataaggcatcagggaaatgatgttagctctctgccagtaacaacgtttaaatatacgtgtaaccagaatgagccggtttctacccccagaaaagggcttctttgcatgtgctctatataataatatgtctttagtgctgtcataatttatttcattattgcttcatgcatacatacattgtaattatcaaaaaagtttatgctgagaaagtcaccgatggccttattatttgcatgccagttctttaaaatgcatttccattgcacaattcattttaaaataagtttttgcactttcttacagtgaaaaaggatgaaactttccaagttgcaggtccaaggaagaaagtccaatgatcaagcwtgagaaacctattctccttcccttcactaagattttccaggggcagaga

SEQ ID NO: 280706 - DNA, 563 bp, Homo sapiens
attaagggaaatgcttggaggtattcattctatattagaatatcattgtcacactttgtaagtatcaagaacagtttatcttcatgatcctttcagaattacccagactcctcaggcaatgacattttaaagaggatttggctgagaataaaaggcttttgatgaaaaaaattaatttatgtcagaactgcacattccaaaaagtagccatctgggaagttacactgttttgtcgttgatattctccctggctcaagtggaagctgcccttgggacctttatatcccaccattataggccaacataaaagtacaacaagttttsttccaataaaaaaattctggataattattataattcattatacatgaacaatggattatattattattattattttcagggcagactatttgagatgagaaaaaactttagttaccacctagtccagtacctctctttacaaattgggaccacaaaagataccagactactctcttagctttggagccaaaattaagactcttttcttttcttttttttttttttttttgacacgcagt

SEQ ID NO: 280707 - DNA, 557 bp, Homo sapiens
ttttttttctttaatggtttttttttcagaagccttaaggtttcagattttgcctgtaaatagtaataaacattagtaatgacaatgaataaaaatgaatgtaaatgggtttaatctgaccggtgtgatcmtgttcaatcctggctaaccaaattctgaaaggcaattttgaaaacgaacgtggagtctgagagataaaaacggtgaacctcggtatctgctagtctgctgttcaaatagataaacctatggaatgatgagacaggggagtttgaagaggctatctgatgcgtcactcatttctctactcacagatgatggagaaacaaagccctgagaagaaaaactatgtctgcttttcccctttgcatcaagatattagagtcaactttatttgagctgattgttttctcaacttcacatcccattctattgcagtgtctgctcatcaaagaggaatgacagatcctccttcatcaacatgttttccttaggaatggtgccaggatgcagggcataagtgagaggacagttcccttggttatgaggtaactaaa

SEQ ID NO: 280708 - DNA, 557 bp, Homo sapiens
ttttttttctttaatggtttttttttcagaagccttaaggtttcagattttgcctgtaaatagtaataaacattagtaatgacaatgaataaaaatgaatgtaaatgggtttaatctgaccggtgtgatcatgttcaatcctggctaaccaaattctgaaaggcaattttgaaaacgaacgtggagtctgagagataaaaacggtgaacctcggtatctgctagtctgctgttcaaatrgataaacctatggaatgatgagacaggggagtttgaagaggctatctgatgcgtcactcatttctctactcacagatgatggagaaacaaagccctgagaagaaaaactatgtctgcttttcccctttgcatcaagatattagagtcaactttatttgagctgattgttttctcaacttcacatcccattctattgcagtgtctgctcatcaaagaggaatgacagatcctccttcatcaacatgttttccttaggaatggtgccaggatgcagggcataagtgagaggacagttcccttggttatgaggtaactaaa

SEQ ID NO: 280709 - DNA, 615 bp, Homo sapiens
tgaatttttctcttctttaatgacaaataatctttacttaaagataaagatgtttatacattttggttaattaagttgtctcratcatagaggtagtttgattgaatgttagtatactattttaaaaaataggagatctcaggcataaggacctactttaatgaaaaaataattaggcttaagaatgcaagtgcaaatggaagcagattcacaatattattttaatattaaaaattgtttagctgcctaccaggtgcctgcactcattctacgactcatgatacattgcatatataatacaactctggccccatcctatgaactttaaagtcttatgtaatctggcctctgtctgcctctttgactttggctgttgacactcccccacttactgaccatgcctcagcctcacttggcttccttcagttctttgaacatttagagcatcttttcaccttaggccattgcattgcccatcttgctgcctagggtactcttgtgcgtactgtcttgaaacatccttctctaaccatcctaaatatacagccaccttccccaaccgtgaagaccctttttgtcatataatcctatttagtattcttcatagtatctatt

SEQ ID NO: 280710 - DNA, 557 bp, Homo sapiens
tggacattatatatatgtttggatatggtctttttatcagcagtatataggcaatgattaatgactaaattgcagcagaaatgcatggcaagtaagatggatgaaaaaattcatgaatttttctcttctttaatgacaaataatctttacttaaagataaagatgtttatacattttggttaattaagttgtctcgatcatagaggtagtttgattgaatgttagtatactattttaaaaaataggagatctcaggcataaggacctactttaatgaaaaaataattaggcttaagaatgcaagtgcaaatggaagcagattcacaatattattttaatattaaaaattgtttagctgcctaccaggtgcctgcactcattctacgactcaygatacattgcatatataatacaactctggccccatcctatgaactttaaagtcttatgtaatctggcctctgtctgcctctttgactttggctgttgacactcccccacttactgaccatgcctcagcctcacttggcttccttcagttctttgaacatttagag

SEQ ID NO: 280711 - DNA, 615 bp, Homo sapiens
tgaatttttctcttctttaatgacaaataatctttacttaaagataaagatgtttatacattttggttaattaagttgtctcgatcatagaggtagtttgattgaatgttagtatactattttaaaaaataggagatctcaggcataaggacctactttaatgaaaaaataattaggcttaagaatgcaagtgcaaatggaagcagattcacaatattattttaatattaaaaattgtttagctgcctaccaggtgcctgcactcattctacgactcatgatacattgcatatataatacaactctggccccatcctatgaactttaaagtcttatgtaatctggcctctgtctgcctctttgactttggctgttgacactcycccacttactgaccatgcctcagcctcacttggcttccttcagttctttgaacatttagagcatcttttcaccttaggccattgcattgcccatcttgctgcctagggtactcttgtgcgtactgtcttgaaacatccttctctaaccatcctaaatatacagccaccttccccaaccgtgaagaccctttttgtcatataatcctatttagtattcttcatagtatctatt

SEQ ID NO: 280712 - DNA, 519 bp, Homo sapiens
cctccagggctccttaggtttttcagaaacaaagtatcttcttttgttgggtagatatgagtggtttttatttccttgaaggaaatcaaatacatttaaaacaaaatacatcrctcctttagcattatagaaaactttcaatgctgtaggtcatataagtattaataattacaaaataatcactgtcttgacaataggatggttttcaaatgtgtttttatattacatccttctatatggaaatgtgtgaagaattactactcttgtggattgcttcaaaaacactttgccaggtcattaattgtcagaaatcagaatatttaactgtatattgaaattacccaatatatgtattcagtgtacatgtatttaatatactttttagtgcaaatatgggcacacatcatttatatttgaaaggaactgagaaagacagaaacctgagtattttacagaatttatgcaaataaaagagatgactgccggaagccaaattagcatctgacttttaagaagaaa

SEQ ID NO: 280713 - DNA, 519 bp, Homo sapiens
cctccagggctccttaggtttttcagaaacaaagtatcttcttttgttgggtagatatgagtggtttttatttccttgaaggaaatcaaatacatttaaaacaaaatacatcactcctttagcattatagaaaactttcaatgctgtaggtcatataagtattaataattacaaaataatcactgtcttgacaataggatggttttcaaatgtgtttttatattacatccttctatatggaaatgtgtgaagaattactactcttgtggattgcttcaaaaacactttgccaggtcattaattgtcagaaatcagaatatttaactgtatattgaaattacccaatatatgtattcagtgtacatgtatttaatatactttttagtgcaaatatgggcayacatcatttatatttgaaaggaactgagaaagacagaaacctgagtattttacagaatttatgcaaataaaagagatgactgccggaagccaaattagcatctgacttttaagaagaaa

SEQ ID NO: 280714 - DNA, 618 bp, Homo sapiens
ggtagtatttagagctatctttatctcctacgactagattgcagactgtactaaaaataaggctttcaaatgaatcataaaggtggcagaacttgcaaagaagactgacttcctttggttttagtataaatgtagaagttgtcgtcaaggaatatcattttaaaattgaagattttggcagtggatcattgctcagaggtggtgagattcaaggtataaagccaagattataggcagctgacttgaaacaataaaaaaagataaagaattgagaagacgaagaagctacaagactgtagtgctagaaaatttattgatgaaggcttgtgactgtgaccagagaattcaatgcattttatcagagtgaatggggggaggagctcgtaaaaatatgtagcatggggcctgtaggccctttgttttggccaatttgtcccatttggaatggctgtatttatccaatgcctgtacctccattgtatctaggaagtaactaacttgctttcgattttacaggctcataggtgaaagggactttcattgtctcagrtgcaactttggactgtgaatttttgaggtaatgctgaaatgagttaagactttgggggactggtggga

SEQ ID NO: 280715 - DNA, 607 bp, Homo sapiens
atcttctttaactgaaactttatagctactgattagcaactcctcatttccgcctccgccagcccctagcaaccaccattccactgtagaagcctgtgaattttattattgtggatacttcatgtaagtggaaccatacagtatttgtccttctgtaactggcttatttcactcaggcagataaaatgtaagctgtgagggacctgtaacaaggttgagacataaggaagaagtgaggaagcaaaattcccagcttgcctccagcctagactctaaataaaagtaacaaaaggagtctacataggtcgcttgtgacattgccatgctttccagggcaggagamcagaaaaggatttggagctaaaaccccttatagcaaaatataggatatatttacgaatctatgtctatatctataaatttatatatgtataatatatactatgcatacacatatatgtttatgtatatacacacatatttgtatatattatacatatacgtgtgtgtgtgtgtgtgtgtgtgtaaccaaacatagatagggaattaaccaaggatacatgatactgggattctggctattttctcctagaaggcggaatgacag

SEQ ID NO: 280716 - DNA, 607 bp, Homo sapiens
atcttctttaactgaaactttatagctactgattagcaactcctcatttccgcctccgccagcccctagcaaccaccattccactgtagaagcctgtgaattttattattgtggatacttcatgtaagtggaaccatacagtatttgtccttctgtaactggcttatttcactcaggcagataaaatgtaagctgtgagggacctgtaacaaggttgagacataaggaagaagtgaggaagcaaaattcccagcttgcctccagcctagactctaaataaaagtaacaaaaggagtctacataggtcgcttgtgacattgccatgctttccagggcaggagaccagaaaaggatttggagctaaaaccccttatagcaaaatataggatatatttaygaatctatgtctatatctataaatttatatatgtataatatatactatgcatacacatatatgtttatgtatatacacacatatttgtatatattatacatatacgtgtgtgtgtgtgtgtgtgtgtgtaaccaaacatagatagggaattaaccaaggatacatgatactgggattctggctattttctcctagaaggcggaatgacag

SEQ ID NO: 280717 - DNA, 440 bp, Homo sapiens
agaagttacataaccagtccaaggttatgtgtgattatctttgaagaatcatcttgacatttctccaaactacatcattagcttcaacttctttctgtctttattcttttttaaggrcaagggcaagtgccaggacagatcttttaaaacactcaagtttctaatcatgctgctctgactccctttggtccacttagcttgatttcctgtacatatttctctaatacacttctgatgtgttttgtaatgtttcttgacactcaccctgattaagcaactggcccgaaattgcacgaggattaatgatagaactataaattaaaatttttcattctcctattcttttagtttattgagctatattgctttcccaaagatgcattatagattacaacatcttttcaaataaaggaaactcatttgtgtttccagtcctacaa

SEQ ID NO: 280718 - DNA, 440 bp, Homo sapiens
agaagttacataaccagtccaaggttatgtgtgattatctttgaagaatcatcttgacatttctccaaactacatcattagcttcaacttctttctgtctttattcttttttaagggcaagggcaagtgccaggacagatcttttaaaacactcaagtttctaatcatgctgctctgactccctttggtccacttagcttgatttcctgtacatatttctctaatacacttctgatgtgttttgtaatgtttcttgacactcaccctgattaagcaactggcccgaaattgcacgaggattaatgatagaactataaattaaaatttttcattctcctattcttttagtttattgagctatrttgctttcccaaagatgcattatagattacaacatcttttcaaataaaggaaactcatttgtgtttccagtcctacaa

SEQ ID NO: 280719 - DNA, 589 bp, Homo sapiens
ttgagaattcatgaagaacatgaaataacatctgaaagtgctagaattagaagaaatgttggaaaaggcacgggctttccatgtgaataggatggagcttgagatgattctcctcctgaggtcacaaaggaaaggatgacactgctgacatcttgattaattagttgatatgatattgtaatcaaataccaaattagatttcattacataatgcatatatttcttcaacaacatggccaccatctcctttctcataaatttattgcttctttttttcacttcccctggatttctaygcccatatgctaagtatggctattcatgacttctactctaagattcttcttgaatctgctcttagtgataatgtgccattatgaaactctcagagtctgtataattggttaatatcttcctcagaaatttgtgaggattccctaaaataagatacaggaagaaagcaagctgtaaaatacagtttttatatttaaacaacagctcacaatttttctaataaaagaataaactaaggcagagaatagtctctaaacaaccccctctccctgtggacaatgcagctggaaaaaac

SEQ ID NO: 280720 - DNA, 492 bp, Homo sapiens
aaacatataatctctactcattatttagtccttctgtgtcatgttcaataatggatttataaggtgttgctctctgaggttgaggtgttggttgtttctgccatcttatttgtttgtttgtttgcgatggattcctgctctgtcacccagaccggagtgcaatggcttgatctcctctcatcgaaacctccacctcctgggttcaagcaattctcgtgtctcagcctcccaagcagctgagacaacaggcgcttgccaccacgcccagctaattgttgtgtttttagtagagatgggatttcaccatgttggccaggctggttctgacctcagatgattcactcatctcagcctcccaaagtgatgggattasagacataagccactgcaccagaccttgctaacccttttttttttttaatgtattttactgggaatgctatatacttcatctgtgtcctgatattatgttggtgatattgtccaatacca

SEQ ID NO: 280721 - DNA, 539 bp, Homo sapiens
aattccctctgcttaaatacatataaagacatacatgagacaaaatagagaattgaaggaagtgagagctatggagggtgcttgtatattatcccaattgtctactgctgggttacaaacaacccaacactcagttgctagaacagtaataacaatcatttattttgttgcaaatctgcagtttggagatgtttctgaagagatgtttatctcagctttgtgaggcctcagctgggatttctcagccacagctggaggacccattcttacaatggcttacacacaagcctagtaagttgtcaggggctgtcagctgggcaatcagtcggggctattgctggggcctcccatcttgtccatayaggcttttccatggtactgcctttactttctcaacacatggatgcaaaagtaagtgttcaagaggcaaagtagaagctgatagtctcttatgggcctagaaattggtacacaccagcttttggcatattcctattgaccaagcagttctgcacccaccaagattcaagaggtaggaa

SEQ ID NO: 280722 - DNA, 1289 bp, Homo sapiens
atatataggactgaaagctcttttgcatatgaaatgaaaatgatatgcactatgctttgttgaagaataataagagatgtcttaagtatcacataagcccatctaaatgccttttacatagtgtcttcttttattcaattctagaagattttaaaaactgcttgaaattgattaggccaccttggttccctaacataataaagcttagaaaatagatttcactgtgctgcagtatattgtaatttaaactgagtgattttctagccaccacaggtaaattatgagccaaaccacagtatggccttaggtgaacctatttgagaaacgagtaacttacatgttaacttgttttagcagagaaagcacagaagatgctatttattaaccttgttctctgcaggtagagaatttgtatgttacagtgcatctgagtggttggactgaattgaccaatttggaaaaattgaccagtcacctcagarctaggcatacacaaccaggtttaattataatttagatgtcgatatcagcgttttccccagaacagttgaggtgatttgccgctgtgttatattaaactaggataagagtcaaccaaagcattcaactattttgtttcctgtgggtagcacaaaaataacctatattaaaagctctatctataatagttgtataatcaccacawgtacttatacttctttagccttggtagccagtaaaaacaatatgattaaactgtagagctgaccctgaatttcactgagaccagtctaaccatttaaatcataactttatgaacaactttttattgccatcacatcatattcttgtgaggaaaagccaacagcaatattagatgacttcctgaaaatattttctcaaacattttttctgtgaaaattatactataggaaaaatttgtgtataattttaatatctcttwtattttttcttataatttattttgatttggctttcctgtttcatgtttattctagaaaattggaaattacagaaaaatatttggaagaattaaaattattcatagttatacttccaaaaataaatattgttgatatttggagagtattctttttaaatgcttttattttgaaagctaagaacatatttgcatatatagtttgtgacctgatttcttgatattttatgatgccaatacaatttttttattaacagaaatttccaagatattccatagtatccagatttaaccaattgcctgttgggggccattttggttgttttcaactttattgcttttgcctgcc

SEQ ID NO: 280723 - DNA, 597 bp, Homo sapiens
ttgttataaagtgagattactcctcctgcatggcctctttgtttgcatgtgctttcttctgctctgcattctgccatgagttatagaagcataagcccctcaccagatacagctgcccaatcttggaytttccagccaccagaaccatgagctaaataaacttctttctttataaattacccagattcaggtattctgttatagcaacattaaatgaactaagacaacctcccagctgggcttggcctgactgactccccttcttccatggaatcctttatcaaggtttctgggctaccacctgcctagtttccctcctatggcattgcctgctgctgcttggccctctttgctgattctgtttttatactaaatttctaaatgttgaagacctcagagctttgtcaggaatcctcttctcttcttttccttctctataaactcttaccttaggaatcttcacagtctcttaaagttatgcactaattatacccaaaacttacatgtccaacccagaactcttgagctccagacccatttatccaactgcctacatccattaagatggtaaatggacatttctagcttaaccaagcc

SEQ ID NO: 280724 - DNA, 572 bp, Homo sapiens
ctacattacatctccccaaacaacaacaatcatttgctccatgtcaagtctttcctatgttattaagtgatgacacttgccaggagcaggtccaggttttatggtcctgaagcttaaacaatttggggagccctctttcacataaaaaatacaaaatttaaatacatatttagtatgaaagtatttgtttagtctgagaaaaggaaactrcaatgaattacaaatttttaattactgaaaaataccacaataatcacaaagtcaagcaagataaaattaaattttattaattacctgcctgacaactctctataatacctataatacttctttcctaccctttggctgcttgctctttgattgcctttttgtgttacaacaattttataatatgttctatagcaagaaaaggataaaaatttagatcacgtctcttgcaaggttaataaaaaattcatttaaaaaaattatggatagtttcaaaacattaattttagcttcacaactccctactggcattatttaaataaaacatacttaagactagatagttgcacactttggactgatca

SEQ ID NO: 280725 - DNA, 572 bp, Homo sapiens
ctacattacatctccccaaacaacaacaatcatttgctccatgtcaagtctttcctatgttattaagtgatgacacttgccaggagcaggtccaggttttatggtcctgaagcttaaacaatttggggagccctctttcacataaaaaatacaaaatttaaatacatatttagtatgaaagtatttgtttagtctgagaaaaggaaactacaatgaattacaaatttttaattactgaaaaataccacaataatcacaaagtcaagcaagataaaattaaattttattaattacctgcctgacaactctctataatacctataatacttctttcctaccctttggytgcttgctctttgattgcctttttgtgttacaacaattttataatatgttctatagcaagaaaaggataaaaatttagatcacgtctcttgcaaggttaataaaaaattcatttaaaaaaattatggatagtttcaaaacattaattttagcttcacaactccctactggcattatttaaataaaacatacttaagactagatagttgcacactttggactgatca

SEQ ID NO: 280726 - DNA, 483 bp, Homo sapiens
cactcaaacatgccaagcttatttccaacaggacctttgcacatgctgttcctcccacttacaacatgcctgaccagctctgcaaracaactatgctcatccttcaggctcaggttaggcagcccctctcacaggggcctctctcattgccttatctcacatagcactctccctccaggtttttaccatatgcttccttttatagcattttttttttagtatcaagaagtatcacattgtatatatttttatacatttttgtctctacgagaatattggccctcaaactgagatacacaggcctcctgaggtacatgaggccttttaaggatataagggtataaagaatcagttttaagggaatctttttccagatacctaatttccgtatgaaatttacctgcaatggagacattacgctggttctccatttcccattcccctgtcacagtcgtgcttctcttatgaacatgccactcactc

SEQ ID NO: 280727 - DNA, 274 bp, Homo sapiens
ctgccaccatagccactttgttcatgagcccattgggtgatgacaggggagggtggggaaagagactragtggtatccacagaacaagtcatcctatccacttgattattaaaatcctcctcacactctgatgagcactcacatgggatacaaatatcttcacagtttttgaccactcaagagaggtccacctacatacctcttccccaaatttctttgtcaccaattttccaatcatgcttcttccaagtccctgaccatccagccaaaccat

SEQ ID NO: 280728 - DNA, 618 bp, Homo sapiens
ttgcatagcagcctggacctactgcagagccttctcctttctggaccccactcaaaactggcagcctttcaggtcactcaataaatgggcaggagtaacacccctaaatgaggaatgtgttgcctccaaaatccaaataggcccactaggcactgtgcctctttcttggttgtaggaggggccaaatgcagcaacttatccctcaccttagaaggaatatctaatactccacaggccccacagcactggactcctagaaattttactgaggtggaaggtccctgatttttagtcagggattttagattttagatttatttcccatcccctggcacacaaatgtctcaccagtaagtccagcgtgcttgctacttcttgctcactggatccaatcagcacaatgtcatcaatgtaatggaccagtgtgatatcttgtggaaggggaaaatgattaagatmttgtgaaaactcactcactatcacgagaacaacatggggaaaaccgcccccatgattcaattacctcctaccaaatccctcccacaacacatgaggattatggggtttacaattcaagataagatttggatggggacacagccaaaccatatcaacatc

SEQ ID NO: 280729 - DNA, 515 bp, Homo sapiens
gagtgcagtagtgttgatctcagctcactgcagcctcaacctccctggctgaagcgatcctcccacctcagcctcctcagtggctgagactacatgtgtgttccaccatccctggctttttcttttctttttttttttttttttgagacagagtctcgctctgttgctcaggctggagtgcagtggtgcgatctcagctctctgcaacatccacctcccaggttcaagcgattytcatgcctcagcttcctgagtgcctgggattacaggcatgcacaagtggatagggtgacttgttctgtgcaccaccatgcctggctactttttttttttttttttttttttttttggtacagacagggttttgccatttgggccaagccagtctcaaactcctgacttcaagtgatccacccacctcagtattccaaagtgctgggattacaggtgtgagccatcatgcctgggctaatttttttattttttgtagagatggggtctccctgtgttgccca

SEQ ID NO: 280730 - DNA, 593 bp, Homo sapiens
catactatagaggagcattatacagatcattagtgtgcagccctctgaattctcatgaagtgaatacacctatgtaacccccactcagatcaagatctagaacatgacctgcacccagacaccctccttatagccctcttccatcactatccctgaatataaccagaatcctgactcctcgttcattgattagtttgatctggtttgaactttatatgattggaatcatacagtaatattcttttgtgcctagcttctttaactcattattacatctgtgagattcatagcagtaccatagtattgtatagcaatgatttagtattccattggaagaatataccactatttatccactcctccactgccagacaaatgagttgttaccagttgtttactattactaatagtagtgctacaaatatgctggtgcaaagtgtatatatctgataaagaatatagataaataatatatgtagaatatataaagatttttacaaatcartaagaaaaaaataagcaactcaataaaacattaattgaacaagtacttttttttttttttttgagacagggtctctctctgtcaccca

SEQ ID NO: 280731 - DNA, 577 bp, Homo sapiens
caaaatcatttctaccctgggttatgttttcttcttgtagaccttttatatatccatagttgatttatgtgaaaatggcgggaaacgccctaccaccaatagcagtgctagtttcaccaaagaacaagcagatgccattcgcagaattcgaaatagtaaagacagttgggacatgctgggagtcaaacctggggcctcaaggtaagcgctctgggatacttagtgctgattgctatcataaagaaagactccatcaccaaaattataggtgcagtatatcttcctccagttggctggaaatacgaagatgtatgaaaatatattagaatgactcagtttcactgaattagctgaataccaaagagacaaaatagagggcacagttgcctggtgagaaaactgtgtcgtgtacgtgcataaatacttcatgaaatggtatgctctgctttcakctgtctggaacaagaagagctttgaaaagaactaacaaaagagaattcttcaatcatagaatgttagaggaggaaagcacgttggcaatcaacttgtcaaacatttcattttataggtgggaaaa

SEQ ID NO: 280732 - DNA, 577 bp, Homo sapiens
caaaatcatttctaccctgggttatgttttcttcttgtagaccttttatatatccatagttgatttatgtgaaaatggcgggaaacgccctaccaccaatagcagtgctagtttcaccaaagaacaagcagatgccattcgcagaattcgaaatagtaaagacagttgggacatgctgggagtcaaacctggggcctcaaggtaagcgctctgggatacttagtgctgattgctatcataaagaaagactccatcaccaaaattataggtgcagtatatcttcctccagttggctggaaatacgaagatgtatgaaaatatattagaatgactcagtttcactgaattagctgaataccaaagagacaaaatagagggcacagttgcctggtgagaaaactgtgtcgtgtacgtgcataaatacttcatgaaatggtatgctctgctttcatctgtstggaacaagaagagctttgaaaagaactaacaaaagagaattcttcaatcatagaatgttagaggaggaaagcacgttggcaatcaacttgtcaaacatttcattttataggtgggaaaa

SEQ ID NO: 280733 - DNA, 635 bp, Homo sapiens
atacatatacatacaaacaaatctgtaacacaaaattatatactatgtgtatttacactacctaatatatttatatacatataaacacaaaacacaaaattccttttatatttgcaagttttgccaaagatgtggagcaactggaactctcatacgttgctggttggaatagaaaatggcacatttactttggaagacagtttggtagtttcttaaaacgttaaaaagtatgacccagccatgctactttgaagtgttttccaaaaggaaagacagcatatgtccacacaaagactagtacatccaccccaagtatgtggctcatgtkagacacctcatcccaaagctgcacacatacacatacgttcatcccagcttaacagcccaaaactagaaaccaaaatgtccacagacaggtgagtggataaacaaagtgtactgtatctctacaatggaatactactcagcaataaaaaggaatgagtaactaatagatgtaacaaaatggatgaatctcaaaataactgtgccgagtgaaagaagccaaccaccccccgaaaagagtactcactgtatgattccatctgcataaaattctggaaaatgaaaactaacctacagtgacagaacccaca

SEQ ID NO: 280734 - DNA, 570 bp, Homo sapiens
ggggtaaggattttacattcataaaaatttctgtatttcttttgaagtattttgattaccactctacttgtgtgaataacttttattttccagtgacctatggttttattttgatctagttttttgaaacttttgacatctttgtcatgttcccycaggatgaaaatctaaattaagtctttttgtattaaataattagacttatttggcagatctttgtaaagtattatcaaatgataattgatactagatctttctgttacaattatgggtacattattgacataaatgttccaaaacttatataaatttacaaaaagctaatttgttatcagtcataactttgattactatattaaatcttaagttatatttgtaggggtatgttattaatgtgaatattctaaagatgatataaaatttatgaaagcctgatgtctctaacatgacactgtcataatgattctggttgttatcttaaaatgctgcaaataatagaaataacaaaatttccttgtctattgggaactttcatcaaatcttaaccatagctacaccaaattttggtca

SEQ ID NO: 280735 - DNA, 515 bp, Homo sapiens
actgcctatccataggcagaatgaaactggctcctgttcactgctctgtgtcttctgttcctagaagcccagtctctatggaccagcaggtattgggagatccatagctaagacaccagaacctgctgcaagcctagaaatggaactgttgacattcagggatgtagccatagaattctctccagaggggtggcaatgcctgggcactgcacagcagaatttgtattagcatccgatgttagagaactacagaaacctggtctctctggctttgtgttctcatttcacccaagattattgaccagagcagggcataaaagattcattccaaaaagtagtactaagtagatatggaaaatacagacaaaagaatttacaattaatgaaaggctgtaakggtgtggatgagggtaagatgcagaaaggaggttataatgaacttagccaatgattttcaactacatagaacaaaatatttttttcaaatgtcccacgtttatttacatatgaaatgt

SEQ ID NO: 280736 - DNA, 547 bp, Homo sapiens
atatgcatccaacacaagaattatgtgtgcacccagggagcacccagattcataaaaacaagttcttagagacctgtgaggagacttaaatttccacacaatcatagtgggagacttcaaccctccactgacagtattagacagatcatcaaggcagaaaactaaaaaatatatgacctgaactcaacacttgaccaaatggaactaacagacatctacagaattccccaccccaaaacaacagaatatatattattctcatcaccacgtggtgcatactctaaaactgaccacacaatcagacaaaaaacaattctcaamaaatttttaaaaattgaaatcataccaattacactctcaaaccacagcacaataaaaatagaagcaaatactaagaagattgctcaaaaccataaaattacatggaaattgaacaacctgctcttgaatgactgctaggtaaattatgaaattaaggcagaaataaagcttcaaaaccaaagaaaaaaaagataagacataccagaatctgtgtgacacagctaaa

SEQ ID NO: 280737 - DNA, 1196 bp, Homo sapiens
aacccagaaatgaagccacacgtctacaactaactgatctttggcaaaggtgacaaaaataagcaataggaaaagggcttcctattcaataaatgattccaggataactggctatctagatgccagaatgaaactagacccctacttatcaccatatacaaaaattaactcaagagggattaaagacttaaatgtaagacttcgaactataaaaactcccagcactttgggaggccaaggcaggtggatcacctgagctaaggagttcaagaccagcctgggcaacatggtgaaaccccatgtttacyaaaaaaaatacgaagaattagctgggcgtggtggcacacgtgcctgtggtcccagctattcagaaggctgaggtgggaagattgtttgagcctgggaggtggagattgcagtgagtcaaaatctcatcaccacactccagcataagggacagaatgagacccctctcaaaaaagaaaaaaaattctggaactagagagtgttaagaatgtcctaaatgtcactgaatgatacactttaaagtgcttaatcttatgtaaatttttcctcaatttagaaactttttcaaattcttgaaawagatcagcggtggcattagattgtcctgagtgtgacctgaaccctgttgtaagttgctcatgcagggggatataggttgttcactccttatgagaatcgaatgcctttctgatctgtcaccatcttccgtcacccccaaatgggaccatctagttgcaggaaaacaagctcagggctcccwctgattctacattttggtgagatataattatttcattatatattaataataatagaaataaagtgcacaatgaatgtaatatacttgaatcatcctggaaccatcccccacctcaggttcctggaaaaattatcttccacaaaaccagtccctggtgccagcatggttggggacacctggttaacagatgtgagacccctttgccttgtcttggaataatgtgcagatatgcattgtgtgaatgacatctgatggcgccatcttgccctgtacatcattttagggacagctccagtatttcatgaaaattaaaatttcttctagtgacgaacaaaatgatactcagaagcaattttgtgaagaacagaacactggaatattacacgatgagattctgattcatgaagaa

SEQ ID NO: 280738 - DNA, 468 bp, Homo sapiens
cctggaaccatcccccacctcaggttcctgkaaaaattatcttccacaaaaccagtccctggtgccagcatggttggggacacctggttaacagatgtgagacccctttgccttgtcttggaataatgtgcagatatgcattgtgtgaatgacatctgatggcgccatcttgccctgtacatcattttagggacagctccagtatttcatgaaaattaaaatttcttctagtgacgaacaaaatgatactcagaagcaattttgtgaagaacagaacactggaatattacacgatgagattctgattcatgaagaaaagcagatagaagtggttgaaaaaatgaattctgaggtattttctttagttattttcaaatgtttttatatgtgtgtatattttaaagaactgtattttggaaatataaaggatttttaagtcatatatatgtgtgtatatattctatatat

SEQ ID NO: 280739 - DNA, 468 bp, Homo sapiens
cctggaaccatcccccacctcaggttcctggaaamattatcttccacaaaaccagtccctggtgccagcatggttggggacacctggttaacagatgtgagacccctttgccttgtcttggaataatgtgcagatatgcattgtgtgaatgacatctgatggcgccatcttgccctgtacatcattttagggacagctccagtatttcatgaaaattaaaatttcttctagtgacgaacaaaatgatactcagaagcaattttgtgaagaacagaacactggaatattacacgatgagattctgattcatgaagaaaagcagatagaagtggttgaaaaaatgaattctgaggtattttctttagttattttcaaatgtttttatatgtgtgtatattttaaagaactgtattttggaaatataaaggatttttaagtcatatatatgtgtgtatatattctatatat

SEQ ID NO: 280740 - DNA, 1067 bp, Homo sapiens
agatcagcggtggcattagattgtcctgagtgtgacctgaaccctgttgtaagttgctcatgcagggggatataggttgttcactccttatgagaatcgaatgcctttctgatctgtcaccatcttccgtcacccccaaatgggaccatctagttgcaggaaaacaagctcagggctccctctgattctacattttggtgagatataattatttcattatatattaataataatagaaataaagtgcacaatgaatgtaatatacttgaatcatcctggaaccatcccccacctcaggttcctggaaaaattatcttccacaaaascagtccctggtgccagcatggttggggacacctggttaacagatgtgagacccctttgccttgtcttggaataatgtgcagatatgcattgtgtgaatgacatctgatggcgccatcttgccctgtacatcattttagggacagctccagtatttcatgaaaattaaaatttcttctagtgacgaacaaaatgatactcagaagcaattttgtgaagaacagaacactggaatattacacgatgagattctgattcatgaagaawgctatgttgccctggacttcgagcaggagatggccatggcggcctccagctcctccctagagaagagctacgagctgcccgatggccaggtcatcaccatcggcaacgagtggttccgctgccccgaggcgctcttccagccttgcttcctgggcatggaatcctgtggcatccatgaaactaccttcaactccatcatgaagtctgatgtggacatccgcaaagacctgtacaccaacacagtgctgtctggcggcaccaccatgtaccctggcatggcccacagaatgcagaaggagatcgctgccctggcgcctagcatgwtgaagatcaggatcattgctcctcccaagcgcaagtactccgtgtgggtcggtggctccatcctggcctcgctgtccaccttccagcagatgtggatcagcaagcaggagtatgatgagtcaggcccctccattgtccaccgcaaatgcttc

SEQ ID NO: 280741 - DNA, 547 bp, Homo sapiens
aaggaaaaggtattattctttaagctgatacatactaccaataatattcattttaaggtctcaaccmcagagataaaagtcagactaggtcaggaatggtggctcacacctgtaatcctagcatttggggaggctgaggtgggtgaatcgcttgagcccaggagttcaagaccagcctgagaaacatggcaaaaacctcatctctactggaaaataaaaaaaaataaaaaaaataaaataaaataaaaaaaactgaggttggaggaccatctgagcttggagaggtcgaggctgcagtgagctgtgatcacaccactgcattccagcctgggaaacagagtgagaccccatctcaaaaaaaaaaaaaaaaaaaaaaaaagtcagattaatgttattggaaagatttaaagaaatcagcacatatccaaccccaactcttctagagataccttaagtttctgagacataagaatttacatattacatttatgtattgagtggttcttaagcaggagtgtatccagattttgagaaaattgttgttgtt

SEQ ID NO: 280742 - DNA, 534 bp, Homo sapiens
agcagtcctatgagagtgacaagactttttaggaaattgtagtgcactagctacagccatagcaatgattcatgtaattgcaaacactgaatagcctgctattactctgccttcaaaacaaacatttaactttcccatgaaaaaagcacactatttattatctctctttactcgctgtrttaatgaaagagcatcctatatgaatacaaagagcatagcccttggatgacattcaacttgagctggaatcctacttgaagctctgtcacttcctggctgttgcttagccttttggggtctcagtttcctcatcaataaaataggaatgaaaatagtagctttcttacgggaaaccactgtaatgcttaaatgagactctgcacaaaagatatagaatagttcctaacacaaataacagctcaataattgttagatattttaatttttactaataccactaaagacaacatttgaattgagatgatacaattatacctgcactttcaggtgtgttttaaatattacagctaacat

SEQ ID NO: 280743 - DNA, 534 bp, Homo sapiens
agcagtcctatgagagtgacaagactttttaggaaattgtagtgcactagctacagccatagcaatgattcatgtaattgcaaacactgaatagcctgctattactctgccttcaaaacaaacatttaactttcccatgaaaaaagcacactatttattatctctctttactcgctgtattaatgaaagagcatcctatatgaatacaaagagcatagcccttggatgacattcaacttgagctggaatcctacttgaagctctgtcacttcctggctgttgcttagccttttggggtctcagtttcctcatcaataaaataggaatgaaaatagtagctttcttacgggaaaccactgyaatgcttaaatgagactctgcacaaaagatatagaatagttcctaacacaaataacagctcaataattgttagatattttaatttttactaataccactaaagacaacatttgaattgagatgatacaattatacctgcactttcaggtgtgttttaaatattacagctaacat

SEQ ID NO: 280744 - DNA, 526 bp, Homo sapiens
tttttgattcgatatcagcaccgtataagagcagtgctttggccattaatttatcttcattgtagatagcgtagtgyagagtggtatttccatactcatctggaatgtttggatcagtgccatgttccagcaacattaacgcacattcatcttcctggcattgtacggcctgtcagtattagaccaaaaacaaattacaaatcctaggaattcaaaataacattccacagctttcaccacctaagttatatttaaaggagaaaactcatttttatgctatgtattgaaatcaaacccacctcatgctgatatagttggctactgcatacctttgtcagagctgtcctctttttgttgtcaaggacattaagttgacatcgtctgtccagcaggagttttactactcctgaattcccattggcagaggccagatgtagagcagtcctatgagagtgacaagactttttaggaaattgtagtgcactagctacagccatagcaatgattcatgtaattgcaaacactg

SEQ ID NO: 280745 - DNA, 521 bp, Homo sapiens
gtctatgagatgacttagacctgaataacatgttcggtgcaaaatatattgttagtatgtatgtcgaaaattacagaatgtcagcttgctacttctccgtggaaactaaaataaataaaagtagacttttggtctcccatgtcagctggaattgaacatcaatataaagcattatcctaacagacatctactggctgagagtttgagtctgtagagaaggatcgttggtccaagtcaggtcttaacatccattggtttttctgcccttggtgtgattgatcaactccgtaatagtggacaatcacattatctactttaatgagatatttatgaataaatttagttayaaactatgacatagttgagatgccctgaattataagccataaagagtaggacaactaagaagcaaaattaggacttaataacattttctgaaaactacaacatttgcatattagaacctatgaacaaaatacgcattgggttttatttgggattccaagataattttagtcata

SEQ ID NO: 280746 - DNA, 521 bp, Homo sapiens
gtctatgagatgacttagacctgaataacatgttcggtgcaaaatatattgttagtatgtatgtcgaaaattacagaatgtcagcttgctacttctccgtggaaactaaaataaataaaagtagacttttggtctcccatgtcagctggaattgaacatcaatataaagcattatcctaacagacatctactggctgagagtttgagtctgtagagaaggatcgttggtccaagtcaggtcttaacatccattggtttttctgcccttggtgtgattgatcaactccgtaatagtggacaatcacattatctactttaatgagatatttatgaataaatttagttataaactatgacatagttgagatgccctgaattataagccataaagagtaggacaactaagaagcaaaattaggacttaataacattttctgaaaactacaacatttgyatattagaacctatgaacaaaatacgcattgggttttatttgggattccaagataattttagtcata

SEQ ID NO: 280747 - DNA, 521 bp, Homo sapiens
gtctatgagatgacttagacctgaataacatgttcggtgcaaaatatattgttagtatgtatgtcgaaaattacagaatgtcagcttgctacttctccgtggaaactaaaataaataaaagtagacttttggtctcccatgtcagctggaattgaacatcaatataaagcattatcctaacagacatctactggctgagagtttgagtctgtagagaaggatcgttggtccaagtcaggtcttaacatccattggtttttctgcccttggtgtgattgatcaactccgtaatagtggacaatcacattatctactttaatgagatatttatgaataaatttagttataaactatgacatagttgagatgccctgaattataagccataaagagtaggacaactaagaagcaaaattaggacttaataacattttctgaaaactacaacatttgcatattagaacctatgaacaaaataygcattgggttttatttgggattccaagataattttagtcata

SEQ ID NO: 280748 - DNA, 613 bp, Homo sapiens
aacaaaatacgcattgggttttatttgggattccaagataattttagtcataaagtttaggaacagattattccattgctttactatttctctgagcatttaaaaaatgttatctcgttaaatctttataacaacctagtgaaataaggcagcaaagtcctcactttgttgaagaagacattgagcctaagagaagcaagttgcccaagaacaaatagctgttcattatggagctaggacttatgcagagttgggacactttctattatgtcatgctaatgctagctaatttactgggtcacagtgcccttgatttatgagtatttcaccttacatttttttcgtctttaattagaagcttaaagagaagtttgtagaatgtactcataagtggatgggataatactattaagttctgatattctgatattgtttgaaatactcttaataattytacatttggtaagtttttttatatcagtattaaaatagtaatttggtttattacatttttatacatagaatttgccagttactttctgactacaaagaaaaacagatgctaaaaatctcttctgaaaacagcaatccaggtaagacttgtgatagtgaa

SEQ ID NO: 280749 - DNA, 535 bp, Homo sapiens
ctttactatttctctgagcatttaaaaaatgttatctcgttaaatctttataacaacctagtgaaataaggcagcaaagtcctcactttgttgaagaagacattgagcctaagagaagcaagttgcccaagaacaaatagctgttcattatggagctaggacttatgcagagttgggacactttctattatgtcatgctaatgctagctaatttactgggtcacagtgcccttgatttatgagtatttcaccttacatttttttcgtctttaattagaagcttaaagagaagtttgtagaatgtactcataagtggatgggataatactattaagttctgatattctgatattgtttgaaatactcttaataattctacatttggtaagtttttttatatcagtattaaaatagtaatttggtttattacatttttatacatagaatttgccagttactttctgactayaaagaaaaacagatgctaaaaatctcttctgaaaacagcaatccaggtaagacttgtgatagtgaa

SEQ ID NO: 280750 - DNA, 500 bp, Homo sapiens
tctgtgctttttcaacagaatttacaaagaaaacattgctatttatgttttcacttgtccacttaacatataactatcaaatgtcttttagatggtaaccatttttctaatgctatagaccacagacaattaaaamtacagacaggagctttttcttatcattgccattttcattattttactactttattcagtgcttactgtgtgctagatgcccactggaagcttataattatgatttattatatattgattatgtgccagacatatgaggaatgaaagttttgggaaaaagtaggtatgatttaaggtaagcatgcagagagagaagaatttttctaggtaaagaagcagaagaagaatgtttggcagaaggaacatgcagcgaggtcgtgtgtttgccagaaggaacatctaatgagattgcctgtttgggaggaagagcagcaagtgcaaaagacaagatgcttgagtgaacatggcagggtttctgagcagtt

SEQ ID NO: 280751 - DNA, 500 bp, Homo sapiens
tctgtgctttttcaacagaatttacaaagaaaacattgctatttatgttttcacttgtccacttaacatataactatcaaatgtcttttagatggtaaccatttttctaatgctatagaccacagacaattaaaaatacagacaggagctttttsttatcattgccattttcattattttactactttattcagtgcttactgtgtgctagatgcccactggaagcttataattatgatttattatatattgattatgtgccagacatatgaggaatgaaagttttgggaaaaagtaggtatgatttaaggtaagcatgcagagagagaagaatttttctaggtaaagaagcagaagaagaatgtttggcagaaggaacatgcagcgaggtcgtgtgtttgccagaaggaacatctaatgagattgcctgtttgggaggaagagcagcaagtgcaaaagacaagatgcttgagtgaacatggcagggtttctgagcagtt

SEQ ID NO: 280752 - DNA, 500 bp, Homo sapiens
tctgtgctttttcaacagaatttacaaagaaaacattgctatttatgttttcacttgtccacttaacatataactatcaaatgtcttttagatggtaaccatttttctaatgctatagaccacagacaattaaaaatacagacaggagctttttcttatcattgycattttcattattttactactttattcagtgcttactgtgtgctagatgcccactggaagcttataattatgatttattatatattgattatgtgccagacatatgaggaatgaaagttttgggaaaaagtaggtatgatttaaggtaagcatgcagagagagaagaatttttctaggtaaagaagcagaagaagaatgtttggcagaaggaacatgcagcgaggtcgtgtgtttgccagaaggaacatctaatgagattgcctgtttgggaggaagagcagcaagtgcaaaagacaagatgcttgagtgaacatggcagggtttctgagcagtt

SEQ ID NO: 280753 - DNA, 500 bp, Homo sapiens
tctgtgctttttcaacagaatttacaaagaaaacattgctatttatgttttcacttgtccacttaacatataactatcaaatgtcttttagatggtaaccatttttctaatgctatagaccacagacaattaaaaatacagacaggagctttttcttatcattgccattttcattattttactactttattcagtgcttactgtgtgctagatgcccactggaagcttataattatgatttattatatattgattatgtgccagacatatgaggaatgaaagttttggraaaaagtaggtatgatttaaggtaagcatgcagagagagaagaatttttctaggtaaagaagcagaagaagaatgtttggcagaaggaacatgcagcgaggtcgtgtgtttgccagaaggaacatctaatgagattgcctgtttgggaggaagagcagcaagtgcaaaagacaagatgcttgagtgaacatggcagggtttctgagcagtt

SEQ ID NO: 280754 - DNA, 330 bp, Homo sapiens
aaaaactaaagcaggaaaatgaaatgtttatgtgtttgatggggagggtggtgggaaagytgagatggccagaagagtccctgctgagaaagggttttttttttctaatacaaaaaaccttttatttgtatatcaaagactctaagaaacgatgacataaggttaacagcgctgatgtcaagatacaaataggtttgaagttagagatgataaatcactttgtttcattgaaccttgccttgattaccttagagagcattccttgtatgctcccaattgcatcttaagcatgatgtgtctgggtagtacacggctcttcctcagaaagtg

SEQ ID NO: 280755 - DNA, 330 bp, Homo sapiens
aaaaactaaagcaggaaaatgaaatgtttatgtgtttgatggggagggtggtgggaaagttgagatggccagaagagtccctgctgagaaagggttttttttttctaatacaaaaaaccttttatttgtatatcaaagactctaagaaacgatgacataaggttaacagcgytgatgtcaagatacaaataggtttgaagttagagatgataaatcactttgtttcattgaaccttgccttgattaccttagagagcattccttgtatgctcccaattgcatcttaagcatgatgtgtctgggtagtacacggctcttcctcagaaagtg

SEQ ID NO: 280756 - DNA, 945 bp, Homo sapiens
agtgaggtcctgaaagccaagtgaagacgccgttagggaggagacgccctccactggctcaaatattgctgacagattaaataaaatgaggtgtaagaaaaaatgcataatttacagaaaaaaaattgtgataatcttgaggaaaaacaatgttggaggactgctgaaattgaagacgcyggtgtgagattaagagtgaatgaaaagaaaatttgagttcgtgagtgtggacagttcttttaaggacatcatgcttaggagtcatgactgagaatgttgtaattttcttccacagtcatggaaaagtaatagacaaatagtttcaagttttatataacaggtgtagttttcaaattttatataacaataatatattttaaaggttataaaaattatacacatgtggcattaaaaatgccagactgaggtgttaaattcttaaaactatagaactaaaagtcgccttgaacatwagtgaggtcctgaaagccaagtgaagacgccgttagggaggagacgccctccactggctcaaatattgctgacagattaaataaaatgaggtgtaagaaaaaatgcataatttacagaaaaaaaattgtgataatcttgaggaaaaacaatgttggaggactgctgaaattgaagacgccggtgtgagattaagagtgaatgaaaagaaaatttgagttcgtgagtgtggacagttcttttaaggacatcatgcttaggagtcatgactgagaatgttgtaattttcttccacagtcatggaaaagtaatagacaaatagtttcaagttttatataacaggtgtagttttcaaattttatataacaatwatatattttaaaggttataaaaattatacacatgtggcattaaaaatgccagactgaggtgttaaattcttaaaactatagaactaaaagtcgccttgaacat

SEQ ID NO: 280757 - DNA, 548 bp, Homo sapiens
gttcactaaaaagaaaagaaaatgccttttccctcacatttgccaatactggttatttttcaaataaattaatgcctggaaaaatggtaactcattgttcgctgattttcatttttctgattaaygggcaaggctgaatatcctagtaaaactataaaatttgttcatcatgaatattagcccaaactagggttagtttgacagcacatagttatctcctgttcaatgttgccataggcttacctgtgatactcttcactttcgttgtcaggaaattgctgattttcaggtgttctgctcttcctttgaggaattaatccatcatcaccattgccagcagtgacaccattactcaggttttctagtaatcccacattattactttcatgcttcttcatttcttcttcaaccttgagtgggatattaaggatagttatcactttattgaataaaaagaacctttttaattgattctatcaattgactcagtttgtcattattttagtcattaaaaatatttcacacttaaatttgatcatatatataga

SEQ ID NO: 280758 - DNA, 547 bp, Homo sapiens
tttgacagcacatagttatctcctgttcaatgttgccataggcttacctgtgatactcttcactttcgttgtcaggaaattgctgattttcaggtgttctgctcttcctttgaggaattaatccatcatcaccattgccagcagtgacaccattactcaggttttctagtaatcccacattattactttcatgcttcttcatttcttcttcaaccttgagtgggatattaaggatagttatcactttattgaataaaaagaacctttttaattgattctatcaattgactcagtttgtcattattttagtcattaaaaatatttcacacttaaatttgatcatatatatagaaatattaccatataactttaagatgtaattatcatmtcattaatatatcacagaaatttttgtaaagtttgcttcatttctgtttcaatgaatgaaacagaattttccaaaattcaaaaagggccctccttcattttatgcttttattctcaatcactcttcagaatcttatgtatgtatttaccccatttgact

SEQ ID NO: 280759 - DNA, 627 bp, Homo sapiens
tattactttcatgcttcttcatttcttcttcaaccttgagtgggatattaaggatagttatcactttattgaataaaaagaacctttttaattgattctatcaattgactcagtttgtcattattttagtcattaaaaatatttcacacttaaatttgatcatatatatagaaatattaccatataactttaagatgtaattatcatatcattaatatatcacagaaatttttgtaaagtttgcttcatttctgtttcaatgaatgaaacagaattttccaaaattcaaaaagggccctccttcattttrtgcttttattctcaatcactcttcagaatcttatgtatgtatttaccccatttgactcatgggaacacgcaaataaaaagacaaagatgcaaaatgtgtcttctgtctttaccacctagattttacattaaacagtcagatttagaggatgacacactgtgcggcttcaggaacagaaaggaagtttgcccttttctgcgctaagatattcttctaccccactgcctttgagcattcttttttcatttggttgctgggatatcaaaaacatgatggtgctcactgaaaatgggagccaaagtttgccacaacacaag

SEQ ID NO: 280760 - DNA, 622 bp, Homo sapiens
tatctgcttaagtccagttctaatatattctaatgtgtactaattacagtggataaagatttttttaataatatgtactaattttctgcaactgaaataaattagaatgttattgtgtttgtgcactaacaccaaaggttccattctgcaagatatgattcttgtaataggcagctgtgttgcttttatgacctggttccctccctgaacagaaacgctgaggtcaaygagagaccataaggcagaatatatttttaaccttggtatcagtgactgacaatataaaactgcagattttcaatcactggccatgattactccttaaccatgaatccagctcagggaccatcagagttacattgttcataattctattgcttaataacataatccaataattgatgtaccttcttcatcatgttcgggtgttgtaaaaataaaagaacaaagttctgaaatttgtttttgcctctattccaaaaggaaagattagctataagctaatcaaaaaggcagatgagaatattttaaataaaaatattataaaataagagtattttaaattttatagtggttatgttttttaagttaaatatcaaatgttaaattagaatccattctt

SEQ ID NO: 280761 - DNA, 353 bp, Homo sapiens
tatgatagtgttatgtatccagattatctgcttaagtccagttctaatatattctaatgtgtactaattacagtggataaagatttttttaataatatgtactaattttctgcaactgaaataaattagaatgttattgtgtttgtgcactaacaccaaaggttccattctgcaagatatgattcttgtaataggcagctgtgttgcttttatgacctggttccctccctgaacagaaacgctgaggtcaatgagagaccataaggcagaatatatttttaascttggtatcagtgactgacaatataaaactgcagattttcaatcactggccatgattactccttaaccat

SEQ ID NO: 280762 - DNA, 353 bp, Homo sapiens
tatgatagtgttatgtatccagattatctgcttaagtccagttctaatatattctaatgtgtactaattacagtggataaagatttttttaataatatgtactaattttctgcaactgaaataaattagaatgttattgtgtttgtgcactaacaccaaaggttccattctgcaagatatgattcttgtaataggcagctgtgttgcttttatgacctggttccctccctgaacagaaacgctgaggtcaatgagagaccataaggcagaatatatttttaaccttggtatcartgactgacaatataaaactgcagattttcaatcactggccatgattactccttaaccat

SEQ ID NO: 280763 - DNA, 560 bp, Homo sapiens
tggtctctcctgcctcctgttttctgcaacaatagtaccttacaaatgatttcaaaaattactactgacacctttattagtgtacaatstcttcccaatatctaaaatgtttccctccacgattcagacatatttattttcatttttctttctttttttttttttgagccagggtcttgctctgtcaccaggctggagtgcagtggcgcaatctcagctcactgcaacctctgacactccctggttcaagcgattctcctgtctcagtctccggagaagctgggattacaggcatgcaccatcatgccctgctaattttcgtgtttttagtagagacggggtttcaccattggccatgatggtcctgatcttttgaccttgtgatctgcctgctccagcctcccaaaatgctgggattagaggtgtgagccaccacacttatccttatttttatcttttaaaacaatgctatgagaacgtcttccttgattctgcatgtctttccccagataaacaggtacctccttccttgaggctgccttagtacttcactgattttt

SEQ ID NO: 280764 - DNA, 618 bp, Homo sapiens
caagttcctgttgtccttcaatgcagctgcaaggtcataagctacgctgaggttgcaaaactgtcactatatgattaactgcctttgttctgcttctgtaagcttgcctacataagccaagccctgtctttgttcagggctcagctttcggatgcaaatccgctgagctggtgcgaacctaaatgaaatcctcctgtttcacccacttggtctctcctgcctcctgttttctgcaacaatagtaccttacaaatgatttcaaaaattactactgacacctttattagtgtacaatctcttcccaatatctaaaatgtttccctccacgattcrgacatatttattttcatttttctttctttttttttttttgagccagggtcttgctctgtcaccaggctggagtgcagtggcgcaatctcagctcactgcaacctctgacactccctggttcaagcgattctcctgtctcagtctccggagaagctgggattacaggcatgcaccatcatgccctgctaattttcgtgtttttagtagagacggggtttcaccattggccatgatggtcctgatcttttgaccttgtgatctgcctgctccagcctcccaaaatgc

SEQ ID NO: 280765 - DNA, 1121 bp, Homo sapiens
caagttcctgttgtccttcaatgcagctgcaaggtcataagctacgctgaggttgcaaaactgtcactatatgattaactgcctttgttctgcttctgtaagcttgcctacataagccaagccctgtctttgttcagggctcagctttcggatgcaaatccgctgagctggtgcgaacctaaatgaaatcctcctgtttcacccacttggtctctcctgcctcctgttttctgcaacaatagtaccttacaaatgatttcaaaaattactactgacacctttattagtgtacaatctcttcccaatatctaaaatgtttccctccacgattcagacatatttattttcatttttctttctttttttttttttgagccagggtcttgctctgtcaccaggctggagtgcagtggcgcaatctcagctcactgcaacctctgacactccctggttcaagcgattctcctgtctcagtctccggagaagctgggattacaggcatgcaccatcatgccctgctaattttcgtgtttttagtagagayggggtttcaccattggccatgatggtcctgatcttttgaccttgtgatctgcctgctccagcctcccaaaatgcwttcatctttatccattaagttcatctgtcccattctatgtctgtggatgctaacttttgatcattgatggtgatacacatggacatttatcatcaactttcagattcttggatctttgacaagtcttattagtgagagtcaaactagtaggatgcgagttataaatgctggttatccaattacctactcaaaatatcctacatgaatwttccattaaacgtgcatagaaaaacattagtcattcctgctgacctgctgctctttgctcttcagtattcaccagaaaatttcctccttcttcctcacatccaggttaaatactactgtacaacctggaaacctggaaattatctgacatttctctctgtcccccaagcctttctcattcaattattactaaatcatattgacgatacctctcttctgcctctgctttatattcccactgccactgggaacacaaacatttacaaaatggcttttatttaaaaaaaaagcctgc

SEQ ID NO: 280766 - DNA, 502 bp, Homo sapiens
ttcatctttatccattaagttcatctgtcccattctatgtctgtggatgctaacttttgatcattgatggtgatacacatggacatttatcatcaactttcagattcttggatctttgacaagtcttattagtgagagtcaaactagtaggatgcgagttataaatgctggttatccaattacctactcaaaatatcctacatgaatattccattaaacrtgcatagaaaaacattagtcattcctgctgacctgctgctctttgctcttcagtattcaccagaaaatttcctccttcttcctcacatccaggttaaatactactgtacaacctggaaacctggaaattatctgacatttctctctgtcccccaagcctttctcattcaattattactaaatcatattgacgatacctctcttctgcctctgctttatattcccactgccactgggaacacaaacatttacaaaatggcttttatttaaaaaaaaagcctgc

SEQ ID NO: 280767 - DNA, 502 bp, Homo sapiens
ttcatctttatccattaagttcatctgtcccattctatgtctgtggatgctaacttttgatcattgatggtgatacacatggacatttatcatcaactttcagattcttggatctttgacaagtcttattagtgagagtcaaactagtaggatgcgagttataaatgctggttatccaattacctactcaaaatatcctacatgaatattccattaaacgtgcatagaaaaacattagtcattcctgctgacctgctgctctttgctcttcrgtattcaccagaaaatttcctccttcttcctcacatccaggttaaatactactgtacaacctggaaacctggaaattatctgacatttctctctgtcccccaagcctttctcattcaattattactaaatcatattgacgatacctctcttctgcctctgctttatattcccactgccactgggaacacaaacatttacaaaatggcttttatttaaaaaaaaagcctgc

SEQ ID NO: 280768 - DNA, 502 bp, Homo sapiens
ttcatctttatccattaagttcatctgtcccattctatgtctgtggatgctaacttttgatcattgatggtgatacacatggacatttatcatcaactttcagattcttggatctttgacaagtcttattagtgagagtcaaactagtaggatgcgagttataaatgctggttatccaattacctactcaaaatatcctacatgaatattccattaaacgtgcatagaaaaacattagtcattcctgctgacctgctgctctttgctcttcagtattcaccagaaaatttcctccttcttcctcacatccaggttaaatactactgtacaacctggaaacctggaaattatctgacatttctctctgtcccccaagsctttctcattcaattattactaaatcatattgacgatacctctcttctgcctctgctttatattcccactgccactgggaacacaaacatttacaaaatggcttttatttaaaaaaaaagcctgc

SEQ ID NO: 280769 - DNA, 410 bp, Homo sapiens
agtaagtatacattaatcttattaatttaatatttatgacttgagtgactgctatccatctagaacacagattaaaagaaagaactataccttccatatctatccagcgcatttaaattcgcttttttcttgattaaaaatttcaccacttgctgtttttgctcatgtayaccaagtagcagtggtgtgaggccatgctgtaaaacaatataaagcaaaaacctatgtaattcaaaaaagtacatattcctcaaccgaagtggaaactttatataagatcttatggacttacacgcatagaagtaaataaaatgtagtcgcttccttctcactcttctgtgctttcccacacgctgctccttcccttggaaacaccccttctctgcctcaccacagtacctctaatcatc

SEQ ID NO: 280770 - DNA, 410 bp, Homo sapiens
agtaagtatacattaatcttattaatttaatatttatgacttgagtgactgctatccatctagaacacagattaaaagaaagaactataccttccatatctatccagcgcatttaaattcgcttttttcttgattaaaaatttcaccacttgctgtttttgctcatgtacaccaagtagcagtggtgtgaggccatgctgtaaaacaatataaagcaaaaacctatgtaattcaaaaaagtacatattcctcaacygaagtggaaactttatataagatcttatggacttacacgcatagaagtaaataaaatgtagtcgcttccttctcactcttctgtgctttcccacacgctgctccttcccttggaaacaccccttctctgcctcaccacagtacctctaatcatc

SEQ ID NO: 280771 - DNA, 565 bp, Homo sapiens
agcaacagctgctccatcagaatagacagtgcctgaccagtatagtcttactatcggaagcaaaaaattccaactgtctttttatttcaaataccgaaggtccataatcccttggaaagaatttgtgagtccattacatttaccaccctaaaaaaamtaaaatactagtggccggatgtggtggcttacacctgtaatccacccagcactttgtgaggatgaggtgggtggactgcctgaggtcaggagttcaagaccagcctgacaaacaggatgaaaccccgtctctactaaaaatacaaaaattagccgggtgtcatggcacgcacctgtaatcccagctcctcagggggctgaggtaggagaatcgcctgaacccaggaggcagaggttgcagtgagccgaggtcacaccactgcactgcagcctgggtgacagagcgagactctgtctctaaataaataaaataccagtaaagcttgtaatttctctaactcattttaccataattgcaattatcatgattaccagtaaaagaatagtgaataaccacaatattgggctt

SEQ ID NO: 280772 - DNA, 565 bp, Homo sapiens
agcaacagctgctccatcagaatagacagtgcctgaccagtatagtcttactatcggaagcaaaaaattccaactgtctttttatttcaaataccgaaggtccataatcccttggaaagaatttgtgagtccattacatttaccaccctaaaaaaaataaaatactagtggccggatgtggtggcttacacctgtaatccacccagcactttgtgaggatgaggtgggtggactgcctgaggtcaggagttcaagaccagcctgacaaacaggatgaaaccccgtctctactaaaaatacaaaaattagccgggtgtcatggcacgcacctgtaatcccagctcctcagggggctgaggtaggagaatcgcytgaacccaggaggcagaggttgcagtgagccgaggtcacaccactgcactgcagcctgggtgacagagcgagactctgtctctaaataaataaaataccagtaaagcttgtaatttctctaactcattttaccataattgcaattatcatgattaccagtaaaagaatagtgaataaccacaatattgggctt

SEQ ID NO: 280773 - DNA, 565 bp, Homo sapiens
agcaacagctgctccatcagaatagacagtgcctgaccagtatagtcttactatcggaagcaaaaaattccaactgtctttttatttcaaataccgaaggtccataatcccttggaaagaatttgtgagtccattacatttaccaccctaaaaaaaataaaatactagtggccggatgtggtggcttacacctgtaatccacccagcactttgtgaggatgaggtgggtggactgcctgaggtcaggagttcaagaccagcctgacaaacaggatgaaaccccgtctctactaaaaatacaaaaattagccgggtgtcatggcacgcacctgtaatcccagctcctcagggggctgaggtaggagaatcgcctgaacccaggaggcagaggttgcagtgagccgaggtcacaccactgcactgcagcctgggtgacagagcgagactctgtctctaaataaataaaataccagtaaagyttgtaatttctctaactcattttaccataattgcaattatcatgattaccagtaaaagaatagtgaataaccacaatattgggctt

SEQ ID NO: 280774 - DNA, 456 bp, Homo sapiens
gtcagttagctgggtgtgatgttgcacacctgtggtctcagctagtagagactgaggtcagaggatcactagagcccagaaagtcgaggctgcagtgagccatgatcacacaactgcactccagcctgggaaacagagtgagaccctgtctcaagaaaatmaatatatgtagtccacaaagcctaaaatatttactaactagctctttgcagaaaaagctggccaactcctggtttagtagatcaaagattctttgatgtattttaataaaagttttaccaaatatactgaaatgtttatattaaatatagatccccatgtacaatcccttggcaatattcagattgagggtccaatatttcagcactcaggcactgacaacaaaaatttagtaactagcaatcttgttgctaacaaggtacagtgtcaatgtagcatgtagcttccatttgcaac

SEQ ID NO: 280775 - DNA, 663 bp, Homo sapiens
cattctcagtgtcaggaaattgctggctttcaggtgttctgctcttccttggaggaattaatccatcatcaccattgccagcagtggcaccattagtcaggttttctgggaatccgacrtgagtacttccgtgcttcttcatttcttcgatagccataaaattttctagctggaaaatacagagaataagaaattatctactttaggcacattatctactgataatcagactaaaaccaagaaagataaaataattggtctaaagctcctaaagtggcattacctagcattttatggcaccattcgggattattccataataatgaaagaatagctctagggtttgcacctcttcaaaattcaatgtacagaattctgagttaactatttaatttttcactgatgatttatgctacttacatgataggatcatgtatgcctacatttactacactttgttaaacaacataatgtaaaaatctaattcaacacaaacatttgaatataaaggtatacctctctatcaccatccttatttatttctggttcttgagatcttttctgcagatgtaaaaacagaaggttaatttgcttgttgtatttctgtgacatttcctcttttggagtgcatgtttttaaaataattttattctgaagtaatca

SEQ ID NO: 280776 - DNA, 663 bp, Homo sapiens
cattctcagtgtcaggaaattgctggctttcaggtgttctgctcttccttggaggaattaatccatcatcaccattgccagcagtggcaccattagtcaggttttctgggaatccgacgtgagtacttccgtgcttcttcatttcttcgatagccataaaattttctagctggaaaatacagagaataagaaattatctactttaggcacattatctaytgataatcagactaaaaccaagaaagataaaataattggtctaaagctcctaaagtggcattacctagcattttatggcaccattcgggattattccataataatgaaagaatagctctagggtttgcacctcttcaaaattcaatgtacagaattctgagttaactatttaatttttcactgatgatttatgctacttacatgataggatcatgtatgcctacatttactacactttgttaaacaacataatgtaaaaatctaattcaacacaaacatttgaatataaaggtatacctctctatcaccatccttatttatttctggttcttgagatcttttctgcagatgtaaaaacagaaggttaatttgcttgttgtatttctgtgacatttcctcttttggagtgcatgtttttaaaataattttattctgaagtaatca

SEQ ID NO: 280777 - DNA, 663 bp, Homo sapiens
cattctcagtgtcaggaaattgctggctttcaggtgttctgctcttccttggaggaattaatccatcatcaccattgccagcagtggcaccattagtcaggttttctgggaatccgacgtgagtacttccgtgcttcttcatttcttcgatagccataaaattttctagctggaaaatacagagaataagaaattatctactttaggcacattatctactgataatcagactaaaaccaagaaagataaaataattggtctaaagctcctaaagtggcattacctagcattttatggcaccattcgggattattccataataatgaaagaatagctctagggtttgcacctcttcaaaattcaatgtacagaattctgagttaactatttaatttttcactgatgatttatgctacttacatgataggatcatgtatgcctacatttactacactttgttaaacaacataatgtaaaaatctaattcaacacaaacrtttgaatataaaggtatacctctctatcaccatccttatttatttctggttcttgagatcttttctgcagatgtaaaaacagaaggttaatttgcttgttgtatttctgtgacatttcctcttttggagtgcatgtttttaaaataattttattctgaagtaatca

SEQ ID NO: 280778 - DNA, 1113 bp, Homo sapiens
ctttaagcctttgtgactcttcctctgatgtcagctttaagtcttgttctgttgaaaaatccatatattcagttaaaatcaaccacttagaacagttaaaaactattgccttttaaaaacggatttgagacatttcattttatttcataaattgagtgtttcatcttttgtgaaattgtcatttaagaaataattctcaaaaacttcaaaaacccacttggggagataccagatgtcaccagattgaagacaaacaaacatgtcaaaaattccctcacaaattcatccacccaacatccatgaacaaaaccaccagaaacacagctttaaaatacagtagaaacatataaggtgacacagtgtactgttctccacttcctaatagtaccttataaatgatttccaaaatcactgctgacacctttattagtgtacaacrtcttcctaatatctaaaatgtttccctccactattctgacaaatttattttctttttttcttttttctttttttttttttatgaaccagggtcttcctctgtcaccaggctggaatgcagtggcatgatcagctcactgcawcttggacattaatgttcaaaagtggtcccgggtcctatctgcatttagatatagatcatttcaatgccaaaaccaatattcctagtgaacaattattcattaagacaaggtgacagatagctcatgtggacacagctgagatgatacaatgtagcaaatwctaaacaattctcatgaacacttggaaagtcagttctataataaagtcatacaaattatactaaatcagtaaatatttggtttgggaagatgctttgtaaagttatagtgcatatgaatacaattaacagtcgtgaattcagagctgtgaaaataaatcaaagaaaccacattgtgtttgagtcagcaatctttagatttctatccagtctttccatccagtccataaattctaagtataatcctggtactcactctcaagtttacgttaaatactatcccatacaaaaaaacactctttctcttacttcttttcattatgtcctgctaaaaaattctgattggctgcaggcggcaagagggaaaaacacaa

SEQ ID NO: 280779 - DNA, 532 bp, Homo sapiens
cttggacattaatgttcaaaagtggtcccgggtcctatctgcatttagatatagatcatttcaatgccaaaaccaatattcctagtgaacaattattcattaagacaaggtgacagatagctcatgtggacacagctgagatgatacaatgtagcaaatactaaacaattctcatgaacacttggaaagtcagttctataataaagtcatacaaattatactaaatcagtaaatatttggtttsggaagatgctttgtaaagttatagtgcatatgaatacaattaacagtcgtgaattcagagctgtgaaaataaatcaaagaaaccacattgtgtttgagtcagcaatctttagatttctatccagtctttccatccagtccataaattctaagtataatcctggtactcactctcaagtttacgttaaatactatcccatacaaaaaaacactctttctcttacttcttttcattatgtcctgctaaaaaattctgattggctgcaggcggcaagagggaaaaacacaa

SEQ ID NO: 280780 - DNA, 532 bp, Homo sapiens
cttggacattaatgttcaaaagtggtcccgggtcctatctgcatttagatatagatcatttcaatgccaaaaccaatattcctagtgaacaattattcattaagacaaggtgacagatagctcatgtggacacagctgagatgatacaatgtagcaaatactaaacaattctcatgaacacttggaaagtcagttctataataaagtcatacaaattatactaaatcagtaaatatttggtttgggaagatgctttgtaaagttatagtgcatatgaatacaattaacagtcgtgaattcagagctgtgaaaataaatcaaagaaaccacattgtgtttgagtcagcaatctttagatttctatccagtcttyccatccagtccataaattctaagtataatcctggtactcactctcaagtttacgttaaatactatcccatacaaaaaaacactctttctcttacttcttttcattatgtcctgctaaaaaattctgattggctgcaggcggcaagagggaaaaacacaa

SEQ ID NO: 280781 - DNA, 448 bp, Homo sapiens
ttctctagcagatattaggtgggcttgttctaaagggtgagaggggttcaaataatgtggcagaaagagatcagtgtttgtttcttcttctttgctaccagatctgtactgtgaggcacctttatatcctgtatagaaccttgggcagtagaaagtcccatatgaaccttcccctgagcagtggctcccagctgtggttggccccttgagtgatctgatttacatgataatgaaaatcgtggaagctacttccatctctagctcaagattttaaaatattttcaaactctagctcacaggaagccattgaagagaattctcagaatctcaagtaggttagttggacttmacagagccaagccttgtccatgacgcatcactaatcatgtgtaaaagtagggctttgtgcttgcttcggcggcacatatcctaaaattggaacaatacg

SEQ ID NO: 280782 - DNA, 605 bp, Homo sapiens
aaaatattttcaaactctagctcacaggaagccattgaagagaattctcagaatctcaagtaggttagttggacttcacagagccaagccttgtccatgacgcatcactaatcatgtgtaaaagtagggctttgtgcttgcttcggcggcacatatcctaaaattggaacaatacggggaaagttagcrtggcttctgcataaggaggcagcacagatctttgaagcattccatattttgtgcagtcactggaaggtcatttgactatttgctgactagctctgaggaaatagtgtgaatcaaagcaaaatgggtgccacccaaatattgaaattgtgatttctgctgcaaaaatagtcatgtaagatggtctatgagatgacttagacctgaataacatgttcggtgcaaaatatattgttagtatgtatgtcgaaaattacagaatgtcagcttgctacttctccgtggaaactaaaataaataaaagtagacttttggtctcccatgtcagctggaattgaacatcaatataaagcattatcctaacagacatctactggctgagagtttgagtctgtagagaaggatcgttggtccaagtc

SEQ ID NO: 280783 - DNA, 608 bp, Homo sapiens
catgacgcatcactaatcatgtgtaaaagtagggctttgtgcttgcttcggcggcacatatcctaaaattggaacaatacggggaaagttagcgtggcttctgcataaggaggcagcacagatctttgaagcattccatattttgtgcagtcactggaaggtcatttgactatttgctgactagctctgaggaaatagtgtgaatcaaagcaaaatgggtgccacccaaatattgaaattgtgatttstgctgcaaaaatagtcatgtaagatggtctatgagatgacttagacctgaataacatgttcggtgcaaaatatattgttagtatgtatgtcgaaaattacagaatgtcagcttgctacttctccgtggaaactaaaataaataaaagtagacttttggtctcccatgtcagctggaattgaacatcaatataaagcattatcctaacagacatctactggctgagagtttgagtctgtagagaaggatcgttggtccaagtcaggtcttaacatccattggtttttctgcccttggtgtgattgatcaactccgtaatagtggacatcacattatctactttaatgagatattatgaata

SEQ ID NO: 280784 - DNA, 608 bp, Homo sapiens
catgacgcatcactaatcatgtgtaaaagtagggctttgtgcttgcttcggcggcacatatcctaaaattggaacaatacggggaaagttagcgtggcttctgcataaggaggcagcacagatctttgaagcattccatattttgtgcagtcactggaaggtcatttgactatttgctgactagctctgaggaaatagtgtgaatcaaagcaaaatgggtgccacccaaatattgaaattgtgatttctgctgcaaaaatagtcatgtaagatggtctrtgagatgacttagacctgaataacatgttcggtgcaaaatatattgttagtatgtatgtcgaaaattacagaatgtcagcttgctacttctccgtggaaactaaaataaataaaagtagacttttggtctcccatgtcagctggaattgaacatcaatataaagcattatcctaacagacatctactggctgagagtttgagtctgtagagaaggatcgttggtccaagtcaggtcttaacatccattggtttttctgcccttggtgtgattgatcaactccgtaatagtggacatcacattatctactttaatgagatattatgaata

SEQ ID NO: 280785 - DNA, 926 bp, Homo sapiens
aatcgagggcactgtgacccagtaaattaacttgcattagcctgacataatagaaagtgtcccaactctaaataagtcctagctccataatgaacagctatttgctcttgaacaagctgcttctcttaggcttaatgtcttcttctacaaagtgaggactaygctgccttattttactaggttgttataatgatttaacaagataacatttttttaaatgctcaaagaaatagtaaaacaatggaataatttgttcctaaactttatgactgaaattatcttggaatcccaaataaaacccagtgcgaattttgttcataggttctaatatgcaaatgttgtagttttcaggaaacgttattaagtcctaattttgcttcttagttgtcctactctttatggcttctaattcagggcatctcaactatgtcatagtttgtaactaaattttttcataaatatctcattaaagtagataatgtgattgtccacwatgacgcatcactaatcatgtgtaaaagtagggctttgtgcttgcttcggcggcacatatcctaaaattggaacaatacggggaaagttagcgtggcttctgcataaggaggcagcacagatctttgaagcattccatattttgtgcagtcactggaaggtcatttgactatttgctgactagctctgaggaaatagtgtgaatcaaagcaaaatgggtgccacccaaatattgaaattgtgatttctgctgcaaaaatagtcatgtaagatggtctatgagatgacttagacctgaataacatgttcggtgcaaaatatattgttagtatgtatgtcgaaaattacagaatgtcagcttgctacttctccgtggaaactaaaawaaataaaagtagacttttggtctcccatgtcagctggaattgaacatc

SEQ ID NO: 280786 - DNA, 1199 bp, Homo sapiens
cacagccactgtgtgtcttttcacacttccaggtgtgcaagcctgggcaagttaacttctctaagccccaggtttttcttttgcatgacagagataacaccagtacccatcccacaggcttgctgtgaggacagaaggacagactaaggcctcaacagggcttggtgcagtacctggctctatattcccttccgcgccgaccctggggagctgggcacgtaaggggtgtcggtatacgcggattcgaagcctcacaactcccaggtaccactaagccgctggggggagctgggggagggacccacaggccgagcgccaagcagagaaaagagcctcgggtggggggacgcagatgtagggttcagcggctggggcgggggcaggaagccccggaggggccaagratcttggcgtggggcggcccggggcggggacaaccgttccgccagcgctcgggctcggcccggagtggggggcccggctggcaagcgcagtaggccccggcagacgccgcggccctgttccwggcaattggtctcttcaatccttattctttcaatgtatctttcttattgtagaggttaggatgtctagtatgatgttgaatagtaagagtgatggtgggcatccttgtttttgaatttaacaggatagcttctcatatattatgtttgctattggttcatggtgaattctgcttatcaggtgaaggaaatttattgatattcttaatttgctatgagcttttttwaaaaaataaaacatgaatacatattgattgttatcaaatcctcatctattgatatcatataattattctcctgtaatatattaatgtgatggattacattaaccaatttcctagtgaagaaacatccttgtattcctagaataaacccttcttgataataaattatttctaaaaaacgttgttaggtttaatttgctaatatttattaaggatttttacatttaattttgtaagtggagtttatctgcatctgtatctgtatgttcttgcacagtctttgtctgactttggagatgatattatactagccttataaaataaattgggtagttcttttcctaccatcggggagagacaggaatgatctgtttcttgaaagtgtgaacaaaagttctctgaaaaaggactttggaggaaacagattttattccaggaacagtttgcaaac

SEQ ID NO: 280787 - DNA, 567 bp, Homo sapiens
gcagaaaaagcatttgacaaaattcagcatgctttcatgatttaaaaaacactcaacaaactaggaatagaaggaaactacttcagcacaataaaagccatatgtgaaaaacccacagcaaacatcatattcaatgttaaaagactgaaagcttttcctctaagatcagcaataagaaaagaatgctcactttcaccacttctattcaacatagtcctggaagtcctagccagagcaattagtcatggaaaaggaataaaaggcatccaagttggaaaagaagaaatraaattatctctgcttaaagatggtatgatctatatgtagaaaatcctaaagattccacaaaaaactgttagaactaataaatgaattcagcaaaatagcaggatacaaagccagcatacaataatcacttgcgtttctatacactaacaatgagcaatctggaaaggaaattatgaaaacaattccatttataatagtttcaaaaagaataaaataggaattaaccaaggtggcaaaagacatggccttggaagttttagaattttagaaaaaacaact

SEQ ID NO: 280788 - DNA, 567 bp, Homo sapiens
gcagaaaaagcatttgacaaaattcagcatgctttcatgatttaaaaaacactcaacaaactaggaatagaaggaaactacttcagcacaataaaagccatatgtgaaaaacccacagcaaacatcatattcaatgttaaaagactgaaagcttttcctctaagatcagcaataagaaaagaatgctcactttcaccacttctattcaacatagtcctggaagtcctagccagagcaattagtcatggaaaaggaataaaaggcatccaagttggaaaagaagaaataaaattatctctgcttaaagatggtatgatctatatgtagaaaatcctaaagattccacaaaaarctgttagaactaataaatgaattcagcaaaatagcaggatacaaagccagcatacaataatcacttgcgtttctatacactaacaatgagcaatctggaaaggaaattatgaaaacaattccatttataatagtttcaaaaagaataaaataggaattaaccaaggtggcaaaagacatggccttggaagttttagaattttagaaaaaacaact

SEQ ID NO: 280789 - DNA, 578 bp, Homo sapiens
cactgaccaatcagaatgaatgccagccataagcaaccattgaatacctaccaggtgagtaagcagccttgaatccaggtgaccagttactcagttactttatccctgagacccttgggctcccagattgtcaactttgaacaatcaactagatttctactttctgcaatcccaatcatgacagaaagtccatcctacactccattttctttaggatcctttttctgcacccctctccaattgcaatttttatatctgcctaggtacatcgttacagaaactggttctgtccagtgaaacagatgagatggccattktccatgtgtcaggaagcctgggcttttgaaacgggggatccagggggacccaggcagcctggctttcaggaagtcacactggttaggaaggtgtcagactgtgcctgagctctgccagcccaggaatgaatgctaagctgtctctgcctgtacaagtcactcagtctgcatgcattgtgtcagtcggtggcactgggtggccagaagtgccaggaagacagacagaaagaggctttttccttcagcttcgggtgctgcaag

SEQ ID NO: 280790 - DNA, 945 bp, Homo sapiens
acatcgttacagaaactggttctgtccagtgaaacagatgagatggccattttccatgtgtcaggaagcctgggcttttgaaacgggggatccagggggacccaggcagcctggctttcaggaagtcacactggttaggaaggtgtcagactgtgcctgagctctgccagcccaggaatgaatgctaagctgtctctgcctgtacaagtcactcagtctgcatgcattgtgtcagtcggtggcactgggtggccagaagtgccaggaagacagasagaaagaggctttttccttcagcttcgggtgctgcaagcagagccatgtcttccactgtgcctcacacaactggggatcctcaaaatgtggacagagggttcacaggatggggaagaataggaagaaaaaaaagaaaacacaagagaaatgctcaccaaagcaaagcaagacaagactgaatcaggcatgcagagcawacatcgttacagaaactggttctgtccagtgaaacagatgagatggccattttccatgtgtcaggaagcctgggcttttgaaacgggggatccagggggacccaggcagcctggctttcaggaagtcacactggttaggaaggtgtcagactgtgcctgagctctgccagcccaggaatgaatgctaagctgtctctgcctgtacaagtcactcagtctgcatgcattgtgtcagtcggtggcactgggtggccagaagtgccaggaagacagacagaaagaggctttttccttcagcttcgggtgctgcaagcagagccatgtcttccactgtgcctcacacaactggggawcctcaaaatgtggacagagggttcacaggatggggaagaataggaagaaaaaaaagaaaacacaagagaaatgctcaccaaagcaaagcaagacaagactgaatcaggcatgcagagca

SEQ ID NO: 280791 - DNA, 617 bp, Homo sapiens
actcccctgccacctccaccagagcagcgtgctggtatccrcagctgggagacctgaagatggctcacatcacaggactctttgcagacattcctcagcaccagcccagagcctggtagccccactgggtggctagacccagaagggcaataacaatcactgcagtccagctctcaggaaaccccatccgtagggaggggaggagagcaccacatcaagggatcaccccatgggacaaaaaaatctggacagaagcccttgagttccaaatctttccactgaaactggctatccaaatgaaaagtaattctgggaatatgacaaaacaaggttgtataacaccctgcaaagatcacactagctctccagcaatggatctaaaccaagaataaatctatgaattgccaaataaagaattcagaagattaattattaagttacttaagatggtaccagagaaaggtaaaaaccaacttaaagaaatttttaaaaaaccctacaggataagaatgaaaaagtctccaagagaaataggtatcatgaagaaaaaataatgacaacttctgaaaatgaaagacacacttagagaaatacaaaatacactgggaaggttcaac

SEQ ID NO: 280792 - DNA, 617 bp, Homo sapiens
actcccctgccacctccaccagagcagcgtgctggtatccacagctgggagacctgaagatggctcrcatcacaggactctttgcagacattcctcagcaccagcccagagcctggtagccccactgggtggctagacccagaagggcaataacaatcactgcagtccagctctcaggaaaccccatccgtagggaggggaggagagcaccacatcaagggatcaccccatgggacaaaaaaatctggacagaagcccttgagttccaaatctttccactgaaactggctatccaaatgaaaagtaattctgggaatatgacaaaacaaggttgtataacaccctgcaaagatcacactagctctccagcaatggatctaaaccaagaataaatctatgaattgccaaataaagaattcagaagattaattattaagttacttaagatggtaccagagaaaggtaaaaaccaacttaaagaaatttttaaaaaaccctacaggataagaatgaaaaagtctccaagagaaataggtatcatgaagaaaaaataatgacaacttctgaaaatgaaagacacacttagagaaatacaaaatacactgggaaggttcaac

SEQ ID NO: 280793 - DNA, 617 bp, Homo sapiens
actcccctgccacctccaccagagcagcgtgctggtatccacagctgggagacctgaagatggctcacatcacaggactctttgcagacattcctcagcaccagcccagagcctggtagccccactgggtggctagacccagaagggcaataacaatcactgcagtccagctctcaggaaaccccatccrtagggaggggaggagagcaccacatcaagggatcaccccatgggacaaaaaaatctggacagaagcccttgagttccaaatctttccactgaaactggctatccaaatgaaaagtaattctgggaatatgacaaaacaaggttgtataacaccctgcaaagatcacactagctctccagcaatggatctaaaccaagaataaatctatgaattgccaaataaagaattcagaagattaattattaagttacttaagatggtaccagagaaaggtaaaaaccaacttaaagaaatttttaaaaaaccctacaggataagaatgaaaaagtctccaagagaaataggtatcatgaagaaaaaataatgacaacttctgaaaatgaaagacacacttagagaaatacaaaatacactgggaaggttcaac
